United States Patent Application Publication US 2015/0240253 A1 - sequence listing, part 4

SEQ ID NO: 13807 - DNA, 802 bp, Zea Mays
ccacaagcacggatatgatgaggagtgccgacgaggacaagaatgccagagccccgccaagccaagacttaactccacttccaccaaacaccttgcagcttctaagctccacttccacccccgataagagatctgggagcctctcctttctctctcgactgcttgtaatccctacaacgagtttgatcatcagtggttccggtagtgcaagccaccgatgactggaagtagggacattctgcccgaactagtacaaatcttgcgcccttcgcgcacaccctacggagcctagaacgcgcacaataaaattacttgttggagcgaggtacaaaactgtcagcaatgaggaggagaaggaatcgacccagaggtgtgaagaggctgatcatgtgcaagaagatgatactgagccaagaatagaaaaaagggagcacaagccaaatgtgtgtgtatccagcccagagtgggttaaggcctagcttgggtcacgctgtgtgtgtgtgtccaatgtgagggagctcttgcacgagctgggtaaataagtgtcgtggtgagcaagagagaaaggcatcaaaatatgtaacaaaattcagttttccttaccaaatacccaactgcttgttccccagtttgttgctgttcttccatctccgattctctactcttcctggttgatgttaacatctgtatcagattcacgatcttggccgattcacgctggagcatgttccatctcacgatcatttcacgcttctacaatgacatcatcaagttgccatggacatcaacaccaaggtgattt

SEQ ID NO: 13808 - DNA, 470 bp, Zea Mays
ctcagcccttgctgtcgacgagccacatgcgattcgtgtcgtcgccgtcttgattcgtgctcggattgtttggatagcgttcaaggtcaagtaaatatcaccgtcgtggataagctccggccagtaaactattctgaccatcgtatcaagcttgccacggtggaatcggatgagctcactagtgaccgctgtctcatggccttgcgccatgtatctggacacatccatcgcgtcgccgtgactcgctataatcgtctgatcatcgcaggtgagagctgccacggttaatgccacgaattctttgcgccagtgaactcccacttctccgaccgccagcacatcttgctcaaattgatcaccaccgctcaagcacgctataaattgacagcatggtctgttgcgtaggatcatcaccaagcttgagcacccgctattgctgccgattagccaccacaactctccaatttctc

SEQ ID NO: 13809 - DNA, 497 bp, Zea Mays
gaagtctccgagtgacgcgggagcgaggggcggacgcagatagcggacggaaggtcggccgctagatttaggtctttgtgttgtgatgtggtggggagaaagtcctgaataaccgctgctcgcacaccacgacccccgtcccacgcgccttgctcgggcttcaagtgaaggccttggacctccagcgcccccgctccacatttgcactatccctgtccgttttccccaccctaagcaccagcagcgccgccaccgtcggaaggccattccgctatcgtcgttgagcctctaatgtcgcctttgtcatggtgagctccgcctgagtgcgatgcaccgggaagccgcctcggtttccccttttcccgacctctccgccatgttctcacttaatctattccctgtgcagtcccggagccgtcgccatcgttccaagccaccaccctcttgttgccgcttccaaggggatcctgagtcttgccttgaggtaaggaacttcc

SEQ ID NO: 13810 - DNA, 481 bp, Zea Mays
ttctggattgggcctcaatttctgtaaagcgcaggggcttcggagtaaaattcctaagactcagggaacagcacataggacagcgggttgttttcaggaaaaccgaggggttcattagcaaatgtgctcgggcgaaacgatatcggctcccgtgagccgtccgatccaaacggacgcgcgagattagatctaggttttatcgaaacggtacgcacccacggtggttggatccaggatcaacggtcccgatttaatgaggtgtgatacgctctgatccgtccgatcgaacccccccaatggctcagatcgaaacgaccaggaagagggctggtttctaatccgaccgttcatgccacatcaaacggtccacggcacacccgcctccgagcagagccctcacggcggcgccgcccgaagctcggcagcgcatggccggaccgcccactaatccccaccgcaggaccctaaagcttaatccgcg

SEQ ID NO: 13811 - DNA, 595 bp, Zea Mays
cggcgaggtcgcaacagcgagcgatgacggcgagcttcctgcgcgagctcgacggagaaaaacgacagggcggcacatcagtgaggggcggcgacatcgctgcaatgctccggtgggcagacaacaaggacagagaggttacacagagtgagttggggatggcgagaggtctacggccgtggcatcttatagctaggagatagcaatgctgagaaggaaagaggtgattgcggctccaaaagcttccatcaatggcgtgactgtgcttccatatgagcagatgtgactggctgctttccatcatgggaggaaacatatagggatgaaaaaaagagtgaggaaggaaggagatcgagcaaagaaggaaggagattgtggcatctcagggtagcggctactgctccttcattcacgggaatcagtggtggtggcggctgctgtgttccttgcatgagagagaatgaccagccattccattgtgaagaagagcagcaagtgcgaaagggtagtggggcccacctacaagtgtaagggagagagaaaaaggaatggggagaggcatgcacagagggatgagctgggttggtggcgaggc

SEQ ID NO: 13812 - DNA, 607 bp, Zea Mays
gcgaggctctctcagatgctactgcctccactacggcaagcactggtagaaagaggaaatgcacatccgatgtctgggaggacatggataagattttcgccactgaaaatggtgttcaggttagagtaggagcaaggtgtcatttttgcaagaaagaacttgctgcccgttctaccattggcactggtcatttgtctcggcatagggacaaatgtaaacgactccatggccgaactgggaaccaatctatgcttagatataatgctgatggtactgttttttgttgggaatatagtgctgaagttgcacgtgtttagttatgtcgtttgattgctaggttggaccttccattatgttttgctgattatgatgcatttgatgaatacattaaaactgcccataatcctaggcattgcaatgtttctagacaaactaaaactagagatatggaaaagtactttaaagaacgacatgctatatggaagttccctttgacccgggaacaggatctggatgtcgcctagagggggggtgaataggcgaataaaaacttattactttaaaacttaaattcttactctactcgaagacttagtacgcagtggag

SEQ ID NO: 13813 - DNA, 1259 bp, Zea Mays
gaagaaaagaaaaggtaaaagaaaaaggggtagaaaataagaaaaccgcgcctgggctggattgatcgcttggcccaactagcacacctcataccgcgcggcccaactgttgtttgggcgttctgtcgcgaggggcccactgcgcagcctacaccgccacacgcgtcactgggatgtgggacccaggcgtcaggcgtcttcaactaaccgcgaaaccaccggagctgctcctcacgatggctgtggcagctccgatcactccgggctcgccctccccataaaacctagaacgtggggtgcccccttggtccgctacctcgtgaaccgtcgatagccacctgggttcagggttttccactccggtcaggcaaggggcggggcaggttttcggccgccgccgcaaatccgcgttggtagtcgaaatctagtgcaattgtgactgctcggtggtagtctaggtcataaccaagccttcgggggagttaattggacagcgaaccaccgcagggttgggaattgctcgccgaccattcaagttcgccgcgaattcgtctggtaccgcgggcgagcagctccgccctacattcgcaggtaacccttgtcccgtttaattcctagcgctgtgcgcttcgttttgtagccatcaatttaggtctcagtccttggcgcggcgatttgggtgctcgccggatcagccaacgccgccgtcagaaggggatcgcggcgcgtttcagaaccggggaaggagacaacatagtgaccatagatttctcctcggacggtttagattaggttccgggtgccgattgggtgggaatgcctagaactgtccgatcaggatcgaggggcccgagtcgttatctgcgtaattagatctgagccatgcatcgcggatccgagggcggatatcgcgtatcggttcagggcagcgagtatctaatcggcaccgtatagttttgatccaacggcccgtagtgcaccgtaccccttcgcgggtacgttttacgaaatagaccttatgatttgagagaatacaacccgccgtccagtgaggtgttcactgagtctagggaatcttctgcgctaaccccctggtctttttgaaaattgacgcccagttcagagatgattaaaaatagagaaataatattagaaattcatttttaatacaaaaacaattgctagaacttggaaaattcatatctaattcattttaaatccaaattgacccattccaatttctaaaattttgtaataat

SEQ ID NO: 13814 - DNA, 698 bp, Zea Mays
aagggagaaactggcaaagccaaacctctgatgaggaaaggcacgaaaataaccgtctcgtgagtgtcctctatcgggacggtaattccccgccagatctgccaggagcataactctttggatggaagaacatcgacctcgacgaggtgaagaaggtcagtttaagagataacgaaagcgtagttaccacagaaaagaagttgactgttgggatcaatcggagggatatcaggcatggcagcaccctgcttcctcttcctgtgcgccatcacgatcccgcaggcaaaaggctcaaaaatagcgcaagaaagagggagagttcgagaggctagaatgcaacggaggagaagcaaagttagggttctcgcaccaagaaaccgttgacaaagatataaataaacacgttaagtcaggcacaacgtgataggctggtagctcagaccagtttttggcagaacagagcaaaatgggtcggatgatacatccggataggtacacttgagcattttcaaaaactaaaatcatcgatcggattcaccgaaatcaattcgacaagaaaaaacatgagttacataagaacagatacgcaacgagcagatttcattcaaccagtagaagaacattacaaaaggaaataaggaccaaatcattaagagccgaccttgatgtccttgttctactactacaacaattactac

SEQ ID NO: 13815 - DNA, 311 bp, Zea Mays
gaaaaatctccatcagaaggttgagaagtataattgtttccgccaggatgagaggggtgtattatgattcaaaagcagattggtaattcctaaagaccgggatctcaagaggaaaattttggatgaggctcatctctccaaattctctatgcacccgggaagcaccaagatgtaccatgatctgaagcctttgtactggtggaccagaatgaagagggagatagcccagtatgtatcagagtgtgacacctgtcagaggataaaggcaagccacttgaagtcagctggagctttgcaaccactatccgtac

SEQ ID NO: 13816 - DNA, 883 bp, Zea Mays
atgtgatcagtcacaactgtgtcgaggtactagttggtgtctacaccatagccatgagtggccacaacaacaatcttagtgtcagaggagtagctttcattaaagcggtacaacaatctagggcagcatgccctactttgctacgtacttgccagatcttgtcagtgcgtcgggcttgagggcgtccattagatgaggagaaagacacaccttgatgaccacatccactaggaggacctccacaccctctgccttggccatggctacgactgcggttgttgcttctgtgccctcgaccagcagtatttgcggaagcttgatgacctccatgaagtagatccatcctcacgctgaagctaagaagctaggatgtggcttcagacatgatgatctgttcaacacgaccacaaacgcagagaccactggtctgttctcttcatcaagtcccgctaggatgtacgagatgagttcttcgtctattctttgcagatgccatctcgtctgcaagaaactttatcttggtgacatatcctagcacgtagcacagtcatgttaccttttctagttgttgccagggcaatcctcatgatcagtctttaccctagactgcgatggataggttgaaactgactcatgatttcttgagtaaaggaggttaagtgctgcccataaggtgtactctagattgagatctcttcacgaaacatcatctttcttggtgttgatctcttccagtgcaatagtcgagccatcaaggtagccctgcagctgcgcgcccctaaggttaggtagaacttgtgccttccagaccgtgaagttgttcttggtaagctttaccgccacggattgccctagaaggggtgttggcataacagagtttgag

SEQ ID NO: 13817 - DNA, 411 bp, Zea Mays
ggagtttctactgaatttgcatggcagattgtctcactgttggcgtccagatatatcaaagtggtctgtattttttgtgttgactgtgcaagatatgtgctactttgcgtagacgggactggtggtgggcagtcgcattgcatctgttcggactgttgcaatccatactccatatagacaaaatactgtagaggtcgtagcaagctgcagcgaacatgctctttctaactgtattctgttatgttctgaaaatcatactacctctgcaagtaatgtaattaatctggggcacattgatagacctgatttgcttaatatttgatgaaagatgcaaattggcacaggtttgcagcaggacttgctttcttgcaatattgtgctttgctaggttttggttacgctgggattgga

SEQ ID NO: 13818 - DNA, 399 bp, Zea Mays
gttttctgctcgcatcttgtgggtccatataatttctggtgtgtcagaatcagacaccattgcacccgcaaaagcagaagggccactgcgctccaagacatacagcaaagattctgggagtagtccacccagtacactacgctttgccaaaggcaaagatgaagatagtgctgcctcttcaccaccatgaaaagcttgatgagtatgtgtggccgaaaacaactgtgcaattgataggagatttgaaccaggatacgccaatgcaaagtaaaaggcaccagtactatataatcgaatcatagctttaggatttcttgtaacaatagccttaagcaatgaggcagctgcttcaacgatgctgggttccccagtaagcatagcctatacaatgcaattttt

SEQ ID NO: 13819 - DNA, 386 bp, Zea Mays
cattggatgagattctcgattcccagtgcccgtaccacaaggacatgcgacacaccctgaggaactgcagggatttcaaaaactccatcaggcatggctgaccattccagccgctgccacctcccccgcctcaaggagagcctaatgagcctaggcaacctcaacaacagaaaggaggagaggcagagctttcccacacattgacagggaggtcaatgtcatatttggaggacacggggcacaagaaagcagaaggcaacaaaaacttattgatcgacaagttttagtggccacaaatagtgctccggcttcttaccgatggtcggagcacacaatatccttcagccgagctgatcagtggcttaacttcgatcaccccagcaaat

SEQ ID NO: 13820 - DNA, 432 bp, Zea Mays
gtttaggactatgcaatggaaccagaattattataactcaactaggagacacaattatataaggaacaataataacaggtacacacgttggcgaaaaaatacatataccccgcattaatctgacaactaagggcaataaatggccttttacattatgtcgacgccaatttccaatcaaggtttgctactctatgactataaataaaagtcaaggacaaacactaccaaatgtagggttatatttaaagaaaaaggtgtttacacacggtcaactatatgtagctgtgtcacgagttacaaaaaagaaagggctcaaaatattgatagaaaatgatgacggttcatgtggaataataacagaaaatattgtgtataaagaagtactacaatctattgagagccatggcaacatacattgatactattttgaac

SEQ ID NO: 13821 - DNA, 582 bp, Zea Mays
tacaaaactatcttatcatatgtctctaactcatatggttaatacaaggaggggaggaggtgttgatctaccccgcacgaattcgtcgaagaagggctgtaaataatcggaaccagaaaagaatcccacgccagctgatgacgtggttgctgctcaaatgcgactactacaacaaatggccaacagaatgatagaaatgcaagcacagattcggtaagaacgacaagaaatgcgtcaagaacgtcaagaaatgtgtcaagagcggcaggaacgacaacaactaccacctccaccaccaccagctccgtctagggataagcactgggagtttatgagtcacaagccacctaaattctctaactcctcaaacccactataggcgacgactggttaaattccatggaaaagatgctcaatatagctcattacactgacaaggagaaagtactctatgcatcgggtcgccttactggccccgttgtgaattggtgggatgcatactgcacatcacatgctgctgctaacaccatttcttgggcagaattctccactcacttcaggaattaccatattcctactggt

SEQ ID NO: 13822 - DNA, 528 bp, Zea Mays
ctgtaacacacctgctaattgtttactgagaaaaggcaaccatgtctagcaatcaaggacacatttgtcctatcaacgacatacatgttagtttttatgtgctggaccttgtcaaagttttccattcttgactagttgcttgaattaatacatcccttttatctattttttaggtgattcatatataactggtctcttgagtgaccttgagaaagctttgcaggtattttagaatccaattgttttatatgttgtgtactttctctttccgtgtgcatcattgctttatcgcaggctcgcggtccatcaaaaaggaagcatgtgcatggatgtaaccttgttagagcaaagaagttgtacggctaccattcgtccgaggagctttttatgaagatctatctgtatccactgtttactcgtttttataaacccaacattgcttctacaaatgtgtatattgtcaacattacttgtcacatcttttctatctcatatcgagcggatttagaaattttgaatatagcttgc

SEQ ID NO: 13823 - DNA, 366 bp, Zea Mays
aattttttatgtttcgtcagagaagccctttaattacacaccttctgtgacgcttatgataccatcagaatgtcatagaaggtcaatattcttgtagtgtaggtagtgcctccatatttttagggcatgcactatggctgccaattccaaatcgtgggtgggataattctgctcatgcgacttgagtaagcgtgatgcataagcaataactttattattttgcatcaggacacaccctaagccttgccttgaagcatcacagaagacgacgaaatcctggtgtatatccggtagtgtcaaaacgggcgtggtcgtgagcttttcctttatgatctagaaacttacctcacacttcggggtccacac

SEQ ID NO: 13824 - DNA, 1740 bp, Zea Mays
ttctaaaacgagccaatgcccaggacatgcagcttggatatttctgagttcttgaaggaacatgatttttccattgtcgccttggggaccatacacacaagtcagccaccaatcacatccccatccttacagaactgattggagatgctatgattagcaatcctgttttgtcctgaatatctcaggtgttgcttccatgccacaaggatgcctccacttgcaccagccgatggaagaaaaactgattcactgaactctgaaccaagcatagagaggatagtgcttctggggacaatttgcattttggtctcctgaagacaaaccacttcagcccgagaagaatcaactaaagctctaacggagcttgtcgaacagaggaattcagccctctcacattctagaacaatatttttgacggatccattaaaacataatacacggtggttaccagaataggggggaggggaaggagctctactgggcactaagtctgctggagtattccagccaaacagggcagagagagcatccacatggcattgagacagagggtgtttaagcagattcacataatactccaaagcctcttgactaaccccctccgaatccgagataatccgaagtgctttcatggcctttctggtggccctactgctcatgtcatgcatattgaataactcctattccagcaactcgtcgtctcttccttggcgcagtcatagtggggcaagatggtgagtttttagactgcttactggtggccagcttattggtctttggaacaggcagcagtccagttggtcttgtactgatcttgctgaagaaagcatcctttgttgactcattttgtgaggatagttccacttgggtgttcaggtgttgaatgggcacttcttcctcagtctccaggtggtctggaaacagaatggcatcaacagacacaggcggaacagccaaggctgctactacgtctcgtgtatgttcaggtgttggataggcacttcgttatcagtcccctggtgtcctgaaatcagagaagcatcaataggcttcggcggtacagtcaaggctgctacaacgccagagcccaagatgggggaggaaggagctgaattatgttggtccatagatgccaattcgtcatccgtagctagaccatcatcttgatcatcttgttgctgttgaaaacctaatgaacgttttcttgagtaaactttcagtgctggcatttgaactggtggttttgtcggtcttcaatctcacttcatcatgcatagatgtggaggtgatccccatctcagatggcccagtggggggctggggcgagacatgcatttagggagtcatgatgaggcgagctcagcccccagggaatgacggcggcccagcagttgagttacgctggggcaaggtcagcctgattgagccccggcggtccatcatggagagacaatgccctagcagggtcattaatatcacatgcgcctgtagctgccttcataatattactctggtggatgtccacaccttcctcgggaatacacgaaatctgtgcatcagccacaagatactccacgcgctctgaggaataagccgtcgggtgacatgaatgcgccaagcgctccccacagttctcgtctaccgtgacgcacttaggcgtcgagtccagagccctaggcgcatgcttagcccgcgccccctcggaccctgtggacccaggcggagatgaacaggtcgccg

SEQ ID NO: 13825 - DNA, 351 bp, Zea Mays
tctggactgtatgagtggatgcaaaacaaactattttaaaactatttggctgcatccacttatatggcataaactagcgtaccggtctggccaggctcacgcccacttggcttgacacacccaaccatccaatcatgcagatatatagctaaatgaatcattgccctcgacacgaacaagatggctccaggtttaggttgtccgcggtgagcaacgctatcgcatacgataccatatatagagtggaatatgcagtagaaagttattgtagccgtgtactcgatcaacaactggaaactaagggagaccaccaccaaggttatttttagagtgtgtaccctactgtagggg

SEQ ID NO: 13826 - DNA, 464 bp, Zea Mays
ctccagtttggctgtcaggctggtccattctgaaattcggattttcagtgaaacagagccaactttgtgtgtgaattcaagcttgaattgttgagaatttgatcaagattgctgtgacaaagttgtagctagtttgtcaggctataattttggtacaaagagctagcttagtcaccacacaaaattgggagtaaatcatgctccaaatctctctgtcagttcatctaataggagatcaccatggtacagtaaatgttcaactgcagaagatcccaattccaccccctactcgtcgccggtagcccatcgccgttgatcgattgctcgccgtgattcgtgcgccatggccatcggataagcacggctcagtaagaatctcggcgtccgatccacttgcgctcggattgcggctaagcttgccagaccccccctccggccgtcggtcgaccagataagtctcaccg

SEQ ID NO: 13827 - DNA, 448 bp, Zea Mays
tcagaggacaacctgctccaatcccggaggcggtaggcgtggttttatccgaagccatctgccatgggaagagagtcactaacatgcacatgccatttttttaaactagttattttattcattacatcaggccattacacaatacaacacacaactaccataagctcattacacgcgagtgctatctagggtactcccgaactccttctctagagtgtctccaaattccttgagaaggtcatcaaggctggctagggacatctcctcggtgtcggacgagttccttaacccggcagggggtagggttggaggggcttcttccttctgctcagtctgacatccatggttcttggtcttcttgcgtatttttcttgcggggcgagcttcttcagtttcttgtcgtaatccatctttagggtgcagtaggcctcacgggtgttggtttcct

SEQ ID NO: 13828 - DNA, 521 bp, Zea Mays
ccggtgagtgcttcacggtgggacttcaacgtcgaaccgctgcaagctgggaatctccgtccctatggtgagtacccccctaccgctactatgtcgcgttctctgttccaagatcgggattgatgccctgttgcatgccggcgtggcgttctggatgggctgacaggcaaggagagagggtaggaagcgagaggttgaagatgggctggtagtcgttggatagggggggaacgaataggattaaatttggcaaagtgatggcccccgaccgtcgatcatacggtggatggcgtagatttgatcgagcccctttaaaatcagaaccgtcgctttcggatctggtggccaccattttctaccgattcatttataggcgcgatataatctggtccgcagggattggatcggacggctcatataaactcgtaccccttcgccgcgcctcttttcttaaagagcccctgcctttttatttattcaacccgccatccaccgcggggtgaatatgagtcttagggaac

SEQ ID NO: 13829 - DNA, 319 bp, Zea Mays
gaaggaaccaatgtgagcgtactgcaggtggtaacacgtctcatggcgatgaagtcaaagtacaccttctccaacaactgttacaatgattttgtgaaactgattattgatatcagcccaccgaatcataacatgtcgaaagacttgtaccattgcaagaagctcgtagctggtctcggcatgaactaccaaaagattgatgcttgcgaggacaattgcatgttgttctagaaggagcatgaaaataccacacattgcatccactgcagtaagtcaagatatgcagtggtgctagatgaggatggaaacgaggttacga

SEQ ID NO: 13830 - DNA, 435 bp, Zea Mays
accttgcttctcgcttgcatttgcggattgtacctattatcatattcaggattacaaaaacaaaactatcaaaaaatgttgtaaaacagtttatatgatcataatacaagaacatttgcattccatacacattcgcttcttttgttgccccttgcctgcacacgtcttgtcacagcattccttagagtgtaagagctaatatagtttgctggcatattgtcttgcttattgtttgtgtctggtgtacgaacgttgttttcactacttggtgcaggaggatcagctgggatgaattcaggaggtttagtagggacaacggaagaaggatcgattggagtggtgctttcacggttgctctgcattaaacaattgatcaaacaatttatgttgcaaaagtttctaatagcaatgatggtaaaaatacaaatatcaaat

SEQ ID NO: 13831 - DNA, 685 bp, Zea Mays
tgatcgctgtctcttgctgcgggtgttggacaactcctcgggcaaggcggtcaactagggtcgtgggaattcgtcgccggtgtccgattgccaccgtgaacccgcatgtctccgtgggcggcgagtcctgctacacgattcactgtaaaatcgctcccatttggttcgacatcccttcctcttccgtttgcaccatttagcgctcgggttagggctatgggggtcggtcggccatgttgccggtgggcgcaccgccgggtgtcttctccaccgccgtggctaggattgaattgaggaagaaggtgtcgggaccgtggatgtcgtgatgatcggtcgtgattagacggagagtagtgcaagtgacagtcgttggatcgcgatcgtgcggacgcagggtgatcccggtttattaaatctcgacggttgaaattagatccgacgactgctatgccttaccgattcgggtgagatctatttaatctgggcccttggtttagatcggatggtttagaatctgcgataccccttcaccgtcgcatttcacataacaaccctcgggattttaggtaatgaacccgcagtccatcggcagggagattagaatctcggaaacttttgtagaataacccctgtggtctctggttatcttgtgccctgtccagagaattataaaattcaataaaag

SEQ ID NO: 13832 - DNA, 307 bp, Zea Mays
gtttgtggggggccatgtgagcagaaaaaatatctctacgacaactcgcacgatcagatcaacaggggtggcagaggcaacacctgcacaattaatattattggactctctcgatttggcgcatctgtgaggttcggtttgtctctgacaggtatggttcgcttcctctagtgtttacggttctatttgctctttccatgattcgattttcaccaacactgaagctgctctcaccttttagtgcattgcaagagttatgtgtctagaaaagccaaaaaaacatcttataatttggaatagagggagt

SEQ ID NO: 13833 - DNA, 597 bp, Zea Mays
cggattcgcgcccaccacggtgattcgtgcccagcgcagatggataacggcaaggaggtaagaaatatcacaccatggatgaactccggccactattatactccggccgccatacccgcttgtgtcacgaccgctttggataggctcaccagagttagccacttcgcgaccttgcaccacgtgccttaatgctttaaccatgccgcagtgagtcatcttagcccacccgatcgtcgccggtgagcccgccacggtaaatgccaccaatcgcttgcaccagagcacccccttctctccggctgccgcacgtctttccccgaattagtcgccaccgctcatggatcctataaattgagccttctgtcggttccgcaaggtagtccagcatccaatccacccgctcgtgcctcgaatactcaccagagagccccaatttgggatttcccccaaatcggtccaaaacaccgcgcatagtgacctcgccgtggctagctcgtttcaggtccgttcatgctctttgccctcctgtttcagtacccatatgtcctcctgatgctcctcgacccgttcaattaagctagaccacgctagatcacc

SEQ ID NO: 13834 - DNA, 618 bp, Zea Mays
tggccgaagcgccatcaacagaaaagatggaagaagcaaaagcatcgaccgagggaccgaaaatatcagaaattttaagtcctccagaagaaattaaagcagcaaaaattaataaggggccaacaatgaccccaaaaagaaaaagaatggttaatgtgttagatgttttggaaacaattaaacttccaagcgcaaccccaaagaagactgctgaaacttctgaggcgcctgctaaagtatctgttgctgaagttccgaagcaacagactgaagttgaaaccgagccttcagaaccggccaaggtaatacctttgaaagcagaagaagcaagaattgccgaggcaaccaaagaaataaaagtactagaaccaaatttgggtgaaaaaactgacactggtgcccccgaagcaccttccaaaatgtacgattatcttgtacggcatgcttcggggaagaaattgtctgaagaagaaatctttgaagctaatcactatgccagagaattaaaatatccgaagggggcattagtgttcaatgggacagacgaagatgacttcctatactgcctcccagacaacaaagaattatccgtttgtcgggagatggctagaagtatgg

SEQ ID NO: 13835 - DNA, 900 bp, Zea Mays
ctctattatcatggataatggtacacaatttactaggaagaaattcctagacttatgtgatgagcaccatgttcgtgttgactgggccgctgtagcccacccccatacaaatggacaagtagagagagctaatggcatgatcctgcaagagctcaaaccctgagttctcgctcgcctcaaccgactcgatcgacaatggccctaggagctattagccatactttggagcttaaggataacccctagtcgggcgatcggatacacaccatacttcctagtttatgggaccgaagctgtcctccccactgaccttgaatatggcaccctaagggtaaaggcgtacgagaaccaatgcaacgagtcaagcctctaagatatcatggatcagctcgatgaagcttgtgcggtagcactactatggtcgatgaaatatcaacaaacgctacgacagtatcacgaccgccacgtacgagggagaactttggaagtagggtacctcatgcttaggttggtacagagcaacaaggatcgacacaattgtcaccatgcaccatgggaagagttgttcgtaatttgagaagttcttcgaccggacacctacaagctgaaagacgaatgaggcaagacgctcgccaatgcgtggaacatctagcaattacgatgattatatccttaacaaaaccctaacattaacattcgtacccgatatatattgtggtccgaccctactgtagcgaaaccaggggtgagccccagtggggactgagggaagaaggatgatgtagtaggccgaccccagtgacaagtagcgcatgtcctattaaatctaattatgttgccctcggtaaaccccaccatgctgacaattttccttttttctcgatcaacgcaagacacaac

SEQ ID NO: 13836 - DNA, 322 bp, Zea Mays
tcggcatgtagcaccgcttccgacccatacaccatgaaaaatggggtgtttccatgtagagctcgactaggctgggttcgtaggctccaaaccacgtatggcagttccctgatccacttccccgcaaccttttcgctcttgtcgaataccttttttctgagtgcatccagtatcattccgttggatctatctacctgcccattagctcttaggtgtgccaccgatgcgtacttgatctggatgctcctttgttcacaaaaatcgaagaactccgagctggtgaagttggatcccaggtcagtgatgatgctatttggtattt

SEQ ID NO: 13837 - DNA, 752 bp, Zea Mays
aattcactagagataactatgaggacctagatatttaccatgtgaaactccagtaaatctttatgctggaaacttccagaccactccttgcaatactcacccatatctcaaccttgacaaacctgtggagtacagcaagaatgatatttttttcagagttcgacaccaaactctaaacttatgaatccattgtttatcaactgacgacctcctccctcctaaccccttcaaacccccacaccaactgcagctcgaattggcaccggtgaacacaacagaggtgtgggaatgcttcactcgcctaaagactgaacccagtttcagtcatttgaactgaactcagcaccataaccaactaaacccacgtggagcacaacagacatatgaagatttttctctgctcccagaaccgaaccacacatcagccacttgagacaaaaatgcagcagcagccgactgaaccttccctgctgacccccttcaatctatctatttcctaaagtaacaggccaaccgcagttaataaaacttgctcccaaaacatagctttaccaacctgctgcagcaactcaaggtcgaaagcttacagataacgaattattgtgcctcaaagtggggtgaaaatcctgaattgtggcttttactaactgaaaaaaattcagcatttccccagactgacaactcgacttggagcagaatttgctgtcgatttgaagtaaaaacaggagaatccatattaacaaaaactgctc

SEQ ID NO: 13838 - DNA, 684 bp, Zea Mays
gtgacattggccagttcatgttcacaggacaacctagagccattggccatctgtactataagagcagcaggaagttgagtccaattgggcagatgagaggcaactctgtgactgatgaaggatgaagaactgccggagtccaacaacacgagcatatccatccctccaatgtggcccagaaaacgcatggtctttggagcatctgcactatgaacagcagcctgaaagatagacaacagatgcacctcttcagttgtagtatcagtaacaggttcttcatcatcagacaactgaagtgtttgccacaattcctcaactaggtgtaactgcacagtatcaggacacttgtgaccacgggcattttggagtccacacttgtaacagagacccttggcttttcgatatgcatacaaagtggccaatttgtcttcagactgaattggtcgagtcggaagtgtagtaatggcctgatcccgcttgagtgaggaagtagcctgactgtctcgtggcatgcccatcggtgaggacgccggtttgctgaatccccgtggagtgaacttgccctcacgatgtctggtaccctcgcgcacctcctcctgcaactgagcaagaacgtaggcagtatcgagatctctgggacgttgcagtaatacaacagatttaacatcatcacgcaacccatcg

SEQ ID NO: 13839 - DNA, 652 bp, Zea Mays
tggcgcatgatcaacgaccggaggtgggtgtagcgatcgctgaggccgcgaagaacattgaggacgagcatgcggtcctccatggggcagcccagattgccaagtgagtctgtcatggccttcatcttgcggcagtactcactgacgctgaggtccccctagacaaaagtccggaaggccgcgtcgaggcggagagcccgggcctcggcattgccaaggaactgacccttgatggccagccaagcagcccgagcgtgaggaatgttccggaggaggctgtgtaggtcgacggagatcgtccccacgatccaggtgagcatgatgctgtcgaggcgcacccacgcggtagtcggtgccacaccgatgggatcgcagaggacgtggtcatcgagggcgtagcggcgaagggtgagtaggaggatgtcccgccagcgtgcgtaggatggcgactctgactccaggacgatgtggaccatgaggcgaatgttttggacactcccagcctgaaggttgagttgagccacgagcgggttagccgggtcatgccagagcatcgtggggatggtgcggggcacggttccgacggtcgtgccgcccatggtggcagaggaggtgaccccaccgtcgtgggtcgtaggcgaggagctgttcc

SEQ ID NO: 13840 - DNA, 396 bp, Zea Mays
actgaggccaggaagctcgagaatgacttgccaaagcgatagaagtcgtaggttgttgatttcctacatattctgggatgtatggagagtaacacgaagccgtgtggaggacttgcttcagctgactctgccgcgccttggattcagcaatttccttttgcttctgaattgtgacctggcatgtccttattgtgtggcccttgtcctcgccacaaaagaggcagtacaactttctgggttgattgccgaaccttcctccactgaagcttcttcctcatctgcctctcggagctggtggtctgaaagaagtctgctgcatgctcgaagactgcgagccatcatggctgttttgagcattattggccctttcatcgttggcattggagttatgaattg

SEQ ID NO: 13841 - DNA, 455 bp, Zea Mays
aaattaccgtccacaaaacaaatacaaaatacctttcagacgtttctgttcagctctgttccaggcactcgaatctctttgtttttgatagttccctgctaactgcatgtgtttcaagtgaagattatctactgcacgcatcaccacgtgaagcttggataacacatcattggtagcactgtgcaattgcctgctgtgttctagagaacatgaacaaattaaggaaaattttagcgtaccttaaatgacacatgaaagctattccacaacagaaaatatggagcagaacaaaccattttctggcaactttttgagagcagcagaaacaacctcgttattcgcatgccatggaccacttgatggaaggaacatcttctgcagaatatcaattgttgttgattcttctgaagagacgtcatttcctagttgacaattggaaaaacctgaactttctg

SEQ ID NO: 13842 - DNA, 326 bp, Zea Mays
tgcctacagttgggccagccgaagccaaggatgatatggccagagagccagaattggaaaaaacaatgacgatgccaaaaattttgagcccaccgacagaggcagaattgccgaagatgacaaaagatcctgccacaactcccaagagaaggaggatggacagcgtgctggacgctgttatggataccacaaaagccttgacccctgctcctatcaagaaaattgccgaggctatcaaagtccaggccgaagccgaagttgggccttcaatgcccattgagacgaagcctgtcgcgcctgaggacaaagccgagcaacaaactccg

SEQ ID NO: 13843 - DNA, 660 bp, Zea Mays
cacgagcttaggcggctggggggtgaagcgggtcttaccgcatggactgctgtatgcgctggagaggggctcgaccaccacggtgcgcctgcagggtggaactaggcattggcaccgccatggctgtgcaggcgagcacctgatcgcacgcacgggatgggggcaagggcttcgtacttggatgacggctgcagtcacgtcctctctctctctgtctctacgctggatcaaccaggctccgtatggagatgcacagatggttgcgcacgggtgttttggttcaaggtgcttcgggttgcattatatactgctagagaagacaaccgatcccaacaaccagtgatagaatttaggataaaattacgcttttctgttggagtttgttgcacgcttgattcggatcctagccaaggaagagggtaatctgccaggcgaggtccacacaacagcgacatggagacacatcgtgagaaggaactggtgataaaatgaacccaccggtcagtgaggatcttgtggcgcgtcgagagggattaatttaatggatgacatcagatctcgcattagcatgacgtcgtatggggctagaaatcaaaaaataatagaagagacgtgggcttcaaccgaattgcagagattgtgggctagttttgttttttt

SEQ ID NO: 13844 - DNA, 469 bp, Zea Mays
ggacaaagtacataagagagttatctcttctacatggtttacaactttgggtattacactcaaggagcgcatggaggtcactatggacacgattgtacgcccccatgtacggtcttatgtgtatccccactgacatgtggggtcagtcaaccttagtcatggaaggagatcaacactggagtctctacagtgacccttatgccgggaaggacgggacgacacaccatatcgagtgtatgcctacgcatgctagaaggtgacacagggctcatgacgataggcgaagccacaccacgcatgaccgcgccacgagattgatccacggggcccaccacacactactacgaagacatcaacacagacttgctacagggaccttcatgacgaacgagcggtgcagtacaccatattgggagtatagctacataggaccctacagacgaccatagggataccacgtcaacccggg

SEQ ID NO: 13845 - DNA, 459 bp, Zea Mays
agcctcggctctcagcagaaatcgggcgggcacaaatcaacagcaagtacaagacccacgttctaggacataccatctacaggggctcggctgtgcctcctcatcgtatgtggccaactccggtactcctgacagccctccttgaggctataaatagggcagcctatggcttcagggaggtgggctaatgcttcacggttttctcctccaccatgatattaacacttgcctaaatcaaccctagtgacttgggatcattccctctcccgctcaacttgtattccctactgcaagcacttaggtgcaagtaatataagtctcatccccctctactaaaagtagggccttctcttgcccaaaccaggataaagacgtgtgtcatcttgcatcacccatctaggttaggggcacacaacattatttcactatttggtaagaccctcaggtccggacaccgac

SEQ ID NO: 13846 - DNA, 773 bp, Zea Mays
aaaaaacccaatttggaagctttcattcctctcattcagaagattgaaagaagactagcttcaacttctattttcctatcttaggctggcagattacaaatggtcaacgcggtattttcttcccttccaacctattacatgtgcaccctgaagctcccaaaaaatgtgatcaaacagattgacaaacttcgacggcattgtctctggagaggggcagacataaatgcaaaaaatccttctcaagttgcttggaaattagtctgcaggccaaaaacctaggggggacttggagtcatcaaccttgagtggcagaataaagcgctccttatgaaatgcctccataaattctttaatagagtcaacacatcccatgggttaacattatctgggacactcattacaacaactctctgccctcagctaaaccagttggctcgttttggtggaaagatattctcaaaatccaagattcttttaaggaaattgcccaagtggagattcgaaatggtaaatctactctcctttggcatgatcgatggaatgggcagcgaatatctgaaaaattcctggagctttggtcttttgcctctgtcaaggagattaacattagtcaagctcggctggcttccccgaatgaactgttccacattcccctttctgctgaagcgttcgagcagcttctctcacttcaggacacccttggtaatctacagttgcttgatcacaatgatatttggcgatgcagtgcctcttccaatcggttttcttctcag

SEQ ID NO: 13847 - DNA, 781 bp, Zea Mays
cggaccagcgcctgagcatgtagtcgtgcagggagtggttagaacaattgtcgggtggcctccttcgggattcacggggagttggtggctactaccagggcagtcggtcgaggctgaactaaggtgaggtgaagttttctcctgaggctgaagccgtcttcgggcgaggtggagttctctcccgagggtgaggttgtgcctagacgtttgcatgtcccatccggagttgttcgagaacagtgaccggagtgggggagcagggtccgatattcgcgtgcttgcgtcatcgtagtcggtgaaagtagatgggaccgcgatcccatcatcctttgttgactgcggtgtcacatggagcagatatctgtatcattgcatttaatgcgcacgtcttcatggttcctgagatctttggctgaggctaggctcgaggctgtccttcgttcgagatgagctcgagtgagacagaaattgctttccgtgaagggggccttcaggcgagtcaaggatttctcacgggtgcagccttcgccggtggatgggcttgagcgagacatagttttgagcgaccattgagcggggcctcgggcgcatcgtgatttaaccctgctcgatctcggggaacacattttctgttaggtatgcttaagggcacaatccgtgtacccctaattatgataccgacacctggtttagtggaactttggatatgcttatttttggtcaacgatttttggctagacccactgcagttaggtctaacctggcttaggctcatctttgg

SEQ ID NO: 13848 - DNA, 443 bp, Zea Mays
caaagctttaaaagggaaagagacgcaatgtcaaagcacatatggtcggctgatcaaagctgaccctacttttgatcagttgctctgcaagaatactagcaagaagaccgttctgcatggtcggtcaacgaagaaactccggtcacctgctaaaacgaaacgggtaaacaaaacggcccgaaaggcgacacaacaagcatcgcctattcatcctatgagactagggtactttccacccgtttactcatcgtcggtatattatcatgttcaaacatggaatggtacgatgatgaatccatggtacatgtatagtccctttgtttatccagaccgggggcacctccattctattccatttgatccattgatcaaatggtcatggccgagaaagatgcaatctgaaacgacctttatacattggtgctttattgaatgatctcaat

SEQ ID NO: 13849 - DNA, 1077 bp, Zea Mays
agtgcatcagtggggaccagatcagtatcatcagcagaggtcaaaactttgtcatcaggagcgctggcctctaaggcgacttcctaacccgaagcttgggctgctgccatgcaaccagaatgtggaggagaagaccctacgtgaacgttcatggaagtgtgagagggagaaccgactcgaacaccctcgggggctgggtcatagctcgcgctacccatccgagctgggtcatccccggcaacaccctcgggggctgggtaagcgctagcgccatccttgagggccaagctctctataacagccacctctaaggctaaaggaccttcacccacttccatgggtgcagaacaatctagaccagcctcctgacccttaagaccacgctccaaggtcgatgaggcacgagacgccgcccgggataactccagcccagcatcaggcacatcagtgcaaacatccatcatgccaccgtctgctggctctgacaacagatcttctgggaccatgtcttcaagagtctgatcaaaattcaccagagataattcttgcagaccaatgagggcaaataaagctagagaaggaacaccactgctttccccgctggctaggtaacgccggctgttcttccgaattagagggatttcatcctcttcttcctcatcttcatcaacaacgcgaacagtacacccattggggtcagctttggccagatcacacccattgggatcaatgtcatctaggtcacacccattgggatccgcagcagtcgggtcacacccattggggtcagtttcagcaaatgcaggcactggcacttcctcagcagcaggaacagaaggaccggcatcctgatccaagctagacactcgacgaagacgtctcttcttctttttcttcccctcagcaggagaagtgggctggttggctctgtgagaacgctttgggcgaacactgtcagacctctgaatatccaaagctttgccggcctcagggatggccaccaccaccagtgtttcagtaggagcgacatcagaagaatcctcagctaacatatccagcatggcacttatatctgcg

SEQ ID NO: 13850 - DNA, 806 bp, Zea Mays
gaaagagtagattgtagtggaaggaggtcaaagggtgagggacgagtgctcgtaggtgacacatggtgcccgtgcggtgggatgttgggcagtagcgatgatgcaccaccatggctaagaggtggttttgtccacaatgaggtggaggaactagagtagcaatctaagtagaagtgttcttgtggatccactggcattactgaggcgttgatgatagtttatgggataccaacttcaagtagtagcatatatgtagtaggtggaggtcaattgaagttatgtatctacgatcctcatagagaaggatgtagtatggtatcccgcggcatacaagggtggtgcttgcaagtggagttgtagtgaggtcaaacaacttgttgaagacgatgttgaatttggatctaggtcgaccggctatcgtcttgctgggttgcttggcgggcaggttggtcggtagcctcgcctcgctgtgttgcttggtgggcaggatgatgatagtttatgagataccaacttcaagtagtagcatctatgtagtaggtggaggtcaattgaagttctgtatctacgatcctcgtagagaaggatgaagtatggtatcccacgacatataagggtggtgcttgcaagtggagctgtagtgaggtcaaacaacctgttgaagacgatgttgaatttggatctaggtcgaccggttgttgtcttgttgagttgcttggtgggtaggtaggtcagcagccttgcctcgctgggttgcttggcgggcaggttggtcggcggcctcgcctcgctgggttgttcggcgg

SEQ ID NO: 13851 - DNA, 555 bp, Zea Mays
ccgaggtgctgttccagcggatgccccagaggaacgtcgtctcctggaacacgatgctggaggcttacgctgtggcgggaagggcgggtgatgcctgcgccctgttcgaccgcatgccagtcagggatgccggctcctggaacattctgctggccatgctagtgcggtcggggagcgtggataaggcgcgcgagctgtttggaagaatgccggagagggatgtaatggcttggacgacgatggttgacggcgttgcgcggagcggtaatgttgacgaggctcgattgttgtttgatagcatgccagagaggaatgtagtttcttggaatgccatgatatctgggtatacaagaaaccacaggcttgacgaggcactggatttgttcacgaagatgccccatagggatattgcttcttgcaacattatgatcactggttttatacaaaacaaagatttgaagagggcacggaagctctttgatgaaatgccagaaaggaatgttgtcacttggacgaccatgatgaatggttacttgaaaggcaagcagagcgagc

SEQ ID NO: 13852 - DNA, 430 bp, Zea Mays
gtgatgatgatccccttgtatcgcatgtgcctcccttttatagtccgagggaggcacacacaagagtgctgagccctgacgggtgtgccccaatgatctagtattaaacatatacaccatagagtggtaaatgttgtggcggacagagatcttcttcctcaaccgccgtgtagatcttctgaccaagcgtgcttccgcactgtttgccggcccgagccagccacaaagtggagttaggtgcgctgatgtatgtaggcgtcgcccttgctgacgtgcgtaagagttaatacgaatgacccgtgatgtcgcctcccatcactgatgtagtggacgctctgcccgagctaatgactgctcatgatggcgccacctaggtgcgtggtgctaaggtacaaccactcaccttggtatcacgtgacacattgtgtgg

SEQ ID NO: 13853 - DNA, 310 bp, Zea Mays
aaaggaggtcggttcagtaaaacaatgaagatcagagaaccagaaatatctgcagaaggaaaagatctctggttactgtggttttggatgtgtgcaggtgaagtggagataggaacgaccgcggcaagataactacaggctgattcacggtcccgcgagcctaaccggagcctggccgaagatttttcgccggtgctcgccgtggcgcggtattttgtcaccgtgtcactcacgccaccaccttacctcactatgcctcttccttacatggtagccatgtgttaacaacgtgtttcatggccgctgatcg

SEQ ID NO: 13854 - DNA, 384 bp, Zea Mays
ggagatcgatgccgatgcatgcacatgcactcgtgtagtactgctagctttaagcttttgcatgcactgtggtctgtggcatgtgcaggttcttgcactgatgcagcaatataatatgggctcctcagccgtactctccctataaatgttcaaatggatcggccccacagtgggtctatcacttggcacggtcgtggccagcacgagcatgatctggcccgactagaagcttacctgagctggtccggtctgatagccgtgtcgagcttggaccggccgtctggcccgcggtgtaggcataagcccggtccggttaaagggtagacacggtaacagcccgcttgagagactgattttgtaatggtgagtctgtttttagctata

SEQ ID NO: 13855 - DNA, 571 bp, Zea Mays
gcaccagccacttctgctctgcttaccgtttcgccttcctccttatcccatcgacccccggaatctcgtcctcgcgcattggggggagattggaatgccgtcgtgttcgaatcgagatttggaagttgtattttccttttttttcggtcctgctggtcttgcgccgcaacgtttcgttgctgaaagcctgaaactggtgggatcttggtccgacgagctctgcgtttcgtgcgtgcgcttgcatattggttgcaggtacatctgatcagcattggccgaccgactaagccaaattgttggtttctgggcgtgcgaggttattatattcatttcctgttcttgttcttgctcctgtacagtctgagcatcccccctctgcaatgtcagtcactatatcttataatttccacacggattaggctggcactgtagactgaagttctggtccatttgtgggtggtaggctgtgattcccatttgttttctttttttgttagctgcctggcaattattgtttgcccgccgcccttccctccaccggcgatcaggcggtccgcctcatcgcgccccg

SEQ ID NO: 13856 - DNA, 570 bp, Zea Mays
gtggcgtggtaaagggggtaaccatcatgacaccgctcgatgtgggtggcttgaagagacgtatcgggggaatgcctcccagtctctaggacctactggtcagtgagcgcactaagaaaagagccactgattgctagggtccattagttagtcagaagaggtaggtgcgccaaccttagaaggacccacccccggtcgaaccccgcgacatcgagcctggggccaagcatggtgcggcatgacaagggaggccgaccgtgtcagaagagaaccactcgagtggatcttgtgcctggcatggtgctgacccgccataaatgcctggccacattaaccacgcttggcaccgagccacagcatgggcgtcagtccgctcctcatgcttggcacccaagacatagctaggactccaccttgcagcttctaagctccactttcaccctagtaatagatctgtgagcctctcctccttctctcaacttcttgtaatcagtactatgagtttgatcatcaatggtgccggtagcgcaagccactaatgacttgaagtagggacattctagctgaacc

SEQ ID NO: 13857 - DNA, 419 bp, Zea Mays
gttttactcagaccatagctacaattgcatcctttttgggacggatggagtactcacttctaccttggttttgcacattttatgtgttctccacttcatatcaccccttgccagtaacatttttttttaatatttggagtttgatgccatgtcttcatgtggtggtgaattgatagcaactcatgtgtctttgatgatctatgggtgcaattgtgcattactgcattaacatgtttagtttccttttaatatccgtcttatatcatatttttagtgttgaccatgtctgtatcttgatttttgtttgtgcttgttggtgcctaagcttatgaacagatgcatttattcatgatgttgttagtaattcatataaactacatagaatttattctatgacaccattgattgttatatcctcc

SEQ ID NO: 13858 - DNA, 528 bp, Zea Mays
catggacacaaaagcacaatgcaacaacacatgcacaagaagcaaagacaagagcgtgagtacaagatcacacatgaacagctcaaaacttgcagtcgaatctctctcaaatcactagaagccacggtcacagagtgttggagtgttggtgtgctcttgagattcttggtactgaatggaggtgcctaggggtcccttttatagcctcaaggggcctacgagctgttgctccttccttgtaaaaatagccaaaaatctgcaccatacggggcaccgaaccagctcctgtagcccccagtctagggatttgattgggcactttccaaaccgggccgacaccgtactggtccggtgcgccatcagaccgtctgatgacgtcatgcaaccattggtcactgaggtaaccattggagatggtggtcctgtgcactggattgaacactattcacagtccggtgatttttgatgaaaacatcccgagagcaccgagtttggatgggtggcacagacccagtttggtgcgtcacc

SEQ ID NO: 13859 - DNA, 1021 bp, Zea Mays
tgttgattatatagagtacatatgactaacaccacatggatagatagtgtggtactattcctatttactcttaaactttgcccaatgcccaaggggaccacaattatgacacttatgcttttagtcaatgtggccactatccttggcgttaggcacgtggggctactttttgcactcgccatgagagaggtagcatgccactgcctggcgtggtaggctttgagcagcatttactgtgttgcctctacttcgaccgtgtgagccattgctccttggtgaagtggagtttgctgccaaagagtatcaattgatctggagttgccacatcatcgtctcaaccgccttcagattgtcggtcacctctaaaattgaggtccgctgtgccgagcaaggtgctgattgcaatcaccacatgcttgtactgcctcgggacgacacacatgagcttttcaactgcatgctgctcggtgatgcccttgccatagaggtcgagggagctcatcatcccaggcggagcacaaagtcgtggaacgagagcaactaccagtccctttggagctgctgcagcgtagacttgcgtgcgtgcttcaaaccaacattgatggacttgatcacctcctaaacctcttttgccgtcgtcttcattgccagcaagcggataatctttggggctacaatggagaggatggcattgagagccatgtgatcttccatgcgatcagcgcatcatacccgatctcgcatcctagaagccacgagcttccaactccaccttcatgaggaggctccaatcctcatgcttgctgtgtgtcaccgacttccttcaccatgctggaccaccattccacgcctccatggcttcgcgcgcgccttggctatgtggaaggggggaatgacagcggtaggttcacacccattgtgggctgcatctttgaccactacctgccggagctgagaccatggatcactctaacacaacatctataggatgagcagaggtaaatagagtagctggagtttt

SEQ ID NO: 13860 - DNA, 656 bp, Zea Mays
gtcgaggagcatcagtgatatgtaagagtgctgaaacaagagagcacagggcaagatcggacctaaagtgcactggccacggtgagagcttgttcatggtggcggaaaactgatttgggttaacttagtgattcgggggctctggtgagtaattggaggcacgagtgggtgtgttgagtgcacacaattacatagctgagttgagggtgtgctcaatttatagggcccttgagcggtggcccgtgaatttgtgattgcgcggtggcgatcggagggaaggggatgcactggcgcaagcgataggtggctttcactgtggcgagctcactggcgttcaccggatatgcataacgcgagctactgcgacgtggtaagatgccagggcatgtggcgcaaggtcgcgaggtggctaactccagcgaacctatccacagcggctgtgactcaggtgggtacggcgcccggagtagaatagtggccggagttcatccacagcgcgatatttccttacccctctgcattatccaactgcgccgagcatgaatcaccatggtgggtgcgaatacgggcgcacgatcgccggtggtgagttctctgagctggcgttctgatcttgtcactgtaccattgaaacccaattcagagcgcttgacaga

SEQ ID NO: 13861 - DNA, 418 bp, Zea Mays
ttggttgagaatgagaatgggaaaggcagtgcaggtgtcgaggatgataatggggagaatgatgacttggattttgaagatcaagatgacatggagaagatcagcaggactttgacactgaggctaccaagaataactccatggatgacaatttgactgctagacaggggggtcaggagtcatgaaaaacaatgtagtagaagctggttggtctatggaaaaagtgcaagcattaacagatagggagagggaagaattctacaagtttaaggccaatgagatacaagatcaggtagtgacaaaagagctagagactgagtgatcaggtggtagcagaagcggatggtttatgtgtccagccggctaacccagttgcggatactgacgcagaaatcatgtttcatcccaaggaagcctc

SEQ ID NO: 13862 - DNA, 1182 bp, Zea Mays
gtattccctagactcagatttaccccacggtggactgcgggttttatttactaaaactatgggggttcatatgcaaaagatctggacgaaggggtatctgttgatatgggccgttagatcacttctggacgcgccagattaggtgtagcatctaactaactggcgagccgcaggagccgtcggatcaatacccaacgcacccgattaaatgaataactcactgaagcggtacgcaaccctaaccacaggattaccgatcaacggcctggattttaaaccccgagatccacacccaaccgatcgatcaggaatctacgctctacggcccacgatccgcacgccctcactcagccgcacgatccggccgcccacataagatccaacgccagggagatctcccccaacctcccgacggcaaccgagcagaggcgcttcggtcacggcggagctctcaccggcgccacaaaatcataccgctccggcgacccgctatggctaataatgtatgcaaaatgaaattaagggctaggcgaccacggtggggactcacttgtggtcgggcgaggtgaggtggcgcccgtcaacggagaagggcggaggcaggggcacgattgcgtcctgacggacgattcttgggtggccggcaccttccgcgcccgagaaggcgcgcgactgaaatcccccgcacgacgactaattcgccgaggttactcacgtacccagaccgccggtgacatcaaaatttcggtgcggcggccgctctctcctcacacggtgccctctcaacaatggcggcgcaggttctccgccacacaatagaaggccagggggcacggctttatatggcccatggagtccgcggatcggaaggattcaaccgaatccgaaactatcgctcgccatgatcccgacgaaggcggtgacccgcgtggcggacaccttaaagcaaggaggggaggggaggtctgcgacttgcgcgcgacggagcaggccccaacggccgagtggcagcttcgggtggcgaaggatccgcgtagagggggtagcgggccacggaaagctgcccaagttgttacgggaccgaaggaatcgcagccacgagcaccgagcatggcagcctcggaaacggtcttcggttgacggaggaagaataccgcgccgcgcaggagagtctgacgagtg

SEQ ID NO: 13863 - DNA, 907 bp, Zea Mays
cttggagagacactactcttagtttctgtttttttttcttcttttttccttttgggcctggatgtcttgtatcttcctctgttataattttgtacttatgtaactttcttcatttttatagatatacatgatactactctgttatagatatacccaaccggtggcctcggatctggagattctgcagacacacatgagtgtctgccactgccaccccccactcctgctatcccccctcctcctcctgtactgatactactttgctatgtcagcagctcagcttaagcctgaacctgaacccgcttgtgcttgctcatgctgccacctaatctgccatttctcgctgggttcctgctccatctgaccatctatctcgctctccttatctgcatataacaattgcatctcatcctggtgtggctcatggccatggaggcaattgcatgcgacctttgcgtcgactaaacctgttgtcagtgaggcttagcctaaacctagccaccaatccacctactcctggctttgcaaagctgcagatccaccttctctgctgctttcggcacaagcaacgacacagatttgcaagtgacaccagctgcagctgatcctataagtttctttgctcatgacctggcaacacaacacttgagcaattgtacgtgtagaatctctactgattttgggcattccatacagtttcttattttctttttgagaaaagtcagttttacatctgccagcgatgggcttattctaggattgttgcactccattcatttttttataggaaagatagttgcacgtgtgattgtttagaacctaaatcagtttgatatggaatgcagttttgttggtttgacgttgtggaaaagggttagcttactctttagatagtatttgttttgtt

SEQ ID NO: 13864 - DNA, 1017 bp, Zea Mays
agcaagctcgagctgatccatggggatctttgcgggcctctgaccccatcgacaccgagcggtaacaggttgttctttcttttggtggatgacctgagtaggtacatgtgggtgtctcttctgcgttccaaggagggagcgatggcggcgttcaagtcctttcaggcaagtgatgaggtggaagctggaagaaaggtgggaactttccgtacggaccgaggcggagagttcacagcacaagctttcatcgagcattgctgcagtgaagggatcaagcgacacttgacagcaccgtacacaccggagcagaatggagtggtggaacggagaaaccaaaccatcatgggaatggtgcggagcatgcttaaagccatgaatctccctaactggttctggggggaggctgtggcaacggttgtatacatactgaacagatcacccactcaaggaaatgaagggagcactccatatgaggtatggcatggaacaaaacctaccgtcagtcatcttcgtacattcggctgtgttgcacatgttaagcaaggcaacaagcgtctaacaaaacttgaagatagaagtacacaaatggtgttcattgggtatgaaagtggcagcaaggcctggcgtttctacaatccaagcacaaaacgcgtacatgtgtcgcgtgacgtcgtgtttgaagaggatcgcgcctgggactggaatgaggaggagaagactgggataaatgtcccagttggtgctgagttcgtccctgtcgagagctccattcgcctgatggacaagccgggtccttcgtcctcgtcaccaagcacgtcgagtagtggtcgttctgggcctcccactcatcccggtggccaatgggatgttcaggatgaacagcaggtgcccacacctgggataatggctaccgagtatgccacacctcccactgaaaccccagatcttgatgctgaccatgaagatgacacgccacggaggtatcgtatgctggaaagtgtgttgggaacagataat

SEQ ID NO: 13865 - DNA, 385 bp, Zea Mays
ctagaaaggggagagggaagaagctaattaacggtgtttcgtacctcgctccgacaagtaggtttattgtgcatgtttcatgctctgtagggcatgcagggagggcacaatatttatacttgtttgggcataacgtccctatctcgtcatcagtggcttggactaccggcaccattaacgatcaaactagtagtagtggttacaagcaaagggaggagaggctcccagatctcttatcgagatggaagtggagcttataagctgagaggtggtgtcctagctaagtcttggcttggcggagctccggtctcctggtcctcatcgacgctcctcctcctatttatccttatgggctcatctccgtatgaaggcgtccggtcgtccc

SEQ ID NO: 13866 - DNA, 769 bp, Zea Mays
cgaggaggtacgggcgagtctcggccgcccgatcgacgatctacggctacgattagattcgcgctttatgaactcccgcttagatctggaccacacgatcccaaactaaccgcccggattttatgaagcccgctatgaatctcaagcgctcgctcagagatggacggaccagatcgaaaacacgcgaagatttcttcccaggctaatctggaccgcgcgttcatgaatcaacggtcgaagctaccttccccaaccagccgactttgggcacggcggcgcaacccaccgtgcggcggcaagaccgccggagctgagaatccaatcacccagccagccatcttctaattcgttcactccttgcctaattagtgacattacgagcccgtttcccccaccaattcctgctcacaacaagcccagagtaccgcccacggcgcaccgcggcaacaccatggccggacagtggactcaggggctcagctgcaccatcctacgattcgctagtgcatagcctataggaagggaggacgaatacggtggggacttaccaatggccggccgaggtcagacgacgctcatccacggagaaggcggaagcgaggaaccggctgtgctccgacgagtaattccgatggagcaggcgacaatttccaagcgaagaggccacggctacttttcctagggtctagaggagttcttgggtacaattccgaggccttggacaatggttagccaagttttccccggcggcggcaacggcgggtttctt

SEQ ID NO: 13867 - DNA, 376 bp, Zea Mays
accgagcacattcagttacaagtccgcaacgagccttttcttgatttttgccttcttcataaccttggtcgttgtattagtcgttggattgtcgtcagttgtacgcgcacattcagttacaacctcttttcctctcttccttttcttttccctacacaaaacatgaaaatagtaaataatcatgtgaattttagaaacttgaaaaaataaagtatattttagatgaatataaccttgacgaggcagcaatggagggcagcaccaaagcaaggtcggagggctctatcatagcaacagaggagggcacgatagaagcagcagaggagggcacgatagaagcagcagaggaaggcacaacagaggcagcagaggaagg

SEQ ID NO: 13868 - DNA, 502 bp, Zea Mays
ggaagtgtgaaattggagctctcgggtacaccattggaggcaatactttgtggctgggtgtgtgattatcctacggacctaacggcgcggtcaatttataggaagcaagagcggcggccgggaatttggatgacgacgcgcgacgaccggagaaggagaggagcactggtgcaagcgcttagtggttttcactgtggcgctccctccggcgatcactggatcccttaacgtgactaatcgtgacgtggtaaagtgtctggacacgcagcgcacggcagtgatcgatcaacgacggtgaggtcttatcccgatccaccgatgagcaagggggtacgacgggcttagccgtgaccgagctcgggctgatcccacgcccagatatttactttaccatagttatcccctcgctagtgaacacgaatcacggtgtgaagatcgtcggcggtgaggggggatgaatcgggcatcttcttcagttactgtaccatggcatacatctccg

SEQ ID NO: 13869 - DNA, 1131 bp, Zea Mays
ggggagtatcaggggcacacaagaatgtggaaacaagatagcagggagcatgaacagacctagaggtcgctgaccatggtgaggtcaatctgagcggtgttcttgagtgagttgggggaaatgagaaattggagctctctggtgaacaattggaggcgagacttggtggcttggtgcatgattatcctacgaacccgacggtgcactcaatttatagagtccacgagcggtggccggtgaatttggattgagacacgcggcggccggagaagacaggagttactagcgcgagagcttagtggcattgaccgtggcaacctcaccggcgacgagccagtgctaccgagcggtttctagtgactcaccgtgacagggtaaagcgtctaggcacgtagcccgaccggataatggcgaacgctggtgatgccagcgcgactaactacggcaagacacgacggcgatgagaacagtggtcggagtttatctccagcgtgatactttacaccgaggagtgcttatctgagtttggtcgggcgtgaatcgcgacgctggcgcgaatccgggcacacatgtcaccggcggcgaggttctctgacctgatccatcctgtgcactgtaccatcgtgaaatgcacttcagagctcctgacagcccaacttgtagcgtccagaacacagatttcttcataagaacttgctaattcgccagtagcaaacttgtagcccttcataccagctacaattatgctatagcaacaaccatcaattgatcaacagatctagctcaaaatggctctcaaacctagttctaggccattgtaagtctgatttcagggttaagctcgtctgacagaccatcttcagatctgtttttctcttactttcatgtagcactagggcttacttacttaataaaaattgttctccttacatagatctacaaaattgatgtggtgatctagggcaaaaactttatcacatggcaggtatagggctccaaagttgagctaatcctactgaaattagacttaacccactagagctcaaatgtgactttttgcaaataggcccaaaacttagggtttaacttgaaaatccacatacttgtgaaccatatgacttaaggtgcctt

SEQ ID NO: 13870 - DNA, 598 bp, Zea Mays
acgaaattggttctgcaatcctgattgttcagtcgcgctctttgctttgttccatgtgcgtcgaagtcgggcttcggggagagattttcgtgcccaccggtcatggcgccgccgtcgaagctcggtcaccgccgtgcgcagggcgttcagcgggtgcgcgtgcgtcggggttgcgtgggctgttgatcgggaaatccacggtcacggttagatgagcgcataccctttcatgagagtgcatccgtgccgttgatcgggccgcggacgaatctgatggggcctaggcatgggaagttgccatccgtggatctcggatcctacggtggactgagcgtatcggttagatgtggcccatgtctaatctaagcgcttgaactaggatacaacggctcagattgatccataccccttcggctcgaccgtttcgcaaatgagccctcggattttaatggaataaacccgcagtccaccgcgggtaggtcctgagtcttgggtgcatttgcctattaaaccctgagttatctattattagcccacgcagtccagacactgataaaatcagagaaattgagatagaaaatgatttttaatataaaat

SEQ ID NO: 13871 - DNA, 716 bp, Zea Mays
cgcacaaacttatggagtgcttacaaatacaattaacaaaatacagtcaatgatcagcaagactaccaggcttcaatccatatggaacattcaacattggagaaatagatatcttgagatcttcttcgaactgggacgaatcttttaatgtagtaccagtgctaccaggtgatcccaatggaacaaccacagcagccacattgtctgttgtgcctttctgtaaagcaacatgaactacgtaatctgccaaattacgttgtgttatggcagaggatccaaaatcatgtttaacacgaatttttgcatgcagcattaggtcacaaacatcttgcatagtcattttctcaaagatcccatcagatgacgcaataagaaaactgtcattttctgacagaatctgccagcctgtcaattcaggtgttgatattacaccgtatctgcaaaataattataaggatcacttcagactgtccatgctccatgcaactctaccgaatggaaaaatagcatgttatatcaacatttcaagaaactctatctgagcatgggactagcactctgccgcagggaaatttatatctgttatcgatcaaaatcacattatataacgagtaacctacagatgctcctcactagctagatatttaaatatgttccattttggctatcttggaatttagaacttcagctattatcgagtctgaatctctaatgca

SEQ ID NO: 13872 - DNA, 479 bp, Zea Mays
aaatcaacctattttttattctaatgatgttgaaattgatttggatgattggagagctcccgtagtaaaatatttatgtgatccaagttgtaaagttaaaaagattctttgacaaagtgcattcaagattgtgttttacaatgatgggttatataggaccgacaaagacttgttattaaaacatttgtgattcgatcaagcaaatgagctatgggagaagttcattaagatatttgtggcatgcatcaattagctctgaagatgaagtggttgttgtgtagagatgatttttattagcttactatgatggcctattgttttgttactaaggttgtcaagagtgtcacttaattggaaatattcagcttgtgctttatgctatgcttcattatgttatcaaaccatggccttttgtggttgggaactagactccattgtccatattcataccccatcatcaaagggacattgcattgtct

SEQ ID NO: 13873 - DNA, 564 bp, Zea Mays
gaggtggtagttttcaggagtttcttcagagcggggttgagatttcctttgaacaaaatgattggggaagttttggaaaattacgaaatctatcttcatcagctgactcctaacgctatcgttaggctcagcgtcttcatatgggctctccgaagccaaggaatagacccgaatgtcgaagccttctgccgactgcatgagcttcattatcagacgaaggccagagaagatggtcttcatgagaattttggttgctacaacttcgcttaccacaaagatatgaagactccggtggttagctatcgcaccaagtggccaactggttggaaaaatgagtggttttatgtaaaggccgatgagaagagggagaagctcaagacgctagtactgagccctctgagcttaagcttcgggctgactaggccgctgtgccatatggtgccggggtcaccatgccgacaagctgtggcagaattccgggtggtagccgagcagattgggaccagagatctagtccaagaatatctggcctataaggtgttctcgacgctgagtgaatggaac

SEQ ID NO: 13874 - DNA, 771 bp, Zea Mays
attagggagagataaaataggggggttagattagggttccaaacctcggttggaattttgggatgttacaaacctacccacttaaaggaatctcgccctcgagattcagacggggctcgagaaaaggtaagggtattccctcctcagagagtcctcgctttcccaggtagcttcctcttctccttctctgctccactgaactttacagagcctcacttctgagttgcgggtctttcggactgctgagtcaagaatctttattggcttttcccagtactggagatctttttgaatctggattgtctctgcctcgatgtggttctctggtacttgcaggcacttgcagagttgggacacatgaaacacgttgtggatatctgacatggattctggtaatttaaggcggtatgctgcgggtcccactctgccaatgatgggataggggtcgatgaatcgcggtgctagctttcctttcacttggaaccttttgacaccacgcatcggggagaccttgaggtatacgaagtctccttcctcaaatctgagttctctccgtttgttgtctgcataacttttctgccgactctaagcttcaagcaatcttttgcggatcaaggcaactttctcttcggcctctttaacaaaggcaggtccttccagtgtcctttcccctacgttggaccacattaggggggtctggcactttcgtccatacaatgcttcgaacggtgacatcttgatactggcctgatggctgttgttataagagaa

SEQ ID NO: 13875 - DNA, 358 bp, Zea Mays
aaatacctctgaatctctttatgcagtccattattcttgtttcatacttatacacatggatgaaaccatcacatgtcccggctacaaaccaccgcttccttgcaatgaatttaacggaataaacatcatgttgggtgttcaagctattccgaggaaggcttgcttctcccgatatgttaatcaaagacatcattttctggcatgaataacatatcatttttgttaattcaaggaaaagaagaaaacattacttcatgataataacaaattaaggcatagtgagaaactaaaaaaatacatgcagtatgatgagtgttaggctgtcaccagttaacaccctggtttttgttgcaatata

SEQ ID NO: 13876 - DNA, 596 bp, Zea Mays
cagacgttgactgtcccctcgggcccagacgctggaaaattgggcgctgatgccgcccgccgtccggacgtggagaattggagtcgtccgaatgcctcccgccgccatcctcatgccgatcccgtccatcagccgcaggggaatgagctggaggggggtcgaaattcgtcggaaccatcacagcagtaacagccacctcaatatcataggaaagacatcttttctcctgcacatccgtccccggctcaacaatgaggagcttcatcggccgagggaacaaatctgtgttcaaacaccatgcacgaagcctgaaggaagacagatcattcttcaatgacgtgctcggatgaatgtctgtgataatgcaagagtcacggagcagatactccaccgtagaacgatcccatgcgtgggctgggatgccatgaacctcgacttccaccagtgctggcaacctagccgcctcagcatgagccaaccgcgaccaccgtctgcatctcatgttcttgtttgggaagttttcaaatgtgtttaggcatcgatttgaatgttttgggactttttccacttttctagaattcaatccaatgatggaa

SEQ ID NO: 13877 - DNA, 486 bp, Zea Mays
ccgaccttcgccgttgttccccagtacagggcacccttcggtggtggccccagcggcaacctctacggcaacggccccggccacccgtatgtctatggtggaggaggtgcaccctcgacgccgatgtttcatggggcatcataccagctgccggttgccccctggaatcccgcacatggaggtgcatggaaccaggactccctcgtgcagaacttcaacaccatgacgctcacccccccggcaccatcggagtggtacgccgactctggtgccggctcgcatatgactgcggatgctggtaaaatttccaccctatcctcgcccacattctccacaccttcgtctatcattgtgggcaatggtgctttacttcctgtcactgccatcagatcacatactttttcttttccacatcgcaatctagttcttaacaatgtcttagtttcacctcacattattaagaacttgatttccattcatcgtttt

SEQ ID NO: 13878 - DNA, 397 bp, Zea Mays
tggtggtgatccgacatgaacgtccatagaagcagccaaggagccgtgctcggcaccctcaggggttgggtcatcctcagcagcaccctcgagggctgggttatcctcagcagcgcccttgggggctgaagcaccctcaatcgtacccacaggagctgggtaacccttgcatgtaacatcaggaaccaaggtgtccccatgaattaggccgccctcaaaggtcgaagaagcatggaaaactgtccgagttatttcttgcccgactggattactagctgaggaggtgtcatctgggacctctacacggatggcagcacttttagttttaggaagctccaataaaagatcttcagggataatctcctccagtgcatgatcaatggcagacatcgtcaac

SEQ ID NO: 13879 - DNA, 366 bp, Zea Mays
acgtccactgctgcacacttttgcacaggcaagcccattttatccactaaattttgactgacaaaactcagagaactgccagagtctatcagattcaccaacatctggttatgcataaaaccttgcaccatcatacatccatcactttccattccactgatagcatttagagacagtttatacaattcttcaacctccttgtcttcggactccagatgctccaacacaggatcagtcaacaccatgcccatgtcttccacagttaaggcatgcaactgaggcaccaccctcttgggacacttcccttggtgacctggctcaaacttttcaccacaagtgaaacaaagtccattcgctcttctaaac

SEQ ID NO: 13880 - DNA, 471 bp, Zea Mays
cgacaaggcacgcttcctcttcctcttgctcctctctgtccatcaccatctccatgtccatctatataagccgcgcgcgcggcagccggcagagttgcttccgccaccactactcctgcctgtccctgtccccgactctctctctctccctctctcctgctagctacacccgctgctgtgctgacctcctccgatcctctgcccggcaacaggaatacagcaggggaggagagggggggcaaccggcggcggtcggtcgcggaggatggtgaagttctcgcgggagtacgaggccagcatcatccccgagtggaaggccgccttcgtcgactacaggtgcctcaagaagctcgtcaagaggatcaagatcgcccgccgcgacgccaccagggaagctgggggaggtagcagcagcgacgccaccagcagctacggcttctccgtcctcgaccccgtccgcgccctcgccgc

SEQ ID NO: 13881 - DNA, 659 bp, Zea Mays
cgaaccggtattccacaatctgatctaaggcattaatccgtgatcggacggttcccgatcgatgtccagctcaaacaccctctcctacccctcttacagccaacaccggtcgaccgcgcacattcctacagtggctccatggccggcgcacgacgatccagcgatatcgtggcaaaagtttcaacctgagtcatcctacatttagaatagccttagatgaactcgaaagggaaacttaccagtgttggttgtcgccggcgtaggtcaatcgcgaggatgggcggatccacgactccgatgagcaattggtgggtgcttagtcaacgattccgcacgccagcgccacagacggcttccccaatggttcacacaagtctccagtctaacccaaggttcctgcaatggtggggaagtggatccacgatgacacggagtggactcaaggcgaggtcgtggctaactccttccttagtgggttgggtaccgattcgcgcccatgaccgcagcacgggacgcggcgcggcttttatagtcatgggtagtggagattataacaggaattccaaggttagcggatcaccggctccacgcgcgcgcggagatcgcgcgaggaagaacaccgggcgtgagagggcccactggcagagaaccaactccaa

SEQ ID NO: 13882 - DNA, 440 bp, Zea Mays
cttgtttccgagcgggaaagcagtagtcatgataaaaaaattcgatcacatcaaaaactctgtttagtctccttttgcctcgagcactgaaggcagtgttcattgcttcgtcctctgccttcataaaagcccccaacaactcatcactagtcacctcaacggcttcaagccagtcatcattcggctcgccaaactgacttctgtagcgataggtgtatctcagataaactaggccaccttcgctggagccagcagcggtgtccttcgacatctcccagtcattaacaagcggccatactttataagcaatgtgctcctaaaccaaatatctggtgccgatgtaagtacacattgtgttgaaggccatcaaacatgcttgtaccttgttttcacttgcgatcagaggcctcctgatgccaaaaagtgatcgtatagggcac

SEQ ID NO: 13883 - DNA, 378 bp, Zea Mays
ttcagaggtagccgaagccaaagtgctgcttgctgaaggacagaggcctgactgctgaagccgtggttgctgattttgtcttcaagaacatccaacctctgaagggcagagtctaccctgcttacttgtacactggcatcaacgattctacccaagtcactaacaggcaaattcccaatgaggacctgctaagccgacttgatatgatactgaggggtagggtttcgaatgttggtgcccccttatcttattctgcatggaacctgcctccgcatagtcccttctctgattttgtctccaatcctcccgcgctcaagatggtagcccgggccatagagtgcgaccctcctcagaggacattgaggccttaattgctcc

SEQ ID NO: 13884 - DNA, 403 bp, Zea Mays
aaaccttattcctcgacatatctatactactctattaagatgacagtgtcagcgtccacaaggaaatgaccccgcctaccccaatccgcccacaaccgcgaggccccgccccgccgtaattccctcctacgctcgcgccgcggccgcggtcaccataaccctctcccctctccacgtccaccgctgcccccacccaacagccaccgtccagccccctccttgccctccatctgtgaccgcccaatctctaaggaatggatcgcgacaggccaccgctcgccatggggtgctcgtggctgtgaacgaatgccaacttgcagaaccagggctcttcgattcggtccttggcgccggatccaattcttgtcaggtgatacagtcctcctccttcatttccccctcg

SEQ ID NO: 13885 - DNA, 429 bp, Zea Mays
caccactggatgagattccattttgagcgagaggatgttaccattcatgcaagtcagattcgccagttgtttggatttcccgagtcatcgactcatcttcacagcttgtgttatggctcctctgatcctccttgtcgccctcatggcggagttgctcctggtacagctcacgtcgcggctctgtttcgaccacccttctcagatgggtcgcgacattctccgacagacttcaccacaggagccaagtttttatatcagcttatgagacggacgcttctgccacggataggttacagggaggctgccactcatattcagctttggctccttggtgccctagtttctcactcagagtttgatgttgtggattttctcatttgtgagatcgaggacaccgtactggatggtctgcgtgctcgtcgacagctg

SEQ ID NO: 13886 - DNA, 552 bp, Zea Mays
gtcggagcagggcggacgcaacgagaacaggactggccgcactcagtcaggcatgcgggttagagcaacatgacgactagggaaggcattgtagggcgagcacaatcgaagcatgatcgacctctgcgaggcacacccgaggcaggagcggtttgcttgtagcacacacacgaaggatgatgaagaaaaggtgtccaaggaaaaatgaaactggtatgtgtgtaacaagtggcattggtggttattttccccaactatatcaatttaagagtttggtgaagcaccctttgaggagcttcactaaaaacgaatctgaccctaagataacccattcgttgaatccagattttgtaaacctagaacgtttgggtcacctgcgcacccgccatcttcgacgaggatggtgggtcggcgtcacctacgcacccacaatctttaacgaggagggtgtcgtggacaatggtgatgacgtgcagggaccaccatcattgattcctccggtgcacctgcgagatccagcctcgcccaaacgtggagggagttcaaccatgc

SEQ ID NO: 13887 - DNA, 498 bp, Zea Mays
aagcacgaacactcacttgatctaaacaagcctaataaggatgatggatgcacacttgttactctgtatgcactaattaggttcctaatctcacgatttcatcaaatcttagacaacctcaccagccaaaggctctatctatatctctaatgtgtttctttggcaaaaataaatgggcaagaacactaaaattaacaagttgaagggtatttatactccctaaccaccaaactagcagttagaagaactctggcatgaaaacacatgtgtccgacctattcatagggcccgacaacatgtagagcggaccctagctcctacaatcataatgtctggcccgacagcacacgtcgaatcagtccaatgcgtgaaaaacctctctatctgtttatggactgtgtcgagctgagacgttatagtccgacgaccctgatacacacagtcatctagcctttttaaacaccccatgtgtaggtgcccaaccaaactcaatggtcc

SEQ ID NO: 13888 - DNA, 475 bp, Zea Mays
gccccatggccaggcacagaagccgcgtgcgcatcacagccccacactggttgacagagccggtccactggccagtgtcattcacccctacgtttcactgactcgtgggcccagtagaccagctccctctgtcccgcacaccttttctccattgcagtgtgggcccttgcgctcctgtagatcttcctcctctccctacccgtaacagaaggtcgtgtttgccggatctcgtgcgtccagctcggagcccacccgacgccctataagtatagagcgggcgacctccttctaccaggagcttgaaactcggccaccatcgccgagatccggggggcgattgaccctgccgcaggaagaggatcatgccgccatgtgggaatttcggccacaccgctgcgtatctctcgacgtgtggttgggggtgttcgtgaaggatacccgaacggagacgtggcactctctagtcgaatgggcg

SEQ ID NO: 13889 - DNA, 679 bp, Zea Mays
gccggaggggctgaggggaggaggatgggggtgggggagaggtgtcaagatccctatcctctcctcctaccatgtgaggcatgctggaagtccatcaaccaccggatcctctccagccgtctcgcccccgcggtcctccccgatgagcacgcgctcgcggagtccatcaagcgccgcctcgggctgccctgatgatgcgctctcatccgctgacctccactccaagctcttcgttcgtgtccgccgagtgtcgctgtggccactcctctacctgctcgactcgctctcctagcagtaccgcgccgcttaagttagacaaacatcctagttacaaggtgaggcaacttgagcagatctggtcttttgcgttctgatatttgctgaatcatagatacatctgaattaggttgaacctgctgagttatctctggatcttgctaagatgtctcgtgaaattagaggcagtccagagatcttgtttgcaagagaagttgcaaggtagtcataccatcaagcattattttgtgcttaccatatttgtactagctttcatctaatgcctacatttcctatacattcagagcatgcagaatgaggaactttatttccttcttccgtcttgcaaggaaagctacatatttgcaggcctgtttgatgcatgctcattttgcaaaggtag

SEQ ID NO: 13890 - DNA, 653 bp, Zea Mays
tttttgagagggaataagggggaacaagcctagagccactctggttgctccaaaagaactatcgcgtctatatacctaccggcgacaaagggggagaagccgatgcgctgccatcatctctcaaaattcaaaagggcacatacgaacagagattagctaagcaaagaggaattaaacaggttaagagtatgattgttctttacatggtcgatctatcggccgggacaaacgaacaccaccaaaagaaccactgttctagaaatgctactaccaccgaagggaaatcctactaactactcgaccttgtggcgcttcgggggaggagacgcatcagctttgggatcatcgccattgccactggtgtcatcgctctccttttcgttgacgtcgccgatgctggagctgctggcgccgctggacccgtggtcgacattgtcgtcgtcgccatcgccattgtcgtcgtcagagaagcagacatagaggggtggttctggctcctcctcctcagaagacatggcatcctcctcactattcgacgactcgttggctccatcccaggggaaaaggtcatcctcgctgtcctcctagtcctcgccgaggaggagctcgaggtcctcgccatcgatgagggagagggcatcctcggactccac

SEQ ID NO: 13891 - DNA, 1273 bp, Zea Mays
gtgagcatgtcgcaccgccttaagtcattgccgacttaagccgattgctccgtttgtagggtatagtggtcaccctcggttaagtaagcgtgagcatgtcacaccgccttaagtcactgccgacttaagccgattgctccgtttgtagggtataatggtcactctgagtcgagtaagcatgcagattgacaataaacggttcgagtgcctttgagaatgaagtctttttattgatggtgtatttcccaattacagaatacaatgccatcccaatagcttttgaaatctagctaggggtaaaacttcttgagatgttctatattccatgagttccctattttcatgccatccatttgagtaagacgaaatgatccaggccgagtgacttatgctactatgaatggtccttcccatagtggcgataatttgtgccgcccctcccccgctagaattcggcggaggacaagatctcccactgcaaaggaccgatgccgtatggccttatcatgatagcgccttagagtttgctaatacctggctgactgaatcactgtattcaatcgttcttcttctagtatatcaacgtcctccagtctagtagcctcagcttcagctatgttttcaaagatcaatcttggtgccccaaacttgagatcagtaggtagcactgcctctgaaccataaaccataaagaagggagtgtttccatgcaaagctcggctgggttgagttcttaggctccagaccacatacggcaactctctgatccactttcctgcgaacttttcattcttgtcgaagactttctttctgagtgcttccaatatcattctgttggctctttctacctgcccttggctcttgggtgtgccactgatacatatttgatctggatgcttttttgttcgcagaaatcaaagaactccgagctagtgaaattggatcccaggtcggttatgatgctattcggtattccaaacctgaacattatgtcttgtatgaattccactgccttagctgaagttagagaagcaatgagcttgtactctatccacttagtgaatttgtcaatggcaaccagtacatgagtgtatcctccttgagctttcttgaagggtccaatcatattcagtccccagcacgcgaatggccatgttacaggtatggtttgcagttgctgcgctggtaaatgttgctgttttgataagtattgacaagcttcacacctctggactaactcggctgcatcactctttgccgttggccagtagaa

SEQ ID NO: 13892 - DNA, 364 bp, Zea Mays
cttacagtggccaagttcatggctgctactcttgttggtaatgttagtaattgaaggcccaaggtgacattggtggcggcttattgttgcacaattcggggaagtttcagaaccaccagagcttagagtggttgttgctggaatgagtgcacctttgatctagccacgcccacagagatccatgtgtcggtaccctgaatcaggggtaccccttactacagtatgaaggcacggtgcccgtgcggcaatctctagccgcacggtgaacaacacccgaccccaccgcatggacggctccaggggcgccacgtggccagaaaagatgatatgtcccaggatgcaatcagttggaccagacctccac

SEQ ID NO: 13893 - DNA, 370 bp, Zea Mays
gggggcggtgtcaggtataagctctatggcaaattcaactttcctttcaggtgccatgcctggtaaatccttgggaaacatagttgggaattctaacactgccttgatagcttatggtggctcaatttcctcaatatgggcggtgacttggtgacagcttcctttccttggtccagacaagaccaactccactaacacttcctctcctaataaggacactaacttcacagtcctcttgtcacagctaaggcttgcttgatatttggttagccagttcatccctaggatgacatctatggttacatcccgggtacccattactatcggatcataggggaactctatccccttatttgaactcttgcactag

SEQ ID NO: 13894 - DNA, 612 bp, Zea Mays
tagcgagctagacactaaatttttaagacaccgtaaacaaccatatgctagcattagctatctacacttcatcgagcgcaccacatcaataccactggaaggacgacgattactacctataattaaccaacacaaacaggacatcacaagtatgagcatttagttaattagctacggcttttcattagttcttctattaagcacacaaaaatcatcccaacacaagtttaatagaggacctatgcatcaatgtcgatagactcctatatcacaatcaactagagaagaaacatacaaaacatgacacacatgcattattaagcttagtcatggcaagtctatattaattaagtgctaaccaagcatttttagccaaaagggtgaactcaatcatcaaatgggcacttgcagaatttttggacagcaatacagcagttgcttgttttaatcataactcttcaattgttagtccaaaaatatcaagctagaactttttggaaaacttaaaaaatgctctacaactttggtattgtcatcacaacctgattcagcacttagcaaggtcaaaacgtgctaatacaacagcgctgtccagatttggacagattcaga

SEQ ID NO: 13895 - DNA, 323 bp, Zea Mays
gcggttttcctcctacacacaagaatcagctctcaaacgtcaaacaggcagtaagaacacagcagagaaaaacatgcaaagaccagtttatcagctacctttttagaatcaagctgggcactgagagaggaattcagcatgttggcattatccaaagaggcagacagccgagccaagtccgtctggccttgagaatacttctcctcaagggcagagtattgccgagccatatctagcaagaaatagtgaaacaaggacattcagtaagaaagcagaataatcaagcagccaaggaggaagcaaaaggcactaaccagcgttcg

SEQ ID NO: 13896 - DNA, 598 bp, Zea Mays
ggaaggatcctttgaagtgcctcgacgacattcttttcagtgtgcatcacatcaatgttgtatggaaggagcatgtcatcataataggggagccaagtcaagctcgacttatgtgtccacatatgctactcaccatatcccacaaaaccaccttctggattggccacgagcccatctatctgttgacgattttcggcaccagtcatcattacaggtgggtggtctgtcactatgacacctttcgtaaagttcttgatgtctaggcggaatggatggtcaggagggagaaattgttgatgtttatcgaacgacaaaaatttgccacccttcttcaaccaaatgaacctaagagcttccttcatcggaacttaccgtgaacacaccaggcgcagaatagcccatacgccagtaagtcatgcatggagtactggtaccaaacatgcattttgaagtttgtctttgtagctcgatcatacgtccataccccttcctcccaagcacggaccaattcatcaatcaaaggctctatgtacatgcccattttattcctcgttgtccaggaattatcaacgacacgaatatgttccgtctttgaaag

SEQ ID NO: 13897 - DNA, 1326 bp, Zea Mays
ggaaaataacagatatgtagaaagtacttatcagtaaaacatttgttggcagcaacaagtgttatgcatgaaacacaagatcaagtgttgaacattacaaatgtttgtgggtcaaggcaatgttgaggcacacctctgattaggcagctaatcatagtgaaaggtaaatgaacatgtcatgaattgtactgaataattaatgaaatccgtgtattcatgaagtaatcgggttgtcattcctcttacatttattggtcaagactacactggtttgatatggtaccattggtcataaacaccacaaatacaagttgttcacttaataaatatctgcttcattggattcatcttgactgggcaaaagcagtacagcggcatggcttatgttaggatacgaggttgcaaaccttgcttgcattggcaactaagagtgaactcgaaattatgagggggcgtctgcatcgactacaaatcgtaaaccgaaacaagggtacaaagtttgttgcagcaggtacctaaatgggaggatgaacaatgtaacaaggtgagagcttaaactacaagtgcggatctggtaaagtcgtaagggttggggaaaataaactaggattgttcaactaaaccattggtggtgtaaatcattgttcaatgatttattcatatgacggggtacaacatggtatacctcaacacgggcggatctcgcccggtacacggggaatcgaagaaaaaaacgagtgctgttcgaaatgattcgtaaaataagtatggatttgacgaggttcaacaaggtattaccttaagaaggggagatctcggccgcaccacgccgaatcgaagcgtctctgtgtggatctgatggagccgtccaaggtcggatacggaaggcaacgaatcgaaagcggcgtacctcgtgcgacgcggatttgaccccgctttgtcttcggtcgcgaacggaactgcgtggagacgaagtcgagttcgtcttctgcgcaactgagcggggccagggccgactccacagctcgacgggaggttcgccgccgcgtcgccgcgcaaaatctctcttccgcggacgattcgaggcgaagcgaggtggaccgggaagtttccgttgtcttccgcggtcggctccgtccgcgcgaagaaggcgagggggcggctacagtcatccgctgcatgtggcgtgagagagaagagtgcggcgaggtaggggagagggtggcgctcgccgctgcgggaggtaggggcacactgtagccgctataggatgcacagtaatagggtaggggaggtgtagggtgaagcgttgcggacagtctaacc

SEQ ID NO: 13898 - DNA, 657 bp, Zea Mays
ggcaagagtagaaaagtgggtcgacagagagggtgtcgcggcggcgttctacggagcagaggagtgttccggtgatgggactctggcaaacttcaattggtcggctccgagagcaataggaagctataaacaagctagaacaggaagcaatcggggagttactgacctgaggagtgctggccacggaggagttcttcacgacagcgcgaagaacagggcagaatggttttgtggactgtgtgagttcttctggtgaaattgagtcgattgctcaagtgcttgtatgcgctatgtggtgaagaagtaggattcgagctcaatttataggccgatggctggagttggatgagaatcgcggagctgtaaccgcgctggcgagctcacccgcgcgggcagagccacgacgattatccggtgaccgccgattaaccgggcaatgccaccgcaacattttaacaccacgtcgcggatgatctttatcgtggctgcagacccatccccaaccgctgtggcattcttatcgccagtgagatctttctgaagttccatgaacagtgcgccagtttcagttaaaattcgcctgacagcccatctttggatcatattatctccaaattcctcatggtaccaagacttaatacatgtagcaaagttgtt

SEQ ID NO: 13899 - DNA, 714 bp, Zea Mays
gccagatggtagtctcccagccaaaggctgaggttcgattcccctaaatactttatgatgttggtgggtgccctgtaccactagggcgctggtgcctggaagatgtgactgccaaatgttgaggtcctagagttggggggctccgaatttggtcttcgtcaggattaaagtgtcctccgtgacgctagttgtacgaacgaccgatgtttggctcctcccgctctttctgccaaggcctagggtcgagggtgatccgtgcgtttccaattttccttgggcaccgatgaggcaggacatgtgccttgtcctccttctcgtactcaagcatctgccctaatgaagcatggattttcgatggtgtggatgcggtatgctagacgtccccgggctcccagcgctgtgacatagaagatcctggatttcgaggtgtgtccttcgttcacccagagtgttagccttggggagtttgtcgaggagcaccgcagcggctgcgacgctctgggtcacctaagggagtcgtgggggtctgctcccgtcgcggatcatgtggcgatggacgtatgtcgttgtggcgcgcatccactcaacatcccatcgtgcccgtcgtgatcgttgtcatggtgcccttcgcttcctggtcgggaggcactagctgctttgggaggactcggtctatgcggcaacttccggtagggcaggtcaagctacggggga

SEQ ID NO: 13900 - DNA, 385 bp, Zea Mays
ttgttccccatggggaacaatcagttctgacttctgagtttcctcttcatgcctgtagtggattgcagatgaggattcgtgtctctgctcctagggctgtctctgagattttgtggccatggtgcaaaacataataattgcccctgattttgtggccctggtacaaaacataataactgcccctataatttactatatagtgtatatgacgttccttcaattcctgctacgcaaacctactacgacatgtgacgttcttcgatggccgatcaatcaggagcgcagaaattctctcgcgacacttgacctcgccaaaccccgtccatccacttacactactatgtctacgactacaggcgacgaatgcgagagggatcggctggta

SEQ ID NO: 13901 - DNA, 392 bp, Zea Mays
gaaggtgcggacctcccaactgacgccatggacgactggagaacgctgtatcacaacttcttatccagtggcttgcttccccaagatgaatcagaggcatgaaggcttcatcaatgggccaagtccttcgtcatgattggggaagatctctaccaaaaggggcatattggaataaaatatctgtgcatcccgatcaaacagggaagatagctcctagaagacatccacggtgggacatgcaggcaccatgctaccacaagaagcctcgtggggaacgccttctggcacgatgtctatttgcccactacggtatcggacgcacactaggtggtgagaacatgcgaaggaagccaatactacacacgacagacccatctacccgcacaggcact

SEQ ID NO: 13902 - DNA, 537 bp, Zea Mays
aaacctggtatcacaaaaggtcattagctagcccaataacgtcttcatccactagttgtactctaatatcctcccgtgcgaatacaatgcccttaacatgagggaaacatcatttttagtttaaaaggtgatctattgttttgaattctttatattcctacttattagcaactgtttggtggaaaaaggtgccttacaaccttaaactatgtttggacagttctctcgtgtaatttggctaaatttcccatggtctttattttattttgagaaatgatgtggcataatgatgtgcgatgatttacttgagtggacataaacactatctaggtatgccttgaatagaggggattataggaaacctggtatcccaaaatgtcattagctagccctttaacgtcttcatccaccagttgtaatctaataccctctcatgtgaatacaatgccctaaatatcatagaaacatcatttgaggtttaaaaggtgatgtattgttttgaattctttatattccaactttttagcaactatatgg

SEQ ID NO: 13903 - DNA, 1065 bp, Zea Mays
ctaagatgaattaaatatgaattaaacaagtttgagttgcatttattattaattttaatgccaaaatagatgccagggacttttctgaaaatttggaggaccgatctacaattccagaatttatttccgaggtcaccgctgtgaaaggtaggacgacgggtttattttaatgaaaccgaggggctattttgcagttttggctcggcgaaggggtaagctcaattctgggccgttcagatctgacccgagggccacaaatagatcccgcacatcgctcaaccacccactcccgtgaccgcccgattaaagtttaacggtcacgatataaaagaacccggatctaatccgatgcgcacaatacgggatcaacgactcgcagcgaaggggtaagatgtgatctaatctcagccgcagggaaccaatcaaccggacatggcggcacgcgcgctctccttctcaaacaccgtacagcgacggcggcgccgcccacaaggctgcggtggagcatcgccggagtcgggctaaatcccatcgcgaacgcgttaatctcagaataaaatgacgctgtacgttggcgggggcaaggcgaaccttatggggggaaattcacctgcggtgccggtgcagaggactccagggacgagaacgcgcggcccacggcggtccgagcagctccgacaagcaattcgaggtcgaccgccacgcaatccgccgaggcaaagtcccggtcgtaacccgctcgaccagaagaagctcccgcacccagaccgaggcctaaacgctggggaaccagccggtcgacgacggcggccagaagcttgccccgatcgcgattcaagacgacgaagcccaagtcctgctaggtgctggattcctaccggagttgagcgctcacagatgagggagacgagacgattgcatgggagggaagactcaccaagccacgaacacggcggagctcaattccacgacgagctccacccgacggagctcccacggcgccagagcccacaatcccacgacgcggcaccacagcgcttcttcctcgccgacggcaaacaccac

SEQ ID NO: 13904 - DNA, 306 bp, Zea Mays
cggcttcagaggcggtgggcgtggtgctggtcgccgaaaggacggcacaacatccccaggggagtcaggaagttcccctaggagaaggtggtggtccgaccaccacaatgttgacggaaggccaggagtttgaggactcgggaccaaccgtaggggtccgaaccatccagaagtcagtctactacgttagcgaggtcctccatgaggcaaaggccaggtatcttgagacacacaagcttatctatgctgtacttgttgcatccaggaagttgtgccactattttcaggcacatagggttgtggtgg

SEQ ID NO: 13905 - DNA, 459 bp, Zea Mays
agactccaccctaggcatttcaggatgatccataatcctagctcaagtgacgacatgggaaatcatactcaagggcatcagcacagctcccaagcatcaggggcacaacaaagctccttcagccaactctaagaggcagaggaggtagaagcttctgtggaagattcaactaccaaccaagaaggttgttttgcctattctatggggaacataaggggcatacaacaagtacatgccaagtcacgattcagaagcaaaaggaaatagctgaagccgaagcacggtagaattagccgaaccaggtcctgcataatgcttcgtgctattccccatacatccacaagtatgtgggcaaccaacaacccacaacattagttgcttcagcaagccactcacaagctgcatgggccccgctaccaccaccaccacccatggctccaacctcgtctcacaatcaac

SEQ ID NO: 13906 - DNA, 503 bp, Zea Mays
aaggccagcttcgagcttcgggaaacccatacttctgactatctcccggcagacggataattctttgttgtccgggaggcagtaaaaaagtcgtcctcggttgtaccattaaatactagggcttccttcggatactgcaattcccgggcataatgtttggcttcagaaatttcttcttcggatagtctttttcccgaagcatgtctaacaatataatcaaaaccttcggagggtgcttcgggagtaagggattcggcttctttcgccacacttttctcaaaagctatattagtatctggagttattccttcgcccccctgctcggttgggacaagcttcgtatcagcaggcactgtgggcctagcctcggtttcaacctgggttattgtagcttcaacttctatttgcttagtatcagctttggattgcgttttgtcagcttcggcaaccttccctgtgggagcggggcttatggaatcggttgtttccaaaatatctaatac

SEQ ID NO: 13907 - DNA, 386 bp, Zea Mays
ctacctagagcatatcatcatccaagcaaaaagcagcagcagcttctccaacagattcagattcatcagaattcagacaataggaaagataggaaagggggagaaggggggaaccttgagatgaggagctcatctcgtcgctagtgttttggagacgccgccggtgttctggagctgctgctggtgttctagagccgcagcctgtgttctggactcggcagaggagaggaaaagtttcaaggggtgacaaggggtggtggcgcattgcctttatactactgtagatgggccgaaaaaatagaagcccagtagcccactagaaaaccctagccgcctggacaaatcctggtcgatttaccatctagtcggacgactaatcgccccta

SEQ ID NO: 13908 - DNA, 608 bp, Zea Mays
cagagaagtgtgtcatgactgtatacattagatccagtctgcaccatgtggaatggagtgtcactgctgcggggcacagattcaaagacacctgccaagtcgtcgctcgcaaggcattgagggccctatgtcaaatttatgaagaagaagtggccaacaccccactcagattctttccgccctttcagagataccgtcatgtttggatggccaggatgcgtgcattggaagggtagtagctgcttgaggacgaccccacagtcgtctacctcactgcatacctgctcaccctggatgcacagtatgatttcttggctcggcaccaccgtcagatgattgcccgagcagaagatgcagagaagctcaaccgtcaggtccatgtggatctcacctcagcccaagcccatgtagctaccttggaaagtcgtgaagtcattgctgttgaagtcctaaagcaagccaaggatgagcacgtccagaagttgatggaggcctacttggtaacccgcaaccaacatagggccctacggatccaagagcccgcttcatccaacccagttcaacccatgagagctgaagatccccatattcttgaaggtcacccggtc

SEQ ID NO: 13909 - DNA, 512 bp, Zea Mays
gcgtgtgcaaatcagggaaataactgagttatgttgattggacgtgatgtgtaaatttaaaaatagtaggtttgtgtgtagggtgtattattaaacatgtatgtcgatgtattaaaatagtgattgcgttaaagtcgtttgaagtattttgaatgcatgacgaagatggttgcattcgacataggaaaagaaacaggttgtgcgataaaaaggctagattgattttataggtcttatgaaaaacgttctattaagtgtatacgtcgagtatgttaaatggatcctacgtatgtagagtgtagtgtattggttaggcgaagaatttttgaatagacgagtatgaggcgtgcagttaaatcgagattgaagtgcaaatcctacgcaatgtgatgggattcgtggtaatataggagttataattgttgatgtgacgagtagtttagcgaatgctcgtttgcgtggaggatgtatcgttaagacatgagtgtcggagttcatttatattagtggtc

SEQ ID NO: 13910 - DNA, 372 bp, Zea Mays
aagtaattattatgcccttctgatccacagtggtgttctgaaatttattttctgcaagcaccaccagcatgcagactcttgcttgaagcagatcagcctgggtctgcactatgcagaatcaaagccagacttctcgccgattggctctgctctgctatatagtggagtaactgtggtcaaaatgaggccatgacccaatctttcgcgccataaagaaaagagacgccttgcttgacctatgggttgccagcgtcgagagttccacccaataggatagataggatggggaagaagtcgtggtcccatccatccgattggcgcccataaaaagaggtgcttgtgcttggagatttccatcgcacctgcttctcg

SEQ ID NO: 13911 - DNA, 298 bp, Zea Mays
gaagcatctacaaggacccgaataacgggtagtgcgctgaagatataccataccgggtgtatacctatgcacgccaacaagtgacgcaagctcgtgacgacacgcaagaccgcacgacgtgcgactgctccatgcgactgacctgcgggaccctccgcgcactaccatgaggatgtcagtggaagactagcaaaaggaacccatacgactagcggacgcgacataacaccatgatgtgagtatggttacgcatgaccctacggaaaacactagaggaaccacgctgcccaagggccac

SEQ ID NO: 13912 - DNA, 380 bp, Zea Mays
cggacagtaacctcgttgatgcactcagtgatgcgatatggcccaacgaaccgtggtttgagcttgcccttggacagctgcggtagtgaagaggcagcgtgctgtcggaggcgtagaagcacccaatcgcccacggcataggagaccggccggtgcagcttgtcatagaaccttttctggatggcttgagcttgttccagccatgtgcggacgtcagtgagaagttcctcctgagcagccatggtctcggccaccgcagccacccgcgtctcgcctggttcataggaccagatagatggggtcccttccatacactaccttgaagggggtgtcccggagtgatgattggtacaccgtgttgtagatgtactctgcccatg

SEQ ID NO: 13913 - DNA, 760 bp, Zea Mays
tgagcttgtaccggccggattacttgatgacgggtgctctacttcagttgaaaccaaattcaaggcctaacaatcgtttcccctcaactaatttcacgaacggcgctctaaatcatctaggccacggggacagcgcagaccacaagtgaacaagcgtgttcccgacgatctagggggtcctggtctaattggctgggtcgaggagcatcagggacacacaaggacactaatgagcacggggtatgagcaaacctggaacaagctagccccggcgagggtgtttctacggtggcagaaaccgatttgggggaaatcccaaattggcgagctctgttgatcaattggaggcacggtttagtggcttgggtgcttgactaccttacggacccgacgacacacttaatttataggctccgggggcggtggccagtgaatttggagttgacgcggtggtggtcagagagaagagttgcactagcgcaaagattagtggctttcactgtggcaggctcaccggcgatcaccgggcatgcctaacacgagcgactgcgacgtggtaattgtcgaggcacgtggcgttcggtcagtaggtggccaacttcggtgaattatctgaaccagccgcaaagcagaaagggggtgcgacggccagccggaacagtgcccatactcaacagcggtgaagatctttctactctggggtgttatccgggcctaagcgagcacaaatcacctcgccagcgtgaatccacgcgtgggg

SEQ ID NO: 13914 - DNA, 318 bp, Zea Mays
tgggtgtacaaggtgaagcgaaatgagagcggcgtcgtcgttaaatacaaggcgcgtctcgtggccaaggggtacgtgcagcgccccggcattgattttgaagaggtgttcgcccccgtcgcgcggctggaatcagtccagctactacttgccattgctgcgcacttcggctggggagtccaccacatggacgtcaaatcggcattcctaaatggggagcttcaagaggaggtatacgtccagcaacctccaggtttcgtcgacagcaagaacaagcacaaagtattgcgcctctggaaggctctgtatgggctccgt

SEQ ID NO: 13915 - DNA, 381 bp, Zea Mays
tttcgaagtattagaggtctcaggaaagccaacttatgccactactgttattaccagcgtcaactataggcgcccaggccacgtgggtagctatggggaaaatgcccaagatttttcttccttcgatattttgcactggtttcataaaataggatcatgattaatccttgctagaaggtttccgtaaagagaggggattcttccttagattatttcgctttcttatggatcaagtaagcctctctatttaaggagatatatatcaatctaataaagaaacacaattatctcgcctggcctcaagggccatctcccacttctctctcgcttgcttgctccctgtgtgtgaccatggctttttgtgtcgatggggttacacgg

SEQ ID NO: 13916 - DNA, 421 bp, Zea Mays
caccgaagtacgccaccacccaccttgctagccgaagggccaaccaccgtggcccaaccaacaccgtcttccaaccctcacgccatcaccaccaggagttttcctagaccctagtgaacctcctcagccagccctttttgcctacacgccttgccaaggtagcgtcaccgctcgcaggaccacaactgagcgctggtgcacgtggacccgcttccatagccaaccctagccaaattcctcttgggaatcgtcttcccactatctgaggtgcttgtccgccaagggaatcgagccctacctccgactagccggagcaccttcgctgtcgaactccgaccgccgagggaggtagaccggacgactccgaccaccactggccatcatccgaccatcgacgtattcgccagggcctccctgatct

SEQ ID NO: 13917 - DNA, 404 bp, Zea Mays
tgggtggcttgaaccatccaatgggatgcaatcaacaggaatcccgtctggacgccgggttgatgacggctaacagttgttgttcgattgatggcattagggcaatcaatcaaacatgacgaattgatttgacacggtatagctgaaagacatcgcgagtgaagacgacggttttgactcgcggccagatctacggatggaactgcaacgatggtggcaaaatccatggtacacttcgcttctctatggatgtgggcatgtggcttgttcgaaggttacgtgaactgtattcgatcagcgatgcatgatcccggtggctcacaaattggtgtgcacacgaacgacgtggaagagagctcccacggctggcatgagatatgtggtcatgtactcgtgtgcgccag

SEQ ID NO: 13918 - DNA, 314 bp, Zea Mays
gtgacaaccaactgtacgcaaagttctctaagtgtgatttttggttgaaggaagttgctttcttagggcatattgttaccgatggtggaattaaagtggacccaggaaagataagtgagatactaaattggaagcaacccaaggatgcgtccaagatcagaagttttcttggattagcaggatactatagaagatttattgaaggtttttccaagttagtgaagcctcttacctctctactggagaaaggcaaagagttcaaatgggatgaagcttgtcaaaattgttttgaggaactcaagaagaggttaacc

SEQ ID NO: 13919 - DNA, 533 bp, Zea Mays
tacttaacctaaggagtgacatgctagtttggaagatcaattaatgtagaaggaaaccttctgatatttgggattgatggtgcaaagagatagtggcattagcagaaatgttaaccgtagaatgaaagttagtgtggatgaaatgacaccaagaatctagcattctcttagatgtatgacaagaaggtgccacataggctaaaaaggcagggcccatagaacaacggtaaaaatacattgttatttagtctagaatgttgacataaaagtagacattcgatgtttaaatgttgtagaaatgcattagttgtattgttattatgattgaatgctccaagaaggggtgggtcaggttgaatagggctctaaaagaagttaaagcttatcaacaataacctatgcaattctacttcaagcattgcatgaattttcatagaaataataaatagagatggaacaagaagggtccttagcttcatgtcaagctgaaccatatatatgaagattgatcacaactaagtgcgtaaatgcaa

SEQ ID NO: 13920 - DNA, 1044 bp, Zea Mays
attcgggccaggatgtgcctgaccacggtgaccgcggatactgaactttgatcgaggtgttccggttgattaggtgaagtaaagctccaagggctgggcaggtgacgatcacaagcacatgtgggtgctaaaacacgaaaaacaagggcgaggacggacctggaatcagctagccgcgagtaagcggttcacggcggcgcaatcgaccaaattgggggaagaaggaaattcgctggctacgttggctaattgagggtgagaacgggtgcttcggcttcgtgataacatggcgcaactgacccgaccttcaatttatagaaatgctaagcgatggtgtccaattttgaaagagaagaacgatgaccgagaggaggggtgagtcatcagcgtaaactatcgtggcgctccctcgggtgatgcctccggcgatgaactgaccttctatgaatatctactgcgacgcgatacatcttctaagcacgtggcacggttataaatcgtcggcgaactccgacgaggacactgccgtccactgcgcgacaggtgtcgcggtgaatagtccggcgataagcttctctcctttccccgagttgagatctttctctgcccatgattatccgtgagtcccagcgcacgaatcgcgatgatcggtgttaatcgcggtggagagtctccggcggtgaggtgcgttgcatctctgatattttgctattgtaccatgggaagctctgtttatgacgcctgatagagcaagtttggcgttgattttctccgaatttcatgtgacaaccccatcatcccactgcatcaaagttatagcccaattaaccatctgcaatcttgctatggggatcatgcccaaacttgcgctggattatgttcaaatctgggttcaaagatcgcctcatcacactgtcagaccaggttcagtctccagacagcctgacaacccatctttgggtgtatttttcttcacatttttcataacaacagtgttgcatcccttaaacagagttgttctcctttgatagatctatagaattt

SEQ ID NO: 13921 - DNA, 291 bp, Zea Mays
gtgtgtgtgtgtttgctgtcacagaaatgctctggttggccatcctgagtggaaaagaaaaagatgggacgctgcgggagcatcctcaactacacaataaacacacctatccctcagtcatctcatttgccttgttcacttctagttcagaacatctagcattcatctccctttctatgcctctcgcttggttatacagtaacttgatcctgatagtgggcagttccatcccctgcaaagaatcgtcatgggaagcctcgcaagctttagggaacaatggctcgctcgctc

SEQ ID NO: 13922 - DNA, 456 bp, Zea Mays
ggctaacatatcaagcatagcacttatctctgcatcactgggatccaaaggcacctcaaagtgaacatgccattcatcatcaggaatttcttcaagcaaagcaaccaaagcactaacttcttcggtagagggtcgcactctaaggcccaaaccgccatcaccagcaggaggatttgacacgaaatgggtaaaggccttggaaggaggcaagttccaggtcgagtaggcaacaggggcaccaacatttgataccttgcctctaagtatcatttcgagccggctcaccaagtccacagcaggaattcttctattggtgacccgggtggagttagctaggcctcggtacagataggtcgggtatgccctgtccttcaatggctaaatattcttgaagacaaagtcagcaaccacagcctctgcagtcagacccctctccttcaacactccaacttcaac

SEQ ID NO: 13923 - DNA, 670 bp, Zea Mays
ggcggagacttgatttgggggaagtttgaaattcaagagctctggcgaacgatcgaggctaattcgtggtggatggatacttcactgccttacggagctcgcgacgggctcaatttataggcttagcgagcggtggccgtgaatttggacgagacacacggcggtcagaggaagggaagtttcactggcgcagtggattcgtggcctctaccatggcggtcattccggcgatcaacggagagtcactaaggcttatggcgatgcggtggaggtactcaggcacgtggcacaaggtcgaaaggcggcgttcaccggcgtgcctatcgacttccaccgcggcgtgtgtagtacggtggccggatttgtttatggccggagttatccacggcggggactcttgcttgatcccgagtgctacccacttggtcagcacgaatcacgcgcgaccaaaaacgcgaatccgcacacggtggtcgtcaacggcgagatatactgcgctggcggtctgatccacacaagacactgtaccatgggatgctccattcagttaacctgacagccatagtttagggtcgatttcctctcagatttctatggcatcttgcccaaagatctgcatcaaagttatagagctacaatccagctataactttgctacataggattccta

SEQ ID NO: 13924 - DNA, 912 bp, Zea Mays
gcaacaacaacagtactgtcagaacaaccagtaaggaggaaatcagtaccagcctcagaacaaccagacacctcgccttcctgccctagcaaccaaccaaaacaattaggcagcgccagcgcaaggaggatatcgtggatgtttccgcatggggggaacaaggtcactgggcggatcatttcccaaagaaggcaactcaacagccaccagctttcaacacctcagcaagacaaggagcaccacagcaagcaccaggaggtcgtggccaggcctacaattatggaaaggtgaaccacttggaggccgaagcaatccatggtgcaccagatgtggcagtaagtatgcttccagtcgaatcctatctagcaaaagtactatttgatactagtgccacacattcttttgtttctacatcatgggtagaagcacataacatccttgtagaaccaatgattccacctttaagagttaattcagttgggggaaaggttcagtctgataagatgtgtccgaatctaaggattgaaataagggggatagacttccctgctaacctagtagtaatgggtactcaaggtttagatgtcatcctagggatgaattggctgcacagaaaccaagccactaccagttgtgacaagaggacagtaaagttagtgtccccatccgggaaggaagtagtaactgaactgttcatgcctgaattagaagcaggagtctgtcaccatttgtctgtagatggcaaggaggccaacctgattgaggagattagaattgtgtcagatttccccgacgtgttcactgaggaattaccaggcatgccacccgagcgtaaagttgagtttgccatagagcttatcccaggcaccgtccctatttccaagagagactatcgagtgtccggaccagatt

SEQ ID NO: 13925 - DNA, 557 bp, Zea Mays
gtcaaaacgggtggcggcgagggaattgtgttgtgtcgccttcaaatggaaatgggcttgcttgcctgttgcctccaggctccagctccgatccagggggtgcttgcttgctcatgctgctgcttcctcctggagccgtccctttgatgcttgctgtcattgatgtctacgagaacacttgtttccgctgttcggatttagcaaactggctgtacgtgtcacgacgctgggtcattctttcacagcgtctgcctgccgtctaggatgccctctcactcgctctgccactgtctggaataagatgcattacatggagtgatggaagaagatgcatgctgtgatatgacacttggcagtcactgaatgataaatggctctgctttcaagtcaaactaacaggcttgtatgatctccagctgcaggaatccagtttggcagggttcaacggtagacagtaaccacggggttggttacttgagctgcacgatttgtgcacggctgaatctggaattctggatctttctttcgtgcctgtcgacacaccccatggacaatgc

SEQ ID NO: 13926 - DNA, 575 bp, Zea Mays
cgagatcttcgccatcaagggttgaaaccctaaacgacgttgtggtggaggacgggaggcggcgatagaggatgtgggcctaagccgcaccgtcgctgcatgggtggacagaaggcggcggacgaggaggtgggcctcagccgcactgctgctgcaggggcagacgagaggcggtgagggaagaagttacactgctggcacttttgggttagagttagtccaggccctagcagaagtcaatggctcctaacatttattgggtacctccggcaataaggggccccaagtgttcactagagggccctcccaacattcattgaaggtgttcctaatggtctagagccatgggcgtttacgggaggacctagcaatagctagggctctcgacatccacttagggctccaaggtcatatcagaaccccgagtgttcacaagagggcctaacgatggttgtgggcttctagcaatcactaggtcctaggatccatgtggggacttgaacattctaggggagcatatcagcgaccaagggcccctagcattcactagtcactatctaatatgtctaagtgtt

SEQ ID NO: 13927 - DNA, 323 bp, Zea Mays
agaaagaaagagagagtgtggtctatgcgccggtacccctgcaccgcttaatctccgggtggcgcgggcgctttggctgggcgagttgtggcgtccagatcttgttcgcgttcacgcccatcaatgaaagggagctctggcatccgccgtcgcgatgaagaagcgtgtgcagtgaatgtcgcggtagcgcagggcgtgttgaggaagatgatctggggagcgttggatcgaaacgaaggcctcagattggacgtaaggtaccccatttcactcaattagatccagaccattgggaggtcattggatggctgagggtagatacc

SEQ ID NO: 13928 - DNA, 642 bp, Zea Mays
tgtttattgttttccaacttcaccaacagtgtttaatattagtcatgcttgttgtattagccctttctaatgttcttgtgcccctctctttttccttgtgaattaattaacttgaacttggttgtgcaggaaagtttaataataaaattctgcagacataactgtagtagcttaagccttggatctaaactggaggcttgcaaattggtactggtatcttactatcttctttaattttttactttaaactagtttggtttatcctcattactaattcagtattgacttcactaggtcgtaccattctctaatttagtctgcaagtgtgaatcattgtggatattatcgatgcttaaattatggaacggttctgaaaaagtgggcaagagccagggtttcttatgcgatggggtttcctataccagcagtaccaaaagaataatttcgagtgaagatctggattttatattagtgggaagcatcaaggttatttctgttcttgcattatctacctcaaattaatgggttttcttttaaaaaaacatctatcaagtcataagatactagaattgtgatacctggaatattttgtaagttttttgaaccctgagttttccttgtcactgaatttatttaataggt

SEQ ID NO: 13929 - DNA, 376 bp, Zea Mays
ttgaaatctctctcgaattgtaaatttggcatcgagcgcgcttaatggtgtttagcccttgtgcagtgctcgtgctgccctcgcgccgttagaaacttgccgccgtcttcctcttctaccgtcgcccgtgaagctcccgtatgccattctctctgtgtcctctcctcctcattctcgccctagtcgtcgtcttgctcgctcgaactctgctcgccctagccgtcgtcttcctcgagctgctctctttgtctccgcgcactgggccctgtccttctccagatcctctcgtattccattctccctgtctcctctcctccttattctcgccctggccgtcgtcttcctcgagctgctctgttcgtctccgcgcactggg

SEQ ID NO: 13930 - DNA, 344 bp, Zea Mays
attcgcggatctcatttggtggtggtatttgaggacctggagatgcattacttgtgttcgcagtcaactcaaaatatatcctagctcgatcgcttcccttcgtaacatatttaaacaagtacttgatcatgtgtgttttgttgcaccactcgacattaatatgtgcattgtattttttgagcaattgcatattgtatggcaccacgctcctactgtccaatttgactccactttttactacgaaccgaccatcatttcgtcttctataaagggtatagccaaaagcatcgatgacagtctcgtcttggtacgacttagggaatttcttagagcatctatcactt

SEQ ID NO: 13931 - DNA, 383 bp, Zea Mays
cactggccggaccggtcgtcgtgtcctgccgtggttaatcgcgctggcatcaccggagttcgccgttatccggccaggctacgtgcctcgacgccttaccacgtcgcagtgagtcaccgtaaaccgctctatagtcctggcttgtcgccggtgagtctgccatggtgaaagccactaatcgctcgcaccagtgcaactttccttctccggccgccaccacgccattccaaattcacgcgccaccgcccccgaagcctataaattgagcgtgccttcgggtctgtaaggtagtcaagcacccaagccaccaagtcgtgcctccaattgctcacccgagctcgccaatttcagatttcccccaaatcaatcccgagcactgcgca

SEQ ID NO: 13932 - DNA, 451 bp, Zea Mays
tgaggacagttgctgcctctgagtttagagcagtatggttttatttcctgttgtatctacacaccaactatctttaaaaattcagagtttagaggcgccatattagtatatttgacttgtgcaaggctgcaagcttatctgactagtttccatgcctagtttaccctctgaagtgttcattttcttacaaggatcaatggcatgttgcaatttgaaaactggttgagcttatctaatttttttactaacaacaaaagtatgagattggttatcttgcaatcactggtccagaattgcagcaaattatacttagggtgagtgctttggttagggattcttaaaactgtttctctccggaaatagcagaattcccaccagcctgaagctgtttctcctgagaaacagaatcagtttctcttcatacacgtttctctaaagttatcaagtccat

SEQ ID NO: 13933 - DNA, 648 bp, Zea Mays
gccccaagaccaaggcaacaaaggaccgaatggctagggcctgcccgacagacaaccaaagactcatcgctcatacctatcaaccgcaacagtaccaccaacatcaatatcaaaacgagcacccatactaccccagcagcaaaaccccaatctctttccacagcaacaatgccttcaacaccaagaaaggttagctctgccaccgccaccaccacaacatccaaatcaacaccaaccaccccaccaccaaagcaagaagacttcgccaatccacccttcaggggagtgattcataagatcaccggagggtccaactcggacttcgataacaaacgacaaaaaggatctctaccgaagggttaaccatgtcatagtcacaagacccatcgttcagacgaagtggtctcatgtaccattaaccttcgacgcaagagacgtcgaccttcgcagcgtgccccacaccacccggacacactcgtcattagttgcaacgtggcagactgggagctgcacaaggtacttgttgacaatgggagctaagccgacatcatcttcctgcatgccttcgaccaaatgggcatcaaccacaacctacttcagcaagttgacaacccattctatggttttgtaggaaaggggacatttcca

SEQ ID NO: 13934 - DNA, 748 bp, Zea Mays
gcatgaaggagacaaagaagataaagaaatctaccagggtgacagtggcaccagtcggagtttgcggcgtaaggccagttgatcttgggctcacattattgggccagtggtgtgtgctagtagtttcccctatatgatgtgtctccaaggaagtatgtgttcttggcttagtgtatggtggtctgttattgacagtagtgggtgtttgtgtcataggtgtttctggctttggatatggatttatttcctaggtgttcccgcgctccgacctgcgagcgatcgcctctctcatctcatatcattcaccactgctccttcaaggggacgtcaattttgattcctatcggggttttaggtttgaagcttttttggacaataatgttagggtattttggttacaccagttgaggctgagcttggtgtcctccaacatatcctgcaaactttgagtcgctgctcggggcttaagtttaaccttaataagacataaattttccgattcgttgtcatgcaggtgtgactgagtctttgcccatgtggttcctggcgaagttggcatcattcctgggtagatatcttgggctcccctgcatttgagaaaccttggaaaaattgatgtgcaatcattgttagacaaggtgcgggccaggctttcgggatggaaagggaagctgttatataaggctggacaattgactttggttaaaacagtgctaccagctcggccgatttaccaattggttgtgtt

SEQ ID NO: 13935 - DNA, 704 bp, Zea Mays
atttctgttttacacagggtctctttagcaaaaaggctggctgaaggggtatctcaagatctcggccgttggatcagacttgggcgcgccagattagatctggaccacgccgaaccggtatgcagcgcgatccgtccactccgcgatcaacggcgcagatttaattctctccgatctcactggtgccgcccgatcacgatctaacggcacccaaccaatgtggcgaaagggtacaccaagttctaatcctggccgttcgtcattcgatcaacgacagtcaacaaccgtggccgaagcgctacgctcgacttaatctccgtcgcccattcccgatctaacggtgtacgagcgccaccaccctcccccaagctaacgcagcggcgccgccctagagctacggcggaagctcgccgacgtgcccacgattctcctcccaagcgttgcgaacactgaaatcgattgatactacatgactaggaggacgaggcgagtcgattggatgggtttcttaccaaggatgcgcagtacaggggtgtggccacagcgatgggcggaagtacgacgatggcggaatcacggtgaggaattgccttcaattcaccgctgcccgcgcccgcttattgaccgaacaatcttccccccgatggcgcacaccaccacggcctggtttcggtcaccagacgatgccgcagccgagatcccga

SEQ ID NO: 13936 - DNA, 512 bp, Zea Mays
aaaactataaggatttttccctaggtcagcacatgaaatttatagagctatgtaaggagaacaactttgctataggaattaagccgtggtcacatgaaaaatttggagcaaaatgagcccaaagtcgggctgtcagactgcccttggtctgaattcagactaacagtgagattgggcaatctttggactggaatttgaccatgatctagtgggaatttgactagggatgctatagcaaaagtgaagatggattatagatctataactttgatgcaaatgaattataaggttgtcacataaaatttggagaaaatctgccttaattgtgctctgtcaagcgccttaaacagagtttcccatggtacagtagcagaaatatctcagatgcaacgcatctcaccgccggtgaccctccgccccgattaacgtcgatcgtcgcgattcgtgcgccgtgacttgcggataaccgtgggcaaggaaagatctcaactcgtggaagggagagaggctta

SEQ ID NO: 13937 - DNA, 1332 bp, Zea Mays
aggctcatcgccaccgcgagtgactccgggttgtggatgcggaccgcatggctcagcggtggtagcagaccgccagtgtacagctggacgcgctggatctcatccagtcgacccgcgcgaggaaggagggcctagaagcggttcgagtactcctccacggtcccggagcgccggcactcggctagctcaaacatcggcgccgagcggaggggcggcccgaaccgcaagttgaggaggtccttgaagcagccgcagcacagttggatgtaccacagttgggccacgtcctcgagattgtaggaagccatccataccttctcctccggcatggttcgctgttgatggaaatatgactcacaacggttgatgaagatcagcgggtcaaacttgccatcgtagcgtgggaaatccatcttatagaacctgcgcgggcgatcattgtggtgctcgccgggcggttggcagtggcctgcggacgccgacagctcgacagtcagggccaggattgcccttgcgttggcctcgacggtggcttggagggtttgtacggccttggtgaggttctcgacggtggtcttgaggtcgtcccccatggtcggcgcggcgtaggaagtagcagagcctggtgaagaagggttgatggctgatgatggcgaagtgggtggcgcaggcgaggatcgccgggatcgtgataccaggttgtcaagggcgtcaaacccctgactggccagaccacagctacgtagctcatagtcgtcgtccgtcttctccagtgaggatcaacacctcaaccgcaggcttgagagaatagtagtagtgtaggagatagtttattgcttgcctcctccctgtggtttacaaggatatatatagccctcagcccattaatttaggagctgataataggaaagaccccactactttggtaactaataaaaaggaaggaacagccccccaatctaggagctaataataggaaggaatcagcccactaatttaggagctaataatacgaaggaatcagcccactaatttaggagctaataataggaagctatctctctttcctagttagccactttccctgccttcctgttcactcgtgcctgctgtgcgcaccgcgtgctccgctacgcgtcgcacatcccgtgcccgacacctcgtgtacgtctggcctctggacatgacactgcagtgtaaactaagcagcatagttccgcatgactgaacgcagcacacaacctttcattaaaacatgcacaagttcaaccaagcaagaatagcacaactcaactaaaataaaagtgtaattgaatacagcacacatcctgg

SEQ ID NO: 13938 - DNA, 603 bp, Zea Mays
gtaagtttgaagaccattgtctggtgaacacttcttattaatagagattaacctgttcttaacaagaatcaagagaaagaggggattgaaggaggtcggttcagtggagcaacgaagatcagtggctcaggaaatatctgaagaaaagatctgcattactgtggattcagatgtgtccaagcgaactagagatagagacggccgtggcgggatacttgagccaattcatggtcttgcggattaggtcggggtctgggtggagatatttcaccggtggtcaccgtggctctgtactttcgtcgccatgtcactcgctcctcaactctacctcactgtgctccttcgttacgtggtcgtgatgcgctatcgatgtgcttcgtgaccacggatagttagccaggtcgtcgttcctttaaatagtgccataaaccacggtgaggtcttcactgtcttccggtgtgctcggtcgaagccaaaattcacactgtcttctcttcctcgccccaaattcgtagtgcatggtgaattagtagtcctttacggccgtatagccccagtgtggctgcctgttgccatcggaatttgccgcgacgcccatttccc

SEQ ID NO: 13939 - DNA, 377 bp, Zea Mays
gtcaggatcgagtgagagagagagaagtgcacgaccatagattttggagtttacggctgggattggatctgggaaaggatggctcgggaccgttggtggttagatggggggtcgtgatcatatctcgccttaatgaagtctgtgccgtcgatgtttgatcctacggcgtgcgttgcgtaccgattagagtgtcaacctaatctaatcctggccgcccagatcagaccgtgcggctacgatacaacgataccccttcggccgggtttcttgcataagagaccttgttctttattggaatcaacccgcagtcctgcgtagggcgaactgtgtcttggaaatatttacaacgtgacccctgcgcttctcagtttttatgc

SEQ ID NO: 13940 - DNA, 370 bp, Zea Mays
ggaagcagcgttagactccaaggcgaccctcgccggcgatggggagaagccgacagcgcaggtcgttcaccaaagacaacgttgagcagcggcagagcgaggagggagcaggtacgctgaaactgagaagggatgcagatcgagcagggaaagaaagcgtggctgcaggatttatagggagtggggagggaggagatttagagctgaattaacactattgatggtcaattgaagaacgacgattactcagcgaaggaacggtcgtagccattaaagctcttaacaatggccgctgcaaaaatttggggaaaaaaccgatgctgaggatccgcgaggggatggccgttgcgaggcaccggggccgcgggcg

SEQ ID NO: 13941 - DNA, 1542 bp, Zea Mays
cttatctttaggttgtaaaacaaaaacaaatattccatggtgctgtcctttgcatttttttcttgaacacacaggagaggtgcgtattattgtattaagaaggaaaaagggataagaacccttaacgaagccagacactcacaccacttcgattacaaagaaacacgtgcgctctttacaagaaaagtcgaccacaacctaaacttaactcttactgcgcatgagggcaaggagacaattaacgccttgtgctccagctagccgccaatagtgcagttccttctagcgattaataaagctccagcgaagcttaggagataccccatcaaacagacacctgttgtgaaggttccatgaagtccaagaacctgagatgataagggagttgaagcccctcttaatctgatcctgcacaccaacagagattgttttccaccgatcctcaaaggatgtttccagcgatgatgtcccaaagtgtaagatattcagagatgactccaacagtcaaagctccctgaatattattaacccaagcatgattggtgagggcctcgagtactgttctactggttgctcttcgcttggatactaatgcaaatacttgcggtgtaaggccagcaactctgtggccttggatccacctatctttccagaaaagcgtgtctgatccattgtccacttcggataccacttccacggagagcttgggcacacttcagaatttgattgggaaaaaataatctaaggtcgactaagatctgtctctgagccacaaccacctcctctgaagtgcccagcccaagttttgaagattggaaaaattcccagcccaccaagctcctttggagacaaactttgaaccaagcacaagacaatggccacctctagcgtccttccttctacgccaaagaagcccttgtttaatcttgtcaattgccttaatcacctaggttggattaatggccatggccagatacgccaacatggatgtggaaattatagtatcagtttacttaacacttagtgttttacgggggcaaaaaattagaattgtggaatgtttgtgctcctctacttgtctctggcagtggctcctgatgcagtatttgacaccccagtccctcctgtatgaaccagctgccctaagcaaccttggacagtgacgcccctgtgtattaactagcgtggtctcattttctttgcatttccccctcctattcgctttgtaatattatgctgaatcaagagcccaacctccaattcacaaaactaaagaatacaatccctagcgaatgatactcctaaaaaatggtgagccatgaagcatgaacccaaactacaatcctacaaacatgattccagtacctatgttattaaggtgtgtgcttttctttgcaagttcttgatatttcatcttgcaaatggctttgggttttacgttcgtaattgaatgtgaccattatggtcaatcgtctgttggcagttactcaattgtgataagtccgtgttcaatatggaaccaattagataaaaattttagaa

SEQ ID NO: 13942 - DNA, 357 bp, Zea Mays
gatgatgaaatcttctggttacagagtacaacttttcttcaagggtttttgaggcattgctaagggtagaactttctaaggtgttctatgttctatgagttccccacttctgtgccgtcgatctgagtaagtcgatatgatctcggccgtgtgatctctgatacgatgaacggtccttcccatggtggtgacagcttgtgtcgtccctcccccgttagaattcggtgaaggaccaagtctcccactacaaaggatcggtgccgcacagctttgtcgtggtagcgcctcaaggtctgctggtacctggccgactgaattactgtgttcaatcgttcttcttccagcacatcaatgtct

SEQ ID NO: 13943 - DNA, 1354 bp, Zea Mays
atatgttttctgctgccagattaaacatcattggatcattggcgggcggttgggcctgacaggaaactgcttttccttggcggtcggtgagaaggacggtcttacttgcgcaacttatgatgcccttgtgcttagttagccaatccattcctaggatcacatcaatcccttgggatggcaagatggttaagtctgccaggaacactaccccacttaaaagaattctgacttgggagcacttgagctgacatagaaggtctgaccccggggttcgggtgaccaagaggatttctaggggtgtagaggggatgccatgtttttccataaaactagtggctataaatgaatgggatgctcctgaatcaaaaagcacagtagcgggagtaaattcaacaaggaacgcaccgagcactactctcggagcttgctgggcctcttgagcgtcgacgtggttaactcgtgctttgccctggtactgggtcctgctctgctgactgttggaggggagtgccttggaggcaggtgccgaggtaatcttggggccattcaccgagttggagtaggtaggcccgagtgccttcaactgggggcaattattcttgaagtgactggggtctccgcagtgccaacaggcatttgctggcggttggttgcttgcaactgagggggcctaaaaggagctctgactctgctgactgtaacgtgacggagtgggtccagctggtctattgaagcttggtcccttgggtggaagcccgatggatcgagctctctggtgacggtcttgctgctgagctcggagaacctggaatttcctcttgaggtgccctttttcttcctcttttgccctttccacttggatggctttgttggagaggtgcgagaagttgagggaatcttggctggcgaggatggtcttagccattttagaaaacgggccatcttcctagtttcggtgctgacatcgtcaggagcataacgagccaactctgtgaatttgtgcacgtactcactgacagatcttccaccttgagttagttcccgaaattcatcttccttgagttgaacgatcccctggggtatatggtgctcacggaaagcagtttcgaattctgcccgagtagcgtccctgacggccgcgttgaaggtatcccaccatgctagggccatcccagaaagttgatgagcagccaattgaacacgctgattttcggggcatctgatggcttccagtttcctcttgatcgtgcgcagccaatcgttggcatcgaggggattgctggatccagcaaacgtgggaggcttgagtctcagaaattctcccgtcctgtcctgcggtcttccaccacttggg

SEQ ID NO: 13944 - DNA, 549 bp, Zea Mays
tgattaatgagaaatccggggttcaaactataaataccaggggcctatattaaactctctgctatagttctaggacggcgggttaatttgcaaaaagagcaggggttcttatgcgaatccacacagccgaaggggtatcgttcactatgagccgcccgatctgaatcctacggtcgtgattagatctcagccccccaacactcgataactactcagatccgtccatcaagagaccaatggtggtgattttaaaatacgggagatcagttcctgatcgtggataaacggatcaacggctgcgatcccctggaccgaaccggtaccccgtgcttcgaatccccgccattcacccacgatccgacgacccagcgtaatcgcccccaaccccagagcgcccaggcggcagcgccgcccacccgacgacggcgaacccgccggagcggcgtgcaagcacaggccacggcagaccatcaccggcgcgcggccaaccgccaagccagagctccagtctcaccaatgagtagtcctacgcgaagcactaacaacaaa

SEQ ID NO: 13945 - DNA, 402 bp, Zea Mays
gtgggcataggttgagataagatagcctctctggtgctctcccccgagtcgtcctctgtcgatagtgcgctcaccgaccacaaatggcggcgcacaatggcagatggttggagccaaaggtctttcctttttggccgaccagcttcttagctcctaggtttgtggttttttagttttggtccttatggatagttttgtgtatgcctgcttctggcctcctaaggagtgtgttgtatctgggtcctttctgcctcccctatcccctctactttagtatgggtgcgcagttctcctgcgttcttttcgaaaaaacaaggccttacaaacgaaccacacctgggacttggtgtcacgtccctctggcgccaatgtggtcaccgggaaatggatcttcaagcacaa

SEQ ID NO: 13946 - DNA, 478 bp, Zea Mays
aactggcatttcgagagcactacattccagaaggggtgctccatatgaaacaagaagaatttatgaagcttaaacaaggtggagatactgtcaacaagttcaaccatttgtcccagtatgccattgatcaggtcaacactgatctgaagaagagaatttgttttatgaggggccttaatgactggctacagtggaaaatggccacctgcctcgacctctcctacagcagggctgtcagcacagcactggcagttgaagccaaatatgcaggcccaagaaagtcaaagggctatggaggtggcaggtccaaccaggggcctgagaagagacaaaggttggtgatccgaccttttaatcaaaaccgttcttcaccacgtccaccctcctacccctttaaacaacctgtctttatttgccccgtcactgcccccacctcaacaactcagccgagtgctaccggtactcatttcgccgccct

SEQ ID NO: 13947 - DNA, 381 bp, Zea Mays
gtcaccgtgcaccgtacccccgcccctctctttcgcaccccgtcgtgtgcgtcatctggaaaggaaaccattgcaaggaaaccgatagaatccacacctgccgcaccggacctgggaagcaatcaccgcgatcgtcgcccgcgccttccatccttgaatgcatgcgctcgcccctagaaggaatcacgactggatgggatccgtcctcgccatcagctcctgccatattcgtcaggagggacgcttgttcatcttctctcaatggtgttttgaggtcgacgtctcttcctctctgaactatagtccactccaaaaccctagacggcgctcgcggcccctagatcccgtgtcccagcgcctccgcttgtgcctagatcccgt

SEQ ID NO: 13948 - DNA, 325 bp, Zea Mays
aatttacatattcgattcaaagttacatacatcaaatattacatagtcttgttacaatagaagcttaatgttcattctattgtctcatacatcgaccattacaaaatatttttacgataaagtctattcttctctgagaactttttccgcaacttcgtttaaaagtttatcgacaacttcgtcaataatggagttcaccatgtatataatgtccagcgcttacttcgtttccggatcagctaggggatcgtacggttccggcggcgaagatagttcagctgaagtaggtaaaattgattagttcgaagccacaaaacaagtaccg

SEQ ID NO: 13949 - DNA, 437 bp, Zea Mays
gatttgtctttatctgcttgctagtggtgttgagcctctttctgccccttcttgaggactagtcattttttcgcttggtcatgttgagacgttgcccatttctttggggaccaagctttgctcattttggatgacctatttttggcttttgtctagcttttgatcatttaagtgagcttcccttcttctaccttcttctgccgatttgtgttcgaatggtggtgttggcaatgcactcatcaagggggagattgcaaacacaaggttaacttgtctcttgtggttcgggttgatgatgagtgattgtcaacatgggtagtgctttggtgtgagtcttggactaaccagagtacgagcttgtgttgtgcaaccatgtctgtcagcttgtgttgtgcaggtatgcagtacaaggacgatggtcgacggcaaaggtgaag

SEQ ID NO: 13950 - DNA, 463 bp, Zea Mays
gaaaacttaggggcctcggggtaaggatttccaaggcatagtgaagagtagcgatggactgcgggttaattatttcaaactccaggggctcttatgcaaagcgcgcaagcgaaggggtattcttggtttctggccgttggatctaaatcaagcgcccagattacattcaggcgttgtaacacaattgcgctccctgtgaccgtcggatcagagatctggggccgagatccaatcacgctcgcctacccgctgaaccatccgatataatctaacggctctcatttaatgtaccgaagcggtacgcttgccctaatcgtggccgtcaccgaacagatcgacggcaaccgtttcaccgcgcggcatccaatccaggccctacactcccgatcggacgacgcgcaatccagcttcaaccctgaggccgggtgacggcggcgccattgatgcagaccgcaattctccc

SEQ ID NO: 13951 - DNA, 520 bp, Zea Mays
gaagaatagccaagtgggcctgcgagctgggggctcacgacattgagtttcggcctcgcactgcaataaaaactcaggcactagttgacttcgtatcaaaatggaccaagcaacaagtacccgataacccagaggctgcagaagtatggcggatgtattttgatggctcgctgaaattgcaaggagcaggcgcaggaatcctcttcattgctcctagaggtgatcaactcaaatatgctttccaattattattcccaacatccaataatacagcagaatatgaagctttgatccacggattgaacattgctatatcactgggcattaaaagattgatggtatatagagattcactagtggtcataagttagataaataaagaatgggattgctcgaatgactccatgggcaagtattgcacagccgtccgaaaactggaagacagatttgaagggctggagttccatcacgtggaaagagaacgcaacgctacggtagatgcattgtcaaagctagaatc

SEQ ID NO: 13952 - DNA, 686 bp, Zea Mays
ggcttcgtgatgacctaacgcagctgcccgggggctcaatttataggcagcttcgtcggtggcgcttaatttggccggaccgtgcgggcggccggagatgaggaagaaccttggcgcggtgaatacgtgtccagtggcgtggcagttgttccggcgatcaacggggagttagagggagtcacggtgatgtggtggcgcggttgggacacgcggtgaacaacggcgatggcacgacgacggtgagcagctttacccgcgggcggtgagcaagggggaatgaactatggctagccggagtggcttccaggtcaccggcggcgaagatatttgaccccgcgatgttatcgacttaccccgagcgtgaatcttgacgccggcgacgcgaatcacggcgggaaaggttaccggcggcgggatttttctgccgcgaccgatctgatccgctgggggacactgtaccatcgcgctgcttcatcagagcttctgacagtcaatgtttgggctcaattttctctcaaatttccatggcaacctatctgaggctctgtagcaaatttgtagagctacaaaccagcaacacttcgactataggggttgaactcatttgagcactggatcaaggtttaattcacactcaaagttgaccctgttacactgaaaagctgaatttcagaatgaaaccagcc

SEQ ID NO: 13953 - DNA, 531 bp, Zea Mays
ctactccggccgctgaaatgacatgaccgagataggataactgaggcttggcaaatgaacatttagtcaacttaatttgccattgatactgtatgagtagttcgaagactgctcgaacatgctgaatatggtcttcaaagctcgaactgtagattaaaatatcatcaaagaaaactagcacgcaacgacggagtaatggtgctaatgttgcattcatggtgcgttgaaaagtggctggtgctccggtcaaaccaaaatccataactctaaattcatagtgacccgagtgtgtttggaatgctgtcttatgacaatctgccggtaacagacgaatctggtgatatcccgctgtcaagtccagactagtaaaccaggaagcttgccccaattcatccaacaactcctcgatgacaggtaccggaaaagatgtcttaacagtaatagcatttaagtgccgaaaatccacacaaaagcgccatgaattatccttcttcttgaccaataatactgaagaagaaaatggactagtgc

SEQ ID NO: 13954 - DNA, 657 bp, Zea Mays
gtcttcgcctttcgcgcgagtcgcttcgtcgtgagggatcggtaccgggtgatcggcaattgctcgccgtcgaagggcactgccacgaaaatcgcctatcgccgtggaccggcttcaactctcggccagtgacggtaaagaccctcccctgttgttcatactagcatgcgcttcgtgtagcacactttagattgggtcaggggcgctggaatgcctattgggcactactccggcaatgtcgcgccgcggttcgatgggcggcgctgccggtggcagtcgggggagaccggctcgtcctgagccgttgatggcgcgatctgcggtgtagattagagggtctgtactgggttaggtcagagtattgtggagcgttcgattccgatcgaacggatcggtgcacagacgagatcgacaccgtcggactcagatcggatggtgcttagtgcgtaccgatttgatgtattgtagatctaatcgaggacgtagaattccaatcagacggccagtgtctgcctgtaccccttcggccttgtaactttgcgtaagagaccctgcagttaccagaaaataatccgccgtccatttttactgtgctcggtgtctggggattcttactccgagccccctgggtttctctgaatttgaggcccagtccag

SEQ ID NO: 13955 - DNA, 494 bp, Zea Mays
atgtggggaagacgaaggcgggcacaatagtatgtttcttacctaggtttggcgagccagggtacgcagtcgtcggagggaaccggccaggcggtggattttcaagtccgacgaggaatcgccccagcattgacgccatacttctcgaattgatggtcgccgtgtcttccatgcgctctagggaggctacccgaccacaattgaagccctggcgctagcgtggatgggaaatcagcccacggcggcagtccctttactctcccctccgcctatggttcaattggtgactaggtactcggcgagatggataggggagatggagcggtcgggttatatagcggcggggcgagtctgagctcaagaatcacgaggatccgcaacaactcccgccagcgcaggtcacggagcggtagctgcgggatcaacggagttcgtttcggcgtttggtggcgatatgcggaaggtgacgtgcctgacacccgaccccacatggc

SEQ ID NO: 13956 - DNA, 1496 bp, Zea Mays
cgggtttgaggcgtccctcctcctccgccgccgctctttccggttgcgtttgggaggaatggttgtggagttggtggattctcattctccgctggggttttaggaggattccgggctcttggccggggaagcggagatcggaggttctgccaggcgtacggattgggcgctggagctcctgtttgtttggtgggtttctggctttctgctgtcgggctgtagttttcagatgttcttctctttcgttctcggtgtttctgttgcactttatgatgtgtacagagttctgcatcctagaatggttagattttgaatgggccatccttcgttgaggaacttgtgggaacaatgcttggtttttcatgtcaaaaattacattttgtgtgtgtgtgtgggtaagttttcgatgttttcctctttttgttatttgtaaattgtaatcgaacagtgaggcacttggttccaaataacgctgtggatccggcgtagttttttcgtacttgcttgaaaaaaagtggaggtttcgtacaactgctccctttttatatttcctgtcagaattccatgtatatgtttcttttatttggtgctactgtgataaccttgatgatcttagctcgttttcgttctattaaattatgtgttcagaattgaattttggggaaaagcttccacctttcttctgcctttaaaaggagatggctttttcacacgacggaaagatgaaggtatgaattggtgtgcctattgtttcacttttgttcatatcatggtcatgatctttctgacctttctatcattgttcctcttccttctgttctttccaactaaatcttgaatgcatttgcgtagctgtaattaaatggaacatttcacctaaaaagtgttctgctttgtactatagggctgtcagacaaaccttttccggacaaaggataagaaagtcgtcaagatgacagatagtgcaagctgctccacaggttagttcaccttatgtctttcggaaaactgtatcaacactcaatgcagtaataaatggaatatatagctcactagcttactggctaatttcatccgatcaaatgggtaatggctgaagctcaagtcagttggcaaccacaaagatattgtcgattgagcctatgttgactttgtagaactatcgatagctactcttccagtctgtacacaattttgaaatgaaataaagagatcagattgaattcaaatgtctttgcagaactatggatagtcactctttcagtttatacaaaatatcgaaatgaaacgaagagatcgaactgaatccaaatatggtcatatagtactgcacttgatatcttcattacagaagttcaacattttatacataatggacacggtataacttttctagtttattctgaaaccataatagtaaccaattgttccatgttttcttgtttattgtagctaagtatggatcaagcaactcaaaatcaccatcttcatccccc

SEQ ID NO: 13957 - DNA, 927 bp, Zea Mays
gagactgaacactgactgacagtgagttctgaggaactttgggctcgattcttgtgcaaggagataagcaaatgggcaagatccctatagcaaaattgtagctggtatatagagctacaagtttgttacagatgaattagcaagttctcacatgaaaatccaagatctgggcactgcaattcggtctgtcaagcgttctaaacaagtttcccatggtacagtagctgaaaaagatcctgggtttagatcccctcgccgccggtgatcccacgccgtgatcctcatcgccgttgcaattcatgctctgtggggtgcagataactcttaagggtaagaaatatcgcatcgtggatgaactcaggccactgttccgcttcggccgccgtgcccgcctgagtcacggccgattcggatgaactcaccggaggtagccatctatcgaccatgcgccacgtgccttggtgtcttaccacgtcgtagtagctcatattacacatgtccggtgatcgccggtgagctagccacggtgaaagccaccaatctcttgcgatagtgctctcctcactctccgaccgtcaccgtgccatctcaaattcacgggacaccactcgaggatcctataaattgagcatgccatcggttccgcaaggtagtcaagcacccaatccatcaactcgtgccttcaattgttaaccagagcccccaaattgctcacttcccccaaatcggtctagaacaccacgcgaagtgacctcgccgtggccagcatgctacaggtccgttcatgttctctggttcctcgtttcagtatccttaggtgcccttgatactccctaacgcatccaattaagctaggacccataagatcactgggaacacttcttgttatccattgatcacgctgtcaccgtggacagggtgatttag

SEQ ID NO: 13958 - DNA, 625 bp, Zea Mays
aacgatgccacttggttacagtagacatcatctcaatttgcaatgcattcaggcttaaatcaacatcatctccacatcatgttcttggaccagtgcacccccatcacatcttgattttatatcacaatcggttccatgtaggcatatgcgtcgtgtcagcattccagccaatgtttccatagtttaagtgctcgtctaatcagcacttttagattattatgccacatgaatgatcctgactggcttctgtttccattgcaattatgggtcaactctgaactgcaacgttttctttttctgataaaaaggctggagatttgtatcccgatccgatttctgatctcagatccaggctttccggccatatccccttccttttttttccttgcaagagcatttttttcttggccgtcaccattcacaagcatcttaggacctaatcatgaacaactatgaactgattacagattgtaattgtacaaatggtacttgtctcattatctgtatgataaggctgccatgcaagtcctgacggtgacaggtggcgaattctattttactgttacaagcattttattgtatttattagaaaagctcaggatatggttgctattgttaaaaaaat

SEQ ID NO: 13959 - DNA, 679 bp, Zea Mays
aagtaacatgattcgtaattacctgccttgtctactcttctctcttaccatatgtttctaactcagatggtcaaaaccaggaagggtggtggaattgatttacctcctagacgacacactcggaggatatatagacaaccccaaccacaaccagcagagatggatcctccaccaccgcctccaccagtcggagctgatccaatggttgcagctcagatgaggatgatgcaacaaatggctaacaccatggcggatatgtgcgcacagatgcagcaggaacgccaagagatgcgccaggagagagaagagatacgccgggagctacgccaagagcgagaagagatacgccaggagagaagggcgcaacagcaacaacagcaacagcagcaagtaccactaccaccaccacctccagttccaccccgagacaagcaccgggaatttatgagtcacaagccgccgaccttcgccagttcgctagacccactagatgctgacgattggttgaaatctattgagaagatgctcaacatcgcccaatgctctgaccgggagaaggttctttatgcttctggtcgtctgacaggtcctgctattgactggtgggattcttatgttgctgcccatgatgctgctgacactattacttgggcggaattcagtacacagttcagaaacg

SEQ ID NO: 13960 - DNA, 574 bp, Zea Mays
cttggggaagaacgttgtgagggtcatgaccgagggcgataccggtagcgccttgatagctagcgctatggaggggccactgtgatggcttgaaacggtaacgctggtagcatcggctgtgagtgctatgtggcgccggtggctgcaaaggctatgatggtggcgagcagcaactagagaataatgatgatagggaaaagcggtgtgcggtgtcgccggcagtgcgctagtgcgctatgagggcgagtacgagggatttggggctaaggatgtagggagcgtggcgattggttcacaaacaagatcaactcatattcacatacaccaacctgcttgacaaaatactcgacccggactgatgactcacataatcacatgcaccaacctacttgatgaaatgcttgacgaggtggccatcgaccatcgtgatggcaaagcttgggtactagcacatgaagctggccatcgaaaaaacgtggtagtctaacagttgtgactacaacaagattagcggcaacattgacaaagctgttgttgccgcctttttggaccaaacaccaatgttccctagatc

SEQ ID NO: 13961 - DNA, 491 bp, Zea Mays
gtctttaggaaatgttctcgggcgaagaggtacccgtacactctggccgtccgatcggaaatcaggggctcggattagatctccatactcgcgaaccggtacacaccactagccatcggatcaagatcctacggctacacgacgaaaacaaagtcataactcccatggccgttgatctgcccaccgacggacacgatcatccgattgaatcggtcccgccctaatctaatcgcggccgttcacggtgatccaacggcgcacgcaggtcatccccaacccgcgcccagacggcggcaaatcacaccaccaccgcggtgaggctcaccggcgaggtgaccaatccgcgcgcacacaccccaatcgcgacccgcctggctccaaaacctcgggcagcacatgacgaattcatccctaccctcaatttctacagttggacaccacccatcacagcccacgccatcgtgcggccatggggtgacggagtatccccg

SEQ ID NO: 13962 - DNA, 315 bp, Zea Mays
ttcacttgcagcgagttggatgccgccaccagttcattcgacgaaggcaacgtcatcggtagcagcaacctgagcacggtctacaagggcgtgctcgtggagcccgacggcaaggtggtcgccgtgaagcggctcaacctagcgcagttcccggccaagtccgacaagtgcttcctcaccgagcttgcgactctgagccgcctgaggcacaagaacctggcgcgcgtagtcgggtacgcgtgcgagcccggcaagatcaaggctgtggtcctcgagttcatggacaacggcgacctcgacggcgcgatacacggc

SEQ ID NO: 13963 - DNA, 551 bp, Zea Mays
gacaactctatgcgccatcgcggaccgtcggagccacatgcgcagactgtccggacgtacgcagaggaggagccgctcctgcgccatgtcgcgcaccatccgtgtcggtgtttagtgttcgaccgcacacccaggggtaccctcgtggtgcttttgggtaggacgatgtcgtagattgtaactcgatggttcatgccgggggcacgagaaagagagagtcgggcgattcagcaggttcgggccgcttgaggagcgtaataccctacttcctgtaatgactttgtatgaaggaggtgtttacaagtggtgtcttctgaaaggtgaggtgctaatgagatgaaaatgatggggatccccattggacttatatacacgaccgtagggtacttcccgcatacatgctgatcacactcttccagcttatctcctagctaatagtgaatagacttcgcttatttcgaggaaacccggcacaatcgttctgagctatctccggcgttcaaggatgtcggggcacgggaaaagcgaacaacttcaacaggatcacgccc

SEQ ID NO: 13964 - DNA, 607 bp, Zea Mays
gtctgtatgcgatcttgtacaacctgtcgtgggcgacatgggtagagatcggacaagcattgcgattcctggtgttgagcaacggtggaagctgaacggagttgttgcttcaacaattttagggatgaatggttctcgtcttttttctattttagcccattttagtatttttcacaaatatgccctttctggtttgattttcaggaaatggaccctttggttggagccgctgcaattcgcgctgacgtaacacgttttggcgccaataacattgtcgcttagatgacagtgacgtggccagacagctccctatcgatgatgatgtgattggtgggtcggctcgaagatccatggcaccgaccaatttggtgttgtggcaggggctggtgcaaagatccatggtgtcgaccccttaatacatgtccacctggcttccctcttctcccattcacctattctctgccttctcgtcgctgccacctcaaatcgccgccacgacgtcaccggaccacccacaccctcgtgttgcttaagcttcttctcctctcctccatgtaatcagcaacacgcctcatttcctcctcttctacccgttgttgctctgccg

SEQ ID NO: 13965 - DNA, 1167 bp, Zea Mays
cttcagataggatcccaagaaaaagtaaaggccctcataagatttgaattgctcaaataatttgatgcaagcatcaacccctagctgctcagagtattctttcgcggcctgcagatgtcccccaagatttcacaataattagaaccaagaaggaagaaaagaaatgccaatgggttggtacagagggggagggggcataagaaactgaacaggaatacctgcacaacaatctgaagatttcccctcagattaaccagtagaaggtctttcatgcattccaaagcccactctcttgacaatgtgccaaagaactcaacaagtgcctgtccaaggaagttgttaatgggcaaaacataaaaaaaaagatatctgaaaataactgaagtcgacaaacctgtggttcaatgacatgggtatttacaatggcacgcttgatatcaggcaactctgagtaatgctgcattacaaaatgtaaggttagttaaacaggaatacgaagcagagatatcagctgcaccaatgtgaaggtactgacctggagggctcgcaagtacaacccagccttttcacacagctgagcaatacgagggcgatcataatgactgaacataccattagcaagaatggcatcagcaacattcgggtaagtcactaagtttatctccaaaacctacaattcatagacagaaactgctgagaaaaggataatgtacacatccaagcgcaaccattcgtgttcaaacggtgaagatgaaaaccttggtttgaagaaaagcatgctctggcaagtttggtttcagaacatccaacagaaaagctgttgcctcccgtatcatatttctctgttaacagatgcataaagcaaaaatccataaggactcataaaaccaaggaatgtaaatagacaacaagacagttacctatgattatgaatataagcatacctgaaggaaaagatcagttattgtattataatctactgggcagcctccctccatttgtgacatcataagagcaaagttcacagctccctggtattatagacagtgagaaaaggactcataaggttaatgaagccacaatcgaatatgtgtcttacaaatgaccgattatgtttaaacaatcaatcacctgtggatctgtacgcaagatggtctggaggaggaa

SEQ ID NO: 13966 - DNA, 612 bp, Zea Mays
gtggaattgatttgcctcctaatcaacacactcggtggatatatagacagccccagccacagccagcagagatgaatcctcctaatcctccaccggggggagttgacccactgattgcagctcagatgaggatgatgcaataaatggcggatactatggcagatatgcgagctcagatgcagcaagaacgccagaagatgcgccaggaaagagaagagatacgacaggagttgcgccaggagcgagaggagatacaccaggaaaggagggcgcaatagcagctgcaacagcaaatgcaacaacaacagcaacagcagcaacagcaacaagtaccattgcctccaccaccaccaccagttccaccccgaaataagcaccgggaattcatgagccataagccaccgacatttgctagttctcctgatccactggacgcagatgattggctgaagtccgtagagaagatgttgaacattgctcagtgcactgaccgagagaaaggtttcaagtcaacattgcagtaaccacctcttccaaacgtgcaatgttcttcatacctgaggagtttgttggtgacaacatccgtatggttagagattttccggatgtctt

SEQ ID NO: 13967 - DNA, 466 bp, Zea Mays
gttgaagcatccatccttcgactcaccacgccactggttctggcggttgttgtgaagcatccatcctttgatgaagtggtcggggtcgccatagttgaagcatccatcctctgtgatagtcagcaaagaagacaaagcaaacaaagcaggtgaggggttagagaaagaaccacctctagagaacaaggccatggtgggtgcaccatggttctcaatcttggccagggtgtggtggtcaatctcagtggacttgagcttgttgaatagcttgtccacagtgagtctcatagttgggtgactcaatgatcgtcgagaccttcaccacccaaacctctgatctagagcatctaacaacttcagcgctctctcatgatgatcatagggaagttatgccttgttggcatgcatcttgttgataatcgactagaaccgagcaaacatagtgtctatggcctctccagccaac

SEQ ID NO: 13968 - DNA, 1145 bp, Zea Mays
gtgaaatcatttttttattgtctatgttcacagttggggaagtgttgaggcatactattttgtgatcctttttatcttctacccttgttttccaatgaattttgtcgtaaaagttacttgaaagttattgtatcttttaactatgtgaggtctggcattactcttgaaatggagttgtgcttgaagaactttcatgttagttagtagacattttcttcttggtcatgtgacaagtgttctctttgattctatttgattgctctttgtacaaaccctaagacgtttctgttctatggtaaattgctggattttgtgacagtgcctgtaattgtctgttttgtacccccaccagtcattttaagtgatgtgttggcctaatggcctcaaattttaacaccatgatgccataataatgactagaaattattatcatgctacctgtatttgcattgttgggtctggttaaataatccattgacagaagtgcatgcatgcatctcgattggtgttagtgcaaaacatattcatgatcgtagttattttttatgtgatggtttaattttatgactttatgatcttaactgattgtgttgattcttcgattcttaagtgtctacgatttaatgattctggcagttatgatttgcgatcctcgttggagttctgatccaagtcaggatcatgatttgaacaatcgtgttcatgactaaggaatgccttccttcaatggcaaactcttttttatcttttccttcttcccgtgtgccatttgtgaggacttttgagaattgtgaacatcaaatgttcaacgtttgcagggacattaaaggtacaagtatgcaaaatgagaaggggttgaagggtaaatggggtgcaaaagatcctaaactgtaaactgcatttcacatatggctactttaacatgactggagagagcagtaaagagaatttttttgcccttccttttttcagaaatatatgctttgaacttcaattgattagcccaaaaactggatattggtcaggtgttcattctgattctgccatgttctaagtgatatgtggactaaaaaaatattgacaaaattatatggttgctttggcgagacagtcaattctggtttgttttttcattaaccgaagtg

SEQ ID NO: 13969 - DNA, 567 bp, Zea Mays
gggagaacgaccaagtccccgccaagcaagtctgcgaggcagggcgaacgaccaagtcctcgcgcgagcaagtctgcgacgtggggcgaacgaccaagtagatctcctgtttaaagcccaacccttgagctataaaagggcatgccctctttcctgtagggacacaagaacacttgctgtaacacattccaaagcaatataacgatcaacactgcactggactaggacctcggactaaagcagtataacccatgtgtcatatttcctcgctcggatctatgagatccaccattcggagtgagtccgcagttacatcccccaccgaacacaaatttattgtcccatcgatttctgcaaccacaacacatacccacccttatgtatggattttgagttcccattgtcatttctaaacaaacagtcaaagcagccttaaaggtccaaacctgctgtgccaacatctttcgtgctctaggttccttaaagtttcttcagtggaccgtgtaaaataggggattgtattatagatgatactatttgcagagtgaagtttgaaatagaggatga

SEQ ID NO: 13970 - DNA, 625 bp, Zea Mays
cggaatccgaattcgaactatttgttttgtattttatccgataatatccgtatttgtatttaaattaaaatatagtaaatagtaacatctgatttcatatccgtggctatctgattcgaatccattcaaactttgggtgagcctatcttcgcggggccacgccacacagatttttaaaaaaaaataagccaccatcccacgttcccaacgacctcccgccaccctcccggattcctctgcgacagggagctgccgttgctcgtccctcagccagattggatcggcgctggctggctggctggctggcttggcccggtgaggcggaaccaaccagccgctcgactcggtccctgattataaacataatcttgtcttcagttcatctagcctggtgttggattctgtactacgcacagcacgcattcctgggctcagctggtccaaggaacagcggaggtagagtatctttgtgttcaggtttagtgatagagatgtcgatctgtctgtctcgactctcttctcctcccttgccagttctttgactccccgccgttgacctgtgtgcgctctcccctcctctcctctccgatttgcactctcccccgccttctccgtcgtcgacgac

SEQ ID NO: 13971 - DNA, 744 bp, Zea Mays
cgcggcggtgaagacaattgagccggcgcccttgatctctacgccggaggcgtccccaaacttgacgaagcctcggacgctagagtcaagctcggtgaagaactcccgtcgaccggtcatgtgatgagtcgccggtgtcgaggcaccatccttcgatcatgtctttgctggagccgtcgccgaggaaagtgcgtgctttcgactcatcaaggtggaggattgccgttgcggccggtgccgctggagatagctcgatgcttgcatgtgctaggagcatagcctcctcctccgcctccgcctgtgcgacgttggcctgaccacgtcgtggctgtcgacagtccctggcccagtgtccaagcttgccgcagttgtgacagtcgtcgtctcgtgccagcttcttgttgccgacggcgccgccttgggcacctccacgggcaccaccctcagcatgttctcgcgccccggcctgtgcgcctccacgcgccttgcgcggcttgccacgtttgcggcctcgtgtcgaggactcccccttctttttgtcactccggcaggcctcccactactcccgagtgagatgtagcttcccgccgatagtgataggcccagagggagcctgtggttcgtcgccgtcgaccaccttgagacgacctatcgcctcttcgattgtcatcgtggagaggtctagcagagactcgatcgagcgagcaatctacttgtacttctcggagatgcaacggaagagct

SEQ ID NO: 13972 - DNA, 277 bp, Zea Mays
gagaagggtcttcttctccgatcctagctagctaatccacaggcatgactgaaagggtcatgcatgtgagagctttatgcaccccagcatgtcaaacaaccgaagccattgtaggtgggtgagtgtgtgtgggcgcgccatggccaaaagctgggctataaatatccgtgtgcatgtgtctgcactatgatctagctagcagctagggcagctgcgttgcgtgctctctcgcatgtaaaatgtcgaaccacaagatgcagggttagccattactctt

SEQ ID NO: 13973 - DNA, 574 bp, Zea Mays
cactcaacacaatggagttttaagccactggattcacccctttcatattaatgtatggatccgaagccatgactctacaagagctaaagcacggatcacaacgaacaagcaccacaactacaccagatatcgacaagtcaacagcaaaggacctcctcgacggggatcgtatcaccacacttgaagcattgaacagatatcaagcacaagcgaaggcctagcgggacaacactgttaaccccaaagaatttgacgaagggacctcgtactcgtcagaaccagcagaacataatcccgaggtaaactcgagcctaaatgggaaggggctttcatcgtcaagaagaaaacgtccccaaacgcctacagactcacaacacaatccgacgaagacctcgagcattcatggaatgtagacaacctaagaaacttttatgtgtaagacaaacaattccaaggccttcgcacctttgtaacacctacaaatacgttattccagttgggcccgcactcttttcctcgcagggggtgaggtttttaatgaggcggtgccatgtaataaagcactaagaaaccc

SEQ ID NO: 13974 - DNA, 535 bp, Zea Mays
ctgggatctcggattggcgaaaaattttgcaaggatgttgctggaagtgttgtggaggtgcctgaaaaatttgggttcaattggagtaagtttggctggtttgggcatttcatcgaacacatggtgtgcggggagttagggttttagggaaatggccatttgaggtatgaaaaccctcccgaaggagctaggatcctgcagggatacataatggggacaaagggacacattccaccaactggattcattggatttcacagaaattggatttttgcacaagggggtggtgacttggatgccacagagcctttcaaaccgagagcaaggagatagagggaaggagaggggggatgactgctcaccggagaggaaagggtcacggagagcaccaggtcgccggagagacgccggtgggggaagatcgccggcgctggggaagaatcgccagagacagagaggaaggaggcgctggcagagagagtgtgcctctggcccggctgcgggctggaggcctttttttaaaacgcgatatggg

SEQ ID NO: 13975 - DNA, 541 bp, Zea Mays
aacgagtcgaggagcatcaggggcatgtaagggtgctaaaacaagagagcagcggacaagatcggacctgaaacgagctagccacggcgaggacctttttacggtggcaaaaacccgatttgggggaagtgagcaattcatgggctctggtgaacaattggaggcaagtgttggtgctttggatgggtaattaccctacggagctcatggcgtgctcaatttacagggcccttgagcggtggcccgtgaatttgagctcgcgcggtggcggtcggggagaaggaggtgcactggcgcaagcggttggtggcatttaccgtgacaagctcactgacgatcaccggatgggctaagatgactcacgacggcatggttaaagcatccaggcacgtggcgcaaggtcgtgggggggctaactccggcgagcctatctagagtgactgtgacacaagcgggtaccggcggctggagtaaaatagcggccggagttcatccacggggtgatatttcttacctctctgtgttatccaactatgcgggg

SEQ ID NO: 13976 - DNA, 439 bp, Zea Mays
ggatgatagcagcagcggtgctctgcctcttctgcttgggggtcgtcgcgatctttccggtgagacgagcaggctcggaatttcagggaagcacaggaatggccgaggggaaaagtgaagttagggctcagaaatcaaaaaggcacgtcgacacgagtataaatggggtttcttgggtcgggcactatctctaaagtgccaggtcactactcagaaaagcaaagcctcaggcatcactcggcagttacctctaaaatgccagtagtatcaggcacatggatgaactatcaaacgtgcaaacagaaaagcagcaaaaaatagcgatcacttgaggcaactaatttcttgattcatattggagggggttacacaaactcaaaagccgactcattatgagtcggcctttttccaccctgcttactacattacattacactac

SEQ ID NO: 13977 - DNA, 689 bp, Zea Mays
ccgggggcgacgcccagacgcctctgcgccctgcggcggggtgaccactgaccagagaccaccaccagcacggttgtacatgcaccacccgagttcttctcaggggccaagatgtagatgggctgcatcacatttttagttagccggcctagcagagtagaaggtgttttgttgaacgcgtcttaaggcccggcccgtgtacagatttgtctggccctacggctcgatccagcacacaagagatgcacgtcttcctcttgcagtctagtctttctgtactgctgatgggagagaaattgatccatggaaacccagctcaacctcgtcaggaacggaccccatcgcgcggccgacgtctctaattggtcagcaacggctgcgtgcgtgttccttccttggcctttcataagtcgtctttctccttgaccagccattagcgtcgatcgatgatttagcacggagaggctcaaggctgtccacacaggttagcttttcttcttcctctagttaacctcctccgttttgaagctcttgttgtcggccgggcttcgtcggcttgttgattcagccagtcactcagtcatctgctgtagcctggattgttcgatcgttcttggagctcgcagctggagcgagagagtaatctcatgcccgctcttcttctgtagattgatggaatgatcagtaac

SEQ ID NO: 13978 - DNA, 425 bp, Zea Mays
aagcttcttcagggcaggactttggttccccctttatgagataatcggtgaagttttgaagaagttcaaaatttacctacatcaactaaccccaacgccattgttaggctcagtgtatatatttgggctcttcaaagccaaggaaaatgtgacaatgccgaagggttctgtcgagtgcacgaacttcattatcagacgaaggctagggccgatgatctgcacaagaacttccggtgctacgattttgcataccgaaagggataccaaggcccccgtgattggttaccgtactaagtggctgacctggtggacaaatgagtggttttatgtgaaggctaacgaaaagaagagggagaagctcatgagcatggtaattagtcccttaaaactgaacttcggcatgactcggctgttgtgtaacatgc

SEQ ID NO: 13979 - DNA, 512 bp, Zea Mays
caacgattcccaggtcgcggcttctggtggtgaatcagtccagtgtaccaagacatgccaaactccacgctgaagctgtgcctttagtatcttgtgtggtgaaggaaggagccagccattctccattgcaggaagctctgggggtgtggttggaggaggcccgcgaagtggtttgaggagccccacatggaagacatcatggatccgtacactggctggtagctgcagccgatatgccaccgtaccaatgccttcgagcacttggaaaggtcctgcataacgaggccctaatttccctttgggcctgtcgacgagtgtcaaagcttggcgattcagaagacggagccagacccggtccccaacagcaaactccaggtccctgtggtgagcatcatagtattgtcgggcataagcttgggcttgcaagagtctgtcccgaacttcctgaaggaagtgatcccgctccttcaaaaggtcttcacgcttcctccatgctgcaagttcccaaccgc

SEQ ID NO: 13980 - DNA, 951 bp, Zea Mays
aggtatttccacaggccaaagtgtggaaaaaatccgaggaaggcttcacagaggtgaacgaacacaacaatttgaagcacggagatgggatttagatgcgtaagattgagagaataaaaatcaaggaggccacagaagaagggggaaactagcagagccaatactctgatgaggaaaggcacggaaataactgcctcatgagtatcctctgtcgggacggtaattccctgcttgatccgcaaggagcataactccttggaggacagaacaatgacctcaacaaggtggagaaggtcagttttagagaaaacggaagtgtagttaccacagaaaggaagttgacaattgggatcaatcggagggatatttggcatggcagcaccctattttctcttcctgggcgccatcgcgatcccgtaggccaaaaagcacaagaacagcgcgagaaagagtgagagttcaggaggctagaatgcggcggaggagttacaaagttagggttcatgcaccaagaaaccattgacaaagatataagtgagcgcattaagtcgggcgcaacgggacaggctggtagctaggaccagttttcggcataacagagcagaatgtgtcgggcagtgtttctggtcgggtacacttgagcgttttcaaaagctaaagtcgtcgatcgagttcactggaatgaattcatcaagcaaagacatgaactatacaagaacacataggcaacgagcagatttcattcaactggtagaagaacattacaaaaggaaataaggaccgactcattatgagccgaccttgatatccttgttctgctactactactacaactactactacatatacaactatactacactactaattatgtcggtggcatcttgccaccagcgttgtcgctgtcgccactgccctcgtcgttgccctcttcgccatcgtcaccatcgc

SEQ ID NO: 13981 - DNA, 647 bp, Zea Mays
cagcccagtgcctagctccactcgagacattgccaacttcgacgagctccgtgcgcaccgccattgttgcccgagcacggctaacatggccagcccaccccagtcatgtcccacccaagtcaaccacacaagtgactcccctagagccccgtaaaacctcctcgagcccgagctaaacctcgccagaacagtgaaatcgagttcaccgaagactgaagcttcgccgttgaatgtgggtcggcttcctcagcccaccatagtctgattcctctggaagccagcaccaccacgactttgtaaagcttccccgctgaccggatcaagctctaccatcgtcgttggccggaattaggagccgtcgttgacaaacgccgcctgtgaacatggaccgggtagctccgaccatcttcgacgacgacccgaccatcgacgtgatccccagatcatactcaacctcactgaccaccccacgagagtgctattgcctccggtaagctgctccaccactttcttcgatgtggttactgttccaatcagccaaggaccgcaggttgggatgtttagaaagccaagagattttgtgttaagcccatgactcatgtgaatagtacaccaaggacttgtttgtaaggaaaaggagagatttt

SEQ ID NO: 13982 - DNA, 425 bp, Zea Mays
aacgacacgaatatattctgcctttgaaagcacacactagggggagattgattgggataacaaacacgggccaacatgtgtacggggcagcgctcagtccataggaattgaacccatctgtggccaatgcaacacgtacattacgagcctcttcggctttctcatggtgaatggaatcaaagtgtttccatgcttcaccatcggatgcgtgcaccatcttgtcaggattgtatcgttttccatttttgtgccatgtcatctgtttcgcggattcctctatcatgtacagacgctggatcctcgatatgaacggaaggtgtcgtaggattgtcaaggggatgtcgagctgcctcttctgtccatcaccagagtctacctccattaacctagacgatttatgcttgggacattactttgcctccgtg

SEQ ID NO: 13983 - DNA, 996 bp, Zea Mays
ggactccgcgcccacgacgcacgccgaggccgtgaacgccccacccccgaccatttctagcagcccacacccctactcactctcccctccatcattcgcacaactgcagagctcccgccctcacctcacaccgtgtgcacgccagagaagcaccgctgctgtccgtcgtggttgcgcgcccattccaccgtcgctgttgagccctcgtcatgtctgttgcctcagtgagcttcgcctcgacatccatgacctaggacacccttcaattcacccccttcctctctatttctctctgttcgcgctcaacggacctcccaccgtgctgcgtcaccgtcgacccgagccctcatcatgcctttgccaccgttcaagggtcttggagtcttccctcaaggtaaccaacctctcccgcccatttatttccccttctctatccttcattgtgcgcaattgctcaccggagtgaggcggcgccgccgccgagccatcccactgtggacggctaccttccgatgccatgcccacgcccatgtttgccgcactcaccccgacctccttgagccctccccatcactttagaacccccaacgtgcccgcgtcctcgtctccggcgaagctccaccatgtacacgggcggcggcatggctccgtttcaaataaaccagatctaatcctgaccgcccacttaagatccgaccgcctagatttcccccttacccgcacccctaccactgggccaggccagtcagtcctgccctcaccctaggtcgctgaccgccctggcccgcctgtcagagcgtgctcgagcatgctcgcccgtgggttctgatctcatcgcttggtctttttgttaaagagcccattagtttccgagaatcaacccgttgtcctagtttattgtgcctgagtccctagtttcttgcagagagacccatgggctttattttaatcatagaaatgggtataaattagggtttttgaattataaaacttcca

SEQ ID NO: 13984 - DNA, 1467 bp, Zea Mays
agcccaaaagctattaagcccagtcatcatgttatatccaaattaaggcccaagcatcccctacaaagagctcggtcaacaactcatgagggcagacaacaaatcattcaaaaagaagagaaaacagagggaatggaagagcaccttcttcctcctcaacctattctgagatcctatccactctcgatctctattgtggctgctcacgctctcgggtgatctcgccggtgagctacgggtgtgacagtggtataagaggcagttatcctcgacattggtgtggcggcaacgtagttgtggcaggggtggtgctccccaccccatcctaaccctagctggcggcattgcaggccccactcgccgacaacgcacttctccggcctcgatccggtcagcggtgcatcttcttcggcctccccgcacgcaaacgtgggcacacacagatcaggtggaggcgtgcagatcaggcgcgcggtggctacgggctattacaatgaagtgattggaaattcggcggcgttggcggtggagtgaaatctatggtgtaggcgacgacgttgggttttggagtgacactggtagcagctcgggccaggatatggcaaggctcatttcctctccgagattgagggcgatggatggattggagttgagtattcctacatgtagcatggggggtttgatactggggacccaaaggtgccatggaatttgaggccacaggaggaaaatgtgatgcatgttgtggcaggaggcatacccaccaagagtttgacggtttgtctgattcggagtcatgaggagattatggtgagtggtgatgacagttacttcttgcaacagggcctggtggtacctgatgcctgttaggtgttcgtgggaatgtcataggaagtaagtgcagataaggaattagatgaactaccttatgttgatgttgtttgggatgaggaacctctagatatagaaacaattgttggtgaggattgggtctatgcagatcaaaagtaggtgcctatctttgcttcagtgatgtgggatagtgtaggacaggaagggcctgatgttgcatcttctgttgatgtggcctgggatgcagatttgcaattagctcaagggactgaggagatgatgtgcaaataggtttcattggaggcatcaattttgtgggaggaaatgtatcaaggtggagagaacttgccattatttctagatttcgacgtgtttgctgtaggaaaggctattgaggacaacaaggtcgtgtgggatgaagagttgctacaagaggttgactcacatgacagtatactgatactagtagttaagggagagtgtctgagtgtcatgggtgacagaccagttgctaagttggtctctttcaaggcttcaatagtgataaatggtgatgaaggggagttgttcgatgaaaggtctcttgcaaatgtgatttgggatgatgaatttatt

SEQ ID NO: 13985 - DNA, 409 bp, Zea Mays
cggggggcagaacggaataaccggcctgcacagcccttcatccgctgcagcagcagggactgcacttggactgccaccgttggcctctattgcagttcaccaggcttaccagtcatatcgcagggtcaaggtgctgaaaaggatctgctgccggccaactattgtgatccacgatacaccaagagcaagtaattcattttaattttcatcagggtgatattcggttctgcttgcatcgagaaatttaattgggctcccattcaccccccctctggtcgccgtttcggtcctacaattagtaatggtaggaatactacagtacacaccggccggctaaaattaattaatgtagaggcaccacgaagaccggagaggcacaggcgcccaagccccaacctagcttagctag

SEQ ID NO: 13986 - DNA, 638 bp, Zea Mays
caaaaattcgtcttcatcagtaccgttgtatatcaaggatctctctggttactttagatccctagcgtattgtttagcttcgacaatctgctctttcgacagccgcttctccgaagcatgtcgcacgataaagtccagctctttagcaagcacttcgggagcaggagacttaactttcttgggcgcattttcttcttccaaggtcaaaggaatagcttccgaagcatatgcctcgatgggagctgatggcccagcttcggcagtatctagtgtcataccagcttcgctagatttctttgggatttcacccttgctatcaggcgctaaagcagggatttgtacttttgaagattccataacagcgtctaatacgctggccattctcctcctttttggagttattgcaggaactttggacaccttcggcagctccggctcttgtggcgggctcaaggtttttggttgctctgctgatttccttaattctgttatttcggccgtttttccttagcttcggcactttggtcgtctcggttttctcctgttccactattaccatcggtttcagcacttcggccgattctcccttggcttcagcaagagcggggtagtttggctcaacagcagaaggcccttca

SEQ ID NO: 13987 - DNA, 688 bp, Zea Mays
tggtgttgcgtctgcctgcccagcactgcagtgaccaccgttgcttggctgccctttcgcagttgccctaggccattgctcggcgctttgctttcgcggaatccgacgcgggcggtgagacactgacatggtagtggtggtgacacggagtagaccgacagactcgacgcacagccatcaggcgctcgatcaggctgccactgcctctacgacctgacgcactgccactcctagcactccaccatcatcatcacttcgtcaggccgggtgtcatatcacccaatctagctgcaaagtgcaaagctttttctcccccttctccgatccgcttcactgcatgcagctctttgcttgcatggaaatggagagcagtacgtttctggattctgatttctgaaggtagcgatgcagagacatgcagtgcagccagcagtggtagttggttggttctccgactgtgaatgtgaatgtaaaccccgtcagatcaatgcgcccccgcgaatcccggccggccggccggctttctccttccttccttccttccttccatgggctgatgggccaagcatggctggctcgtccgtggaggctagctagctatggtcccccgggaaacacgcatggcgatcggtgcacgcatcatgcatgcagatgcagtagtgcagtgcctgactgacctgcgagttga

SEQ ID NO: 13988 - DNA, 495 bp, Zea Mays
cgggtaaaggtgatctggtgttctgaccaccaatagggggtgggggcactagtggtcgccaccagtatctatcgatcgttgagcttctgctgccttttgttctcttgtgacccgtgtcctccgaagattacgttgacctcttagtcgatgcgcgggaatgctccacctcctcccctttcctgctgctgaggttgtcgaggttcgccaggtcctcctcgtggtgggggaggtggtagaggttggaagggtcggccattaccgacggagtgcttgaagtctctgcagttccggagggtgtggcacatatctttgtggtacgggcactgggcgtcgaggatgtcgtccaatgttcgttcgcctccgcggggtgcccctcaggtatgagagacgggtggtccagcggcgtggacctcttcacgaggcctcttctcctaacgcttgtcggttcgctggtttgcgtcatgccgtggtgcagacggagtaggcttctacccc

SEQ ID NO: 13989 - DNA, 625 bp, Zea Mays
gtctggagcatcagagcaaacattcatcatatcatcaacagtcggttccaacagcatatcttcaagaatgacatcctcaagggcctgatcaaaatctgttatggataaatcttgaaggctaacaagggcagacagagctggagaaggaatatcactatccccctactacctctgtaacatcggctattcttgcgaattaatggaacttcttcttcctcttcttcgtcctcgtcaaaaatgcggacaatagatggtgcaggatcacacccattggggtcagcttcaacaggatcacacccattgggctcagctttaacaggatcacacccattgggttcagttggtgcacggtcacacccattggggtgaactgaagcaggtacaccaccattggggtcaacttcagtaaagacctctgttgatatttcttcgcaaacaggagcagaaggtccagcatcctgatccaagaatgacagtcgccgaagccgtttctttttcttcttcttctcctcagcaggggcagttgggcggctgacctggcaaagacgctttgggcaagtaccctcaggctttcgggtgtccactgttttctcagtctctggtataaccgcaacaaccattgttt

SEQ ID NO: 13990 - DNA, 413 bp, Zea Mays
aacggtatatgtgtcagctatcgtaattagaggtacctgaattattcccctaaaacacgcttaaccccaagaccaccatcaagacacgttccccgaggacaatggagtgcaaatcacacttcgcccgaggcccctctcaaggtcaccatagctctgcctcgcccgagcctaccctcggatagggtattgttctcaagagaatcctcgtcctggccgaggtctcctctccccagaaccgttgtctccacctcgtccgagcccgtctcgggtaaggaagacatccccgaggcaggactcaaccgaagtccgcagagtacaggagcattcaatgcgcatacctaccccaaacagagttgcaggtgaacaggagcaacaagactgtggtcctgtcaaacttcaccaactacgatgac

SEQ ID NO: 13991 - DNA, 439 bp, Zea Mays
tgggataagagcttgccatatgcggagttctcttataataatagctaccaggccagtttgaagatgtcatcgttcgagactctgtatggcaggaaatgcaggactcctctatattgggatcagactggagaaagacagttctttggacctgaacttatacaagaggcagaagaacaagtgcgaatcataagagagaatttgagaattgcgcaatcaaggcagaagagctatgctgatacccggagaagactactacagtttaaggagggtgatcacgtgtatctgaaggtgtcaccgatccggggtatgaggaggtttaaagttaaaggaaaattgtcccctcgcttcattggacctttcttgatcttaaagcgattgggagaagttgcatatcaactgaagttacctgatcatctatcagatgtacatgatgtatttc

SEQ ID NO: 13992 - DNA, 503 bp, Zea Mays
tgagagtatgtctgagcgtgtgagcttgtctgagtccaattgagcctgtcccttgtaacgctgcgtgccttcccttttatagtttaagggaggcacatacaaggatgctgagccccgacatgtgggcccaagagcataatggaagaaatacattatgtgaataactgatgctgacagagtaacacatgagtaatcagcgggagtcatgatggcttcagtccatgcagtattaataggtcgttaccctttccttggtaacgcgggagtgatggtgagtaactgcacagcccacgtatcatggacaggttccgcccgttggcttatgccacgcgcagtatgccacgtggcagcatcgggtctccgccagagcgaggagcagaagtgtatgcggatagatccggatcccaccagaccaggattggacatgtgtcagctccggatccccgcctggacctggattatggcccgagtgtgttctatcctggaaccttgggaccctacta

SEQ ID NO: 13993 - DNA, 620 bp, Zea Mays
gagcggagaggtaccaacagggggtcctgacaaaatcgatggcaccactggagcgtgaagcggaggaggaggagcagactgaaccggaggtgctgagataccagaatgctgaagcataagagccatgaatgccctactctcagcccgatcctgaagtagctgctgctgaagtgcatcctgcctgtcctgcatgctctgaaacatcgagagcatcgtctcggataaccgggcctgctcggctgccaggttggccagaatcgtcgcaagagcagggtccatagccggaggaggagcaggagcagcacgagaactcccagcctcatgatcatgggagcgtggaggcataggaggcggaggcgaaggaggaaccccaaaatcatcatcatcatcatcagctgatgtaccctgagtgtcaaactggcgaagagctgcatcctcggcctgagagtcaaacacagaagcagaagctggcacaggaatctcaggagcaggacgataggatccaaaaacaaggcgagaggcctcaagggtgctctaaaatcgagggggctgaatcagctgcgcaaagatgtggcacaagtagtgagcataaggcaactgccgacgagcacgaatcccat

SEQ ID NO: 13994 - DNA, 692 bp, Zea Mays
cgatcaacggtcaagtacccatcttcttcatccaagcaggacacaatggtgcgagcaacccccacaatggaggccatgacagcgtttaggtgattcggcaacccgaccctccaacgcacaaacggatgagagctagacgtagcgaggaggtcaacgaagctagcgagggagcccttaccgaacatgtggtggcagcagtggcctcgcccatgagttcttgcaaccagatggcaggttccatgctctggggagcaattgggtcgaaagcggtggtctacccagtctagactcatcaacgagaagagaagcagtttgtttctttcacccaaagcaggaaacgacaacttggtgtcatctcccgctgtgatctggtggaggatcaccgaggacggcctggcagagatggacaggtagagccagaaggagacagcgaagcctccttcctcgccggctcaggccgctcccgtttctgggtcgacgcgcacgccgcagagctcgcgatagccgtcattcccgccgcattccgattccgactccgccttcgcccccacggaggcaggtgaagattttgcctcagccgtcgaccatcgttcgacatggtacggatgcccggggggttcatggcctcggttttataggcgccaatggggaaagatcgagtttgatttggtgaatctttatccaaggcgaat

SEQ ID NO: 13995 - DNA, 296 bp, Zea Mays
gaacgacaaatacaactgtttattccagcttgggagtcattctgctctaaatgagttaccgcggacacctcatctgacttgactgtcttatcatctgattatgcaatgctaccttgagctaagccaccgtgttgagaaaaatctattgcaggaacaccaggcattcccatattattatcagaacacctagttgactcttccgagacatcgcacgcgtccaagttaaccaatccgttggcttccccaccattgcaggcgacttccatcagcacactacttttgcaagcctcagcctc

SEQ ID NO: 13996 - DNA, 590 bp, Zea Mays
gacagcaccaactcgttggcggcgcaagcctggagcttcgccgtgggagaaaaacaaagtatctcgacattccccttaaggacagcattaaggggtggcgtctcgagtggttcattgtggaaaaccactgcaagtcactccccctaggtcagggaggcagccagatgtccgcacaccaagctggatagaatctccgaacccctcggagataacagaggctaaagtactgcttgccgatgtctgcttgctgaaggataggggtctgactgctgaggctatggtcgctaatttcattttcaagaacatccagcctttaaaggactgggcgtaccctgcttatttgtacagtggtgtcagtgattctacccgggttacgaacaggagaattcccacacagtatctgatgagccgactggacatgatcttgaggggtagagtttcaaatgttggtgctcctgtggcctattctgcttggaacctaccaccaatcaggccattatttgagtttgtgtccaaccctcctgctagtgatggtagcctgggtcttagaatgcgaccctctcctgaggacattgaggctctgattgccc

SEQ ID NO: 13997 - DNA, 452 bp, Zea Mays
cgggcaagaaaggcgaagggggcagggcgcccgcgtcgccgtctcccggtgcgaagaagaaatggtatcctcgtgaatcgtgagtgacgggtaacgtacgtatcctacctagcgtcaacccgtgagttagtttcacgctatcactattactggagtgatcagggtatgggaaggatcagtattgtggtctggtcctttcttatcagcgagtattgtggtctgatcctttcttgctttctcgttatgtataaccaagcaagatgagaagatgtatagcttgcttccaatatactattgagctagcaagtattttattatgttctgaccgatcaaactcctgaatcaatggaagaacattactagtgtgccaagaagaagcaattctcaaggacatggatcagcacggctcgtttttgttcattttaaaggcgtgcgcatgcatgaacgtgtgt

SEQ ID NO: 13998 - DNA, 610 bp, Zea Mays
ggggttaggatattagggttccaaacctttggttgaaattttgggacgttacaaacctaccccacttaaaggaatctcgccctcgagatttagactggatttgagaaaaagataagggtattccctcctcaaagagtcctcactctcccaggtagcttcctcttccccttctttgctccactgaactttacagagtctcacttctgagttgcgggtcttccggactgctgagtcaagaatctttattggcttctcacgatactgaagatctttctaaatctgtattgcctcttcttcgatgtgactttctggtacttgcaggcatttgcggagctgggacacgtgaaacacattgtggatatcatacatggattctggtaattcaagacgatacgctgcgggtcccactctgccaatgatggggtaggggccgacgaatcgcggtgctagctttcccttcacttggaaccttctgacaccatgcatcggagagaccttgaggtagatgaagtctcctttctcaaatctgagttctctctgcctgttgtccgcataactcttctgccgactctgagcttcaagtaatcttctgcggattagggcaactttc

SEQ ID NO: 13999 - DNA, 550 bp, Zea Mays
cgctcggggtcccggaaatatcaccgtcgtggataagtccggccggtaaaactaatccgaccaccgtactagcttgtcgcggtggaacccgataggctcgccggtgaaccgccgtcgcacggccttgcaccacgtatccgagtacctccaccgcatcgccatgattcgttttagcttccggtcgatcacctgagtagtcgccacgacggttgacacgagttcacttgcaccagtaacctttcccctctctggccgccacagcgccatcctcaattcaagcgccactgtccctggaagctataaatcgagcccgccgttagctccgcaacctcattacacatcacaccgtccagtatcgcccccaagcttgcaaccgtgagctccaatttcaagtttccccaattctgttctgaaacaccgcagggtcgagctcaccgcggccagcccctttccggtgagttcatccccctctctccctcgtttgagcactcttatagctctgtgatgcttgccaagccaccaattcgaactgagagatcaccaatcaccg

SEQ ID NO: 14000 - DNA, 788 bp, Zea Mays
gatcgccctaagatgagtattcgtaagcatgttatactaggtcgagcaggcgtgagcatgttgcaccgtcttaagtcattgccgacttaagctgattgctccgttagtagggtatagtggtcaccctaagtcgagtaagcgtgagcatgttgcaccgtcttaagtcactgccgacttaagccgattgctccgttaggagagtatagtggtcatcctaagttgagtaagcgtgagcatgttgcaccgtcttaagtcactgccgacttaagccgattgctccattcgtagggtatagtggtcaccctaggttgagtaagcgtgagcatgttgcaccatcttaagtcattgccgacttaagccgattgctccgttagcagggtatagtggtcaccctaagtcgagtaagtgtgagcatgttgcaccgtcttaagtcactacctacttaagccgattgctctgttagcagggtatagtggtcaccctaagttgagtaagcgtgagcatgttgcaccgtcttaagtcactgccgacttaagcagattgctccgttcgtagggtatagtggtcagtggtcaccctaagtcgagtaagcatatagattgataataaatagttcgagtgcccttgagaatgagatctttttattgatgatgtattttccgattacagagtacaacgccgccccgatagcttttgaattctagctaggggtaaaacttcctgagatgctctatattccatgaattccctatttccgtgccatccatttgagtaagccgatatgatcc

SEQ ID NO: 14001 - DNA, 287 bp, Zea Mays
gaatacaagcatgttcaactaggagacttgaagaggaaggctatctcacaggggcagggtagcagcagtgttcgtccccgctacgtttcgccatagggtacacctactcgtctaggaggaggacaacgcccagctcagtacgctccacaggggtcaccacggacacctctcactcatcaggctgctcccactggcaccccgacgaggcctacaggacagaagaccggccctacatgcttcaagtgcagtcagattgggcactatgctaatgcttgtccggtggggaa

SEQ ID NO: 14002 - DNA, 572 bp, Zea Mays
accgcagaaacactaacataaacattatttgagtgtatcattgtgtttaaacttgctagagtggcatcatccaatattcatggtagtataacatcctgcaaatgccccccaaacagcatcacatagtgttttagctcgaagttttttttctcgaaaaacgcaggagggctacgtatcattccattaagaagaaatacagagataatacaaaacagccacctcacgggggccaagtacaggcacactgatactcatccatgtataaaacacacaaaactactaactctaacacagcctactgacccgggatgtgactagttagcaaggatagctttcttgctctagccagcttccacttttctcgctcttgatcagccatcctaacagcaagatccacattaggtctagttctgtcgaagacaaagttcctttatggcaagaggtagacccaaatatttgcagggaaattgcgagatctcacaaggcaacgagttttgcagcaaggtcaagtcttgttcctcgcatctaattgggtatatattgcttttctggatattggttcgcaactcgga

SEQ ID NO: 14003 - DNA, 547 bp, Zea Mays
actaaacgagctttgctatctatgaattgataaaagatttgtcaggagtaaaatagaagagtcacgaggtcgaaagcataaaatgaaggtatatgacagatgagagtgagcaagtgtgattaggagtcaatttgttgaacgtcgattgagcacaaacctcaatgggaggaacaatgggtactctctgagagccaactctgaatgagtcattttggtgaaaggggatatcaaactacaacacaagtactagtatggttctagatggcacaaaaatgatgagtagcaaggagctatgagtttggaaaccctaggaggtgtggaaattttgaagtttagggcttgaagcatagcactaaagggaggaagtagggttatatagtggacgacatggatgtaggtgctggggcttgggcatagggagcgcacatagagcgatgggttatggatggcaaagaacttagctatgaggaagcagatggaagatcacatgcacatgatgtattgaaagcagcctatgtgtgggtgtggtggtgcttgatagtgtgat

SEQ ID NO: 14004 - DNA, 332 bp, Zea Mays
cctcatcatacaaatcatagttacatacatgcagcgagggcatcgcaccttactttggttcaaccttcgggatgatacccatctccctatagttaaacagcattatcctcagctcctcaccctcaaaaagattccgcagctccccctctcctacactcgccccagccggcaaggacaacaattcccgtttaccagccccgtccacacgaagacgaccaccctccacctcaccacaatgacgccgctcactttgcgacatctcactaactctccgcttcgccaccgcccttcgccgcctatgcccagcactcgtaccaggaaggacttcagca

SEQ ID NO: 14005 - DNA, 321 bp, Zea Mays
caccgctgctccgatagcttttgaggccttgctaagggtaaaactttctaagatgctctatgttccatgagttccccacttccgtaccatccatttgagtaagccgatatgatcctggccgagtgacttccgacacaatgaatggcccttcccatagtggtgacaacttgtgccgtccttcccccgttagaatttggcgaaggaccaagtctcccactacaaaggatcgatgtcgtatagctttatcatgatagtgcctcaaggtctgctggtatctgactgactgaattactgtgttcaatcgctcttcctccagcacat

SEQ ID NO: 14006 - DNA, 452 bp, Zea Mays
ccaatgggggacaactatctttaatgcgcatacctaccctgcccagcactacaggtgcacagtggcaacaagactacggtcttgtcaaatattaacatcatgattacgcatgcaccactgtgcatgcacgccacctgccagcccctcacgggacatgtaatacgacaggagggcagatcggccctcgggcacaaattccgcctcacctgatgccaagctcaccctcggatccaaagccccctcgcccgagctcggctatctgttccaccacgaatcctgcaggaggccactccgtcgactgtgtcgcacgtcagaaagggttcgtctatcacctcgggaagacttccaccgcgcccgagctcgactctgttctcaatatctgcagcaaaggacaccccaacgtcatcggatatagaagcgatgacgcatcacgtaaggtatgtggccaaacc

SEQ ID NO: 14007 - DNA, 881 bp, Zea Mays
cgactatgcggcgcgcatggttatcggagtgatccgcccgtgaaattcgccaacggcgccgctcaatcggacttcggcgcagggtataagaaaggcatcgggaacccttcggccctcggccacctcacctcatggactgtagccgtcgttggggagagtagaaaggagggagtggaggccctatgcgccgccaccgcgtgaatcgtgggtcgccgtgaccgctcctcgcctgcgcaccttcgggcggcgcatagtacttggagtgcgtggaatcgtcctcgctctgcgccggtgtcgcgctcacggagccggagatttgccgcggaaccacgcagcaggtcaagctgggagcgacattaacctcggtgagtatctcgcctcgttactagggtatttcggctatcaataccactcggcgaggtggagtacgagcgcaagaattggataccgagggtagattggagaggatcgcgctgggtttgggtttgcgcagcaccgggttgcgcacggtcggcgtcgtggctgacgaacaggacgaagaagacgactcgccgtccgttgattaggggaccaacggctgtgattcatccggtgcgcccttctccgccgtggtagaggtagatagcgtcgtggaccgttagattgagatcgggttgaccagggcacctaggggtctcgtgcgattttggaccgtggatccgtgatccaaggaccacgtctgtgtaccgcttcactcaagtgatggtctaatccgagccatcgggatgtggatcaacggccagatccatcccgtaccccttcgtctgcatcatttgcataagagcccccgacaaactagaaaatacaacccgccgtccagtgcacagttccctgagtcttag

SEQ ID NO: 14008 - DNA, 327 bp, Zea Mays
gcaagatctacatattacaaaggtaaggatgatatcaaacaaaagctcaacaaaggatgaagttaaggtgaggcaagattgcaaagcgacaaagtgaaaggaaacgaacaagagcgggatagggaaaacaacactctcggattgaaatggaataagtgaggctaagaaaaataggtaaacatcatggtaagtatggagagaggtcaagggtcaaaggtgataataggcaaggatataaaggaagaggtaaatgtgcataaaaacaggaatctaggtacaaccaaaaatagagttaagataagtcttgcaagtggtaaagtataggat

SEQ ID NO: 14009 - DNA, 890 bp, Zea Mays
tgtagcccaatcatagaagaacaactttgctaaagagtgtgagctcagttgttaagaaaaatttggagaaaatctcaacccaagttggactgtcaggctggttctgtctgaacatcagactaacagattcatgccctgaacttcaagcccaatttcaaaccagatgcagtggctttttggggcaacatcatatggcaatattgtagatggcatattgctctacaactttgctgcagagcttggtatgagttatcatcagaaatcaagagaaaacttggcttcaaatttggctgtcaggttcatttaactgaactcctgatggtacagtgcccaccggatcagaccgccagcgcggctgtcttcaccatcgacgaccgatcttcgccgtgattcgtgccaccgccgtgtgattcacgtcgccgatgacccgataagaccgccaggtaaaagccaccccccctggggataactccggtgactcaccgtgactgcctttctgctttgcggctgtagccgataagctcaccgtcgaccgccgcctctcggtcgtgtgccgcgtggctcaactcttccaccgtgtcactgtgacccgctactgctgtcaaatcggcgccggtgagcttgccacggcgttagccacgaattctacacgccgccttcttcctcatctccggccgccagcacggctcggctaaattgatcgccaccgcccgctagctctataaattgacctcgcccgtagctgcgccatgtagttgtgaagctatagcaaccgctcccaccctcgatcgtccatcagcacgtccgaattgcgcattctccccaattcggttctaaaacaccgtgaactcaaccccgccgtggtcagcccaactccggttagctccttc

SEQ ID NO: 14010 - DNA, 745 bp, Zea Mays
acgccgaggtccccgacagcgcaccgcacagggagccaagctccggcgagctagactggccggagggagcaaagaccagtgctcccgagtgtctgacactgaattgaacccttcccgagcatttcccctaacttaatttcagaaatggctaactggttaactctggccacgacgaccgcgagcggagcagagggttgaatatgttcccggcgattaagggggactcagttcaattgggttggttgaggagcatcaggggagtatactaatactgaaacaaggtaacagagggcgtgaacaaacctgggagtggctgaccgcggcgaggtgttcttcgctgtgtgatgaaccgatttggggaaactcgaaattcgtgagctctagcgaacaattaagggtgggagcgggtgctttggtttcgtgatgacatagcgcagctgactcggccttcaatttatagagggcttaagcggtggtgcttaatttggccgagcagtgctggcggccggaggggagaaagagtactggcgcaacgaattcgtgtcccacgccgtggcagttacttcggtgatcaacagagagcgagagcaggtcacggcgatgcggtggaaaggtatagacacgcggcacgaggccgagaggcggcggtcaccggcgtgcttatcagatttcactgcagcgagcctggtacggcggcgggatttatttactagccagagttatccacggcgatgatctttacacg

SEQ ID NO: 14011 - DNA, 715 bp, Zea Mays
attggtctaacttggttgggccattgggggatgccaggcccaccctggcccccctggtgtcttcgccactggcgaagacgaaatcgaggaccacgctagcctcgccaccagaaaccgagagtatatggaggcaggagccttaatggtgtgctgcttgtacaggatggatcgaaagaggtagtggatcgaacggtaagggtactggaacacagggacttatgcgccgataatgagagcaagggcgggatctgccacacacaggtggaggatagcgacaaccacctcgccaaccgtggacaggggcatggcatgcgacgtggtggaggtggaggcaaggggaagagaagctgggaagaagggaaggaagggaacgatggactcataggataaaaggttgttggcgaagatgacgactaaaggggtcctgcggttggcgtcgccgtcgttgcttccacacccacgcgttgggaggagttccacacctgttaattagtggatcaattccaaccgcaactcagggttttggcgaggattgagcctagtttccaaccatggtgggctaaatgaatgaacatttcatcacaggctggtattgaatccatacggggtgatgcccattgatcaggccgtgatctaggtcattccagacccagtcgaacaaaaccttagtaaatattataatgcatatttaaaaattaaaacaaatccaaataaa

SEQ ID NO: 14012 - DNA, 465 bp, Zea Mays
gagatattggcgggatcaaatccctgggtccatgggagtgggatccacaagtcagagagggccaaagaaagagaccaccctagaaggactcgccctcgagatcgagggtcggatgaggtggagccagaagggaggtcaaccgaactgagaggaagccagccgagtggattctgcacctggctcatgcaccgcaccccgtcatcaatgactgtctgcattaaatgcgcctgacactgagccgcggtgaagagtcgatcttacactcatggcctgtgagcccagaccaaagccccgctcatgacttatgagtcagacttgcggctcattcatagcctaacgagcacaggcctgagtcctctaacgacctacgaaacccgcaacatgacgaggaatgccaaggcttcggctatgaaggccaaggatcgacgcgacgcaggaggagtaatgatgacacttgggtccccc

SEQ ID NO: 14013 - DNA, 399 bp, Zea Mays
ctttgccggtcggtaatagaatacgtcttgacatgcttccggagccacgatccggctgtctccttggggccagtcatcgcaggtccggtggccgatgctgaagatgctgctcgtgagggcgtgcaggacgttgtggacgcggtggccgagcgctttcagcgggatcctactggcgatgagtagctaggcctgcgtggagaaaacgagggttccgctggggagcaggttgtaatataccattgatttcgcaagatactctttaggtactacttactgggcaatattacaacttatctgcacaccacttttcctttgctgtgtgcaccgttaccaacttcttccttggtacttggcccccgtgggatatggcctcgacgcgtcggggctggataccaggat

SEQ ID NO: 14014 - DNA, 915 bp, Zea Mays
gacatgagtggtaatgccctagagatgtgtcgtagggcaaggcataccaggtgctagaaaccccatgtgtacagtgcatggttatgcatcctggtagctagctggtctaagggtacgttgatgaccagggaccttgagaatcaggtacccgtaatggatcactgccatgaacatgtggagggcagggcctcctaggatggcgttatagggcaggcggagcctagccacatcacaagtgatgaatttagtgtgttggttgttgttgacactgaatgtaatggaaagtgttacctacccaatggtgtgtggatatgtcatgggatacctcccatggaggggacaagaatcgagcagtagcatgggagctgtagccaccaaaatgcacggactgatagaacattctcccttactatgctagccatgaggatatgggaggtcatggtgtcgatgtggtggtagtgaccaggagcaggaggacatatgcccaacgtaactaggacggtcggagatgttgaaggcgatgggggtagcggtctagttgaggcaaccacacccctgggaccttggcacaatggttagctcatcgagtcgaggcaaggtgtttgtatgacctaccttagtaatgggtaggccacatgttcgttggccacgatggcggtcgctaccagcacttaagggtgcttcgtgccttgctgctagagctcatggatcgtagcgtttgacgataatgaaggactaatgaggcgacgagacgggagaatgagagccacaaaaaaattctctacttgagagcacaccgtgacttgttcccaacttgaatccaacccctcgagactcaaaaacagagtagcactatgcagatcaatctagtgtcgattgactaaaccaaaatgctagaccagaaccaactcaaat

SEQ ID NO: 14015 - DNA, 689 bp, Zea Mays
gactttttttgggtcgagctctggttaaaaagagagagatgtcatcctttcaagttccttcatctaatggtggttaggtcccacactgtaccatgctcttcaatggcaccaactatcgtgatcgggtcttgcacatgtggtggcatgtgcatggtcttcgactttgggagttaattagtggcgagctatcatgtgcaccattgccttgtccttctgttcagccattgatttctacaagaacattagaaaacaactagaagaagctttgtgaagcttacgatgatgatatggcctcttatatgtcccaatttatggtttatcaggcatggatagatgaggatgctcgtgctgttcttgtcactagtatggatgagcgtttgactatagatttggaccagcttgatcatgtttctaaaatctaggctttcctttgacaacgctctagttagtccacctatcttgctgctttgcgtcaggagtagttattacagcagggtgacaatatagttgagttcttttggcagatatctatggtggtgtgagcttgacattcttggtctttagttgtcacttgccacttgtgattcctgatggaagcaatagagtcaccttgagctccgtcgtacgtacgttttcttgactcgcctttacgctgagtttgagcctctttgtgcttagttacttgctca

SEQ ID NO: 14016 - DNA, 361 bp, Zea Mays
cgggttctctgcaatagccacctctaaggctgaaggattctcagtcacctctataggaattgaacaaccttgaccagcctcttggctctgaagactgcactccaaggtcgacgaggcacgagacgttgctcgggataactctaatcccacatccggaatgtcagagcaaacgcccatcataccaccatccgttggctcggacagcagatcttcaggaacaacatcctcgagagcctgatcaaaatttgctatggataattcttgcaggccaacgagagcagacaaagctggagaagggatatcattactctccccactgactctgtaacgccgactattcttccgaattaatgggatttcc

SEQ ID NO: 14017 - DNA, 634 bp, Zea Mays
gatgctacctgggcagaatttgaagccgctttccgatagcatcatgtgcccttgggaatcgtccagctcaaagaagaagaatttcaggagttaactcaaggagggagatttgttagtgagtacgtccacaaattcatagagctggctcgctatgcgccttatgatgtcagcacacaagccaagaagatagcccgtttcttgaaggggctgagaccagaactcaagaccatcctcgccagccaagatttcctcagtttctcgcacctctcgaactaagccatctagttggaaagggcacgagaagaagggccacctcaagaggaagtttcaagttctccgagctcagcagcaggacaggcaatagagagttcgatcttttgggttccctcccaaagggccaagctttagcaagccaatagggtccgctccgtcatgtttcagccagcctggtcaaagttccctccacacccatctgttgcaagcagccaacctccaaccaatacttgttggcactgtggagaccccagtcactacaagaataattgtcctcagttgaagacatctatacctgcctactccaactcggtgaatggccccaagaatgtttcagcacccgcctccaaggcaccctcca

SEQ ID NO: 14018 - DNA, 903 bp, Zea Mays
cggatgacaaatgcaggcgatgcgggcaaaagggccattgggctcgcaattgtcgtggacaattgaagatggaggagcaggcacacgtggctcaggacgacgagcccacgctaatgtttgccctcgacattgaggaccctggcggcgctgcgaacacgtcttctccgacacctgtcgatgctgctgtgaacatcgacggccccacaagtgtccacacgccacatcacgtgaaccttgtggaggcaaaggtgttcgcctcattcgacgtggctgggcaccgggactcacggcgatgggtcctggacactggcgccacgaaccatatgatcggatgtcgtggtgtcttctccgacctcgacaagaacatcgccggcacggtgcgcttcggagacggatccatcgtcaacatcgaaggccggggcaccatcctcttcgcctgcaagaacggggagcatcacaccctcgcaaatgcatattacattcccctcctcactacgagtataatcagtgttggccagctcgatgaggtggggtttgaggtgcacgtaaggggaggagtgatgcggattcatgacaaggcgcgtcgtctactcgccaagatctaccggagcccaagccggctctacatcctcgacgccgagattgctcgaccagtgtgcttggcggcacacgcgaaggaagatgcgtggttgtggcacgcccgattcgggcatgtcaacttcactgcgctaaggaagatgggccgggagaggcttgttcgaggcatgcctctgctcgaccaggtggagcaggtgtgcgacgcctgcctggcagggaaacataggcgctcgccgtttccccagcacgccctgtcgcgctccacggaggtgcttcagctgctgcatggggacctctgtggtccaa

SEQ ID NO: 14019 - DNA, 2172 bp, Zea Mays
agatcctcctttccttagcgataccctgccacccttggtgtagggtctcctttaggtggccatccaatagcactgtgtatgcaactacatcaggcttgattcctaaatttatcatttgaacaaataagtcacatgcttcttgcaaccgaccaaccttgcaataaccattcatcagtatagtgtatacaatgacatcagaaagtcctctttcatccatatcaaggaaccataagtgagcattgtgcatatctctgttctgacaataagctgaaataagtttgctatatgaaattacatcaggaataacattcttttccagcatcatactacacacggttgaagcctcctcaaccttttcatctatgcagaggccatttatcaattttgaacatgaaaattgatccaccatatttccttgtttagcaactctaagaaaaagtgcgtgagcatggtcagtccagcccgagtgcaaataaccacaaaccatagaactgtacagcagttcaatattatctatccctttttcttctactatattaaataatacctctgcttcgctcaagttgcctcctctacaaaaactagtaatagctacaccataggtgagtgaattaggctccaacccttgattcatcatgtgctcaagaaggtcatataccttaataacagtgccattcctgctatacccactggccaatatgttatatgttactacatctggttttacattttccttcagcatctgctcaaatacttgccaggcattttccatttctcctttcagacaataaccattgatcaggcatgtatagtggattttgtctgggaccaaacctcccgccatcatttcagttagtagcttaactgcctcattcatgttcccaagcttgcaataagcatccatagcaatgttataaagaacgccgtcaagatggagtcctagatctctaaatttctggaagtgaacaataacttcagatatcatgcctagcttcttgaggcactgtagaaggtaaccaacaatgtaacaatttatctcgatgccatgggataccatggcttcaatataatgccacaccttttctaagttacccattttgcaataactacgaatgagatagctataaccatatagatcaggggtagatccatgtctggtcttgatgtccaagactttttcagcctcctccagtttcatttctttgcatagtccatcaattaccatattataagcgatggactcaattgcaaccctttcctgggtgatctcatgaagaacagtgtatttgcttaccatgttataagctagatcgtactttccacaatcacaaaggccaattataaatgatgagtatccatgtgcatcaggtttcattcccatttcaatcatcctaacccacacttgaaatgattcttctgccttatttacttcaaaaaacgacctaatgactatgttcaatgattgagtatccagcatcaactgaaagcacttcatttgatcataagctctaacaaccatatctgaatcaccactctgggatacaaatttgataaggaaactgcaagcccaaagtgtaggaacaaatccaagcctgcaaaggtgacaaaacatctctactgtttcttgtacgtcgtggctgttagtgtatgccttgattaagcaattgactgcatatgagagtatgtgagaagtggcacaagttttgctcaagtgaccaataagtgttaagatttctgggtcaccattagcagttcccgaaagaatctcacaaaacaaggataccaacatcttcccctggaatgaatgggataaaatttgtatgatctctgagtaggttgagaagtcatggttaaaaccaaggctatgtatatctttaaagtaggcaaatgcaactgcaggcttcctccttaggcagcggagagcctgcacaacactgtaagagctcaaagacttctgctgtttctggataggctcattatcagaagcataattcagcctttcatcaccgcttgagtcatcatggtgaactgaagcgagtacggagtagttgcaagaaggaacttcccgcgataaatccttactgtgcctgaaccattcagcagtgcatttgagccaccgtgacaggatcattggagatataaatctttgtgctcttctaacgacccattagc

SEQ ID NO: 14020 - DNA, 490 bp, Zea Mays
gcagcatcgctgactaaagcagcgtaggtggatagaggcgtcggagactcatgagctgacagattcctgaaccctcaatcacctgcatccatcaccctgacatgaatggtactgatatagtagcaagcccgagggggttcgcacactggccttgtctcatacacgggtcggacgtaggttcccaacgcatgcagaacatcttgcaacaggttagggaagtgccatgtctcgaacattgatgtataatgttcagtgacaggccataaccccacgtagtggtcctgctgttcatcattggcttctttgttgatgttctcctcctcctcttcttcttcttcgtcttcatcatcataaccagagtcactcgggtcgtcgcctccgggagcaggggcttggactactggtgatggcggtgctgaagctaacgatccagctgtgaaggctagtgattctgccaacggggtgggcgtaggcagaaactcctccgagc

SEQ ID NO: 14021 - DNA, 273 bp, Zea Mays
gttgctggcccagagtagtcgcccgaggctggggcgagtcatggcctggtcccacatacaactcttttaccacgcgactaaaaatagtcgcgtgggtactgcgtctttatatagcagtaaggggtaccctagtttcagggtatcgacagtggcccccgggcccaccttaggggaggatgcgagcctgcaggtgggtccaaagcttgtactttgcctcaacatggcctaatcagtgattatcgcgctgttttagcacgtctgctaatgcgcccg

SEQ ID NO: 14022 - DNA, 751 bp, Zea Mays
cagagtcgtcttctccgtgttgttgcctgcgtaggcacgtaaatcgggtcgttgtaatcacctcactggattccaagcgatttttgttaggcttataaagtggttgagtccgtgcatcacctcgcccggtatatataagttggtgtcaccccttggtcgcggttcatggccatttgcgtatgcgtcgatcggggggaaagagcgagggagaggtagccgccacaggtatttcccacatttgttcgacgcttaacaaccgcagggggtcgtgaggatcactagatcgtgtgggaggtgtgtggccttattgaacagagaaggccagtacaggaaggcgaattcctcgccggacatcgtccagcatcgtagtatcacacctcaccgtggtcagagggttgtacccttcaagtcaaggtgagacacctcttatcatattcgccatggtctccacttagtttagcgcttgaggggttgatgttggtgtgccagagggctatgatgctagcaccggccatggccgccgctgcggcacaagcacgccaccaccttgtcgagctgagggtagaaggaaggtccctagccgtggatcgactggtggacggatgagattagaacccatgcataccccttcatcaaataaaatcctagccgtaaaaccgctatccgatggccggtgatgtgtaccccttcgcgatctaatctaggccttagatcaggagatggagggttcgagtagagtatagctctcgac

SEQ ID NO: 14023 - DNA, 351 bp, Zea Mays
cgcgacggttcacgattcctcgtctacctccgatccggcagcggcggcaagcgggattctaaggcggcgtttcgatggagaaatccccatttaaaggccccgagacctacccgagggctattgcatgcaagagtatgttaacacagtaatgaattcgttggagggtgactcactgctaatcgcggcgctgctcggtctggccacggcgagttgcggacgacggtggtgttgatcggccgacgaggaattcctcaatattcggtgggtctccttccaattactccctcacccagcttctacatggtcaatcccacccccaagtagccccgctagagcctgaaccccaccgtc

SEQ ID NO: 14024 - DNA, 748 bp, Zea Mays
ctggattgtttttacttgagtctggaacgacaggaatggaagcatacagagaggcagaggatgtacctagaatcagcaatgatgaaagccaagtcatggccatcaccagttttatcagttgagcctcccaatatcttcctcgcaacctgcctggtagctgaggacccaccttttgatagtggcgttggcgaccttgcacgctacatcgaagtgcatagtctgtaaggcaacttgagttggtggcaataacaaatttattgagtgttcgaaagcatgggttaccttatccttgctgtagtttttggtgctctgtggtgtctgagaagaggtacctccagttgggacagagtctgctgatgtagacttggatgcagcccgcgcagacgaaattgatgaaggttgggatccactgggtgaaattggaacttgacctccatcaccaatctcggcgacaaccgtgttaacctggaaacacacattgcctaaagcaatggtgctgtctgtgaagcttacgttgaatgtgtacaccttttccatcagcctatttatttcatcaggaataaatctggctggattatccgcgatcaagatgtcaagtggtttcttaacaatgcgttgtgccatacatccaaatagtatgaaatcagtctcgcctgtctcatcgcctgctgtgatgagcaacctgtacctgcgcacaaagtagcagccacagatgtatgattaaggagtcagcaggcatagatgtacc

SEQ ID NO: 14025 - DNA, 681 bp, Zea Mays
ctgagaaacttaaatgctctgcaccgcaaaccttggtaggagcagcaagccgaggctgttgtgatgtctggttgtctggaatcaaatcaccggcaggaataacaccatttcctccttccagttctttcacagtagctaggggccaaacagcagagattagtgggccagcaaaagagaccgacatggtctttacttttggaatccagcgcacagccatcccacgacgacggaatggggtagacggcctgcgccttccgcttgaactctgcctctgtgatcctccggaccgccacggcaccgcgaagaacgtgcccagcccgaaagactgcggtgcctacgggtgccatgacgtctattctgctgaaagtcctcatcatcatcatggtcccagtcacgacgactgaaatctctgcctctgtgatcctctgatatctctctttttctccaatagagtctggcacgccatagctccacacaaattctcaacgtggcctacgacaagtgggaccttctctaacatccctcccacggatgaatgagaggtattctacaacttcaatgtggttgcgaatggtgtatacatggccttcctttagattagttggcaagtcatgatgagccccaaccagaggtagaggggcaataggaggagggagctccctatccggttctgcgacagat

SEQ ID NO: 14026 - DNA, 379 bp, Zea Mays
tggcaatccggtctcatggagttccagaaaacaatcaactgtctctcgttcaagcaccgaagctgagtataaagcggtcgccgacgccactgcagaacttatttggattcaagtgttgatgcgagaacttggcattactctcagccgtgcacctagtctctggtgtgataatattggtgcaacatacttgtgtgccaatccaatctttcatcgccgcatgaagcatgtagaagttgattatcattttgtccgggagagggtcacccgtcgccaacttgaagtccgctctatatcgtcgaaagatcagctggctgatatcatgacaaagtcgctctccagtacgccattccaagttatgcgggacaatctgcagctagcg

SEQ ID NO: 14027 - DNA, 611 bp, Zea Mays
ctggcgaacaccgtgggcccggcggaccttcaatgcttgagccggttgtagttgggcggtaccatggtggatcgaggggtagaggtggtggtgaccccggaggtgtgcacatgatttttttgagtaatcccacatgaaacacatcatgaatgtgtgtcgtggccgaaagttcgaggcgataggtcacctcgttgatcatggccgtcaccttgtatgggctatagtaaaacgacctaatcttgccacgcattgctgccggcagggtcgttggggtgtgatgacggacctgtagccatacccaatctcctggtgagaaggtcaaagccatgtgtcctcggtcgtaggcatgtttggccaccgcctgggcttgttccagccatgcacgaatatcgcccaagaactcatccctttctgtcattgtttgcatgattgtcggaacatggcactcgcctacgtcgtactcacgcaatgctggtggatcatgtccatagatgacacggaagggggtctccttaagggcagtgcgaaggaggtgtcgtactctgcccatggtatctacttaggccattgacgaggatgatcatttgtcaaacaacagaggtacataccaa

SEQ ID NO: 14028 - DNA, 472 bp, Zea Mays
gggttatcgacatccgcaggggagcacgatagagctagaggcgacgacttcgagcttgtggagagctcatggaacataatcgcattgacagggacctgcgttcccagatgtggatggtggggtagcagtggtggaagggagtgagcgctcggctaatcggcatggtgtaggcagagcgacggtggccaaaggagcaccagttgcagcaccagatggggtcacggtagtcgcggactaagtgatccggagtgaggcagtgaaagcacttgaagggcacaacaatgggcatggctttaccaattttacaacgagaggcgacttggatggggagagaagggtgaggggcattggtgaggttataggtgcgtttaaggctgtagatggagtaatgctgggcgagcggtgggggtggtgatgacgggacgtgcattagagagggttgcagagcattggatagggttgtatgcggtgc

SEQ ID NO: 14029 - DNA, 1307 bp, Zea Mays
aagcaaaattgctggctggagaaatggatttcgagtatgattggaaggatattctttttaaagaggtcactatcaaggatagggagaagatacaggaagttgtgcgggatgaggaagcaataccaacaaatagtgattgggctgtaaaactgggcattaatctgtactatagtgctaatcttgctaagtctcctttatacagtaagcaagttccatacaatagagttatctatgaggcatttggctgcggttctcccaatgactcaccagtgaagctgaagacttattccagaaggcaatgcagggcgaagaaaatagtcttggctggcaggtggtgtggaaaagtatggatgtcaaaccaggttcatccatacctggctgacagaatcaaaaatcatgagccgaaagaaatcgatgaaacatttccttctgatcagaaatcccatgctgaacctgttgaaaattcaagtagagaggcagcctccacaagaaagagtagcagcagaacaattgaaggaaaaacaagcaagagggagaaagaacagttggagaaagctaatgccaagaagccaaaatttactgaagaggacaactccaaatcattggagggtactgctgaagcctccacacagaagataaagggcagatcagttctagaaaaaacaagcaagaaggagaaagcgtataccaagaagctaaagcatactgaaaaggtctcggaagcactaaaaggtccttcagaagcctccttccctgcaccagctgggatggtagtccgcagcagctctaggatcgccaataggaaaatcatgttgaaatcaaagatggaagaagaggataatggctcagctgaccgtccaaagtcaaaggtcgaagacgacaaagataatcctgctggccgttcaagagcaaaaccactaaggcaaaagactaaagtagacgcgaagaagaaaacgaaggaaactagagtagaaaagcgaaaggctcccagtccagcttctcagaaggacgaagaggagcaatcagatgatgtcgagggacgttctaccactaaacaacggctgtctttacgtaagaagggggctaaaacagaaggaaaacagcgaatggagaaacccagattcgggggaagtgctcctcccccaagctctccgaagcgcaaggaagagtacgtgtgcgacatcgaaggctgctccatgagtttcggcacagagcaggcgctgtccctgcacaagaacgacatctgcccggagaagggctgctgcaggaagttcttctcgcacaagtacctgcagcagcaccgcaag

SEQ ID NO: 14030 - DNA, 303 bp, Zea Mays
tgctgtcagattcgccaaacaaaatgatctaaccgtcatggattattataattcaatgatggataatattgatgaggtgaccgacaagagggtgatagctttgggagcaatagaaaaggacaagatcaaagtagccagggcctacaacaagaaggtcaaagcaaagtcatttcaagtatgggacctggtgtggaagaccatcctgcctctaaggactaaagaccgaaagtttggtaaatggtcgccaagctaggagggtccatataaagtaaaacaggtaatgtctggtaacgcctatttatt

SEQ ID NO: 14031 - DNA, 424 bp, Zea Mays
tgagggcgtctgctaccacgttggccttcccggggtggtagtggatctcaaggtcataatctttgatcaattccagtcatcttcgctgacggaggttgaggtctggttgagtgaaaatatacttcagactcttgtgatcggtgaagatgtgacatttgttcccaattaggtagtgcctccatatttttagggcatgcactatggctgccaattccaagtcgtgtgtgggataattctgctcgtgcggcttcagtaagcgtgatgcatatgcaatgactttctcattttgcataagtacacaccctaagccttgccttgaagcatcacataagacgacgaaatcctgatggatgtctggcagtgtcaaaacgggtgcggttgtgagcttcttctttatgatttggaagctttcttcacacttcgg

SEQ ID NO: 14032 - DNA, 743 bp, Zea Mays
gggccctcctttgggtttggctgagcccaacacttggagccagggattgacccatgatatctctttccacttttcctattagtgccttctcactgaattaccgctcaagtggagatacatcggggggtagaagagctcatgttggtatttcctccagccttatgatgagtcgtcaaaacaccataactgaaaagtggttttgttatgttctatcgaagagaggtgggtgaggtactttagagagtcgatgcaatagtggaggtagaaccctgatgttggggctaaggcgtatcgtcattgttccatgggcgtcgatgatatggcaagggacacaatctcctagtagtaacatttgtatagatcgtgcgagtctattgaagctaggtacctggagtccatcgaagttgttgtgatggtggtggatggtattgatgtcattgcatactgtagattatggttgtcttgatgtagaagacaatgtagttgtctcgcctcttgctacgcagcccgtgcctcccttcccaccgtggagtgtcgaggatgacatgtgttgcaatttaaggctactagaagagctttgatctcatatgtcttcgcgtcaacgtgaagagggatgtcaaagcaggtaccacagtaggtgattgtcatcggtaccaatgaagtccaaagatattgatgttggtgcgacgttcgacgttgcccgccagtcgtgcgaaggttgtgttgatgatgttatgcgtggc

SEQ ID NO: 14033 - DNA, 1748 bp, Zea Mays
agtcattggcactgccttgctctaaacgtaaaacaaatagatttacatgttttctaaaactaataataagaagataacagtgcagcaagccagcaagacagcaagtagagatggggaaacactcaatagtaccaaatctcactatttgcagtaagttagttgggggaggggggtatgcgtaccaatgcaaataatttattgaatagaaacaatggtcctcaacatgccaacaaaatgacgaaaacagcatccctatgtagagccatgggaccatgacaccaggaattttatccttgactgtcctaagaactgagccaggcagattcggaaaattgttcaaattccacgggcttgaacagtatttctgccacgtctctaggtccatagatgatggcactgtatcaccaagacgaggaaacccgctcccataaattgaagtgtccaagtcactcccatacataacctcaagttcccctgccttcccctccacaatctcccagaactgcttctcaatttgaatacggctgggattcctctgcccaaaccatctctttctcaccctgtcgtcaaaccgccggaaagtctcaagcaagcaggacttcctcctttggataaacccaaaacaatctctatcggagttgaggcaatctgagcaataccaattccctggaggcactcgctcgagcggcggcgacaaacagtacaaatgccagcctttatcacagcgatcgcataggagcatgacatccccatgtaacccactactacactgctcacaaacttgatccacttcatcattaaacacggtagacgcggcatcagactttctccttttccgcttccggacaccagcagacacctcatcgactgtggtaaccacagcatcagagttcctcctcgtccgcttctgggcaacagcagatgccacattatttccagtgatgttaacaacacggccataacgaccatgagatgtccctctgcctaattccttgcgtgagaaatttctccttttccggcctgtaacctcctcaaccatctccccagtaacagatatgttgctctcttcgtcctgtgaacgagaaaccgatggtcgatcatcagatccgggccgtggctgcttccttcccttgttcccatgctgtgggttggcgaacttctcatagccatagagatgctcgtaatatagctgcgcaagcacgtgcttggcgcactctgatatgtgcattggcgccttatcatcaacgaggcggacgacgtcgccccagcgcttcccctcacaggcaccgtagtaaccgccgaagcgcttgacagcatggaacaggcggcagaggtcgagcgggcgaccatccgagagagagggcgacttgggaaggcccttcctgcggccacggcgatgtgcggaggaagccccgaggaaacggcgatagtcgaggaggaaggtgtcggggtcagcgggggcggggcgggcgaggaggcggtggatgggctgcctcttggtggggaaggagagagccttgaagtcgagggcgtaaggcggggaccatgaggacggcgggacgatgcggcagatgccgtagggctcggcgagggggcggatacgggcgacgtaggcgagggggtcggcgaactcctcgtctgtggggtggaagaccggcgcctcagggacggaggtggctgtggcaacggcaggaggggcccctttgcccatgggcggttaggtttagaggtcagcgaagaatggcaag

SEQ ID NO: 14034 - DNA, 943 bp, Zea Mays
gcgtgaacgccaacgtatgagggagagttgctactgggcggagtcaaggatgccacctctggccaatcggaaggtgtgctgtcgtccgtgttgagaacgcggccggggaggctcggcctaccctggcggatgtgtctgtggcgtcgtttggaggggtgaccgatcgggggactggcaattgctcgccggtgaagaagcttcgtcgggggaccgcactgctccgcggatgggattttcgccgcacaatgcactggtatgccccccttcatgttcgcgccagcattcgccctcgtctgctctcggtagcgctcggatcaggcccttgaagttcggatgggcgcgtctccggcagggttttggcctcagatcagcggcgttgccgcgtgtggggtgcgggaggtggaagaaagatgttggccgttgatgataggatggacgaatcagattgggggaaggtagcgtttcggcgtgatccaatccgagccatagatccataaaccggcggtgtagatgagatcttcaattcattaaatggtgacctttcgatagtagatgaatgcttgcaattagaacagctgataccccttcggataattaaatctatgccatagatctcgagacccggtcgtaagcaaccgcagctataacagttcggctacatttgcaaatgggcccttcagatttagggtaataacccaccatccatttttcagtgtaaagaaaataaattaaatgaggactttgcatattagcctctaggatataaaatcagtatagaaataatacccaaatgactgataaacttcataaatccataactaatgcattttaactctgatttagcccattctagttgcattggactcataataatattgtttatcatctagtaaccttgtattaccatgaaacctatgattaaaatcttgtacctcatttgttt

SEQ ID NO: 14035 - DNA, 347 bp, Zea Mays
ggaactcatagctttcgctatagttattgatttgggtcttgtaatgttatacagggagtgatattgatctttcagcgagaccctgtccagccagctatcctcccagaaccttacttgagatccgtctttgaccagaaaggttccgaagcgtagaaagtctggttttgccttcattagacaagaccaaaagtgggagtcaccaattttccaatccacttgagccagtgattttgaacctatgtatttattacggagcaattgttgccacataccatcagaggtaagcaatttatacaaccatttgctaagaagagctctgttcatagtgttcaaatctaggattccaa

SEQ ID NO: 14036 - DNA, 845 bp, Zea Mays
caatatgttgtcgtcggtagcagctgatatcagcctctagcttcgaaaagccaacactcttggatagagtgccgactatcttcgccccggcgcggtcgcggacacatcttaggatctcctcgtcaaccccccccccccccgaagagcaaagcccctggttgatatccgcatgatacaacaaattcctgcaactctaacttgttctcttcagacaattcttggccgtccaggtaccaaagatcaaaatatttttcgcccgaaggactagcatcaacttccctttctttgcttggcgctgcggccatttcttcctctatagccacatctttaaccacatctgatatgagcctatcaatatctgacattgttgtttcggcttcatcagtgtttttgacttcagcagcagcatcagcttcggcactcgcagcagtcactattttagccactgaggcagaaggtggtgtttgctcgacggcttgcatcacgttaactattcatcgtttcttttgcccttcaaccttctcctttgcagccgaaggttgtcctttcctctgtaaaaattgcgtctgttctgatcccagagaacttagcagcttgaagtgtggggaataagtaattacctttaaaattcctgctacttcggcagtagagggcgttgaaggagcttcttcccctgtctcatccaccttcggctcaacagagggcgttatgtcaagcttttgctttttattgattgtcgctttcggctcaagagctgtctttgctttcttcaaatttttctcatcttcctttattagccgagcagcttgcctactcaggatgctgacaatccttttccttttcac

SEQ ID NO: 14037 - DNA, 385 bp, Zea Mays
ggtggacgaggcaaagaacgattctgattaaaaggtcggattaccaacctggttcgcttcttaggtccctgattagacctgtcacctccatggttgtattcttagcttctacagccaatgccgtactgacggctctgctgtaagtaaggtccagacaggtggccattttcctttggagcctatagttgagtcctcgcatgaagcaattctttttctttggattagtgttcacttgatcgatgacgtactgcgataaatgattgaacttgttgagatactgcattacagtatctcccccttgctttagtcgaatgaactcctcttgtttcatgtgaagcaccccttctggaacatagtgttcacggaatgctatcttaaattcatc

SEQ ID NO: 14038 - DNA, 469 bp, Zea Mays
agcgattttccttttcctcccttgcttctgcgtgggaaagcagtaatctaggtatacgaacccgataacatcaaacaccctattcaatctcttcttaccgcgggcgccgaaggcagctgtcgtagcttcgtcttctgccttcgaatacgccgtaagcatctcattgcttgttgcttctacggcatccaaccagtcatcatttggctcgtcaagccgattcttgaaccgaaatgtgtactttagatacaccaggccaccctagctggagccagcggtggcctcctttggcatttcccaatcactcgcaagaggccatattttgtacgcaatatgctcttgaaccaagtctcttgagccaatgtaggtgcacactgtgttgaaagccgcctggcatgcttgcacatcattcccaagcgctgtggctggcctcctattgccgaagcgagaccatataggaccttgaataatc

SEQ ID NO: 14039 - DNA, 726 bp, Zea Mays
attatccaacacatgatttggaattggcagccatagtgcatgccctaaaaatatggaggcactacctgattgggaacaaatgtcacatcttcacagatcacaagagcctgaagtacattttcactcagccagacctcaatctccatcaacgaagatggctagaactgatcaaagattatgacattgagatccactacaactccggaaaggccaacgtggtagcagacgccctcagccgaaaacctttcggggagaaagaaaccaacttcttggaagattcgaagaaagaatcagtccaattgaatgcttgtctcagagacaatggcagcctagaagtcaagccaatactagaagaactcatacgcaaggctcagcgcctagacactgagacggcaagtcttgtggagagaactcgccaagaacaactcccggacctcaggacagatgaagaaggaatcctttggttcagaaaccgtatgtgtgtaccaaaaggagaggcacgagaagttttgcttgacgaagctcacaactcagtctactctatccacccagggaccaccaagatgtacctagacctcaagaccagatactggtggagaggaatgaaaaagaagatagcacagtatgtggcccagtgcgacacttgccagcgaactaaggcagagcatcagaagcctgcaggtctactgcaacccctcccagtacccaaatggaagtgggaagaaa

SEQ ID NO: 14040 - DNA, 314 bp, Zea Mays
catcaataggagcacctcatctctttgaattacggcaaaccctatgaccgaatcaccgtggaagcaaggggaatcacaacaaacttcttcacggaccctggggcttggagctataaccttccgggcgagccgcaatcccttcttaaccatagccaaacgagccaattgactctcgaaacaacctcgccgtgagacaccaaaagtaacacgccgtcgtcgccagggtgagaagtgatggtgggaatgtagccgcaccctcggggacgaccggggacttcaccgttgttcatgaaggggatccgtggtgttgtagt

SEQ ID NO: 14041 - DNA, 274 bp, Zea Mays
gtaaggctgtacgtcttcaattcaacaggcaacgtatcttcctcatccatgctcttccggcgatgtgcacgtcttggagacccctatttttcacgtacggggcgccggagagctcctaaccgccttaactccgatccactactcctcagttacagctcctgccaaccttctgaacaggcgaaccaccaacaccatctcagttacagccgctgccctgcccaggcacctgcacctgcacctgctcctgccgctgaacgcgcttcaaatcctacca

SEQ ID NO: 14042 - DNA, 650 bp, Zea Mays
attttcaacggtcttagaacaacatctaaaacgctggccatccttctaccgtttttaggtgttgctatcgaagcagatgttattcgtaacagctcttgcttcattggagagctttgcagtttcggttgatgttcggtcttagaactctctgttgttgtcttttctagttgaatggtgggaacttcggctgctgctgcgggtattttcatcgtctgttcaaaaaattccaaaagcagcagattaaatttccttcgatttaaagcaataaaaaagtattacctccgaagccgagagggtatcttcggcagattcaacgacctttgcctttgaaccccctgtagcaggcagtatagcagccctctccaaaaaatacgacttcggccggtgagttacaagtttcattttctttggtttcgacacgatagagggggtcattgtggtaattctccttttcatcccttgcttctgagctggaaaccagtaatcgcgatagacaaaaccaatgacatcaaaaactgtattcaacattttctttccatgggcgccaaaggcaatattcatggcttcatcttcggctttcgtataagcccccaacaaatcatcagtattcgccataatggcctcaagccatttgtcatctgcctccccga

SEQ ID NO: 14043 - DNA, 421 bp, Zea Mays
gagggaggggcggcggtgctggtgcggtggagctcagggagggagagaagagtggccgaggccggtgcagatcatggaggagctcggggcggcccttttataggcgcccgaggggagggaagcagcggtgttaggtggacgccggtgaggtgcacaacgacggagtaaatggtgcacaacagcggcgacgggaccgctcggcggggcggtgccgtgcaaggacgcgaccacagcgagcgaggacgaagttgtgtcgaacttctctgtgtggcgagtgcaggcggggaggaggagaggacgatggccgacggcgatcgcgctgaagtcgtgcgcggcgaggaagatagggtggctgactggcggggccggcttgtcagcgatgcgcgggcgcgagagagcgagggtgagtgcggctagcggg

SEQ ID NO: 14044 - DNA, 498 bp, Zea Mays
tcacttcttagaatcaatgtagaaccacttctgtgcaatatactcgctgaaagctgctttgagagctctgccaaacaggctgggtcaagctgcacttcaaacttctatgggaacaacttgtattcagagggttcaatgggagtgcgtcaaatcgatttaaatgggcaataagtgttgaatcttgatcaaatcgcacctatggttgctttttgaaccaatcaagtgacggttccctaccttttgattgcatagtgaatgacatcttgtgtgtcttgcgcactactattttgttatagttatattctgcaagctataattctctttttttattcatttttagttgcttagatagacatttgcatatcatagtatgttttgacacaaccatgctaggaagagtgtgtttgatctacatgctgacaagttgttgaatttcaggttgctgacacgattttacaagatgaaggctcctttgatttttcaatcataatgcatttt

SEQ ID NO: 14045 - DNA, 842 bp, Zea Mays
ccttgacggagacatcgtccactccggatggccgcacctttggcaccttggtaggttccttggtatcggaggtcgaggggtccctgccttcgtcgtccgggcgagcagtttccgccgccagggcgtgcagcttctccacagccgcaagcgcagcggcgcggtcgcctcgcacggtgaggaccccggctggggatggcatcttgaggaccaaatacccataatgggcaatggccatgaaccggtataggttcggcctgctaatgatggcattgaacgggaggttaacctccgcaacgtcgaactggatgttctccgggcgtaagttttcctctgtcccgaatgtaaccgggagcgtgatgatcccgaggggatacaccggttgagtgcccacttcagagaatggatgagagggtcctagccgggaccctgggatctgcagctgcttgaacgcagcatggctgatgacgttgagcccagccccaccgtcgatcagaacatgatgcagcttgatgatggcaatgacaggggcggtgatgagcggctgtatgccggtccctgccatgttcttggggcagtcggatgccccgaaggagatagtggtgctacgccaccgctggtgtggagtggccttcgggacccctggggttgccgacaggacctcgcggcgcagggacttcacgttcttgcgggaggtgagctcccaactcccgtcgtacatcacgtatagcttcttgcggcggtcgttgtcgttaccagagtcggagtctccagtgaggatgtccttgaggacctgctcgggggactgatacccgaggtcccgttctcccgcggccacatcacca

SEQ ID NO: 14046 - DNA, 663 bp, Zea Mays
aattcttcccatagtgcagcacacatgccctcaacatgtcttccaaaatctgatttaccctttctgtctgaccatctgtctgaggatggtatgctgagctccttatcacctgagttcccagtgactcttgcagctgctcccagaaacgtgctacgaacggtgctcctctgtctgacacgatagtctttggtattccatgcagacgcactatctggtcaatatagatttctgcatacttttctgccctatgggtggtatgtactggcaagaaatgagttgtcttagttagcatgtccacgatgacccaaatagaatcgtggtgtcgggatgtgttgggtaaacccacaataaaatccatgctgagatcctcccatttccaagatggtatgggaaggggctgtaaggtacctgctaccttcaaatgactggccttgactctttggcaagtgttgcattcagatacatacttagcaatttccctcttcattctggtccaccaatacaaagatctgagatcatgatacatcttgttactgccggggtgcatggagaatttggaaaggtgagcttcatccaatattttctttctgagtttaggattcttaggaataaccaatcggtcttcaaaccgtagaactcccttgctatcctgacgaaagcatt

SEQ ID NO: 14047 - DNA, 1010 bp, Zea Mays
tttgtcaagtgttcctagaaagctctcagaggtcagaattgttctttgatttgacaggtgaaattatggatcctttctttaccatctattacttataaaaaaattgttataattctggcaaccttacatgatagcgtcattagtgttcactcagtcgccatgctgttcgtatcacttatcgacgcgtaaaccagttgtttgcttggccgtctcttaagaaaatttagcattcttatgtccactcttgtgcagtttttcaacaagccaggcttcatcaagctaatttttcttatgcttttacaggttcttttttgctaacttaaggcaaaggtttgtatttacatgtagaatatactagctaaagtttttctagcaaagggtttttatatactaacatctacataatgcaagataattatgacaaattttatcttgaatgcatggagtaagattaataacaccgtttgcatcgggtgtcgtcctttcctagaatgtagtcaccctgtaacattgtttgcagcgactatatcatgggcgtggcagcctcccatcagagtcccgccagcgccgaacccttcgcatcgacagtggccacactagagaagaagccatacccacctgccatggtcgcggaggaggtgatggcatgaggctgactggggctttggaccccgtcccccattccacccgtcgtcgccgacatacttgtccaaggtcagtccgccaacgagtatatataaaagtcatcaggaaaggttgctcgcccaaagccttacctgacccgtgataattttcctcccctcaccaccgttatcttatcctgacgttgttcctttcaccatgctttggtgcccacccgccgaagagggctgaggagcagatgaaggcacaaggcagggaggaagaacctgcagtgggcgtgcgacgagggcgtgctttggtcccctcaccactgctgcagatgaaggcaccgttttgttgcacaaacagcatgctttattattattata

SEQ ID NO: 14048 - DNA, 383 bp, Zea Mays
gcggattgcgaggaggtcagagacaccaggatgaaggagagcgccacccacgagcggggcttgtgctggaccccacgacatgattcataggcgcacgatttcccccagttgcggagcactcagatggtggcgactcccctcggcgagttggaatacgacgagcgccgcatcgcgccaaactccccatcatataggcacagggtaggccagctagatttccgggtcaaagacgcgagtggaagcgaggcttgcgggcgcagttacgtcggtgcacgcgaagtctccgcggagaatataagtccgacagatggggtccacacggcggtgtctagctgggatggagcagtgagcacacgggacgagcgactgtaacaggggcccac

SEQ ID NO: 14049 - DNA, 863 bp, Zea Mays
atggggttaagctagataacaggagcgttgttccttataacatggcgttgctcaaaaattattgtgcacatatcaacgttgagtggtgtaacaaatcaaacatgattaaatacttgtttaaatatgttactaaaggaagtgatcgagcgaagatatattttgaggtgatggcaaagacagccaacgcatcacctgaaccttaggtagctcctcgcaatgaaattcaagagtatatcgatgcaagatacctatccatatgtgaggccatctagcgtattttggagttcgacattcattttagaatacctgtggttgaacgtcttgttgtccatttgcccaacaataactatgttcagtatgaaccaggtgctaccttaacgtctctcctagagtcccccgtagtaaaaagttccatgctaactgagtggtttaacaccaatgcaagaaatcctggataccgacacctaacatactgtgatttccctactgagtggtcctggcactcttcggatcgactgtggcgaaaaagaaccccttgtcacaaaattggacggatgtactacgttcatccaacggccggtgaattgtactacttgtgcatgctattgatgatagttaaaggtgcaacgagttatgttgatctaaggacatttagtggcacagtatatgctacctttcgcgaggcatgtgaggcaaggggccttcttgagagcgataacgaatggagccttctctttgacgaggccatcgtctctgcctcatcgcaccagctacgccaactctttgtaacagttgccctccattgctcgattggcaatgtccatgctttatttgataagtactggctctatttcacggatgac

SEQ ID NO: 14050 - DNA, 298 bp, Zea Mays
aatgccaccatcacattgggtgtaagctggtgaagttggacttcgaaacgctgtaggacttcgacgacaaatcgatgcacaggcaagcaaagaccagtagtgaaaaatgcttcaaaaataaccaactccccgtctggctctaggacctcgtcggctcccagagcacgcccccacaccatccccaaaataccctaagcgttgcatctcatgcaggcggcccgaatagatcctcgatgtgtcgaattccactgtgtgccctaacaacaaatccacaatcatcactgaatcgctaaccatc

SEQ ID NO: 14051 - DNA, 598 bp, Zea Mays
tgcgcgaggtttggtgacgtctgatcatcgtataccgcctgcatcgcaacacgcgaaacctcaaggaaccttcgttgacaatgggatggtcgggccctcttggcagcgcaactactcgacgaggatgccgtcgtgcggttggtttgcgcgtagcatggcgtcaggctatcagcagtgaccacaaggcttgtgtatgcggcgaggcggcagcagcaggccagggcgcaggccgcgcttcgtttctattccactaccacccactggaaccgcagacacgggcgcccgcattcattccatccccctgccgcttgtggctgcggttgtggttgggagtagccgcaggccgccagcaggaggaaggttcgcggcagcttcctgcggccccaccgagtttccatttgaagaggggcgaggacgccgtcgtcctctgtcctccatccacactcttctgcttctgcaacgactccctccctgcctcctcatcaacttgcagtgcagcagaagcccaagcagagggaggaggagagacaggcgccgaccaagccccgaccgagcgagcgccgcgcatgcggttcccacctccaccccaccaccacca

SEQ ID NO: 14052 - DNA, 632 bp, Zea Mays
aagagagagaaaatgtcatgtacacatcgttttcatggtttgattgagaaattaaggttctaaaagagaaaaaaagcatagcatagaaacctggagcaaatgccagacaagtagtagaggcaaactccttctgttccctcagaacgtatgtcaacagagcagctgtaccacctcccagtgaatgtccaacaacctaaatagatttgccaattgccatgaacacccatcaattgcaacactttgaaagaaacatgtaaacatagttatgatgcatcataagtcataaaaaggttatgttgtagcaatgctcatactctagcatcaaagacaaagaaaatggctatgaaataactcaaacctttattttgaagtctgggtacatctgcaatgcttgtgccagacaaggccctgagagctttgcaatccacctagcagcggcaaccatcccaaaatgagcatatcctagtactaagtcgctaacaccaccttcctgtacaatggtatggtgaaatggaaccacagcaccagtggcagctgttaatgtatctctgatgctatgagttcccctaattaatagaagtatagactttttgtctctatcaagcaaaatggtgaaagctggcttcaaaatc

SEQ ID NO: 14053 - DNA, 573 bp, Zea Mays
tgttagtggatttttttaacccccactgcatggcaaaattgggtgctgctgcagcctgcgggggttttagctacgagtatgttaatttgattgattggaatccttcgagtagtagtcctgctgagactgaaacaggggatgttgcattgcatcgtgactgatgggattgcgactggtatcgtgttggttgaattaccgtggaatttgtagtgagggtggttttgggtaaatgctgctactgttccgtgggcttgagctgtacccatgaagtttgcgctgttgtttcaaagcaaatttgtgcgataggttgggagactatgagggcttactggattcatccatccatcaaccttgagctagctcaacatttttcaaggacacagcttgaaaacttccgtagcttctttacttaggtttatactctgcatttcgaaggtgtgaacctgactgattgcttgagggtagcgaagtgaggctcctcttgttcgagcagtgaagtgatgctacacttggagtaatgctatctgtactgtgttcaaacttcagagcctgctcatcaacttagggaccact

SEQ ID NO: 14054 - DNA, 721 bp, Zea Mays
ggccgtcagatcaaaactcgacggttaggatgggtgccaaggggctttaccttctccggtcggccagggacagagccatacgcgcccgcggcagcgcaactgccagagacatggtagactgaggctcatagggcgttaggggtcggtcttggtagccagaaaggtttgggaggactcggcgaatcctatggcggggtcgggatagcaggaatggggctgaggcgaccaggcggaaaagggggagtccttggcggaccgggggatactctgacgagcaatcgcgcgcgactaagggcatactgcgtaaaattaggggcgggttagatcagttaccttgagagaaggctcggggctcacgaacggcgtccgaggcacagcgaggacacgggtcgacggcggcggaactgcggcagggcagagagagaaccggtgagcgtggaccgagagaaacagagggggagggggcgaaccgaggggtgtcctaggtcgcgggtgacgaggcgaagcacaccgaggcagcacacactgtaagggctcgacgacgaccgcagaacgggcgcgtgaccacgtcgaacggcggtagagatccctgggtgcacgcgcgatgcgaggcgagtgctgggggctgcgagtgcgcgagtgacgaggaaggagagcgagtggggcactgggtagctagaaaagggtcagggtagggacgggcgcggcgtcagcgtgcgtc

SEQ ID NO: 14055 - DNA, 380 bp, Zea Mays
gacgactccggagacagcgatgacgaggatgacgacgacgacgatggagaggatgagcacgtcaaccaggaagctgattacgcccagcaggaccacttcatggggattggtccagttgtcgaacattacacatcaatgttcgagacaggacacttccccaacctgctgcaagcagtgctgcacgagctaggagcctacgtccgccccctgtacgagacgaggcgagtgagcgagcctccccgggcttgctattacatcactcgcatccatgtcagggtaatagatgcaggtgacaggggattcaggactctgtctgctcacgagtccctgataccgctgtccacctacgctgcctcggtcagcgatgctgcccgtcggac

SEQ ID NO: 14056 - DNA, 488 bp, Zea Mays
ggaaaataaaagaaaaagaaatgtggttgtacccgtagctgggccaacattcccctctgccggcccattcctctcctatttccctcttcggcggggcccacttccccttagcccgcatgtcgccctccctcaatccagaatctatacgctcgctagctgcttcctaagcacctaagacaatagcgtatgggtccatgccgtcagatgtctcccccaccaaatatcggatctcaacagaaagcagaaaaaggcggatgcgatccgtagaaattgtaacaaacctaggcattgaactgacccggattctatatgctcggtgtataaaggcggatacctgacccctgaatcatagccatcgtaagctgcatcaggaagagatagccgaggggatcatcgccgtgggaaggttcgccgttgctggtaactcttgcctgcaccgccattaatggatcaatgggagatcgggcaggatcgccaacacgcaggga

SEQ ID NO: 14057 - DNA, 784 bp, Zea Mays
tttaaagcatgtgttgttgccatgccatcagaatgtggaggagaagacccaacgtggacatccatggaggtatgagaaggggagcctgctcagacaccctcaggggctgggtcgcagcccgcactgcccatcagagccggatcaccaccggcaacacccttgggggctgggttgcagcttgcgctacccacccgagtcggatcaccaccggaaacaccctcggggcttggtaaccgcttgcaccatccttgaggaccgggttcttcgcaacagccacctctaaggctgaaggactctcagtcacctccatgggagttgaacaaccttgactagcctcttggcctcgaagactgcactccaaggtcgacgaggcacgagacgctgctcgagataactctaatcccacatctggaatgtcagagcaaacatccatcataccaccgtccgtgggctcggacagcaaatcttcaggaacaacatcctcgagagcctgatcaaaatttgctagggataattcttgcagaccaacgagagcagacaaagctggagaaggaatatcactactctccccactgactatgtaacgccgactattcttccgaattaaggggatttcctcctcttcttcttcatcctcgtcaacaatacgaacaatacccccattggggtcagctctagcaggatcacgcccattgggatcagctctggcaggatcacacccattgagatcagcatcgtcaaggtcacacccattgggttcagcatcagcagggtcacacccatt

SEQ ID NO: 14058 - DNA, 776 bp, Zea Mays
aaaaaggtgttcaaactgcttttgtcagacatgtgaagtgcaggtctgatgcagtaatttgagttttggttcagtgtctttctatggattttggagcttgtttgtgattgatccaaggggtttaagcctaaggtccctgtggaggaatggtagagggtcatttggtcgacaagttttgttaaacttgatctccctattgctatgtaaaactgggagtaagttgtgtccgaaagttccctgtcaagttgaggttgtgctgttcagtaactgaaaattggaggtttcagtgatcttttgctgtgtttggggcatcataacttttgatccctgcatttttggtcttggactgctgcaacaaactaatagagctatagttggagaataatcttggttaaaagggatgggtgtgttgtcgaggggatttgggtgatagaggggcttaaacagggaggtatgcagagggagcaccaggactgatggagtaaattcagagttggatttagtaaactgaagaagctttattcctccttgttgtgcccatctgatgctatggatcgtgatatggatggatataaggatgtatggtctaactcaggttctagagttttttcccactgaaatatccacttttggactgatttggagatagtagagagagtaattcggttaactgaaccttggatcagatttggcggtgaagaaaagatctctccctgctggtctccttgtgtgtttgggtggagataaggtcgaagtgcatagccaaggatccagtg

SEQ ID NO: 14059 - DNA, 353 bp, Zea Mays
ggcgggttgaattctatatcactcggggtctcttatgcaaaagatctaggttgaatgggtatggagaaattcgggccgcacgatctgatccggacggctcggattacaacgtggtcataaccgaaccggtacgcagtgtggggcatcagattaagatcctacggctagggtgttatgaagatgcaatctaatctcggtcatcgaactaccatcctacggctcggatccgtttgatgaaggggtatgctgattctaatcctgaccgcccacgcagagatcaacgtcccgaaacaatcagctgcacaatttaatccccaccgttggatgaggatccaacgccaagaacgtcatct

SEQ ID NO: 14060 - DNA, 632 bp, Zea Mays
agcaggagcagaagggccggcatcctgattcaaggatgacactcgccgaagccgtctctttttcttcttcttcccttcagaaggagaagatggatgactagcttgatgggaacgtttcgggcgaatattatcaagtctctgaatgtccaatgtttttccagactctgggatgagtgctacagctagtgtttcagcaggagccgaatcagaggaatcttcagccaacatatccagcatggcacttatttctgtgtcactcgggctagtaggcatctcaaagtgaacctgcctctcgtcattggggattccaccaagtgaagcaaccaaagcctcaacttcctcgggagagggccgcactctaaggcccaaaccactatccccagcaggaggatttgacacaaaactgatgaacgtcttgggaggaggcagattccagtctgaatacgcaataggagcaccaacattcgataccttgcctctaagaatcatctcaagccggcttaccaggtccacagtaggaatccttctattggtaacccgggtcgaatcagtaacgccatgatacagataagctgggtacgctctgtccttcagcggctgaatgttcttaaaaacaaaatcggcgaccacag

SEQ ID NO: 14061 - DNA, 2961 bp, Zea Mays
tctgtgccggacgcgaccaaattcgaaattgcccaacgtctcgcctctcgcgacctccgctccccatttcaaaccgaaaggtccgaaaccccatctcgaccccgttctgccgtatctccgatccgcctccgccgccgtctcccctgcccaggcgccggaagtccacctcgggctccagcatatccgcgatgcatctggacggcgtcgacgacgagctcggaggcggcagctgcgccccctcccccgcgcgctttgagctccaagaggatccttccttctggaaggacaacaatgtgcaggtagagttttatccgcctcaatgcgagttgcctcctccggacctccccttccactcagccatcgtttctctcccctagctggagtgctctagtctaagctcgcgcgggactgcgcccgttagcatttcatcgagcacatctatgtttctagtcgtttaactgctccaatctacaggttgcgatccgtatccggccgctgagcggcagtgaggtgtcgatgcaggggcagaagcggtgcgtcaggcaggatagtagccagagccttacctggattggacaccccgagtccaggttcactttcgatcttgtcgctgacgaacatgtcacgcaggtgcttttgctgctctcgattctcagtttagcattcgtccctctttccatctgctgacttattttcgtgctaactgtgcaaaatgcgtaacttcaggagggcatgttcaatgttgccggggtgcccatggtggagaactgcatagctggctataacagctgcatgtttgcttacgggcaggtaaactgcaggtttcacttgctagtcgctgctgtaaatactcaagttttaagattgcattattctgttattacaaaattatctgcttctgctagactggaagcggaaaaacacatacaatgcttggtgacatagaaaatggaacacggaggaacaatgtgaattgtggtataactcctcgagtgtttgagcatctctttgtaaggatccaaaaggcaagtctcgaagatctgttgctttctagacgcctaattttgggcttttggctgacatgacatgttactgttcttagctaaatgtactccttacggtttgcaggaaaaagaattaaggagagatgaaaagctcatgtttacttgtaaatgctcatttttggagatttataatgagcagattctggatctgctcaacccaaattctgtaaacttgcaggtaattcatgcacggattttgtagttgtacatatatttgcatgccttgttgtagttatacctcgtgttaatttaatggtccctgcttttttctttgttgcatctttttatgtgctgttagcaaatgtctatatttcgagatatacattattcatatcattagctgattagctctagtttgattctttcagataagggaggatgccagaaagggtatacatgttgagaatttgacggaacatgaaatctccaatgctcgagaagcgctgcaacaacttattgaggttgtttgatggaataatttcattttattctgtattttatgctgaggtttgtctctagttgggattgttggaagcttgaatcccttttgcctgttcaaacagaatcgagtttgcacaattgtctggttcctaagtttaagattcagtacatgactgaccttaatatacattcttcatttctttccagggagcagcaaacagaaaggtagcagccaccaatatgaaccgagcaagtagccgctctcatagtgttttcacctgccttatagaaagtaaggtacatgaaagatgaaacacatattctccagagttgttactggtttgtaataagatctcattgtggttctctagtttcaaggtgtcatagtggtattatatattcaaccttattattgttcgttatgacgcacacatattgcccttactttctcttgaaattaattattcagtgggagtcacaaggtatcaagcaccaccgcttttctcgactcaaccttgttgaccttgcgggctcagagaggtaacttgcataagtaacatcacatataatcatctgatatgactataatggaattttagtgcggccacttttcaatgtctttcactctcctgtttagcacgcatgacttctgccttgcaggcaaaagagctcaggtgctgaaggggagcgattgaaggaagctaccaacatcaacaaatcactatcaactttggggttagttgattattttctaataataccacaaactgtggaaaatcttttgaaatttgttataaacttagtatgtgagtcagattaaagtcatagcatgacatattttgtaactattttggtcaatggcatcattgcagacttgtcattacgaacctaattgctgtgtcaaacaaaaagtcacagcatgttccatacagagattcaaaattaacattcctcctccaggtaatatcagcaactgatgcagtaaagttgctcatgttgtaacttggcatctaaggagctattatatgattgcaaaatttttagatgtgagtttacattctctttgctgataaaagatttggtatgcctttcactgctttccaggattcccttggaggaaattcaaaaacgaccataattgcaaacataagcccatccagctggtagactcctaatcatgattgttctattcaactaccctttttattttgaagcttccattccattttgaaagttacacatttgatatttctcgctttctatccagttgtgctgctgagacattaagcacattgaaattcgcgcaacgagctaaatatataaggaataatgtaagtaacctgcacacatttagaataccaccttttttgtgcaagcgtcggccgtcagctgactattactttttgtaggctataattaatgaggatgcttctggtgatgttcttagcatgcgttt

SEQ ID NO: 14062 - DNA, 413 bp, Zea Mays
ccaagtttacggctagtcgatacagtgggggacatgcaactaaaccagagctatttacaaggtacctagagccaactcttggctggcacaatccagacagctaggcacaaacattacgcagctacaagtgcagacccattccatctactaaagccagctgaacaatccatccacaaaagcgataaacagagatgaccaagatgtacatccacaaaaggcaagacatcatctgtgacgtgttcagactgcaggtttgttaaggctgcaaacaaatataagaatgtgagtataaagttccataaatattatgcgcggggtctctgaagttaatgttataccaaagaaagatattaagcacatgtatacaacctcaaggctacacaaacagggtcttgatcgcaaaccaatagcct

SEQ ID NO: 14063 - DNA, 348 bp, Zea Mays
cagaaccacctatagagactagggccatggtgggtgcactagggttctcgatcttatctcgggtctggtggacttgagcttgttgaacaactcatccacggtaagagtctgatagttgggagtctcgatgattgccaagaccttcacctcccaaaccctccaatctagagcatgtagaagcttaagtgctctctcatgatcatcatagggaagttgcaccttgttagcgtgcatcttgttcacaatcgactagaaccgagaaaacatagtgtctatggtctctccaaccaactagacaaagttcccgtactcttattgagtctagtctttacatgatcatttctctca

SEQ ID NO: 14064 - DNA, 646 bp, Zea Mays
ttgtcacgccgcgctagcgctgtcatgtgggggccactacgcactgttgttcttccttccccctcgcaacaaaccgacaccaaaaccacacccaccgcatgaactcagagattctgttacaacaacccactgaaccaaccttccgaggccataaagttgtatcccagggctctcgcttcccttttcatcaccgtgacccaccaccggtcgtgaggaagagggagagattatgcgagagacgtgagtgcgcaaggtgcgccaccgctggtgaggagttcgggcggtgccattgtggtgttagttgagaggagagagaggtgaagcagataagccctggtcgtgtattttatgatggacggtctaattggatcggagagtacccacttcgcttcattaaatcagcaccgtcagatcgagatcttgtggtcccagtttcgtagcgggtaatttaggctacgatctaatcgcagccaccaaaatttgatcggacgtctcacattcactaatatctcttcggtgtggctcgtttacaatagatccctcaagttttatgaataccaacccgtcgttcacatatatacaaattacaaagatccttgcagattagtccagtattattcaaagtgaactctgagcttcacaaaat

SEQ ID NO: 14065 - DNA, 750 bp, Zea Mays
gtcacgcaaaactatagtcgctgaaccgctgtcgtgtgtgctcagtcatcagacattcctatagatcttctcgaagtcgtgaacatcgaggtagtttcaactatctcaccgtatctcccggctacgtaacaactgccaccagctagtgacccgtgaatcccctgggtccaggctataagaagcgtgtgctaccttcgggaccctcgcgcgtaagagaaagcaaggacacaccataacttaactcgtgtttccttggcgcaatgccataagaatgctagacgaagccgttgtgcccacgcctcgcgtccattgtcgcctagtggccaaggaggggtggggaggttcgtcagcgaacgtggatcgtgcgcgggcaagcatcgggcatgagagtcatcggggtttggtgaattgctcaccggagattgttgagcactacgaagccacctcttctcatgggcggagaatgtcgtgtcaccatcgtaagtaagtagctttggaatcaatttgttttgactccttcattgcatagccgtagtagtagatggtttgggagcattgggtgtcaccagggcttctctggtgagggcccaccgccgtggtagggcgcgccgctgcaacctggtcgagagagatagagggatgaccaggtaccgtggatcttgggatcgatggtggggattagatccctaaacacccttcgggtattttaatcggggatgattgatcgggtttgggtggcatagattcgtg

SEQ ID NO: 14066 - DNA, 411 bp, Zea Mays
gggagatctatggctactcgtctaggttgatgacatgctatcgttgttgctaggcaccatcgtcctgataaggatagaagtatctgggataggaaggagcgggaagttctacacaaaaccgaacaggtgcttggcggctcccatcttgcgaaacacgatggagatcctcttgcatggacgacaaagataacattaaaaaaactacaagattgattaagctaaagtaaatgctcaacatccacaaacaagtattatagtgcagtgcactttaatacgcaaatgcttccactggtcacctccgcctgcggttcataacacctcatgcaaattcgtcccctaccaaagaatgtgctgaagtaaaaaaagtctcatatgattcatcatcattgactgatcagttttcagaactac

SEQ ID NO: 14067 - DNA, 544 bp, Zea Mays
atttttttgtgcaaattagaattctatttgaatttaaacctaattggaattggaaaatatgaaataaaaaggaaaatcactcaccggccgaaacacctgtactcgtggcccacctccattccatactacaggcccagcctactgctcacggtggccgagcgctagcatgcacactgttgttatgtggggtcaccccgccagccaccttactcgcgctcatctccctctactcgctgacgcaagggccccaccagccagaagtttctccttcaccatagcaagcgcgagcagaaccgtacccgccggataagtaacgaactccaccaaacgcgcaacagacccaacaaccagtgcggtcgtgccaaaaaatatacaagagccgatgacccccctttcaatccccagctctcagaacccgtgttcgccaccagatcctcgcgccgctcgccgcctggccatggcttgtcttcaaactatggtcatgccgtggggcacaaagacgggaggtcgagatgtgaggggcggctccgccgtggttgcgtca

SEQ ID NO: 14068 - DNA, 590 bp, Zea Mays
ctttaaagcatttataggtttgggtaagaaagagtaggataagaaaagactccatccaagattgtggctcttgattcttttgaagatctggcttgaatcttatccttccatgcttgatttgatgttgatcttttcttcttcagtcttggtcttactgattcgacattagtgtatattatcggagtggggagtatggttaaggtagatataggtgagatagactacatgatgttggtcaaaaacttgtttgatgttaggtggggtagacagattatgcaatccaccatgacactattggttgggttacctcttatgctcacggttgaattggtctaatgcactaatttaggtttaagtgcataaggggagaacaaggttcataggagtagcatccagtttatttcactagtgttaacttgttaagttactgtccttaggttagctcaacttaaggttagacttcgttaggttagattaacctattagattggatcagatatagaataattgatatgactattttagactagataagatctaaataaattctttggattaactcacggttgttactttagagtgggataaat

SEQ ID NO: 14069 - DNA, 449 bp, Zea Mays
caagactttcatcagttttatgtcaaatcctcctactggtgacagtggtttgggccttagagtgcgaccctctcccgaagaggttgaagctttggttgtttcgcttggtgaaatccccaatgacgagaggcaggttcattttgagatgcctataaacccgagcgacgcagaaataagtgctatgctggacatgttggctgaggattcctctgattcggtccctgctgaaatactagctgtagtacctatcccagagcctgaaaagaccttggacattcaaagatctgatagcactcgcccgaagcgtcctcgcctggccagtcatccaacttctcctgttgaggggaagaaaaagaaaaagagacggcttcgacgagtgtcatgcttgaatcaggatgccggcccttctgctcctgctgccgaggaagtgccagtggagatttttactg

SEQ ID NO: 14070 - DNA, 327 bp, Zea Mays
ctaaaagttccaacctatgtgcacgccgatttctcaagaattcaagaaatttcagacatttaatcatcctcatctgctctgcggtaagaaccacctgaccagctacaggatcaaatctcaaatcttaaagtgtcttttctgacttttatttaagcatgtctgtttacttgggtcttctttgggatgatcataggttgtggtgtggttataaaggagtgttctttcaatcagtacatttgtcctaactttgtgctttcaggaaatgtcctcaacaactgatccatctatctacaaagtagtaattgtggcaacataagcttcaggaaa

SEQ ID NO: 14071 - DNA, 559 bp, Zea Mays
aacatgtcctcagacgaagaagatggtctgaggccagcaattacccacgggttgactggaggatcaagacttatggaaccctggaaactgccaccatgctacatattggtgcccaaaccagaaccacttcgacttccaaactgacattgattaatcccgttaaaacatgagccccagtgagaaatgaggttacgaccacgagcatgatgatcgaacctccatgattactgatgttgccatgattgggatgcttgaatcctcctttgttcatcaagtttgcctgcccattgttgcgcccaccacggttgccaccagatccttcacgcccaaagataactccatgtcccatccggctaccatcatcctccatgtttcctaagagcgcttctgcgtatgaaacatcaaggggtgagtattggtggccaaatgagttatgggagccctggagaagccaacatacgtcccaatccttgcaaacaaggaaaccaatcctttgcggccaagtttcagggagcgacgttgtgtagagaaaatttgccatgcctcaccaacgccttgc

SEQ ID NO: 14072 - DNA, 483 bp, Zea Mays
agccgaagcgctgaagcgtcgtgccaaagccaaagaaaaatcggccgaagagccagagctagaggagtcggcaagattgccaaaaatcctgagcccgccaccagagccggagttgccgaaggtgtccaaagctcctgcaataactcccaagacgaggaggatggctagcgtgctggaagctgtcttggagtcacaagggcaccaactcctgcctttgcaaaggaggccatcaaaactgctacaactcgtgttgaagttgaagtcgggccctcaatgcccatcgaaacagggcatgttgaaactattgagcagaatactgaacgaggaccttcggatgtcaccctgatcgcggaaaaagaaagcacatccaaggttaaatctcctgctcccaaagcgtttactaaggagctatactttatcatacgacacgcttcgggtaaacagctgtcggaagagcaggttgccgaagctaagcactacgcc

SEQ ID NO: 14073 - DNA, 968 bp, Zea Mays
cagatagtagaggaagtcgtcttcgtcatttcctctgtataccaaggaccctcacgggtatttccagtccttggcatagtgttgcacttcggcaatttgttctaatgacaactgtttacccgaagcgtgtcgaacaatgtataacaaatcagcatgaagaggtgcttcgggagtatgagatgtagatttttcgggaggactctgttccatcagtcttactgatgcagctttcgaaggtccgacttcggcgagagcagaagtcgcgcttgcagcagtcacttcttttgcatcttcagattttttgccagatgcttcagtagaagtgagagttggcactttcacggattctagaacagcatctaaaacgctagtcattcttctcttccttggagtcgctgttgtagtagtcgatagcttcgatagccttgttacggctggagggctcaacaactttggctgttatgctatcttttctgattcaagctcttttaccggatttaaactagctttggttgacatggcaggagctgattctgtacttgaggggatagagtcggcactgtcaataagcgtcgacacctcggtcgtcccaataggcttcggcctacatgtcaggaccttcgctctatttggctttggcgcaccagaagaggtcgaagtagcaactttccttttacctccttgtcttcgggtaggaaaacagtaatcaggataaacaaacccaattacattaaaaaccctattcagtcttcttttccccaagcgccaaaggcaacagtcatggcctcgtcctcttcccttgtgtaggctccaagtagctcatcgttggtttcctctatagaatctagccaatcatcatttggctcatcaaattgacttctataccggaaggtgtacctaagataaactaagccaccttgactggagccagcagcagtttccttcggcatttcccattcattcgcaag

SEQ ID NO: 14074 - DNA, 438 bp, Zea Mays
ctcactgactcgcggggccggtcaactccagtcgtggaggcttcaacatctaagtctctaaagtgacccatacaccggaaaaggactagacaatacccataccgagcatatacctacgcgtgcttgacagtgacgcgagggatatgatggaagataaaggtgtactcgacatgaccttgaaccttaacgtaaacccaatttgcgggacccaccaggtaccacaacgacgacaccaagcaagctacaaggactcacataccgaacagacgacatgccatactaggggtacgacagcaaacgacccaacggacgacgtctagaggactaagctatctagaggcagcaagccgagctcacctagtagaatataagtttcattgtaaagtccacccttgagctataaaagggattggacacctttcttttgacacacaagca

SEQ ID NO: 14075 - DNA, 449 bp, Zea Mays
aaagaatccatgacactattcatgtgtctctttgacattcacaattaaacccctctcctttctctccttcgcaagtccgagtccccgatgatggacgacgacgtgcgtgctccggcaagctagcaccggccggaacacctaaccattcatgccctaagtcagtctacgcctaactccacccctggcgatcctaatccaccccttaattgagttaatccgtcccggagttcttctgcccacgacgacggcgagacccaagaaaaaactaaggtgttcccgacgactaggtgcggtatagtttaattggcggggtcgatgagcatcacaagaatgctatagtgctgaaacatggacaaagagggcgagagcggacctggagatggctgaccacggcggggtgactcacagcggcgcagagagtggatttgggggaaattccaaattaagac

SEQ ID NO: 14076 - DNA, 934 bp, Zea Mays
ccttgtacgtgtaccctaccgaatagaagaccgacccaacaatcaaacacaagtgaggcgtgaggtagaggaactctctgccaagggcagatctagaatttttgtatgacccagacctaacctattgaatttcattcctttaggactagtgacaaccccattttttcaagtaatttttattttctcaagaaaaatataaatcctttaagaaaatagagttaccagactagtcttaatggaacaaatagagactcatatgaagctaatgagatcaagccctgggctttggacgggatggctggggtgtagatctgcccttgctctctccgtcacatgtgatgtttttttcatgcgctttacagttataaatttgtcttatattttctcaaatgatagatataaagatacacatactgtttcggattcaatgtttttcacttttttcgttgtagggggcaaacaatgcacaaattgattggattaggatgtttttcacatttttgaggtctcctcctttgtttgcattgcatttgtttttattgcatatattactcgtgctaccagttgcgctacttggatgtggtgatttgtgattataggaagtgagtgaaagtatttacctacttataagaacaccacacaccaagttgtatcaatgttgcaagaggaggaggcttgaagctttttatagacatccaagtagctaagccgggtttgggttgtacctcagctaacaagggaaatccagctaagccgagatctacagtcaaccaggtctactttcccacttagatttattaattagctttgtttgtgctgatacttattgagaaattttatagagcctattcacccatccctaggcatcaaatcagtccttccaatttgtataaaacgaagtctcatggttaagcttaatcgtttgtgataatca

SEQ ID NO: 14077 - DNA, 1020 bp, Zea Mays
caccagatcccaggtatcattggcaaaggaggcctgatactcgtcctccatagcaccatgccagtgaggattagcgagggcgctacaaacagaagtcagaactggagagaccgaaagtgaggcagtagcggagaggaccaggcgataaacagggtgaaggaccctaacgacctgctgagtcaccatcacgtggatgtggcgagaatcctaatgaagagggggtagtacattgtcggctcggtgcgggagcagggcagtggatccaccaaggcacgtcactgatagtcatgcatgggttggtcatagcggcgagcagtcggcgcagacaagggcaccagagagcccaagagacatgagcgacaaagtggaagaggccatcggtttcgagggtgatgccattccctagaggcagagcaggtggcaaaggagcagccgaggagtctgggcacatgaggcatccggggcacctaggggagagagcctgcagggggaagaacaaacaatgactaaccaggaagcgccacagagtcaggagtattgagaaaatccaagtcatggagagagatggtggtgggtaggaggtaggcgagaaggggaaatctatctcatcgaaagtgacgtgacgagagatctggagacgatgagtagaggtcaaggcaccagtaccctttttgatcatgagagtacccgaggaagaaacaacgaacaaaatgaggagcaagcttatgaggagatgtgacatgaatgttggggtagcatccacacccaaaaatacgaagatggtcataggagggagtggtgccaaagagagtaaagtggggaatggggacacgagtcgccatagtaggaagacgattaataaggtaggtagcagtgtggaggctctcagcctagtagcaagcatgaacagaagcctgaaagagcaacacatgacattgttagtggtgcaaatcatgcgctcagccttaccattctgagggaaagtgtagggacaagacatccagagctagactccatggg

SEQ ID NO: 14078 - DNA, 556 bp, Zea Mays
ttcatctgctgcgagcgcatcgcctgccacgatgtcgtccaaggagaccttgagtgatttggcggtgatggagttgcatcctggccataccgtggagtttggtacctcgaggatttcatcggtccacgtgttggagatgcagcggcttggttactttggtaataaagtcagccgggccctgggtgcagaggaggtccccgagcctgaaggcgagttgatagtttttgaggcttttttgttgtcggtctttgccttccgacacatcgattcgtggcagaggtgttgtgaaggtttgaagtgcaagtccaccagttgacgccgaacgccatggtggcactggcgaagtatgtctgggcagttacttcctacagcgggcagatgtctgtgaaggtctttgccaaaaattattgcctgcattggcagaagaggaaaataggaaataagatagcacaattcggatcgtgcaccttcacgccgaggactgggaagacttcggctgaggttgtggagatagtccactgcactaggaacaaatgaggtaactggtgggattttt

SEQ ID NO: 14079 - DNA, 715 bp, Zea Mays
tgttgttatatgaaaactccaccaaggaaaggcacttgtcccaatccttctcatagagtagcacacaagccctcaacatgtcttccaaaatctgatttaccctttctgtctgaccatccgtttgagggtggtatgctgagcttcgtattacgtgggtcccgagtgattcttgcaattgctcccagaaacgtgctacaaatggcgctcctcggtcagacacaatagtccttggtatcccgttcagacgaattatctggtcaatataaatttctgcatacttttctgtccggtgggtggtatgtactggcaagaaatgagctgtcttggtcaacctatccacaatgacccaaatagaatcatggtgctgggaggtattgggcaatcccacgataaaatccatgcaaatatcctcccatttccaagatggtatgggaaggggctataaggtgcctgccaccttcaaatgactggccttgactctttggcaagtgtcacattccgatatatacttagcaatttccctcttcattctggtccaccagtacaaagatctgagatcatgatacatcttgttactgccagggtgcatggagaatttggaaaggtgagcttcatccaatatcttctttctgagctcggggttcttgggaacaaccaatcggtctccaaaccatagaatccctttgttgtcctgacggaaacatttgtatttgtc

SEQ ID NO: 14080 - DNA, 646 bp, Zea Mays
agccttattctcttgtaaaacaagacctctgaatcataagcattgctctcatgatggagtagcccccactgttaggcgcatgagaaacttcaaacagtaccctaatctatagtccaacgaggatcgtcagtctagtatgcctcaatcactttctataggcatcgaatcctagccatcattggttcgatggttatcgaactgtagtcattagactatacgatattatagttgttagagcggcaatgctaactttcaaatgtaaacaattcgggtgtatcatttggtctttacttattcttatcgtctatgtttacttttaggcctcgttcggaagctacgatgttgggcgcccggtcaaggcctgaccggtgggacagtacttgcacgttcctgtcctatgtctttgctgcccggtggggtggatagacgcggttgctatttgggagcatctcagggcatacttctgggacaactgacgttgtcttcttccttagaggcggtggcaagacaggtggtgacgacggcgaccccatgagtgaggggcggtggcagttggatctagaggaggaggcgaggcagagagtggaggctcgggcgctcaacggctagatccaaaggagaaggcgatggtagcgacaagtgagag

SEQ ID NO: 14081 - DNA, 498 bp, Zea Mays
gcggaacagattagatctacgactccttgaaccggtatcggagacggatcgtcagatcaccatccaagggtcgggatctaacgacactagcgctcccgctcatccacacatccgcagatctacggtcctaatataatatcgcgaatgggtatgctaccatctaatctccgccatacatcaacagatcaacgacaggcgtcctttcttcctccctgcaccaaaccacggcgacgccgccaggatgccgcgatggtccatcatcggaatcgaaatccaagccaaatcgacatcacgggcgccatcaacagatctgtgacttgctacgtgatgcgaaatacaatctgaacactataggtaggtccttaccgatggcggggtcgaagacgaggctgcccacgtcgctcggtgaagttgtggcaatggcgagcaattgcagtcagcgaggccgccctccttctcccacgccgaactctatgcgatcccgttgcacgaatgaca

SEQ ID NO: 14082 - DNA, 1151 bp, Zea Mays
tttactgaatttctaattttctggactgggcatcaaatactagaaacggtagggtctcaggtgcaagaatccgcaagactcatagcacaaccgcgggttgatttgataaaaggacatgggctattttataaagttagccagctgaaagggtatggtgagttctgggccgctggattcaaatcgtgcgaccaggattagatctactcccttaatgaatcggtacgcagtgtggttcctcggatccagatccgacggtgctcaccaccccatcacccaatccgtccgatcaaccgcccacgctctagatcaacccagtgaactggtacgctaagatccgaaccagatcaacggcccggatcgaacgtggcaaggaggtaagacatgttataatctagaccgttgccctagctatcaaagaccgtgatgatccaatagcccccatacggattgcaagtcaatcatcaccgtctatttcatgatctacggacaccttggcatcgtctacctcacgacaccaaggcgcagtcgtcgcgccatgcccggcactccccctctctctcctgtcggtccaccggcgttctgcccgaccaagaccagccagtggtcgccaccgccgttccccggcggcgctccaaccccacacacacgcggcatcctaacgaatccacaaggtattgcattggaggaaaccgactcaccatagatgattgcgccggtagggtctgcctgcccccgatgaccagcgtcccgccgacgacgaccccgcaaagtaccaagctccaggtacacgatcggccaagccccagacccgacaccagaggtattacgctggcgaattctcctctcaactcgcggtcttatggcgatgaggacgacaatcgcgctgtgttcgagggagcgagggaaagaataggtgagcgcaaacgaagggaagagcacggcacgtctggcttttaaacacgaagccgagggcttccgagcgcacagcgaggaaagcgtggacgcggcgacattctgttcatcagcgcgcagttttcgcggaggatgaagaccgggcgagggaaacggacaagcggggcccatctgtcaatgctacctttgttgggctgcgcggggctggtggtgaatatgggccacgaagtggattcggc

SEQ ID NO: 14083 - DNA, 364 bp, Zea Mays
tgaagacggcggagcacatgccatgtgaagacggcagaatgtgcgatcgacatggaccctgtagtggctatggcggctgtcgtcgaatctgaggtcgagtccagctgtggccgaaggatccacgagattgacgcgcccgtgacggccatgaccaaagatccgtgcccacgatgactggagatctgcgtccgtcccccctgtagattgttcccccctagataggtgtagcatcgccaccgctatcctcaactatttcaagaaggtctatggccacgtcaagcccctccttaagtgatccaacactggcatcgatgagttcatcacattcgatctggtctacgggccctaggtaggtgctccctcc

SEQ ID NO: 14084 - DNA, 746 bp, Zea Mays
ggcgacttttgcacggagagtcttttggaaaagatttcgattttgcgcacttgttgtgctgttccggctgcacccttaggcgagttttgtgcggagtgtcgcacgcgagggtagtcagcgctgcctctcgcggtgacttcggtgtggtcgaatgccgaagaccgtcgatgcggtctttttcgacatattgtgtcttagtttttgcgggggattttcgcaggtatattacatggctccgcctcgttaaaaacctcaccccctgggaggaaaagagtgcgggccggaatgatactgtttggtgaattacaagggcatgttggccctgaggattcaaacaaaaaatttgcggagattatcgatattccaggaatgctctaggtcctcgccagatggcgttgttaccctgtacgcgcttggggacgccttcgtcttgacgatgaatgggccctcccactttggctccagcttgccccgtgactctgtccgggttgttcggacgagtacgaggtccccttcgtcgaattctcttggggcgactgcgtggtcgcgccaggccttcgtttgagcttggtatttgttgagggcctgcagggcaaagacacggtctccgtcgatgaggtctttggaggttggttcgtctacgtcggggacggctgaagcgcttgtccgtggtgacccatgttttatttcctgcggggtcatggcctccgatctgtatagcaggcgaaagggagtgaatccagtcg

SEQ ID NO: 14085 - DNA, 306 bp, Zea Mays
ttcaaaccttgtgtagcttattgagaattctctcagccagccaaaaagtgcagcctaatcaccatctcatctccgagcaaactggtgaacacgtaaactgtcatacgaacatgcatggtgatataaacattgttgagatcctgccgacatccaaagacttacatgtcacattgcacactggcattgcattacatagtctggttgttcgtgaactactagaggtccacgccatgcttacaaagacttcattctactaccttcctcccctccctcgttgccagcaacgatcgtcccagaacagactgg

SEQ ID NO: 14086 - DNA, 345 bp, Zea Mays
caataatgtaacaaagggtgtgtaactgtattgtataataataaagcatgttttcttcttcagatgccaacaaggacctgtggtcatgatggggcagggacttctcggggtagtggggacgagaccccgatcccaccacctatacctccaactttggcggaggatattgctgcactattgaacactactgctgacaatacccagtttctccaggaaatggcgggaaaccagattcaccagcaaggaggccgatgccaaaatcaagctccgagagacactacttacatggaattctcagaaactcgtccccctatcttcattaaagctgaagaacctctagaggcg

SEQ ID NO: 14087 - DNA, 609 bp, Zea Mays
gtcaatgccaagaggaacctcataactgaaggcaagttcaattttattctatttactcctacaaataacccagcattgtaaaaccatatgccctaggattttagtcggaacttcgatcatgattcttggtcaccgatggcctagattcctgttgcgtgacgcagcgagtttttcctgtagcaaggcaagagcactagttgtgtccatgtccctgggccgagagggcgcacttcctagtgccaccacattcttcttcggatgcaaggctcaaggatgagtgtgcatcagaaagacgcgctagcccaggaatcatgtttagacttctatcaaggaattggattctagcaatggatgtccaacaattttgatcagcctatcaacttctacccgagtaataacttcgaattttttctcttgatctcgtttggaaggtgctccttgtgtttgaacatcgaatcagtcggctttctattacaatcttttgttggggatccgacagaggatttcagaattatacctttatcatatacagtttttcgattctcagtttcttgtaaatcagtgggttttgctatatatggcatcaaatattttgagtgtaaattcttc

SEQ ID NO: 14088 - DNA, 1006 bp, Zea Mays
ccataagcttcttaagagctagctaactttgcttttaggttatcatttttcttaattagttgttcattggtatgtgggcttgcactagcttctagttgatcaattttattagttagctcaactttaagatttgcaaatgttttatattgttcaagcaaattttgataaaccttttatgagctaactaactttgattatatcactttaaattgatgtttttgctttgtgcaaacttctctaaataatttgatggcatatgtaagttcttgattagaggtgagttttcatcaacactattcttactctcattataggatgagtcattagtgtaacatcgtgccataaggcacttatgaaaagaacatgacgatgaatgcttgtggttgtgtctcttgtattgggaatcatcttcactagatgattcatcccaagtcttaactgttgtatgagccttagccttgcacctcttttcttgtccttggatgtgggcttgttttgacaatcctcttcaaagtgccccttcttgtcacatttatagcgtccttttgttctttgttcttttctatcaatgttgaatagaatgtcttcaacttggatgggcacacccatgaggttcaacttatggatcaacctcatagccttcctaactattttggttgtaccttcatcaacttctgatgataaggtgtatgcttgatcttcatcatcacaagcatcatctttatcttcacttgaggagcttgaggtttcaacttgcatgttgcccttcattttcttgcgctcttcgcatatgagagttatgcctttgctttatgaagtggattcttcttgacccatctttcgtggcatttcaaataccacaatcttgtcaatgacaagtcctagagtcatttcactcaagttctccatgttgcgaaggatagtggtgatgcttgcataattgttataagatagcacaaagattatcttcctcatagtgttcgcataacctaacttcattaagata

SEQ ID NO: 14089 - DNA, 584 bp, Zea Mays
ttgtgatgttcttgactgatttgggggaaatcccaaattggggagctgtaggggacgattggaggtgagggctggttcactgggtgcacaactacttagcggagctcactagggcggcaatttataggttccatcagcgatggtggctaattttgagaagacgcgtggcggtcggagagaagggaggtcactcgcccaagtgtttcatggctttcaccgtggcctgaccaccggtgatgaccggacatgctaaggtgagtcactgcgatgtggtagagcacctaggcacgtggcacctgagcggtaggcggctaactccggcgaggttatctgaccggccgtaaggcaagggggtacaacggctagggcgaaacagtgtctcgagctcatccctagcgccagatttttcatccgaggatcgttatctgcgtttaaccgggcgtgaatctgggcacgagatcactggcggcgagcggggctgaacctgagatcttattcagttattgtatcatcagaatgtcattcagagcacctgacagagcacatttgggggtgatttgctccaaaattcatgtagcaactca

SEQ ID NO: 14090 - DNA, 404 bp, Zea Mays
gagatatgccccatgcctcacaatgctattccgagcactaatgaccccaacacgccgagaagggaagggcgcatgacagcgggggtcttaccaatggttagggacgatggtgcgagatggccacggcgcttagtggaaccgcagcgatgttgatctttggtgaacaatcatcatcgacctgaggttccccatgcatgccgatgcctaggataaatgccaccctcccaagcacttcatcatagccacccgtggaggtcccggtggtggttcaccgcaaccccgacggcggcagcagcccgatcttgcctcacgactctcaccatcactggtccagccccctttggtgattcgaaagtaggagaccccgagtggcgatagtagatataccctacacggaggggcgc

SEQ ID NO: 14091 - DNA, 418 bp, Zea Mays
cggtgagctaccctatgttgttcgcccttctttaagcatcgcgtagaacgttttcgatttgaaattggcgctctgggtgcggacttggccggattccggtggcgaaccaccgtggttccgggtggcgccgccgtcgctcgtagggtgattgggggaaatcacgtgggccgttgatcttctgccggacggctaggattagtccccgtttaccctctcatgttgagttgatttggtccgttcatctggatcggacgggtggaaacaaatctagagtaataaaatcctacccgtcgtttttacatccaacggttccctgcgcataccgcttcgcgaccgcgcggatcaaatcctcaccatccgcgtgtgatcggatggtccaaaccccaccgtaccccttcgcgggtcaacattgctaaag

SEQ ID NO: 14092 - DNA, 668 bp, Zea Mays
ttcaaagtatttgccctaggtcaatatagcaaagtggtagagccattgtagaggaacaactttgctataggtgtttgggcctggtaccatatgaaatctggagctattttgatctgaagatgggctgtcagacaaatttttactgaatctaagcactgttcatcggaattacagaaacaacctcgccggcgataagaacgccactgcggtcagggatgggtcagcggccacggtaaaggagtcccgcgacgtggcgttaaagcagggaggtggcgttacccggttaatcggcggccaccgtactttcgctgtggctctatcgcgcgggtgagctcgccagcacaatcccaacttggtgaatctcatccattcccagccagcagcctataaattgagcccggatcttccttcttcactgcatcacgcacactagcccgtgagtaattagctcaattgcaccagaagaactcccaccgcccacaaaatcagtccgccctgttcttcgcacggccgtgaagaactccaccgtggccagcactcctcgggttagtaacttcccaattgctttctgttctagcctatttatagcctcctattgctctcatagtcaaccaattgaagttcggcagaagcctaacaccggaacactcctctgctccgtagaacgc

SEQ ID NO: 14093 - DNA, 703 bp, Zea Mays
ttcgtctgcttctttccctagcagtctcacgagattgggctattcgtcagattgacattcaaaatgcatttctccacggttttcttaatgaagacgtctatataaagcaaccaccaggttttgctgattctactcatccagattatctttgcaaattggataaatctctgtatggattaaaacaagcacctcgtgcgtggttttctcgtctcagcaagaaattaattgatcttgggttttcaccatcaaaggctgatgtctctctcttcatacttaataagggtggtgttcagatatatatgttgatttatgtagatgacataatcattattagctcgtcgtcagctaccgtggatagactccttagtcaacttcgtaatgattttgcagtcaaagattttggccctttggcatattttttgggcattgaatgtcagcacaccacgcatgggctcatcctgtcttagcacaaatatattcatgatcttctcactcggaccaacatgctgacatccaagccggttgctacgccaatgctaccagctgataaattgcaaatccagggtggcgcaccactctctgctgaagacgcaaccagatatcggagtgccattggggccctgcagtatcttcttctcactcggccagatattgctttctcggtcaaccaggtgtgccaattcatggttgcacctactgctga

SEQ ID NO: 14094 - DNA, 817 bp, Zea Mays
agcgctaggttatttcagaataaagacaaacagacagacataattttagtcctagtgtcttatgttcttgtgcgtgccatgtgatgacgtgtctcctccatagccattattattaggtatacaactctacaagccaatgccaatgctttgatatttcagtctctgcaagtatatgctaatagtaccgaattccactagattcacatttgtgcttaattggagtctcgaactaatgtgttgataattgacaaactttttgtcagacatgcaccacaccaataccgggcaacaagccatgtaatgaccgccaaccggccggccacgctgctcggagcacgctgccggatcggaggttgccgcgtgaaagaaggcaggtcgagctcacgtaggtcagtagaatgacaaatttctgtcttccttcccgcgtggaaactggttggatctctcacttactcccgtgcgtaatccacgagctgtttgcagcatctactagcggagatgctctagttgcgtgccggactgccagttcaaacgtcaaacaaacaaaaaaaaaacttgaagataaaacaggttgccagtaaaaaaaaactagaaagggtagagaaaattttgcatgttgcatggccgtctattcttatgcacggagcgaaaaaggatgaaggaaaacggatcgaacccagctctacggcctgcggtgcacccaaagaagaggagaacgaagggggctagagcagtagagctcgaccttgaatcagcggatgtgcggcttcgcgtgtcgtcgtcgatccacatccacagcgcgaaggcgaccaggaac

SEQ ID NO: 14095 - DNA, 797 bp, Zea Mays
aggataagaggaagtcccaaagcatgcggaacaggcataccggtcgcacgcaagtctcacggaagaatcacctaagccccggagatgtgccccgtgtacgcgtcactatcaggaggaagcaaccgaacgcaggaagactcggcatgcttgtagcaaaggaaagtaggctcagatagactcaatgatctgtacagggatatctcttcagtcgactatataaggcggaggaggtaccccaacaaaaaagagggagactccattagatcgatagtcaactccatcttcatcctctagcaatcatctgtgacccccgaactcgaaacaatctaatactcagcatcacacatgacgtaggatgttacgcacttgtgcggtccgaacctgtctaaattccccgtgttccgacgtgcccccgcacgtaccatcgagcagcgatcgacgtcgctgtcctcctaaaagcactgcgtggtttaccccgtagtgcacagtcggtaccaaacatcgataaccagcgccagctccatggccatcacctttaacaccgcgattgtcttcaacgtcaaggaggttttccacttcggatccctctcctacatcaccgaccgaaggggaatcctgcaccgcgtcgtggacgcagggagaggagcccctacaacgtgaggcacgccttcgccggaaccggtgctggaatgtccggcgtcaccacacggccggggaacgggaccccacccagcccgtttctcaggacgaggcgtccgaggctggagagaccccagatgaacaggcatttcatgaac

SEQ ID NO: 14096 - DNA, 417 bp, Zea Mays
cgcttctagcgggatcctgccgatgattagtagctagatctgcagaaacagggcaagggttccgttggggtgcggcttgtaatattttctggttttgtaagatacttttgagaagtattaatctaacagtgacataacttatctgtatgttatttgtctttgctgtgtgcgtcgttaccaccttctccctggtacttggcccccctgggatgtaggctcgacgtgtcaaggctggatgccagtatacttaagaaagaattggtgacctggcccccaggaggtagtctcgactaggacctggacctgcacatagccttggctaggaagctttagtagtgcacccataggacccactaactggtaacttttatcctttgattcacgcaataggacatgcaggacttagaccgagaagcc

SEQ ID NO: 14097 - DNA, 525 bp, Zea Mays
tgacaacccggaggctaccgaagtatggcggatgtatttcgatggctcgctgaaactgcagggagcaggcgcaggaatcctcttcattgcccctagaggtgaacaactcaagtacgcgtttcagctattattcccggcatcgaataatgtagcagaatatgaggcactgatccatgggttgaacatcgccatatcgctagacattaagaggctgatggtatacggagattcactagtggtcataagccagataaataaagattgggattgctcgactgattccatgggcaaatactgtacgaccatccgaaaattggaagacaagtttgaaggcttggaattccatcacgtggaaagagaccacaacgtagcaacagacgcgttgtcgaagctaggattcagtcgagcccgggtcccacctggaatcttcgtccaggaagtgccacgcccaagtattccctcagatcaggcggaagagtgcaacaccttgagccaaccagaatcggactctaatgactggagaga

SEQ ID NO: 14098 - DNA, 1531 bp, Zea Mays
accgtgtttttatggtttgtagatatttctgttgtgattttgattagtttttcttatcaatttggtattataattttagtgtgatggtattagatgtaaatgttggtactgggaggaagagtgttagctacctaggaaggaaggaagaattctgggaaggatacggaagggagggagttcaggagaaggagaagaaggtagacgaggaaggcatttccatagagtttcagatagtgttccttacaagcataatcctgaagacagacatcatctactacatatacttcacacacaccagggacccatcaggcagactaacagatagataaacccaccacacagagacctgcatcaagcccacttcggaccactcgtacggacattaggacgacgcttgcgagctcctcggtgagtggtttcctttgtgtgcaccggcaacggaggtgtaacattccccggctcttgaagacctgcttgaccccaagcaggggcgaatggaaagcactgttggagagcttcacggtcctcccaagtggcgagatcgagcggtaggccagaccattccacaagcacttgctggacaaggtgatttcccttggtaatacctctggtttgaagaatctgttgaggaacactgaactccggaagagctgatggcaaggtagcagtagtggcatttttgaagcctgaagcaagccggagttgagaaacatggatgactgggtgtattttgctagaagcgggtaaggccaagcgataggctacattacccactctggctgctacctgatatggtccaaagtacttgtagctgagtttgtgatgagcccgcggcataaccgatgcttgtacatatggttgaagcttcaagtaaacccagtcaccaaccgcaaattcccgctcagacctgtgtttatcagcctgacgctgcatgcgaagctgagctcggaccaggtgttggtggacaagatcctgcataatagaacgatcctgtaaccattccgacagctgaccaggcacagtctggttcggagatacgcctagagaatgtggtttacggccatttaggacttcaaacggagatgaacccaaagccgaatgaaaagtagtgttataccagtattctgcagtgggtaaccaagaggaccatttcttggggcaagcacttacaaaacagcggagaaatgtctctagacactgattcacccgttctgtctgaccatccgtctgggggtggtaggaagaactcatgcgcagctcagacccggccaacttgaacagatgttgccaaaagtggctggtgaagacaggatcgcgatctgatataatagccaatggaaatccatggaggcgttacacattggaaagaaacaactgagcgacagaggcagcagtataaggatgagatagtggtatgaagtgggcaaatttggtgaacttatcaaccactaccattatacaatctgctgaacctgagcgagggagaccttccacaaagtcaagtgaaactgtgtgccaagcagtaagagga

SEQ ID NO: 14099 - DNA, 295 bp, Zea Mays
ttcgtttagtggccaatcgtgtggaacgaccttcttcatatattaaagtagggtcgactctgctgagccggccaaacgttctggaagtctatgatcgctgctacttctggttgttcgcggaccgtctggccttcgtggtcggactgtccgcgcctaccccagaccatccggcgtacacaggataggtgaccatgatccggtatctgatcatgcttgccccccgagcgttcatcctaccctttgtatggggacataaacttagcacgatgattagaaaggattcactggccatacc

SEQ ID NO: 14100 - DNA, 632 bp, Zea Mays
gtgcatatcaaggatcaagcccttagaagacgacccactcagaggatcgttgcctaagactacgcccggattcggcactaagcagcctgacgctcagtgtgtgatgaccatcataggaagggtctgccctaaactgcttgactaccaaataaaccccaagaaatccacgtggattgctcgagtgatcgggggttacatcttgcagatgcgcttgcacgcacccaagattttagtcattaataagagacgagcaaacctggactcacgctcagcgcgtgacaaccatcgcaggaagggtacacccataatctgctggagtaccaagtgaacccctaagcaatccacatggattactcggggtctcaggggatacatctagcagaagcgcttgcacacacccaagaatttggtccgcagcaaaaacccatgtgcaactctaaggtgttacatgaaagctcggggcggctgtcgagtactcgggaaccaagtacaataaataggccctttaaaactgaccaactccgatgaccaactctgtgaggcggactgactgaccaactctccgatgaccaactccgatgaccaactctccggtgaccaactctaacgaacaactccgatgaacaactctc

SEQ ID NO: 14101 - DNA, 457 bp, Zea Mays
gcctcagatcagatactgttcgtgtttgttaggccgcggcagctgcacatgagctcatgacagccggcagcaccaccaccaacgccatggaagaggggtcggggtccatcacatagacatagatgcctgttgtagactaggacgggagggcaattgttaggcgcctgttgccatcgcatttgctgctgtgggttgccaacaagtaacatgccaggatgctttgctatcacgcacaggacaggagaggtcctttttctcgacacaagctctacagcctctactaaactagcacttgctgatgagtgcagaggatgaatggacgatgaacatctagagtgagagagaaaaaaatgttaataataataaaaagtagtagcaggattaagaatcaacctggggtacgtaggaagaggtacaatccctaggaatctagagtatgagaagtatgggaggagtt

SEQ ID NO: 14102 - DNA, 607 bp, Zea Mays
tcccttgtaaccctgtgtcccctcccttttatagtttaagggaggtacatacaaggatgctgagctccgacatgcgggcccaggagcatgatggaagaaatacattatgtgaataattattgctgacagcacacaaagatctttgctggacgctgtgttgcttctccgcgcctgttgtgcatagaggcctataggcggagccgttcagattccctccaccttagtaacgcatgagtaatcagcgggagtcatgatgactgcagtccatgcagcattgataggcagtgacccttttcttggaaacacacgagtaatggtgagtcattgtccttgctatggtaacgtgtgagtaacagcacggaccacgcagcgtggactgggcacgccgcctgtcactggaatgggcagacgcacgtcttatccgtaatgaatgcaaagacgtgcgtagcccagaggcttcatgccaggttctgcccgttggcttacgccgcgcgcagtaggccacgtggcagcatcgggtctctgccttggcggggagcaggagtgtatgtgataaggtccggatcccaccagatcaggtctggacatgtgtcggcaccggaccccc

SEQ ID NO: 14103 - DNA, 441 bp, Zea Mays
aagagcacatttcctgtttttcattgacttttacatctgtcttggctatgttagaggggggaatacatccattgcgtaccagccttttttctatggtgcacatgccttcgaggaaaaacacacagagggcttgtaggtcctgcaatgaccttgttagtgatcaattcccctttgacctccccagaacttgatcctgggcaaaaatcagcacgtgttacacctttcagcttatcagtagtgcgagtccataatctgtatcctgtttttcccacttgaatagtaggaaaacctggccctatgtctataaagtttgcactctgatgacctgcatcttgctgaccaacctctccatctttaacttggaaggtagggttccttcctccagtcacacttcaacttatcgacggaaaatgcttctattctgatccaagccatgttttc

SEQ ID NO: 14104 - DNA, 631 bp, Zea Mays
ttaagaataaacttaattagagcaactccaacagcttatataaaaattctagctaaatctaaagtttagaaagcactttttaaaatagatagctttctatatggcatgggtaccaacagactatatgtaaaccaaacgttgactcgacttttgtgtatgtttgaattttttctgcattgcatgctctgctctcacactcgacttttgggtcctgtttgaagctgtctctgataatacaactgcatttgtgtttctgaaactcattcaactcagcatgaataatgtaatctcatttcaaaagatatgacaaatcaagcccatgtaatgaactatattatagccacctatagataagagttattggccacaagaagtttcagaacccagatttcagtctatcatttgacagttaggaacaagattatatgtactgttttttgaatagatagctacttaatccatctacaatcagggacataaacctacacctgccactgaacagcatatacccaactatccaacaagcgggaagcagatctaaaagtacttagtcatgaaagggattgtatcttcataacaaataacattggatttattatcctagcacataggatacaactacgaaaattac

SEQ ID NO: 14105 - DNA, 359 bp, Zea Mays
gtgatggtggcgtaagatatttgattgagatgtgcgggtatatgctgcattatggttatactcacgacgaggaaagatgtatgtattgtgtaacacggcgcttaggtcgctattatatagtcgtgtgaaggatgctcctgatggtcgtgtgattgaggagtgatgtagtggcaagcgaggagtaagtttagtttttcaaacggttagtggatagtatctatcggtgttgtcatgatttttgttgtatggcaatgtgatgcttcgctttgtcaatcatcacattccatgcccatgggataaataatgtcttgttgatcgattaaaaatcttgtgtgagcgttgtcgcagcccaataatta

SEQ ID NO: 14106 - DNA, 781 bp, Zea Mays
gtgcgaggtcggaactctatgtcgtgagctccaagctcacatgcccacttgactgtccttccgactgcttctttgttgtggagtatatctcctattagtaaacctatgactactatgactttgtgattatcgaagtagtgatgcagtttgcgagtagtgaggagtaccgcgtatagtagcttctggacttgagggtatcttattttagagggtccgaggacttcactgatgaagtagacatgatgttgcaccggctatgcatgcccttcttctgcccactcgactaccaacacagtgcttactacatgagtcatgcaggagatgtacagtaacatgtcttcaactagttggctgcctgtggctcgacgcggtggcttgaggaccggtggggtggtcaaaaacttcttgagtgcttccagggattcttgagactccacggtccactggaatctatctactttcttgagtagtttatagaatggcatccccctttcgctgagttttgaaatgaaacggcttagcactgccatgcaccccgtaagtctttgcaccttttttgcgaccgtggcggctccatcctcattatagcttcaattttttctaggttggcctggattcctcgatggctgatgatgaacccaagcagctttctgtcgggtaccccgaacacacacttttctggatttaacttccagtggtagcgcctcaagttgttgaagacttcctgtaaatctttgatgaagctttctgggttttctgttttgatcaccacatcatcaac

SEQ ID NO: 14107 - DNA, 410 bp, Zea Mays
caagtccccgcacgcacccacttcccctctgcctcattcaattcgcccctgcacactcacccgagttgcgcgtgcccgttcttcaagctcgttggagctccctcgtcgccaggactcctgcgcccgaatccgcccccagcagagctcgtccactgtccccgaccgtgctctaccaccgccaagcaaagcctcgctgtcgatttcgcctcacccgaggtgaatttccccgccggacttctccttctctctcccccgttttctatgttccatcaattagccaccggtgatcgccggtattgataccgcattgtcgtaccgagaccccccggccaaccgcaactaccccatgccttcttcgcccacgtggagtcgccagcttcggccatgcgctcgcgctgagcgcgcgaccg

SEQ ID NO: 14108 - DNA, 494 bp, Zea Mays
ccagaatagtactgtttggtggattacaagggcgcgtgggccctgagggtttaaacaaaaaatttgcggagattgtcaatattccaggaatgctctaggtcttcgccggatggcgttgttagcctgtacgcgctggggacgctttcgacttgacgatgaacggaccctcacactttggctccagtttgcctcgtgactctgtctgggtggttcggacgagtacgaggtctccttcgttgaactctcttgggacgaccacgtggtcgcgccaggccttggtttgagcttggtatttgttgagggcctgcagggcgaagacgcggtctttgtcgatgaggcctttggatgttggttcgtctacgtcggggactgctgatgtgcatgtttggggtgacccatgctttatttcctgcggcgtcatggcctccgatccatatagtagatgaaaaggtgtgaatccggttgcccagcattcggtcgtgtttaaggcccag

SEQ ID NO: 14109 - DNA, 407 bp, Zea Mays
gcgagggtccggtgccgacacgtgtccagacccggacctatctgcatacactcctgctccccgctcaggcggagacccaatgctgctgcgtggcctactgcacgtgacgtaagccaacgggcggagcctgacgtaaggcctcagggctgcgtggccactgcatttattgcggataaggcgcgccgcctgtccattccactggcaggcggtgtgccgcctctgcatttattgagccctgtccattccactggcaggcgatgtgtcgcctccgcatttaatgagccctgtccattccactggcaggcgatgtgccgcctccgcatttaatgagacctgcccattccgctggcaggcggcgaccagtccgttccacaggcggcgtgcctgtccattccattggcagacgg

SEQ ID NO: 14110 - DNA, 1081 bp, Zea Mays
tcatagtttgcgctgcccacttgagccggatcatctccggcagtaccctcgggggctgggcagtggcttgcgcttcccacccgagccgagtcatccccggcaacatcctcgggggctaggcaagtatcaacaccgtccttgagaaccaagttctctgcagtagccacctctaaggctgatggaccctcagttacttccatgggaccaggacgatccaagtcagtctcctgaccctcgagaccgcactctaaggtcgatgaggcatgggatgaccttaatccagcgtcgaacctccatcacaccatcatctgccggctcggataacagatcctctggaaccatatcctcaagagtctgatcaaaattcgccagggtcaattcttgcagaccaatgagagcagacaaagcaggagaaggaactccactactttcaccgctggcgacatactgccgactgttctttcgagtcagagggacctcattttcttcctccccgtcgtcttcaccagcagcacaggcaacacccccattgggatcagcaacagatggagcacccccattgggatcagcaacagatggagcacacccattgggatcagcagcagatggagcacacccagtggggtaggcgtcagtaaattcaggcacaggcacttcttcagcagcaggaaccgaagtaccaacgtcccgatccaaactagatactcgctggaggcgtctctttttctttttctgctcatcagcaggaggatcaagttgattgactcggcaaggacgtctcgggcgaacacttacaggcttctaaacatctgaggttgtaccagcctctgggagaggcgccaccatcaatgtcccagcaggagcagcatcggaagagtcctcagccagcaaatcaagcatagcacttatctctgcatcactaggatccaagggcacctcaaagtgaacctgccgttcaccatcaggaacttccccgagcgaggcaaccaaggtgctaacttcttcagcagagggtcgcactctaaggcccaaactgccatcagtgacaggtggattcgacacaaaaagagtgaaggccttg

SEQ ID NO: 14111 - DNA, 448 bp, Zea Mays
cgacgttctcagagcactcttttgtcggggtttcccctacttcagaggcttcgtcctaggagatgggttatgctagatcccgttccctggcttcgtggtgatgtcgtatgttaccacgcctgttccggcgtcggcgtgcgtcacgctagggggggctcttcccccagtatggtgtgctcgtcattggaaacaggcgcgtcctccactcttctctggatgaagaggatgtctgggaagaaagtgcttggtgtgatgcttcttgctctctccatctcctttgagggcagaatggtcgggatggtcattagttgtgcctctgcggttgtgccaaacccaggggcacatgcttttcttcgccgagtaatctgagtccatgcccgagtgggcgacgtggacaagggagttcaccatgatggaggcactacctcggtcggtcgattcacatgcg

SEQ ID NO: 14112 - DNA, 904 bp, Zea Mays
tccactgtcggagggtataccgttggttcaacgatgcctgcgcctgcacttgatgacgctcgaggctgaagctcggatgtcatcgaccaccctcaccaataatgacctcttcaagcgggccagggcatggtggggaaggctgattacagtgcccttgcccaggtcccgatgcggcccaaccgtggttacatgtcactagtaggccatagaacctgcctctgcttttatccttgtttcttcatctcaacgagattaatcggtcttccatttgttctaaggggctacggggttacagatccaccttgcctccggtcctagaggacgtggagggtcgggcagtgcgtaggttggctgcaggcagcagaagaggaagaaggacaaggagaagaagcgagcccacgagaaaaggtagctcatgacaaactcgagaatcatcgtcgagcgtaggtgagggaggggctgccattggaggcgtcccagatatgttcagcaacgacgatgatgatgacgaggggatggaaattcgactcggctttagccctgaggtgacgctttggttcgagccactctcagtgagcccgtctggcagtctggatgtgtcggcacctaggctcaaggtgtcggtgccttggctcgagacataaacgttcatcgagcggcagactatcctcgtggtcaaagaggaggaggtgacagcggagcgggttgccgaccaactcccggtgtcgaccacggggaccatgggcctgaggagtttggcgctaaggaggcttgtcctgcctcagtcttggtaagtgtcatgagatatagaggctaatttttcgttatcttctgtgtgaatttttgttcctgcatgcttttctcagccaaaagcgtagatcgggtgcgccgacgctagcccctg

SEQ ID NO: 14113 - DNA, 375 bp, Zea Mays
gaaacgagtaccaggggcactcgactgattggtaggagcgggggcagtattgggacgaatgaaaacagtctgcttgaagggataggaaggtgggcgatgcgaaggacgattctgattaaaaggtcggatcaccaacctggttctcttctcaggcccttgatttgacctttcacctccaaacccctttgattttccatgcccgacattttggcttccactgccagtgctgtactgacaaccctactgtaggtaagatccagacatgttgccattttctgttgaagcctatcattaagtcccctcatgaaacaaatctttttcttcagatcagtattcacttggtcgatggcatactgggacaaatgattgaactta

SEQ ID NO: 14114 - DNA, 536 bp, Zea Mays
cctctgcatcacccatattccaattactttttacaccgagtaattcgacgtggtcgtcgggcttcgcggcatggtgctccggtgggccattatcgtcgctcatgggcgcgccgctgcgagcgtggtgtgcgcggccgagcttggctgctggaggatgaagatgatcacgccatcgtcgatcgtatgttgaacggttcggatttggtctagccatcggatgtggttgggtgaatctgagccatcggttgcgtgtcgggcggctgtgatcgtgcgctggtctatatgaagggaccaggggaccgttcgatccacagcggacggtagagattagaagataacgtttcgatacatcgccaacctaatctgggccgtgcgacgtggatccaacgactctgggtgctgcataccctttcgctgtgcagtttttacatatgagtccctagatttagtggtaatcaacccgcagttctgctcggggattgattgtgtctggggaatgtcgcaagtgggcccctggtcttttagttattaatgcg

SEQ ID NO: 14115 - DNA, 510 bp, Zea Mays
ggagccaagggcgacaacacatcctctcggcacatgcacatgtgatgtgcacggcaagctagccagctagggttacatttggggctttgggccaagcacaataaaacatttgggccaagcacgcatttgggtcaagcgcaaacgggaatacagacgcgattattccggataaaatacgggaaccgttaattcggtcgggaaacaactcttactgattccgttcctgttactgtccatatttcccgtatttttcccgtttcctgtttttccagaaaatacgatatacgatcggttaacgtggtatacggcgccggtcggtacgggatttttccatcccgttctcatccctacatagaatccagccaatatggcatcttcactcctcttatcctcggccatctcaaccttgattaagcaacgacccgaagcttgacaacaagtgcaattgcaatagctcagaaaaacaactgtaagtcagtggcgtgaaaaatattttgtcacaaccctcat

SEQ ID NO: 14116 - DNA, 522 bp, Zea Mays
aaagatcctaacttatcctaatctagcttaatagatttaccttatcttaagagatactctattgccttaatagaatcatcctatcttgaaaaagatttcatgtcatcctaataaatctaactgacctcaagagattctatgttatccttagggattcatcttgccctaattagcgtatttatcccactctagaataacaaccatgagctaacccaaccaatagagtcttgatggattgcataatctattaacccccacctgaccaaccagattttgacctgcatcatgtagtccatctcacccataactattctaaccatatttccccaactccgataatatacactaacctcgaatcaatgagctcaagaccggagaagaaaagatcaacctcgtcaaggaaggagagaagtcaaactcaacattcggatgcattaccacccaacacagagttcttcctcaccataaacgttcttacctctgcctattcttgccctatcctatccatctcttatattctac

SEQ ID NO: 14117 - DNA, 456 bp, Zea Mays
ccactgtggcggcatcaattgctcatcggagaaggaaggccgccacagattgcgtctctccgtggaccgccctcacctcgacgtcacggctggtaggagcttacaacctcgattcgttttaatcttggcctcgtgttgtggtagtcggggtggtaaattctgggccgcagcggaagaagacccagcgacgacgaggtctgtcgtggtggcttggcggtggcgccatgctctgggtggtcgagaggtggaggatggctctgtgccattgatattccgttggacgatgtagattagatggtaggataacccttggattgtgatcacaaggccatgattagatcagacattataggaatctcgaccatcggatctcgggtgaagggactagattagaatagagcataccctttcgcggatctaatctaggccgccagatggcgatcgggcggctgtcat

SEQ ID NO: 14118 - DNA, 975 bp, Zea Mays
tgtcaatctacctacgtattcatcgaagaagggcagtagctaatctagaaccggaaatgaatcctcctctgaatcccccgccagatgggactgatgtcgtggttgcaactccaatgcaactgctgcaacaaatagccaacactatggcagaaatgcaagctcagctccgccaggacaggcagcagccaccacctccaccaccaccaccaccaccgccatcaccacctagggattagcatcacaaattcatgagccacaaaccccccacttttccagctctctcgacccactacaagttgttgactggctgaagcccatagaaaagatgctcaacatagcccagtgcactgacagtgagaaagtactttatgcatcgggtcgcctcaccggccccgctgcagattggtgggatgcatactacgtagcacatgctacttctaacaccatttcctgggaagaattctccgccagcttcaggaactaccacatccctgctggtcttatgaagattaagaaggattttctatccctcaaatagggaggcatgtcagtaagtgaatacataaacaaattcatcagctatctcgctatgctcctcgggaagttgttgatgacgagaaaaagcaagaactatttctggagggattgatcgagccactccgataccaactgatctcccactcattcccgtccttcaagaaactgttggacaagtctatagctctggagcacaagcgagttgagctaggcaagatgaataggaaggctacaaaccagggacaggcggcaagtagtactcgtcctcgttatgcttcatcacaaggtactccagctcaaggtagtctcggacaacaacctcaacagatccaatctactcctcaagcaagcaccccagtgggacctgtcgctcctaatgcatcaacaaacaggtcatgctttaaatgtggataggctggacattatgcgaactacttc

SEQ ID NO: 14119 - DNA, 1245 bp, Zea Mays
ggatcgctgatgcaaaactggtgtttgatggcatggaacaacacaatttggtgtcctggaatgctatgttgactggttatgtcaagcccatggatctggccggtgctttagatttgttccagcagatgaggcagaggagacgaaggagcttgatgtagttacactggcttctgtactcaatgcctgtacagggctgcttgaccttgggaaaggtgaggagctccatgcacttgtgaggttgtattccaaatgtggatgcctgaggactgcagaacgtcttcttctatttgaaatgggatcagagagagagagagagagagagagatactcctggaactcgatcatctcaggttacgaacgccactccatgagtgcggacgctctcagcatgccctacccctacgtgagatgcaatccgaggcaaaacctagccagtcaacgtttttcagctctgcccttgcagcctgtgcgaacatatttctgcttaagcatgggaagcacattcatgcatacatgatcagaaacaggaacgacattgacgatatactgcgaagtgcgctggttgatatgtattccaagtgtaggctgtttgattattccgcccgggtctttgagttagggtcatctaatgatgtcgtcctgtggaattctatgatctttgcatgcgcgtaccatagtgaaggtgactctggtttcgtgtatctgtgaggggcatgtcaggttgggaaggagttacttcactctgatgagtacaacagcatcgttccacggatcgaacaccatgaatgcatgatcgagctgttgggaaagcatatggatacatggttgagctagaggatttcgtggaccacatgccctttgagccaacaaccgccatgtggctcaggatctttgactgctgcagggaatatgggagcagaaaattaggggagagggctgcgcagcgcatcaatgatagcaaaccgtcatatttgttcagtccgctcctgtctacgaatgcagtggctgtgacgatgcagagcccatgtcattcttgctgaggctgacaaaactggtgatgattgattgagattcttgctgaactgtgaggggttttaggtggctgagaagctgaatgggctgtctgagatgccacaaacttgaatttgatcttttagctgcctatgaacgggtacaatcagcacttacgatagtgataccctgctaagacaagaattcaggctgaaaacagctcatgttccctcg

SEQ ID NO: 14120 - DNA, 930 bp, Zea Mays
cagttcagttcttgcaacagatggagagtactcccaatgcacaacagatccatcatcgttaaacttaagcatggattgagatctaccagttctttctttttctttcttagcagggcaaagttctaggtgacggatcaaatgtccagtcctagaagtagatttagcagacaatgtgtgcttgcagtgaaggcaaatggcggaaatccttacctccttacctccctgcttctcagtaacttcctcaaaatgcaaccaaaccttggaggtcggtcccctcctcctggagcgcttaccagaggcaagcgcagatgtgctagcatcggccgtcgccgttgggctggtggatccgatgcgtgtatctgccatgcccgttgttccagcagcggcaccggtgccatcaacctcaatggcagcagctgaactgctaccaaggaggaaacatcgggcatcatcttgctcattctgagcttcaagtagccgttcctcagcctctgcggctttgacaaactcgtcatccatggaattatcatccatggacattggaacacccacgcagtcggcgtctccggctccctcacggcaagcgctgacctaagatcttcatccaaaaacaatgtatacaaatgagagggacaccactacaccagatctacctagtacggttcagtgaatcgaattaataccaccttacctgcgctaccggagcaccagatccaccgactatgtggttgagagttgagacttgggagccggaaggggacgtcggtaccggaagacgaggggagcagagacgtgacgatggagatggagcagagaccggaagactacaggagccgagagggagacggggtggatgtgggtgaaatacctgagacacggcgagcccgtggagcagcgagccagcaacacggcgttggcgatggaacatag

SEQ ID NO: 14121 - DNA, 399 bp, Zea Mays
cacggggcccacgggtcagcagtgtgctgagggcacgaggcgcgatggtcgctagattgcagatcgacgactatggttccacgaaccacgagaaccgttatccgcgcatccgggccataagattgtggttggatggttaagatggggtgccaggggatttcaccttctccggccggctaggggcggcgccattctcacccgcggcggcgcagctgccgtagacgaggtagattggggtttctagggtgctgggggtggtgttgatagccagaaaggttggggaggactcgatgagccctatggcgaggtccgggttgcaggaacgaggctgagacgggcagatggtggagggggaatctcgggcggaccggaggtcactcctgcgagcaatcatgcata

SEQ ID NO: 14122 - DNA, 343 bp, Zea Mays
tgtatatccactttatcatgtaggataaaagatgtctataaagcatagataggtttgggtaagaaagagtagggtaagggaagactccatccaagatttgtggatcttgattcatctgatgatctggcttgaatcttatccttccttgatttgatgttgatcttttcttctccggtcttggtcttactgatttgacattagtgtatattatcggagttggggaagtatggttaaggtaaatatggatgagatagactacatggaaaaaaagtttgtttgatgttaggtgggtatcgatagattatgcaattcttcataactctattggttggatcaaatctca

SEQ ID NO: 14123 - DNA, 712 bp, Zea Mays
ggctaccaccacttgagaacgttgtatgttttcttatgttgataggatcttataaggcatgtttacaatattcgaggtctcccttccctgcatgctgatagtggccttaggcccatcataggcctagaaaggcatgaaggtgggttcgatcttattgcaagatgccggacaaagcaaatccattatgtgtgggggtcattgcgagcttccatggtagtaggtgcaaagaaggtgacatgataaacaataggcctaggctaaagcaggggtgcaaggggaggacatacgagactaggagttgtgatccaccatgatagagctagtgtataccatggcttatccactcccaaggtactacctctaaactttgttgccatgcttggtgtagcggccagttgatagccattgcctctacctgcctaaaagtcaaagcattgggcagcaatgatgccacatgtctctagaatttcaaagagtcatatgttgagcttagggatggcaattctgctcgcgggcacggatatccgcgggtttcgtacccgatgggcatggatacgggtaagaaatctcgcccacgggtaaggatacgggcaacacttctcacccgcgggtaattgacggatataaaattttgcccgcgggtattacccgttacccgcttaatttactagcccatcaaaatattgcccatgtgttcattttatcctaaaac

SEQ ID NO: 14124 - DNA, 541 bp, Zea Mays
ggcttgttgaagtttggtcccttgggtggaaacccaaaggatcgaattctctggtgcctatcctgctgctgagctcggaggacctggaactttctcttgaggtgacccttttcttcttccctagctctttccacttgtatggccttgtttgagaggtgcgagaagctgaggaaatcttggctggcaaggatagtcttgagttctggtcttagccctttcaagaaacgagccatcttcttggcttctatgctgacatcgtcaggcgcgtagcgagccaattctgtgaatttgtgcacatactcactgacagatcttcctccttgagttaattcccaaaattcatcttccttgagctgaacgatcccttggggcacatgatgttctcggaaggcggcttcaaattctgcccaggtagcatctttgacggtagcgctggagatatcccaccaggatagggccatcccagaaagttgatgagcagccagatgaacacgctggttttcagggcatccgatggcttctaacttcctttttatcgtgc

SEQ ID NO: 14125 - DNA, 385 bp, Zea Mays
cgaagacatggtcccagaagatctgttgtcggagccagcagatggtgggatgatggaaatttgtgctgatgtgcctgatgccgggttagagttatcccgagcggcgtctcgtgcctcatcgaccttggagcgcggtcttaagagtcaggaggctggtctggattgctctgttcccatggaagtggttgaaggtccttcagccttaaaggtggctgctgcagagagctcggtcctcaaggatggcgctagcgtttgcccagcccccgagggtgttgccggagatgatccggctcggatgggtagcgcgagctatgacccagcccccgagggtgtccgagtgggttctccctctcatacttccatggatgttcttgtagggtcttct

SEQ ID NO: 14126 - DNA, 457 bp, Zea Mays
cgtcggctcgaccacgagtgtggactttaacacgtgatagcggtgaataaaatggacactaaattttaatcatcttcgtctatcacgattttgatatcgtgtctgtctccatctgtttaaattgtcctaatttattttgcaaaaattcagactttagcaatcttctgaaacattagatccaatatcgtttgggttgagccatcgatgtcttgcccaaactctaatctttgaaattgaatctggttccttaaacttcgtttgaaattctttgacgcctgtgttgcatgtgtctctctgtggtttggcttcatggcgtgtggcgggcacaaccctatgtgtgacaacgcacaacttcttacttacgtgaaaaacacgtatcgtctccatggaggtccccgtgtgcaccttatctccctaccgctatccctttcggttatccgaatcggccaccgattca

SEQ ID NO: 14127 - DNA, 485 bp, Zea Mays
aggatggtacgctgagcttctaatcacagtggttcctagtgacttgtggagttgctcccaaaaacatgctacaaacagtgcccctctattagatacaatagtctttggaattccatgcagacgcactatttgatcaatatagatctctgcatatttctctgtcttgtgggtggtatgcactggcaagaaatgagttgtcttggttaatctatccataatgacccaaatagaatcgtggtgccgggaggtgttgggcaatcccacaataaaatccatgcaaacatcctcccatttccaagagggtatgggaaggggctgtaaggtaccggctaccttcaaatgactagctttgactctctggcaagtgtcccattccgatacatacttagcaatttccctcttcattctggtccaccaatacaaggatctgagatcatgatacatcttgttactgtcggggtacatggaaaatttggagaggtgag

SEQ ID NO: 14128 - DNA, 304 bp, Zea Mays
ataatgagtggtgaccagtgtctaatccgacggtttcgattcgcacgcttggttggcgacgaataaaacgcgccaacgcctgcctgcgcagcggctacgactacgatcatccttgatacttgttgttttctccttaatcgcgagtgggtacggcattaatgccgtttatgtgatcttttgataatttctccagagactaccggcatatatcccgtcgttgcaagaaagaaaacaatctgaaacagtgatggtgaggcactcctacgtacacacactgcacaggcagacgtttacatgtgtagac

SEQ ID NO: 14129 - DNA, 329 bp, Zea Mays
ttgagctgcaaacaatggcttctcggtctccgtgcatcggatgagtccaaacttctgctcaatgacccgtacccattcgtcagcttcgaggggatcttcggctttgatgaatagtgggggatgggtttccgaaaaatccaagtacgaagtttcgtggggtccctacggataagccctcccgccttgttgctgaagttgatgtcccaccatttcacgtaggaagcgggtgttgtcagcggtcacggtgaccaaggcagcgatagcctcggccaacgtgggcggtaccggcggtggattgggtgtatcttcttgaccacgggatgttcccg

SEQ ID NO: 14130 - DNA, 630 bp, Zea Mays
ggaagggccattcatggtatcggaggtcactcggccaggatcatatcggcttactcaaatggatggcacggaagtggggaactcgtggaatatagagcacctcaggaagttttatccttagcaagactccaaaagctattagagcaatgttgtactctgtaattggaaaatacgtcatcaataaaagatttcattctcaaaggcattcacactattggttatcaattgacttcgactagacttggaatcgacacacttactcgacttggggtggccactgtaccccactaacggagcaatcagcttaagtcggaatgacttaagacggtgcaacatgctcgcgcttactcgacttagggtgaccactataccctactaacggagcaatcggcttaagtcggcaatgacttaagacggtgcaacatgctcgcgcttactcgacttagggtgaccactataccctactaaccgagcaattggcttaagccaacaatgacttaagacggtgcaacatgctcgtgcttactcgacttagggtgaccactataccctactaatggagcaatcggcttaagtcggcaatgacttaagacggtgcaacatgctcgcgcttactcgacttagggtgac

SEQ ID NO: 14131 - DNA, 724 bp, Zea Mays
ctccgttaatagggtatagtggtcaccctaagtcgagtaagcgtgctgatttcaagtccaatcaaatcgaagtcagctgaaagtcaagagtctgaatgcctttgaaaacaaaaactttattgatgctaaagtcccccgattacagagtacaatgttgcttcgagaattttttaggcctcgctagggataaaactttctaagatgctctatgttccatgagttccccacttccgtgccctccatttgagtgagccggtatgatcctagccgagtgacctctgatacaatgaatgacccttcccatagtggtgacaacttgtgccgtccttcccccgttagaattcggtgaaggaccaagtctcccactgcaaaggaccggtgtcgcacgactttatcatgatagcgcctcaaggtctgctggtacctagccgactgaattactgcgttcaattgttcttcctccagcacatcaatatcctctagcctagtagcttctgcttcagctatgttttcgaaagccaacctcggcgccccgaatattaggtcggcgggcagcactgcctctgacccataaaccatgaagaacggggtgtttccatgcagagcttgactgggttgagttctcaggctctaaaccacgtatggcagctctctgatctactctcctgcaagcttctcattcttgtcaaatactttcttcctgagtgcttccagtatcaccccg

SEQ ID NO: 14132 - DNA, 540 bp, Zea Mays
tggctgaccacagtggagtgtctcacggcggcgacttcgaccgatttggaggaaataccgaattcaggcgctacggtgggtaatcgaggcgaggagcggtgcttggggtttgtaacaagctaacgaagcaggctggggcatcaatttatagtgattaacagcggtggatccgaatttggggatgaaagctggcagccgaagcaaggtgagtcaccggagttcgcataacgtgacattcactgggcaaaaggttacgaccttcacatggttatcctccccaacctgcaaccacatggtagaatagcttaaggcatgtcgtgaccgagctaaatggcagcacgacgatggcggtcacgtggacacgtcaccggtgcaagtgggtacggtgaagccggctcaatccactcccccactgatcttttcacgtccgcggtaatatcctgcccgagttgaacacgaatcgcgacggacagcacagattgcagcgcggagatcgcgggcggcgaagttcattgaaatcttgttcagttactgtaccat

SEQ ID NO: 14133 - DNA, 337 bp, Zea Mays
tgtcattggggccggtgaaccagcaacacagacgcgacctcccctgcaacggcatgacccgacgcttcagaaaatctccaaccacgtgcatcgaggtcataccaccggccgccagttccttgatcatgtccagtacgggttcgaactccggcacaagggacagtttggccctccattgcttccggtcgagtcttggtccgtcgttcggcagggcaaggcggtcgttggcctcagcactgacgatcacccagtcattgcgccagttctcccacctcgcgccgccaagggtggcaatgtaggccacggttggatctgacctcgtctagaaatagtaggc

SEQ ID NO: 14134 - DNA, 383 bp, Zea Mays
ccacgagttcatctatctgttaatgaattttggcaccagtcatcattgcaggtgggcggtctgtcactacgacactttttgtaaagttcttgatgtctaggcggaatggatggtcaggagggagaaattgtcgatgtttatcgaacaacgaatatttgccacccttcttcaaccaaatgaacctaaaagcttccttgcaaacttggcatgggaacttatcgtgaacacaccaggcgtagaatagcccatacgtcggtaagtcatgcatggagtactggtaccaaacatgcattttgaagttttgtgttcgtagctcggtcatacgtccataccccttcctcccaagaacgaaccaattcatcaaacaaaggctccatgtacat

SEQ ID NO: 14135 - DNA, 321 bp, Zea Mays
gcatgtcccagagctcctgaacagcatgtaactgaactgttgtggcacattgatgacccttactccacttctcggcgcaatattgacacaggccgcgggctcggcgataagcacgaagagatgccactttgctatcagcagaagatgctggcgataaccccattttctgcttaatattgtctcctgaaggtttctcccatcgatgaggaacattagctgcagcttgcacatgagctcgacctttatagggacgaccaccatgtccagaatccttccgactggaagactctgcctcctcctgcaataatgccaacgcacaag

SEQ ID NO: 14136 - DNA, 421 bp, Zea Mays
gccccactccatcctccaggtggccatctttgtccacttctgtgagatgttcgtgggggtggcagcctgcacttccctcttccgccagtttttcgtgctggtgaggtctgggaagggcaaagaccaccttggggcatactacttccagatgaggtcagatccaacagtgacctacattgccacccttggcggcgcgaggtaggagaactggcgtgatgactgggtgatcaccagcgctgaggtcaacgaccgccttgcccttccgtgcgacggacccagcctcgaccggaagcaatggagggtaaaaccgtgcctcatgccggagttcgggcccgtactggacaggattaaggaactggcgattggtggtctgaccttgatgcacgtactcggtgatttcctgaagcaccgggtcatgccg

SEQ ID NO: 14137 - DNA, 377 bp, Zea Mays
ctggcttctcctcgctgagcacgttctgaatcacaaaacggttttccaagattcatgctccaccttccggaattactcgccgaagttcggagcggtttcaactccggcgagctattacttccaatctgtgtgtcgtcggcagaatccgagtgtaccactgcgtttgtctcgtcaagggcttcgtcttggtgcatttagttcgtcaatcggaccttcgaatctccgtcaatcgacgaatttcttctcggttcggacgatatcttattctccgatgagtaaactctattgtttcttcttctattcttcgtttttcactgttacgttgcagctcctccctgattgactccttccctacgccacgacctctttcccttctc

SEQ ID NO: 14138 - DNA, 715 bp, Zea Mays
atgtcctggaaatacataggacgaccaggggacgattagggtcgatcaggggcgactaatcgccctgatcgtcgcctaatcgcgactaatcgtctgatcgcccagtggcatcgatcagacgatcaggcgatctgaaaacaatggttatggcacatgctccctcactcgccccctcgagtgttgctctattgaatgaatttatggtaaccacccccttggaacctgttctaccgacggctggtgagttaatggctcctgtccccttggattctgatatgccaaccaattcttcagtggccattctcagttattgatgtgtcgtcggtggacaaggttcatgttggcaactccatctccttgacactctgcccctcttccggagtaataaaacttgggttcactgaagcgcctcttgtttgctctgggtattgatgaatgatgatgcctctttcacttatggtgggccaagaactgagacctgcaatgtttctgccatggctaagctattgctagtctattcccgacgatgccagggcatgaagaatgcttcctgcaacgaagaactgaccactccatgcagtgaacttgagaaaaccactatgacagtgaagcaactactttccaagccaattgacaaaagaagacttcacaaggcgccaacaacggcgcctcgctgtagtagaagggtggctggcgccaagccgtactccacatg

SEQ ID NO: 14139 - DNA, 692 bp, Zea Mays
gttaatatgcacatgtacagcactacagataatagctgtgcatattccaaccaaatgtccgtgaaaatgccagttgagtgccactaaacacacaccaacttaaagttgttcgatctgtacgatcaccaatgcaagaccacccaaggtaaaaggaacagagttcattccaaatcggattacgggaagaagagatgggagggccagcttgtcaagagacgaatttgggcgcaatttattagtagcaattattataaatagacctggttagcacggccccgtgagatccagccagagagccgcggggtgcgagttgagtttggatggggggaggaggcatggagcgtaccgggcggcgcagaggatgagcgggcgacgagatcgggcgggaaaagcgctgggtcggagaagaaagcgcggaggcggagggcgtgcgcggagcggccgtcctcctggagctcctgcaatagctctagcgccgtgaggtgataccgctcctccagcaagaagttcaccacgcagttgcacaacgaagcccaccgctcgtccgctgcaccaacgcccactgccgccatcctccttggtatcgggcgggcctacctctatcgcggtgaagctcgccgggcgtcgttgtgtggcatgtggccgcggcggaaggcacagatctcacgcgtgtgactcgaggccggtgaaag

SEQ ID NO: 14140 - DNA, 452 bp, Zea Mays
atgtcaacatatcacatattcacatgcatacaataaaaaaaccagacccacttgtatgtggttcatcttatgttcacccccccaccaaaaacaaaaacagatgttactattgctgctgaattatcattttgaactgcaaacttgctggctgttccattagggtttgtgctttgaaaactgttgaaaagaactactttactctttatatttctaaatggcttttgatttcttacacaatgagtaacgaattccaaataatttaagcaaactttgtgaatcaccagttcttggatggtttctaaggaattgttacacattgggatatatcttggttctggccatgtaaacattagctactttttgattcttagatttcttcacatttttaagattctactatgacatgctgtcacgatattttatttcttgtgggcttaaggttttgtaattgc

SEQ ID NO: 14141 - DNA, 442 bp, Zea Mays
cgccggggtgttttgggggaaagaaccacggccattggatcaaccgtgaatcacacgacggatggctcacattagaatgtcgtaccggttagctggggttgatctcgggcgttaggtgggaatccaagggtcgcgatctgatcacgagtaattaaatccccttcgctgattcgtattccggcggccggatctgcgtaccactttgattagggttagatctaatccgggcggtcgaggaggaatccaacgatcggatggcgttgttggcctgtcgtcgtcgatcttggatcgggcgtacaccattgcctaccgatttggggtgagggtcggtctaatcagaggcgcacatttccgatcttacggccgagatctgatgataccctttcgccatggttaaattgcaaaagagcccctcctgaattacaaaatgaacccatagtcc

SEQ ID NO: 14142 - DNA, 390 bp, Zea Mays
atcgggtgctctaaccaccggtacggggcgggaggaccggtggtcgccaccagtatctggcgatcgttgagcttttgttgtcttctgttctcctgtgatccgtgtccgccgaagatgacgttgacctccctgtcaacgcccgggaaagctcctccccctccctcctcctgctgctggggttgtcgtggttcttctggtcctcccctcggcggaggaggaggtagaggttggaagggtcggtcgtgcccgacggaatgcttgaagtcccggcagttccgaagagtgtggcgcatgtccttgtggtacgggcactgggcgtcgaggatgtcgtccagcgtgcgctcacctccgcgaggtcctctccgggcacgagaggctggtggtccggcg

SEQ ID NO: 14143 - DNA, 469 bp, Zea Mays
cacaggagacatccgagtggactgcgggtttatatatataaaggacaagggcccttctgtaaactgtacccgcgaaggggtacgcgccgttctggaccattggatcaaaatggacggttcagattttatgcagcctgatgagcttcggccactcgatcacgatccaacggcccacaccacatcaccctactaatctaatctcctccacccaatccaaatcggacggtgagcgcaccttcttccacctctcacgcactccagccactcttgctctctctcatctctcacggtgtctgccccaatggagcgtcatccacccgacaacgcaggcgggccatcgccccaaccgtgaccctgatgcagcaatagcccagggcggtggtgccgagatccgtaatggtgccctccccagcgatcctaaaatctagaaccccgcaccgcaaaactgaaggcgatatacgttatgggg

SEQ ID NO: 14144 - DNA, 868 bp, Zea Mays
ttaagtaagcgtgagcatgtcacaccgccttaagtcattgccgacttaagccgatttctccgttagtagagcatagtggtcaccccgaattaagtaagcgtgagcatgttgcaccgccttaagtcattgccgacttaagccgattgctccgttagtagggcatagtggtcaccctgaattaagtaagcatgagcatgtcgcaccgccttaagtcatcgccgacttaagccgattgctccgtggtagggcatagtggtcaccccgagttaagtaagcgtgccaattgacagtgaacaatctgagtgcctttgaaacctttttattgatgatatttttctcgatttacagaatacatcgtcgttccgagagcttctgggatgtagctaggggtaaaacttcctgaggtgttctatgttccatgagttcccaatttccgtgccgtccatctgagtgagacgatatgatcccggctgagtgacttctactactatgaatggtccttcccatagaggtgacaatttatgccgtccctcccccattagaattcggcggaggatgagatctcccactgcgaaggatcgatgtcgtatggccttatcatgatatcgcctcagagtttgctgatatcacactgattgaatcaccgtattcggtcgctcttcttcgagtacatcaatgtcctccagcctagtagctttagcttctgctatgttttcaaagattaacctcggtgccccgaacttgagatcagcaggtagcactgcctccgaaccataaaccataaagaagagggtatttccatgcagagctcggctaggttgagttctcaggctccaaaccacatacgacaactctctgatccactttc

SEQ ID NO: 14145 - DNA, 530 bp, Zea Mays
gtcgtttggtacgagtattggtgagggggatctgcggaatttgtttgagggtgaggaattgaaaatgatgttgtttaattatcgggaggcgggcattatcccgaaggttgagccgatgtagtatgtgtgatgccctcacttgtcgtgcgatagtacaggacacaattgtatatatttgtgcggtgggtcaggtgacccttcgctgtgtgtatgtaatatgcgacttgtattgtaatgtggaatgttgcccttcacgtgccagtgtgatgttgtaactgtcctgtggcacccttgggcgacttttgcgagttgtcttgtggaaaagacttcgtatcgcacattactgtgcttgtccggctgcacccttaggcgacttttgcatggagttgtcttttagtaaaagacttcgtatcgcgcacttgttgtgcttgtccggctgcacccttagaagacttttgcacggagttgtcttttagtaaaagactttgtatcgcgcacttgttgtgcttgtccggctacacccttaggcg

SEQ ID NO: 14146 - DNA, 485 bp, Zea Mays
gtccactctcatatgttcctctactgatctacggttgtgatgcatcctgacgcatcgcccccgatgacctaatcccgaccgctccctgcaatatcaacggcccacgcccgctcttcttcctccaccagacatgagggacacagcggcccgccccatgacggagatccccaccggtgcgcccccaaatccgcctgctccggcgacaacattcccacggtggcgcgcgaaattgaaattgaagtaagggcggttacaaggagggtgtctcaccaatggttggagcagcgaagtggcctgaccacggcgtgaagcggctccgcggcggtgagaggctcatgacgagaaattacagcaccgactgtccccaatcaagcctggaaagaccatacacacgaccagtgcgtctccccgaagcgcccaggccccgatccgaggcccgaacagcaacaccagcaaggtcccacggcggcgacagcttcttcctt

SEQ ID NO: 14147 - DNA, 942 bp, Zea Mays
atttacggtcatctcacttgattctcttttacctttgtctctcatcaatatctttgtcctcaaatcaatacttcaaaggagtattgattcgagggcaaaggttcatatttttaacattgtgatttcttgtttttgatgctgtgaagctattgaaaacaagtgaccaacattggcgttcacctccggtgatttcacgaccacaacgaaactcacatcatgctaccgaagaaggcaacaacaactagctttgtcctaaggaccttggacaccaatcaaggggacgaagctcttctcagggaggtaggaaaccaaaagaggaaggatgtcagcctagaaccataagttgaggagctagatcaagagattgacaacctcaaagcaatcctccagtagttggagaatctcagggaaaaggtgcttcgtctttttgaacttcagaaaaattgacgaagcaactaaagaaatgcgcaacattgaggcgcaagaccagaacaactatagggaccagaattttgagggcatcaaccatgacaatctttgtcatgaactagacaactttcaaggtttcctctacgacgaagcttccccattgacactagagctacagatgacaccctggacactgctatacagcccccacaatgccaatgtatgatggcctgactgatccaaagcaattcctcatgagttacgaagctaccatatcttcatatggtggtaactcagcagtcatggcaaagtccttggacatggcagtcagaagtgtgacccagacttggtactcacctcttcggccaaggactatcacttcgttgtcgaagctcaaagaaattcttctcactagcttttagggttttcattcgaagcccgttacctcgtaagacttgttttagtgcacccaggagttagatgaatatattcagtcgtttgttcgaaggtttc

SEQ ID NO: 14148 - DNA, 473 bp, Zea Mays
ttcttcatccaatttttcatcagaaggttttccatccaaaactttgatcacagccactagcccaacaatctgatttttgttctccggtatgtctattccgaaaaaaaccttgctctggtatcccaaaaccaaacaaccagagcttcccgtgagaatgacaccctgtccccatatgtccaaactcactacacttgtagcacaacatatcgtttgtgcatttagattggtgatgacctatcctcatacaacggaagcatttgatctgcctcttttgttcatccttcatccaaaattccttctcattatgcaagagtttcctattatcagaattctgaccccccatgatagaagactgcacccctgatctctttctctcttcctcgctagtccgtctcctttgctactagcctcaaaacgctcttcttcacgtcgacttgcaaaaccacccctaccaagagcaaatgacggacgac

SEQ ID NO: 14149 - DNA, 496 bp, Zea Mays
cccgagtgccaaaccccaaattggaccgagctacgcgatgctacgcacacggcgaaccagtggaagtagttcataccaggaaggatggcgaggaggtttcagttcacggtgttgtgcgtcccgacagcgcttccctagttccggtgacaaattctccagttcccagtcatgaatcctgttcaacgaggctagggaaaccatccatgtgtcacggcgaagcttctgcgcccagtgcggtcgcctgattgttgacatgggccacactctattgcggcggacgaattcctccccggcttccctcacattcgcacgacggcttgttcacccacacggttccagcgaccgaacacatttccccctcatgcgctcacgatgccacggcgtagacgagatctggcagcagtggctccatcctccttgcactttcctctcggtggcgctgcagcgaggcgaaagaagctgcggcacaaggtagatgtcgagagggggccgcacg

SEQ ID NO: 14150 - DNA, 570 bp, Zea Mays
ctctagggaagatggtctcgcatttcgacgagatcgacaccgccgtgattgctgagggttatctcgtcgaaaggagcaatgaggagctggatgccatcgaagaacaagtccacccttatgccgatcgctcgcaagccgggtcgacgtgaagctcctcctgtccagctccttgagtgcggaagcttccgccgatgatccttctgcccccatctagaccgcgctccccctcgcagatgtaatgaactattttttatttgtttgcaagatacttttgtatgtgacattaactctggctcaaccgtcgcattcttctccttccctcccgttttacatgccttagctcttgcgagcgaaccgcctggccaaggcattggaacttggaaggtgctagtatcccggcccttgagcagggcgtgccaaattggtcggcacaggctgcttgtatgcaaaaaatgggggcaaagttgcttagggatagaatttcctcaggtttttgatgttccaagcattgttccgaagattgccgtcgccgtccttgagtcagtaagcccccgagcgcagagtttgggc

SEQ ID NO: 14151 - DNA, 699 bp, Zea Mays
ggcttaagtcggtgatgacttaagtcggtgcaacatgctcgcgctaactcgacttagggtgaccactataccctgctaatggagcaatcggcttaagtcggcgatgacttaagtcggtgcaacatgctcgcgctaactcgattaagggtgaccactatgccccgctaatggagcaatcgacttaggtcggcgatgacttaagtcggtacggtacattcatacccacctaccttagggtgaccactatgccctataagtcaggtgatcggtttaggtcagaaaatgctttgaaaccgacatggcactcttactttcgcaactgttcagggtgatttctataccataatagcaagacaattaaaggagcaaaaaagaacatcttactcgttgacattaggggcactgtctgacgccctgctcacagaatattcgagttctaacataaccctcacatacatatagacttcatactacatcaaatgttttgcaagacattattgcattgaaacacctttagcaatgtccttcacaggagcaatggaagaggaaggacgactcgaagcatcgggcgcagccttgacatccgcaatgatatcgtcaggcaccacgacgccaggccgcctcatcaagatccgtccagcgtgaacggccttgtccatggccttgtcgcgctgagccttcaaaatggtacaattgtcc

SEQ ID NO: 14152 - DNA, 507 bp, Zea Mays
ccgctataccggaggcagcacgcactgccgaagtggcgggcaccgtccggcggcgctgccgcgcgttgggacgggcagatcacttcggttcggtggtggtcggcgccgaactcgcgttggggccgcacaacccactacaggtggacgtgcagccctggacgagatgcactggcggcggcgcgtggttgcaccggcgccagcggccggagcgcgggagcaaggaggctagggtttaggccttttaggatgaatggggaacacggaggaggaggtgagtcgcgactgcgaggggggcatcgaagcgacgcgacgggcggacgagcgccggggcctcgggggacagagtcgcaggacgcatcggggaggatgggagattggctgaggagtgaggaccaggaaggatgggccgggtattacctggggctaatggaccggaccagcttgttggcgattctcggatggagcacaggcgtgccggaagtgaaacagtgccacatgggctgcgtc

SEQ ID NO: 14153 - DNA, 579 bp, Zea Mays
cggatctgaggacagatgaaaagggggccctttggttcagaaaccatctatgtgtgccgaagggagaggcacgagaaatcctgctagacgaggcccacaactcagcctattctatccacccagggtctaccaagatgtacctagacctcaagaccagatactggtggagaggaatgaaaaaggagatagctcaatatgtggcccggtgtgatacttgtcaacgaactaaggcagaacatcagaggcctgcaggcctatgcaacccctcctagtgcccaaatggaagtgggaagaaataggcatggatttcgtaatcggactgccccggacccaaaaagggaacaattctatctgggttgtaattgaccgtcttaccaaggtagctcacttcattctagtaaaaactaccttcggaggagccacccttgcccggatatatctcaaagaaatagtaagacttcatggcattccatgaagaatagtgtcagacaggggatcacaattcacctcaaaattttggatgagccttcagcaagctatgggcaccaagctagacttcagcaccgcctaccaccccca

SEQ ID NO: 14154 - DNA, 1344 bp, Zea Mays
agaatgcggaggagaagaccctacgtgaacatcaatggaagtatgagagggagaaccaactcgaacaccctcgggggctgggtcatagctcaagctacccatccgagtcggatcatcttcggcaacgccctcgggggctgggtaaacgctagcgccatccttgaggtccgagccccttgtaacagccacctctaaggctaaaggaccttcaaccacttccatgggaacagagcaatccagaccagcctcctgactcataagaccgcgctccaaggtcgatgaggcacgagacgctgctcgggataactccaacccggcatcaggcacattagcacaaatttccatcatcccaccatctaccggctccgacaacagatcttctgggaccatattttcgagagtctgatcaaaatttgccagagacaattcttgcagaccaacgagggcagaaaaagctggagaaggaacaccactactttccccgctggctatgtagcgccggctattcttccgaattaaagggatttcctcctcctcttcctcatcttcatcaataacgcgaacggtacacccattgggattaactttggccggattacacccattgggttcagcatcagtcgggtcacacccattgggatcagcatcagcaaaaaccggcactagcacttcctcagcagcaggagcagaagggccaacatcctgattcaagcatgacactcgacgaagacgtctctttttctttttcttcccctcagcaggagaagttggatgattggttcggcgaggacgcttcgggcgaacactatcagacctctgaatatccaaagctttgccatactcgaggatgggtgctacaaccagtattttagcagggctgcatcagaggaatcttcagccaacatgtctagcatggcacttatttctgcgtcactcggattcaaaggcacctcgaaatgaacctgcctctcgtcgtcggggatttcgccaagtgaagcaaccaaagcctcaacctcttcgggagaaggtcgcactctaaggcccaaaccgctatcacctgtaggaggatttgacacaaaactgatgaaggccttggaaggatgcagattccaggctgagtatgcaacaggagcaccaatattagacaccttgcctctgagtatcatctcaagccggctcaccaaatccacagcaggaatccttctgttggtaaaccgggttgaattagcaaggcctcgatacatataagctggatacgctgtcttttagtggctgaatgttcttgaaaacaaaatcggcaaccacagcctcgacagtcagacccttctccttcaacaatccaac

SEQ ID NO: 14155 - DNA, 790 bp, Zea Mays
tgttcctctcaatgtaaaatatgattgacacaggactacaaaataaccatgtgagctcatttttaatgaagcaacgaccttacaagttgttgccgaaattcagatgaaaatctacacaaaagtaccagatttgtaagaactgaccatgcaacaaaccaaaccagttaaacaaaaacaggcatcactcattaaggaaacaagaactcaatccataatatttaaatatcaacggggcaaacgttacattgcaatgtgcaatgcaaggcagatggttcacaaagtaattgtgcagggacgcaaggcatggcgacagcaactacctaccacttcaaacaagacataaaatgtatgatccagtttgcataccactcataatcatttttatcgccgtctgtgttaagcaattcatggctttctccatgggcaggaatgttgacaccaagttttacttccgggaaatatctcaatttttctgatggatagaaagaaataactttaaaatggtaagtaacaaaaaaagagggactgtataaagaggaaggaagatgaaatttacaagcattactcattgaatcatcaaaatccactgacggttccagtaagaagttgtccgtctcaactttctgcatatcagagaacaaagcgagttcatcatcctttgattttgcaggaagcacatttctgaaactgtttgtcctcttttgataagtctcctgtgcaggagaccttgatgtcctcggtgagggtgacggtggcattttttctggtttcttaagcctggtacccttct

SEQ ID NO: 14156 - DNA, 566 bp, Zea Mays
cgactaggtaccagcagaccttgaggcgctatcatgataaagttgtgcgacgccggtcctttgcagtgggagacttggttcttcgccgaattctaataggggaaggacggcacaagctgtcaccgctatgggaagggtcattcatcgtatcagaggtcactcgaccaggatcataccggcttactcaaatggatggcatggaagtggggaactcatggaacatagagcacctcagaaagttctatccctagaggcctcaaaaattctcgaagaaacattgtactctgtaatctggggacttcatcatcaataaagttttcgttttcaaaggcattcagactcttgacttacagctgacttcgattggattggacttgaaatcagcacgttacttgacttagggtgaccactataccctactaacggagcaatcagcttaagtcggtgtgacaacttaagtcggtgtgacatgctcacgcttactcaacttagggtgagcactataccctactaacggagcaatcggcttaagtcagcgatgacttaagtcggtgcgacatgctcac

SEQ ID NO: 14157 - DNA, 484 bp, Zea Mays
gagcagaggacgagattggacctggagtgcactggccacggaaaactgatttgggagaactgagcaattcggggtttctggtgaataattggaggcacgggtgggtgtgttgagtgcacaattacatagcggagccgagggtgtgctcaatttatagagcccttgagaggtggcctgtgaatttgagctcgcgcggtggtggtcggagagaaggaggtgcactggcgcaagcgattggtggcatttaccgtggcaagctcaacggcgatcaccggatgggctgagatgactcactgcggcgtggttaaagcaccgagtcacgtggcgcaaggttgcagggtggctaactccggcgagcctatccaaattggctgtgactcaggcgggtactgcggccggagtagaatagtggccggagtccatccacgaggtgatatttcgtaccccccttgccgttatccaactgcgccgagcacgaatcacc

SEQ ID NO: 14158 - DNA, 290 bp, Zea Mays
gctccttacagcccactcaccactctcgctccaactccgagtttgagtgcagcagaaggcagagcaggaaaggaatttcggaagggacgggtacagcccgcagcgccaccacaagggagcacctggaccaggagcctccaagcgcaagcaaccaagcgcagcgcagagcacaacccgacgcccagcacaaccagcagccagggcagcataaagcaatgcagccgggaggcgcggcttccagtaccgccaccggtggacggaggcgcgtgtcggtgcagtccaccaggagc

SEQ ID NO: 14159 - DNA, 755 bp, Zea Mays
cctggttttatcaattatctggactgggcctcaaatacagagaagtgcaggggactaaaccaaagttatcccatgtctcaggccgctaacgcatgggtggcgggttgattcagggataatacagggtctctattataaatttctcggccgaagggggtacacgatcaccctgaccgcccgattagaagtggatggtcgcgatcagatcggcttatcaacaactgcgacataaccccgacccctcacagcatgatcaacggtccagattcaatgtagattacgccgatcgccaatcgaacgatcaaaaccgaatggcgactgctaacccctcaaagcggtacgcccctgatttaatccagcctcaacgcccgatctaacggcccggcagctcgtctcctacctctagcaccgaaccacggcggcacgcagagcgagggaggaaccactctggcgacccgcccaggcgcaatcccgcaccacaatactccccgattgacactacatgctcgcagagttaaaacgaaatgggtgggagatactcatcggaaatagaggcgaggaaggtcactgcccatgctccgtgcggatccgccgtctgatgagagccacgacgagcaattacgggtaccccagtgtcctccgatcgcccaggttgacactaccgcgcacgcgcccacacgaggaagccctcgactcccaccacgacaccggaccaccccccaattagagaatggcgcggcggcagcagcgttctt

SEQ ID NO: 14160 - DNA, 664 bp, Zea Mays
gtctgcccatcacatattattgaggcacatttttataatctgctttagttgggatctttacatttgcggccattgcctcagccttttatgcagactcctcgtgctcggccaaatcaacaatatgtgacgtgaggtcccgtgcaatccctttcaaaaatcgagttgtgccagcagtaatagctttactcttctttttctcgaatgtagatatcaattttggtatagggaatttagatttctttgattgtcgtgaatcccttgatggctgtggagaaggtagtggtgtcctaaatgttgatgcttgtggcggagacggtgggttagaaagaggatgaggagaagcatgcgaagattgaggaggtgatgatggatgtacaggtactaaagtttgaggaggcggagatggttggggatgagacgacgacggcgttggtggatcaaccaattcgacatccctttgaggccaaaggatgaaatttttgatggcttgtccaagtgtctcgattccttcgggcccagggatgtctagcatgtcgtcctcggatccttggacgaccgtcgtcacttctaccctgcaataatcatctggtatgtctcttccatgaaactagcatcctgggatcgcaacgcatgttcctactttcttcgtgcaattattgttaat

SEQ ID NO: 14161 - DNA, 338 bp, Zea Mays
cgtgccacgtgtttgtgcgctggtcctcgtcgttgtgactcactgggtgcatgtccggtgatcaccggaggaagcgccacggtgaaagccacccaccccttgctcctgtgtccatattccctccggccgccagcacgaccttgcgaaattggacaccaccgtcgatgggatctataaattgagtgcgccacaatctccgtagggcagtaagctatccagccaccacgaatcagccgcaaccattcgctagaatccacgaattttgaattcgccccaaatcagtctccgccgccgtgacgaacagctcgttgcggccagctcgattccggttagctcgc

SEQ ID NO: 14162 - DNA, 536 bp, Zea Mays
ccagcatctggggtgtggcgcggcagacagggtgatacgagcgcggagcggcggaggtcagaggagagggcagatccagaatcggacagtgaggagcggacgtagaggcacgagtggatggatcggaggtgagattccgacggggtggagaaagcggagggggagggagggatgtggagccttttctgtttctagggcgaggcggagcggtggacgggcccagcacgggcgacaaagacttggtgacgaggtcggaaggaagcagatgtgcgacgaggctggagagagcgagcggacgtggacgaacgactgcgtcgaattgaagaaaccattcgggtccgcccttctacacgcgtcgcgacgccatggccgtcggccgcgtgaaacgcggagaggggctcaaaatcccgtggcttttaagactttagattgtttctcattagttgcatactcctagtagctagagaattaaatctcttgttgtattgattaaatttctctagtgtcttgattttagttaaaaccgtctattcacc

SEQ ID NO: 14163 - DNA, 924 bp, Zea Mays
ggacgcgctgcccatccaggtacgtgcgcgtgcgtgcgtgcgtgtcagcgtgtgccggcatggacgtacgtacgttcgtgatgctcaccacccccatgcgcgtagcaacccttcaacgaactagtattctcgatctctcttcgtctgattcgaacccgtttttcgaaatctgagacgggcgagaagaagagacgtcattcggaggcgcggcaaaacaattatttccttgacgattcaaatggtcccccacgcgagccacgaaatccctgcacaattcagctcatgcggttgctataacacacagacacaccggccgccctctgtgcgttggatgagatgagatggcgcacaccatggtttttggtttattaatatgtttggtttaaggaaaaggaaagaggtagtccgtcgtcttttttactctcactttcttgtttggtttgtgaaattaaatgtgttgatccatcgttatttcatttctcgtagattaataattattaataatacgaggaatacattcattccaccaatttgcttttgaaataaactcatgatgtaccaccttatctataatggattagttttttttcaagccaaacacctcctaaatactcctatattcagaacaaacttgcactgtgctaatgtaccacgatacttaggttagcaacgcaccatgattacttttattaagttgcattcaccaaccaatttaacctaaaaaacttaaggtgatgggagctgaataattcatttatattatattttaacaatcctgctcacgtcgagtctcttttagatatttggcgtagaatataggagcgaacaataattattatttttctagtatttatactatattaagttgcatgcaccaaccaatttaactaaagcttaaactaataggatgatatggacaattca

SEQ ID NO: 14164 - DNA, 706 bp, Zea Mays
gaatttcatattagcaataacatatagtgttgagattttttttgcacaattgatcaacaacaacatacattgacacatgttttttgtgtttgtagatggacagatcttggattaatagtaggcgttttagcaagcagcatatcgcaggagtgaaaagtttcatgaagttaatttcaaagcgttttgcagatattgatgaggtactatgtccttgtcgaaagtgtttgaatcggattgctagacctaagtcaaagatagaggatcatttacatattcatggtatggcaagcacgtacactacgtggatacatcatggggaggcacaatttgatactgtaataaatcaacaagctgaccatctagaagaacaatattgtatgaatgaggatattagtatgaatgagtctgaaaacccagaagatagattgcctgatatggtacgagagttgttcacagctggagaggaaggtgcacataaatctatgtttgcagttgtattggaagatatggagcaagaacttcaccctggtgcatcgtacacaagattttcttttgttgttaagttacttcataacaaatctttttaccggatcagcaatgttgctttctccgcaattctaaagttgttatcattggctttcccacagtgttgtttaccagcatcttataaggaagctaagaaacttatcaaagcattgggacttgg

SEQ ID NO: 14165 - DNA, 419 bp, Zea Mays
ctctcgagatctgaccacgccatagcctaatcacagccctcagatgtatgactcacggctcgaatttaatgtgttaaaaggacacgccccaagtttattctccaccattagatcaatgataaagggttcgaattaagcttgcctacggtcaactttcatccacacgatccaggacacatggctcagatctgatctagcaaaaaggtatgcgcccctctaatctggaccatatgtggtctgatcgacggccccggattggatttttctcccttccccgaggtcggcacggcggcgacattgtcgtggccgcgcgcatcaccggaggcagtcaactggcgactcgagcccaaaactattgtccgtctagcgccacatggacggtgaaacaatgcaagttgagctgggaaccccataccgtg

SEQ ID NO: 14166 - DNA, 716 bp, Zea Mays
cagaagggcccttggggttttgactaactggagttgggttcggttactattcttatgagtcactgacgatttgcacagaggtccttgaagttctattccattacaccgactgatccccgacggcgttgagtgtggtcgagctccgacgagcacgtagaccgaccggaggaggccaagaccagtgctcccgagcagcgggcatagaattgaaccattcccgatcacttcccctaagtcaattttaccaatggctgcccaaaggcctctggccacagagaccgtgcggacaacccaatgatcaacacgttcccggggattggggatggtctagttcgattgggcgggtgggtgagcatcaccagcatacaaagatgctaaaacgagaacaaagagggcatgatcagacctgtggagggctggccacggcgagctcggttctgcggtggcggaaacttgatttgggggaagactaaaattcaagctctctgacgaacgattgctagcgattttcggtggctgggtgggtgatgaacttgcggggctggcgggggcttcaatttatagggcttagcggcggtggccaggaatttcagtggggacgcgcggtggtcggaggaggaagaagagtactggcgcagtggcttggtgtccagcgccatggcaattgcttcggcgatcaacggggagccactaaggcttacggcgatgcggtggaa

SEQ ID NO: 14167 - DNA, 424 bp, Zea Mays
gctcagagaagctcttgagcaagccaatgcttcagaagaggatatagtgtccttgccctaccatgtcatcttcatggattgccaggtttgttcaaccaaaacttttttacctctgcatgtgcaaagctccgtctgatgattgcctgacacctgtagtattccttgtttgtttttagatgcccggtatggatggctatgaagcgacgaaactcatccgcgaggaagaacaacgctacggaattcatgctccgatcatcgctttgaccgcgcacgacatggaggaggatctgcagaaggccatcgatgctgggatggatcttcacctggcaaaaccaatatcgcggaagaagatagtggacgctgttcgcagtttctgcaaatgtgagaattgacaaagcgtttctgcgtcgggtgaagaactctc

SEQ ID NO: 14168 - DNA, 839 bp, Zea Mays
ctcttttgcaaatggtgtcggccgaaggagtatccgaagctattagccccccagattagatcctacggctaggatttcatgctgaatcggtacgaagccccatcggtcagatcaaagatcgacgatcaggattaaaacgatgaaggggtatcctctggtccaatctaagccgtcgaaacccaaatctacgacccagatcaataccacgggaatgtgtgcctacgcacggatctgggacgtctatttcttaatccacggatgccctggcgtcttcaacctcacgccgcccaggcatagacgccgcgcgctccccagtactctctctctcctgccggtcaaccggcgttctgctcagccaagaccatccagtggtcgccaccaccgtcctccagcggcgcaccgaccccgggtgcgctccaaccccacattcacgtgacatcctaacgaatcccaaaggtattgcataggaggaaaccgactcaccgtagatgagcgcgccggtagggtctgccttcccccgatgaccagtgtcccgccgacgacgaccccgcaaagcaccaagctccaggcacacgatcggccaagacccagacccggcaccagaggtattacgccggcgaattctcctctcaactcgcggtctatggtgatgaggacgatattcacgctgtgttcgagggagcgaggggaggaataggtgggcacaaacggagggaagagcacgacacacccggcttttaaccacgaagccgaggctaccgaactaggcgcagagaaaatcggggtcgtggttgtaacaaccccagcttccgcgcgcccgcaacagcccaatggggaag

SEQ ID NO: 14169 - DNA, 642 bp, Zea Mays
gggggcggtccttggtgattcgccgctctaccaggggggattcatccggtgcttcgcaagaatggcggaccgggcctcttccctcgccgctgtcgcaagaataggagggagattaccgccatggccgttccctgtgcgcgacgctggtccagacgcggggattggtcgaggcaataggcgtggtgtcccgtgtggcgtcggtaggtgattacatctgcgaaattactttgggatggagcaattcctcgtcggccttcgcaaggaagctcggatgtcgccgctagctgtgggtagtatcccagcggtcgtctttgccttcggtaagccatcaaccctctccgacgtgatcacagaatcttgtagaaccgttgggattaaggaatagtggggcgaggctcttgttcggccgtactccggcgggagcgccgcctcggtcgcaactgtgccaccgtggcatcttgatgggtggaagacaggtctgtggccgtcgatcttatgatgggtggctaggattagatcttagtttaccctttcgttccatcgaggctatgtcgttggattgggatcgggcgtatgagattccatcgctagtgttttaaatcgtgatcgtatccttttgatccaacggtctgtgttgcgcac

SEQ ID NO: 14170 - DNA, 542 bp, Zea Mays
ctgccgtaaggtaccttctacatgatcgcctcgtcctcaatttcgttttgcgcatgaagtcaaccgcatccagtagccggaacggtggaattcgggtggccggcgaaggactccgccgagcggtggtgtctctgcgcacgccgccgggggggggggggggaagctggctgctggcgtaggattgatgacggaccgatggccgttggatgggaaaggagcgcccgagattagatcgtgtgaaccgttgattcctaacccttggatcataatcggacgataggcacgtagctctgtattcagtagatccgggccgtagatcctcaatccgagggcggtcatcgtgtactggttgatgatacctagatctaatcgtggcccttgattcgcgatcgggcggccagaaaccgtgcataccccttcgcggtcacgcatttgcatatgagcccccgaccaaaacagaaatagaacccgcagtcctgggctactgttgactgagtctcaggattgttatgtaatcgcccctgcagttttcagtatttgag

SEQ ID NO: 14171 - DNA, 1526 bp, Zea Mays
tcgaggctcatcatcatctatttgtattggctctgaatcattgatagactctggttgcggttgtgacaatgtttcctgttggctgccactgaatccgaaagttgagaaataaatataaattaacatgatgaacaataattgaaaataacatacttaaaatatgcacagcagtgatcagtttcattagatcatataaacttacacgtacaaccatctcttgcattttaacacagaatatatatgcacaacatcgctattcgataacaatataaataagcatgtacaaccatataaaacatagaatacatgtggatgtataaatacatagtataaatgcatacccattccagatatacatgtgcaaccataaatttaagcgaactgtaataacaagatcaaataagaggttagcgtgcttgaaatcgaaccccaatgattttaatagttgtgtaccagccacggttgacgcgtcttgttcttgagtagtcggagcagaaggtgatccttcggtagcaaggcgacttcttttcttggcgatggtctttttcacacgtggttgtggtggatgacggggagccatggcatcagacattgaggaattaccgacactagcgcatggcatgacagcagttccagcagctattttgggagtagcagatgacacaataggggttgtggctgctgcatcactggtagcatgtggtagccagttcttgttcgaggtgtccctttgtgaggatcaccggtgggttagcgttagtcactcaacaattaagccatccacaatcatataagattatacaggtagatccaaattccaaagtaaatatggagtgggaattatgttctcagttctcaccttcttgtgtcgacgtcgtcgcctgaactttgaggcagtgaggaggaagtcatggtgctgacagcaatggacagtggctggagctaggcaaggatctgtagcggccacaaccgctaaattagatggaatacatggattaataaataaacacaatagcatggattttctagtacgagcctatgagggatcaataaatatgacaactaatcgaatggtgaaggagaggaattgagagatacctgtagcctgtaggcgattaggcgagcatgtggccacaaacctggaatatttttttgtgctcgtgtacacacttctctggactcttgagctggaaccttgaatgcttgatcaatccttgtagcggtgacgggatgtgttgatgtgctcctgcactgcgcaagctgcaactagtgcgcgagcgcgatgcttggcctgaaggctggagccttggtgcggcgcgacctgcactgcgcaagtctgcaactagtgcgttgtgcgcgacgcttggcctggagccttggtgcggcggcgagggggtgttcgtccggatctcctggacgctaggacggcggcccgacgacgagatgaacgaaaggcagagaaagcggctacgaccgtacggggaaagcggtaggaagctagggttccagtcttccggagcacaccg

SEQ ID NO: 14172 - DNA, 888 bp, Zea Mays
tgatgctgccgagttagtccaaagatgtaaagcttgctagttcttatcaaagcaacaacatttacccgcacagctactgcagactattcctgtaacatggtcttttgcatgctggggctggatatgatcaaacctttcaagaaagctcagggaggctatattcacgtgttggttgccattgacaagttcacaaaatggatagagtataagcccattgcctctttaacctcagccaaggcagtagagttcatacaagatatgatattcaggtttgggataccaaatagcatcattaccgatctaggatccaacttcaccagctctgaactcttcgacttctgcgagcaacgcagcatccagattaagtatgcatcagtagcgcatttaagagccaacgaccaagtagaaagggccaacagaatgatactggaagcgctcaggaagaaagtgtttgacaagaatgaaaagcttgcaggaaaatggatcagagagctgccatatgtggtttggagcttaagaactcaacctagtcgagctctgcatggaaataccccgttcttcatggtttatggttcagaagcagtgctacccaccgacctaatattcggggtgccgaggttgaccttcgaaagcatagctgagtcagaagctaccaggctagaggatattgatgtgctggaggaagagcgatcaaacacagtaattcagttggccaggtaccagcagaccttgaggtgttatcatgataaagccatgtggcaccggtcctttgcagtggcggacttggtccttcgccgaattctaatgggggaaggacgacacaagttgtcaccactatgggaagggccattcattgtatcagaggttactcggccaggatcataccgg

SEQ ID NO: 14173 - DNA, 417 bp, Zea Mays
gcaacatctgtatgccttttcttttgggcagatttatcacaactcttttggaaccactaaagaatagagttgttaataaatctgcagtattttattgtaaaaccatagtactgcttgctatcaggttgataacaatggagtgtctgtaatattttggaagaacaaaaatcacgtgtgctaacactcttacttactacatgctcaaacactatcaatgtataaaccacttgatgttatatagtggggtttttttaaagagtgatatactgagtaacttttgcttaatcaccgggactattatctatcactgccaacttcgacaacaacactcttttgtaatatacatagctacatactatatattcaagtagctaccaatataaaaaccactcttttgtaatatacatagctacttac

SEQ ID NO: 14174 - DNA, 630 bp, Zea Mays
ttcagggagtaccacgggatctcggcgggcgtattcctagaagaatcaagtgcggtggaggccggaccggccgccaatttctcgacgttgacgcaacgccgctgctgttccgctagttgtcgtgggcagggctctccgttccaccaaagccggtgagtattcccctattcggttcagtacatttccctgtgcgtgtatgcggttgtgattgaggaatggcgctctggggttggaggttgtcctcgccggagtcttctccgccgcggaggggaactcgtcgtcatcgctcagccgggtagaggaggaagacttggattcgcgccgtcggatgtgttttggatggccgtgattagatgtagggtcggagtagcgtgagccgtcggatcgggttgggcgctgagatcggtggcggtgggctcgcctgggatggaaataccgagagccgtccgattccgatctagcgcggtaaaatagatcaggtcgttttaaatcttgatcgttcatcacagaatcagtggcccgcgcagttcacccgatcgtcgcattccagatctaatccgtaccaccagtttttgatccaacggccgatagcaaacaataccccttcggccttaccgttatacaaaagag

SEQ ID NO: 14175 - DNA, 457 bp, Zea Mays
gcgccaagattgatcttcgaaagcatagcagaagccgaggccaccaggctggaggacgttgatgtacttgaggaagagcgactgaatgcagtaatccaatcagcacggtaccagcagactctaaggcgctatcacgacaaggctgtgcggcaacggttcttttcgataggagacctcgtcctccgccgaattctaacgggagagggatggcacaagttatcacccttatgggaaggacctttcatagtggtagaagtcactcggcccggatcatatcgcctcactcatatggatggcacagaagttgggaactcctggaacatagagcacctcaggaagttttatccctaggctgtatttcaaaactgctggggcaacaatgtattctgtaaagtggaaatgtgtcatcaataaagagagattacaaagatactcagcttatttacgattgacttgc

SEQ ID NO: 14176 - DNA, 316 bp, Zea Mays
ggacaaggaaatgtaggagatctatagggcaggagtcccctcgctactcaattttgaatagcgagagaattctttcccatgggtccctccatttccgtgtccaccaaaccaaccttgaatgttgtcctagctccgttgacgtccatacctcctgtgcttcccactcgtatggaatgtttgcatctgtgttccccctacaacctgatgtatgttgttagtcagtccacccttatgtatccctccctattgtacccttccttcatgaatcgtacgctatgatcggttgtctcatggaacgtgcgtggatgaatcaaag

SEQ ID NO: 14177 - DNA, 492 bp, Zea Mays
cttcatccgccaggaaactcttgaggttgtcggggatgtcaccagcaatgcccaccttgaagagaaggcacttcttatcgacgcatatttgaatgagggctatcctcttacggtcattttcaaaccattcggtatctaaacccacgatgaggggcttaggctcctcgccgcggacatcccgcaggaagcgctctaccgtcatggttgcagatgtgactgcgacttggacctcacttttaccgactatgatcatcttgtgttggtccgtgaaacaggagggatcgctatggagcttgggcaatgagtcactttctgccatcacagcctttcttttgtcaataggacgtgggcggtttatttcttccgccacttcggtcccttgtttgccgtgaggctgcgagccctgaggttggtcctgcaacactatccccccatttggaggtgggaaagactttgttgatgttgaattccttggaggtgcccccagtatgc

SEQ ID NO: 14178 - DNA, 447 bp, Zea Mays
atagtgtagcaattgttagatggcaaaataatgccttccatcgctggtatgcatggctccggtgagctgttgccacagtggcgctatcctttgttgtgcgggtacctagggtagaagaaagggtaggggaaagatgcctggccgttcgatggtagacatgtgcatgtgattgggtcgcgcagtattgtgcttggggccgttagatctggatcgtggggtctaagccacgcgtagactgatgctaacttagggggattgcgggtcgtcgatcacggatcctgtggcccgtattgaatacatttcacatacgatcagatctaatctgtgccctcggttgtggatccaatggtccaacgccacccgtaccccttcggccagtccattttgcataagagaccctggaccttttggaaatagaacccaccgtccaccttgggattactctga

SEQ ID NO: 14179 - DNA, 583 bp, Zea Mays
aacacctatgtagaagtggcaaaacaaaataagaagattacgtcagcatcttcgtggttgggcaaaaaacaccagtggtgcttataaaaaggaaaagaagaatattttaaataagctggattcattagataagaaggcggagtatgacaacttgttggcacacgagttagatttaaagcagtgccttaaaaatagattagatgagttgttgagggaggaagagattaagtggtatcaacgagcaaagtcgactcatttgcttcagggtgatgccaacacaagatattttcatttgatcgcaagtggaaggcatagaaagtctagaattttccaactcaggaacgggaatgaagtggttgaaggtgatgccaaactaaagaggtataacacttcttactacaaggggttgtttggaccggcgccgacttctgagattactctagacgagagcctggttcatgatattcctcaggtctcagtggaggaaaattcttaccttacttctgagttcagtgaagatgaaattaggaaagcgattttccaaatgcagcataataagtcaccgggccttgatggcttcccg

SEQ ID NO: 14180 - DNA, 359 bp, Zea Mays
gccagtgtgttgctagctgaagttggactgttgaaagagagaggtttaactgctgaagctgtagttgctgacttcgttttcaaaaacattcagccactgaaagatagggtccacccggcttatctgtatcaagggctagccgactcaactcgggttatcaacaagagaatcccttctgcagatttggtgagccgactggaaatgattctcaggggcaaagtgtccaatgttggcgctccggtggcatactcggcctagaatttgcctcctgccaaagtcttcactcttttcgtgtcaaatccacctgcgactgatggcaatttgggccttagaacgcggccctctgatgaagaagtcag

SEQ ID NO: 14181 - DNA, 697 bp, Zea Mays
acttgccacgatccatggtaaaatggggggatcccaaagggttttaaacaatgttaccctcctgacagaatgtcgtttctaggaagcaagggagcgatgactcaagtcagttgggggtaagcgtggagggaccctctacttataatgcccaacaagatcccgaaagctaataggggtcttgcgagcctcaccaccccattggttgcgaacgacaaaagggacaagatgatgtccgatccgagaaaagcccccaagggcccaatagttagtgagggcatctagagaaagccactagccactagggcccgtcggtcaactggaggagacaggtagcctttaccctggaggaacccgcctccgaatgaaccccacgacactaagactagagtcaggcgtggtggagtctaacaggggggcgagcgtaccagagggaaaccactcgagtggatccctcgtctggcccgagatcgacccgtcataaggcctacaagcccctcagactaaagagcactcatgacctacaaaccccttagattgcagcgcatttatggcacacccccgaactacggcgcactcatgacctattgggcctgggcctgagtgcacaaacctctagcaagacacaacacaacgaaccgcaccgagccccaggctacgaaggccaggggtcagcatagcccaaatgatcgcactcggg

SEQ ID NO: 14182 - DNA, 791 bp, Zea Mays
tcatgtggtacactcaatatacaaaatgtcgcgcaggacacattgcccacaaatattgattcaactacaactaaaactctatttatttacagaaagggtgcacagatgataaggctacagtcaattagagaaaaggaaacatatataaaagttagaaacacaaacatgaaattgccagatgaacatccacatgagtagttctctattttgtaaaccaagtctgtttgtgtttccgagaggtgtggtgtttagatttgagtgctcagggaggtgtcttccatcttatactcgatcatcgcaagatttgagcggggctggtgcgtagaatgggaagtactcgagtatcgtaagatccgggcggggctggcgcgtagaatgggaagaatgagatggcggggtggtcctacacttgcgatgggatgcgggccgatggtggtcctgtgcgctggatggcgacaaggggattgggttgcgattcattacatggcggcgaggcgtggattgcgtttggggtgcagaggatatgagcggggcatccgcagtgtatgggaagaacgattgggcggggtggtcctgcgcgtgcaggtcatcgacgataggattcctgcgtgctggattgctacgaggtgtggatagcagcgaggggatgtgtttccttctgtggtagtggccggatttttccttccatggctaaggcattgatcggtaaggggattgcggtgagaaccatgcggatgcaggggtagaggggagagggcatgcacggggaagaaggaagacactaacatgtg

SEQ ID NO: 14183 - DNA, 406 bp, Zea Mays
gacgattgagctagggttcggccgccgcgagcgttacgggtgaggtgagctgaaaaaaatgcgtgctcggttgctggattcgtgggcccgatacacgtaaactgctggcgaaatcaacgcgaaggcccatgcaccgacacatggattactgtatcgtaaacggaaacataagacatcgtaatatcaatatttatgtggggactagtacagctgcccagattgcgggaacacaatcttctcgtgggtccggatgcccgaaacttgcgcatatcaaaaagtgtgtaaaccgtaacacgattgagcataacacgtagttataattgacgtaagtaggtggtacagtgagccaaaaaagcctgcgcacctggtcggtacggtgcggtccgtgcacctggtcggttgctgg

SEQ ID NO: 14184 - DNA, 398 bp, Zea Mays
ggcggtgccagggataagctctatggcaaattcgacttttctctcgggtggcatgctcggtagttcctcgggaaacacatctggaaagttcgacacaaccctgatagcctcgagcaggttggcctccatgctatcaaccgaaatctggtgacaatctcctttcgctgttttaggcatccttagctcagccactaccttctctccgggcgaggacttcaatgttacggtcctcttgtcacagctaacactcgcttcatacttcattaaccaattcatccctaggatgacatctaccccaggggtgtctattactattaggtcgctggggaaccctatcccccttatttccacccttacatttgagcatatcttatttgcttgcactttaccaccgaccg

SEQ ID NO: 14185 - DNA, 471 bp, Zea Mays
aaaataaaacagaaaaaagaaaaagagaaaaacctacctgggccacggatcccattttcggcccactaactctttcccccacgcagcccaaccccactcatgcacacgtgccgacatctggggtccatctgtcagtcgctacaggcgtattctacacgcacgatctcgcctccacgtgggacccactccatcagctctcttctcccaactaccgccgactatggcacggtcaactgcggagctcgggcttccctcccttctgtcccgtaaccaacccacctaggctataagtgcgcgcggtgtccggtcagccacttccccctttttcggcagagacctaccactaccatgccgccgtgcgggagagagagattcggtgtgggctcgccattgccgccaaccccaccgtcgacaaaaccacgcatccactgtcgttgtgccatccatatagctctgagcgcttcgtctcag

SEQ ID NO: 14186 - DNA, 409 bp, Zea Mays
ccatccggagtagcatcaacgctgacttgattaaccttggcaatagaatatcccttgctagaacctggtgtttgctgcctgttctgaactggtgtagtagccatcctctgtgggcagacatttgcataatgaccagtcttcccacacttgaaacaagtagtgcctggactctgtcctgaaaacttcgtcggggtgccagtaggggtagcctgtcgagggggtgtcctcagtggtgactgctgaactgggcgtggtcctccgggtcgagtcggtgtaccctgcggtgaactatagcgaggacgaacactgctgcttccttgtccttgagatattgcctttctcttcaaatctcccagctgaacacgcttgtgttcaatagcaagagccttatccaacagtctctgaaatg

SEQ ID NO: 14187 - DNA, 592 bp, Zea Mays
atcataacaagcatccaacgtaaaataagcaaactaactctaactagactaactagactgagatactgaactaagaattattacagactccaactctgccgatctagggatccaaatctatccgggtcctgcagtcaggggtaccatagtcgaagcgaccacggggcggtgaccggtaagggtgctgaatcccaacaggggcgggagaaccaccatccagatagtggcgtgctgcgcactcaacacgcaattccgcaacctccgtccgaaccttgcccaactcgtcaagggcgtggtccaactctgtgttgagcacgacggccaagttgaccatgctattcagcctaggattgctctcaccaactggcgaggcaatcacacctctagcactgccggtcgaatggcgagggtagtacttcaggtcaaggccatcagctaccccactgaacaacgagcaatactgagaaagtgcccgtcgtgctgaatatatcttgcatggctgcctcggcagtatccctctcagtaatagaatagtgctctgagaaggcctctgcaccctggagatcatcgtccgaacggcgcaccaaacaag

SEQ ID NO: 14188 - DNA, 652 bp, Zea Mays
accggattgtgatttgaagctggaccgttgttccagaggcccatgaggaaaataggccagttaatccggctcgaatagttccttccttcgtgccagaaagaaatgcagggcgatggcaccgtgtccgagtgcaatagtctagcgtttaaacaagttgatcgaccgggggagtgatcagagatcctcctggtccgtccatcatgtgctgccagctacgaccgtggctgtcacctcacctggatcagcagcagctcatgtggctgccactggatcgaattctagaactgcctgctctcgctcgcatcgcacgcacgcacgctcacctcccggccccgtcaccatcatgtgctttcctccttctaatcacacatgcacatgcggcatgcatgcgcacagtagctttatttgtgccaatgcaagcaggtagagacgtagagtgcatgcatggccgccaaacctccatgagagaaacgaactaaacgatggggggcagcaggaggactggaggagaaagataaacagacagacacaccgaccgaccgaccgaccgacagacagggtaggtaagcttaagctaagcaggacgaccgacgacccacagtcgtcgcacaccagcagctagcaggcactaactaaccagcacgccaaccac

SEQ ID NO: 14189 - DNA, 784 bp, Zea Mays
ttttcgaagcctcaacaattttccctgaaggagtagagcttgaagcctttactgattctagcacatctagtacatttgccatccttcttcttttgggagttgccgcaagacccttttgtatcttcggcactgttactttcgccgaagggcttaaaatttctaacatttttgttccttcagtttttggctcttcggccttatttttaccagtctttgcctcagcttgctcggctgagggtgccttcggcattacagccagatcttcagccttctgtgtaggagaaatgggctcctttgggtttagcagctgaagaagtttctccgctaaatttaggcaccacggccggttcaatataccgtggccggtgggtaaggactttcagttttttgctcttcggcgcaggctcatcgggggcggccgaagcagcaattttgaccgaagcagcatccttccacttctttccccgtcctcgcagcgagtagctgtagtcggggtaaacaaaaccaatagcatcaaaaactctattcaatctcttttttcctcggcccccaaaggatgtggataatgcattatcttctgctttggaatatggcccaagcaattcatcacttatagattcgatacatttcagccagtcatcattcggttcatcaaatttatctctatatctgaaggtgtatttcagtcgaactagctcaccttcgctagacttggtgacagtctctgtcggcatctcccaatcctctacaagaggccatactctgaaagctatatgttcttgga

SEQ ID NO: 14190 - DNA, 625 bp, Zea Mays
cagggagcagcatcagctggttgggggtgcgagtttggagatgcgtcgtgggaggaaggctgactatcttgaaatcccgctcaaggatagtatcaagggatggcgcttggagtggtttattgttgagaaccacggaaattctctccccctcggtcagggaggcagccggatgttcgcactccgagttggaccgagtcccccacggatcaggaggtggctgaggcaggggctttgctggctgaagttggactgctgaaggagaggggtctgactgcagaggctgtggttgctgattttgtcttcaagaacattcaaccgttgaaggacagggcatacccgacttatctgtaccgaggtctagctgactcaacccgggtcactaacagaagaattcctgctgtagacttagtgaaccagcttgaaatgattcttagaggcaaggtatcaaatgttggtgccccagtggcatactcggcctggaacctgcctccttccaaggcctttactcattttgtgtcgaatccacctgtcgctgatggcggtttgggccttagagtgcgaccctctgccgaagaagttagcgctttggttgcttcgctcggagaaattcctgatgatgaacggc

SEQ ID NO: 14191 - DNA, 589 bp, Zea Mays
gaaaaggtcgtcaaagtggttgtcaagggtgtggagatatccggccatgtagattatggtagggtcatctttattaggatctctccctgacaaggcctagagtcttttcctccaagtaggggtatttttgtggctaggtggaaagtagcggaggggtgtttcagagacttccctgctgtagttttggcatagctggcggagggctttttgggcagcattctggtaggtatctaggaaacggtggccagtagcggtgatctgaaagggagggtgatttgggtagcttcggctttctcccaggtagatagccatagagcatttctcaatcccgttctcatggtattccttccagacataatccagcttcttacagatccccatgcgaagcgcacaactccgaagaaggtgagggaattcttccaccttcgagcaataggatgtcctaaggacaaatgtgccttccatctggtagcaagagaagaagggttgttaataccggggaaaggagagaaggttctttaagcggttaagaggtctttttctttttgaggaaagctttttaggtcagggctgcggtctacggccagtc

SEQ ID NO: 14192 - DNA, 474 bp, Zea Mays
ttactactaggttagcggggaagtctatcccccttatttcaatccttagattcggacaaatcctatcggactgaacttttcccccaactgaattaactcttaatggtgagatcattggttctatggggatgttatgtgcttctacccaagatgtagaaacaaaataatgtgtggcaccagtatcaaataatactttcgctggataggattcgactggaaacatacctactgccacgtcctgagcatcctggattgctttggcctccaggtggttcacctttccacggttgtaggcctgttcacggcctcctggtgcttgctgtggcgctccttgtcttgctggggcattgactactggtgactgctgagctactatctgtggacagttcttcgcccaatggttttgttctccacagtagaagcatgcacaacctcctacttgcgctggagctgcatggctattctggttggtta

SEQ ID NO: 14193 - DNA, 308 bp, Zea Mays
aggattatgacgatgtctaccattacctcccataccttgtcgattacgtgtgaggcgttgtcgcagcggtgcataaacatcatcatcgtcgtcgtcgtccacaggagagtgagctggggctggagttggtggtaggggacgagcctctagtacgtccatgcgtgtaacaagttcaacaactcgtcgatcaagctactcataggatgtcgccgcagagtcctgatattttttaaacgcttcagtcatcgcgcacatcatctccttcaattccatctgagagacacactcatcgttgttaagcttaggcc

SEQ ID NO: 14194 - DNA, 478 bp, Zea Mays
aatgcgtgctttgagagaggaggggaaacttaggaggcgtgctcgcatgagtggtggcacatatgagatggatggtggctcctttcatcgagtgtccgtggcatgtttaggagaacaccttctagaaaggagaagtcttctcaataaattattgatggatatgtaaccatattttcataactttgtaggggatttcgagttcgagtatgctacaaaaaccaagatcacgacgcacctgaggagcgtatgaaacacgatcacatgcctacaacaagcctattggacccttgattctgactgtgttaggcaaagttcatcttcacccattcgtctctatgttaattatccattttgttgaagtgacttagcaacctatgaggtgagcgtaccaatgggaggagcctgagtactactaaatgttggtggactcgtagacaggggcagagctacagggtatgccaggtgggccacatcatac

SEQ ID NO: 14195 - DNA, 601 bp, Zea Mays
ggaagaggaggactaggaagaggggggcagggatgaagatgaggaagcggagtgggagggagcggcggcgaggagacgccattggtgggggtggggggagtgaaggaggggaccgaggaagtgcaacgggactggagagggaggaggaggcggatcgacggagttggggaggaagacaggagagcaactgttgaggcccataaacttaactccggaggaagacaggagagcaactgttgaggcccataaactttcttgagcggatagtgggcttgaggccagcgaatctataactatagcactataaactttacaaaactcgctcaatccaatcatttttacacctccattaaaaatcaacaaacatattatacccaaacttaacatacaatcaaaatcaacgctcagatcgctaaataactctctcttgctcactcaaatctagtgaacggtattatttgaattatcatttccctccccctccctcctccgcaatcctgcagctctagcctccccctccctcgtgtcccgtagcctcctccccctcacttatgtcgtcgtcgttatagtcgtcaacctcttctctcgcaccgtcatcgtt

SEQ ID NO: 14196 - DNA, 360 bp, Zea Mays
aggccaggatagggccccaagcatctaagtgcagttaagtgcttctgggggggcagaggcaggactaccccaagcacctatatccttcatagtgtcccagagcatgaaggaccccggggacttagactcatgagcaccccgaggcacgaggggccccagggggctttgaattgctcatcagtaccatggggcacaaggggcctcgaggacttagattataacagagacatcaggggcactagggacctcaagccttagagtgccccggggcatgggccccgcctatgatggtactagtgattgggctgacttcctaaaccgagatcattgagtattggtagcggatagagatatggcttt

SEQ ID NO: 14197 - DNA, 614 bp, Zea Mays
tgaagatgagtacggtgccacgccatctaaaccgagccacctagagtttggaaagtctattattactgaaggtgatgtgcctaagatgttgaagcttggctattttagtgaagccaaaaagaagttgattcgtttcggcggagaggaaattaccccgaagccggaaaaagatgaggtggtggtatttagaagcttttttaaagcaggtttgagatttcctttacatgatatgatcgcagatgttttggagagatttgggatttatcttcaccagctaactcctaacgccatcgttaggcttagtatctacatttgggctctccggagccagggggcagaatcgcttgccgaaggcttttgccgggcacacgagcttcattatcagaccaaagcaagagaagatgggctgcacgataacttcggctgctataattttgcttatcgcaaagatgcgaaatatccagttattagctatcgtaccaaatggccagctggctggaagactgaatggttttatgttaaagtggatgagaagaaggagaagccggttcaaagccctttgagtttaatcttcgaagaaactaggccccaatgcgacatgaaaccagatagtc

SEQ ID NO: 14198 - DNA, 832 bp, Zea Mays
tcattcgaaattgcttggggtctgagtggccatcgtacatgggcagttgggtggctagtatgaaggtggccatggcacaacctgtagctctgtggttagaggagaagcgtcatcaaaagcaatgatgtcatgatgaaaatcatcataccacatatcgtcgtggctgggaccctcctgtcgaaaggtctttttgttgtggtctatgcccttgctcattatcttgtgtgatttgtcgcatttcctcagctgcttcatcaatcttattttgtagctctgacagtcgaagcatcttttcctttctcttttctacctgttagtgtatggcctccaggttgctgatctcttgatctagctcttcatcttgtggagttgggctagtggccttcctcttctggcttcgggcctcccttagaaggattccgtcttgattggtgtctagggagcaagaacaacccctggcgccgttgtcttcttcgacggcatgacgaaggtggtcgtagagttcaccggaggtgtgccccaatgttggtcactcgttctcgattgctatacacaataaaaaacaagacaacacaatattaagaaagataatcaaccttcatctttaagtagtcatccctttgagataccttctttagagacgaaggttatgatttgctattgcaagtaaatatatgagtgtgtaggaaatataaagaagtttaaacatgacaactcgtcttgcacgtcaacaacatatattttctccttcatatgttaaatttacaaacataccttcggctctagaaagtgatttagagcgaagatgaagagaaggttacacacaatgatt

SEQ ID NO: 14199 - DNA, 501 bp, Zea Mays
ggaaggcccagtgcaattgtatgagcatggatgcaagagttaccaccttgtgtgatgagttgtgcaagttgaacctagaagttgtttcttcaggtgccttgaattatatctcgatggagcccacattacaagagcaaatagtcagggcgcagattgaagacaagggtgttcaggttatcaaggaaatgatcaagcagaaagcagaaaaatacaaatgcttccgtcaggatagcaaaggaattctatggtttggagatcgactggttgttcccaaggaccctgagctcagaaagaagatattggatgaagctcacctttcaaaattctccatgcaccccggtagtaataagatgtatcatgatcttagatcattttactggtggaccagaatgaagagggaaattgctaagtacatatccgaatgtgacacctgccagagaatcaaggccagtcatttgaaggcagcgggccctttgcaacccctacccataccatcttgga

SEQ ID NO: 14200 - DNA, 497 bp, Zea Mays
accgaatatggtttttgagcaaatccagccatattgtcgaagaacccaactaatgatttactccattttgattaaccaaattgatgtaattatattcatcgcttccttagtggcagcaatattatagaatcagaatcgccttgtctatttcctagcacaatttcttcttctcttctgggtcatgcttgttctccttttgtcgtgatcttaaaatggtgcctctttttttattacatccaatctgaatgaggttctgagcaaaccaggtgttctcctcttttgatcggcaagcactgtactagctgagatctacatcaaaatgctatgttgtactttattttatgtcaatcatatgtttcttttggcatccacttggtcccttgttcccaaccatacaagatttcagattttattatttaagtgccagttttatgcaatccctttcccaaccatacattgattgctctcccagtggtgaggattgtatctaagttcgg

SEQ ID NO: 14201 - DNA, 667 bp, Zea Mays
tcgtcgagtatcttctgcatcgcctccactgcctaggggcccgaggctgtctgcgtcgcctgagcaacttgcgctgcccgaaactggcggacctgctcctccagagcccacactttctcctccaaacgcttcctcctctcctcgtcctcgagctcaagctcatccagcagcttgttctgccttgcccacatctcctccctgaaggcgaggtcctcctcctgccgggtaagaccagctgcccgtttcacaagggaagcttcccccgaggcttccctcggcacgagcaatgtcgctggccctgtcggcgagctcctgctgcagcttctgcagcttcacctcaaccgcagcctgcttgacccgctgtttctccagcaccgtattataagctttcagcttagcttggagcgctgtgacggtctcctccctttggtctaagcgtatctccttcctagccaggcttttcttcttctggatcacctcgtcctcctggtcagacaccttccggatgtcctccttgaagtcctcacgctcctgctcaaactcggcccgttctgaggcaaaatggcaggacaccgccttagtgcgctcctccagttgggtgcaccagtcgccaaggcgctggtgctcggtctcgagcgcctcccactcccgccggatagccacctcg

SEQ ID NO: 14202 - DNA, 646 bp, Zea Mays
tgctggtcgactcgacgagggaattggtgctggtatacggccggtcatggacgtagtcatgcgctgctgccatggtgtatattttcctgcagaaacattagaccttgcacttccctttcagctttgcaagcaagatgaaacaatcgggttacattagcataatctttataagcaaggatgtcctgaatttccctatttaacccgcccaaaaatctagccatagcagattcctcaccctcctctatgttacaacgcaacatacccatttgtaattcctgataatattcttctacacttttagtaccctgtctcaattgttgcaacttgtttaacatatcacgtgcataataagaaggatcaaatctagcctgcatgacccgtttcaacccatcccaagtttatggcatgttattaggattcttcttaccatgttctatccaccaaacagaagcaaattcagtaaaatcactagtagcagctctaacccgcgcattctcaggaaattcatgacatacgaacttttgatcaaccgcaatctcccaagtaatgtaagcatcagggtcatatttaccatcaaaaggaggtattttaaatttaaccttactaaaagcatcatcattaccatgtacctcacgttggcgaaaac

SEQ ID NO: 14203 - DNA, 384 bp, Zea Mays
gggaaaccgtaatcctgccctgaaaaagcttttgaaaaccactacttcatcattcttcggcgttggagtggtttcttctccggcaaaacgaataagcttcttttcagtttctccgaagtagcccagttttatcatcatgggcatgtcggcttcagacatagtatatttttcaaaatccaagtggctgggttttgacgggatcagaatgctatagtcttcctcttcttcgtcagcattttcttcctcaatatcagcctgctcaacttcggcagcagaagtaccttcatcaacaactccctctgtcacaactaagcccgattgtctcatgactttagagatcggagctgtctcagtagcctcagtctcctcttcttcacgagtcac

SEQ ID NO: 14204 - DNA, 438 bp, Zea Mays
gggaggaggactacccggcttcaaagccccatccgccttgtgagagtaatggaagcccggcgagtagacagtaaccccatcgagcctgtcagacgcccggatacgcggcgatgaagtcggacagagaggatcttcgagtgacgtttgcgccgaacacttttctgtaccgaatctcgacaatgggaccgtcctggctgctgaagcaggtgcgccgcctcccgcggctgaccatagcagatccggttgaggagatggaacagcaggggcgcagagggggagatcttgggcgtacttgcaaagatcctcgctgccaagtggtgggggggcctggagattggaccgcgcacataccggatctaggggagcatggaagggctggtgtacgaacgccgaatccgccgcgctgggtgccgaccggagaccgccgcgagagggagc

SEQ ID NO: 14205 - DNA, 490 bp, Zea Mays
gtgagatactgtagagctcctgcgaggctgtggtattgggtggcatcggccaccggggcgccatccgtagcagacaacttggcttgagtgtcaacaggagtcgccatagggtgacactcggccatgccgtcccgttggagcaggtccacaccatactgacgctgggagaggaagaggccgtccttggaacgcgtgacaaagatcccaaggaagtgatgaaggtcctcgagatctgtcatgtcgaactcggagtgaaggagctcggtgaggtgacgaagaagccgggtcgacgaggttgtcaggatgatgtcgtcgacatagagtagcaggtaggcgatgtcagcgccctctttgtaaataaaaagagacatgtcggaggctgacgcagtgaagccggaccgctgtatgaagctggagaagcgctggtgccaagcccgaggcacctgcttgagtccgtacaaggacttctgcaggaggcacacgtggtcgg

SEQ ID NO: 14206 - DNA, 1100 bp, Zea Mays
cacctaggctggatgtatcaactatcgactagtgtgtcatgtgcgaggagcagaccacatcgacttcataatccacaacctccacctgtatttgcaagattcaacacttgaggttgggttgcatccaaaactaggccgaccttgaggaaatcttcgtcagaaattcccaaggcacgtacgttcgccctggctacccatgggacctcaagaatcaccgtcaaaaagcatgatgagacattaagggactacatccggtgtttctcgcgacaatgcaacaagctgactaacctcaccgacgtcgacgtaattagtgctttcacctcaggaaccacaagtgagactctggtgcacaagctagggtacaagggcccaggaaccacaaataagctccttgacattgcaaccacccacgcattgggagaggacgcagtgggggcaattttcaaccaccgcaggcagaaagccaaacacgataaagagcccgatgagggctttggaggtcgggccaataagaggaagaagaacaagtggaggcacgatggaatgctagtagccacgacgggacagaaaggaaggagaccactgactgaagaagccaccaaccattttgagaaactgcttgaggccccatgtcgaaccactgctacccggcccgacatgcctacaaaaattgtgtgttgctaaggaagttcctgagcaaggaaaaaccacccgagaaggggggcaagctctagcaggatggcgagtaggagaaagtgggggccgctttcctcgacaaaactaggtgtttgctaatctttggtgggtctgactactacatgtcaagaaggcacataagtcaaaacgacgtgaggtactccaggctcaggaagcatccccgaccttccttgactggtccgaccactccattagctatgaccactctaaccacctagagcacatcccctgtcccgggcgatacactcgcgttgtcagtcccattgtcgaattagtgtggatgaaaaaggtgttgatggatggagggagctggctcaatatcctctactttgccacgcttgatgttaagggcctcgatcgaggacgccatcgaccgataggag

SEQ ID NO: 14207 - DNA, 711 bp, Zea Mays
ttcatttccccctgttgaacacgcttgtgttcaatagccagagccttgtctaggagtctctaaaatgatggaaaggtgtgagcaaccagtgaatactatagtggtgcattaagtccttcaatgaagtgttcctgcttcctttcatcgtctaccacttgatctggagcgtatctagatagctgaataaacttgtcgcgatactcactgactgacatactaccttgcttcagcgacaaaaaatccttctttatcttcatcagtccaacaagaatgtgatagtttctgaaatgagtagcaaattctgcccaggtgatattgttggcaacatcatgagcagcagtataagaatcccaccaatcagtagaggggcttgtaagacgaccagaagcataatgcaccttctccaagtcagagcattaggtaatattcaacatcttctctactgactttagccaatcatcagcgtgcagaggatctggagagctggcgaatgtcggtggattttggctcatgaactgccggtgcttctcccggggtggaactggtggtggtggaggcatttcttctctcatcttctgcctttcctggcacatctcttgacgttcctgctgcatctgagcttgcatatccatcatcgtattcaccatctgttgcaacatttgcatctgagctacaaccactagatctgtcctagccggtggaggattcgga

SEQ ID NO: 14208 - DNA, 587 bp, Zea Mays
gcggatccggagacacgacgactttacctctctctagtcgcaacaatgtagctggatgttgcaagttgcaaaagagttcatgcatggttgtcttggccggacagctatcctatctcattttatatccgttatcttattctctattttaaaattctctttgtaaatagtgtgatctaccttaagaatcttatattttacttgatctgccaagagacgaagactggaagaggtcgtcgcaggcagcgatgcatgtgtggggcgtgaagcagtaagcagataacgacggacttggcgccgctgactgcatgtgctgcatgcatataggcggatttctttcagtacagatgcaaatattactggcttctcctggaatcctggttggtgttaagcatgcagcagatgaaagcagtgcaagaaagagctcagcatcgatcgtaatgagttgactggtgatcttctggagtcatcgtgtgcaatgcaaattaattaaagagcccatcgtcttctcgtggaattatcattaggcctcgttcggtttgacctgaacgacctggaatacctggaatacagcacaatctgtctgaaat

SEQ ID NO: 14209 - DNA, 632 bp, Zea Mays
agcttcacgggtcactggcgaagctaaccgagaggtcggcgcaacttggacgcgactggagcgggctggccgcggtggccgaggcttgggcagtggtggcgggcggaggaaaagctcgctggagctaaggaggggcatctagccagcgagggtgagcatggggtgaggtgaggcgcgcccgggggaggctttaaaggcgcgggcgagcacggccgagggcaagggcgcgcgacggacttgaccagggttgaacacgtgtgcgcattcattctgcccgagttctggcacgtgtggtcgttcatccgagccttctctcgccttggtcagtgcacaaaacctcttctcctccctataagctaccgatcttgtgtgggggtcataggatttggccaggtcacaaagatttggagctctgaagtctggtctgtctcccagcccgagcccgaggcaaattttcggttttgtcgtgtctagggctcgcgtcccgatgccatcttctggcatgcgacagaggggttagttagacacgtttttgttaatgggagcattaggattagagctaaggatcaaggtgaacgtgctcggttttggttcaagggctgaaaatttagaaatctgaatttcagatttcc

SEQ ID NO: 14210 - DNA, 519 bp, Zea Mays
ttggcgctgcgacttgaagcataaggcttgccctgagatcttcgtggagtttcctggagtgaagttggggccgtcctggtgcgaattggcgctctggtcgggcagaattcctcgccgaagacctgtccgcgccacaatcccaccccacgtcgtggactggcgttccagctgcccaacagctggtatgaagctttcctccgagctcacctttgacttcgctgcgcatagcatcaagccaggttcgatttggggcgtcgaggccctggatcacctgcattccggcgaggctccgccgtacctagcgcatgtgtctctgcctgggctgcgggaggtagaagatggcccctgaccgttggtcccttgatgaagggctgagatcagttagcatttaccacttcgcattattagaactcgggccgtcaatcgtcgatccgtgggctgggatgattctgcggcctgaatgaattattagccttggatttgtgatccgacggctacgatcacatactaattccggat

SEQ ID NO: 14211 - DNA, 927 bp, Zea Mays
tgggcaagcagtgttgatgatttaaacactccgacagactgtggaccatcgattcctgacaaatcatttccgctattgtttaagaaaccatcattacttccatgatcctgattcgaactgttgccatcagctcctcgagacagttgtgttttatcatctgactcaacagcaccagaatcaacaaacatggaggataactccccaaggagtaaacatctaaaactcttctgagctgcaacatcatcatcaggagctaaagtaacatcaccaaattttgtcaacaagcctctaatacatttccaaacatcagcaatctctggacgggattttggatcatatctcaagcacgatgctataactgcagccaatggttcaagtatagtaccaagcaatgtggcatcaagccttgtaaccacttccttctcccaatcatcatacagtccttcagagttccaacctgccacaggcacaagctgttcatccctagtaagaagtgccacgaacacacaacccaacgaccagatatccgaggtacagccaaccaaaccatcaaaatcacgaccctccgtccgcaacgtgtcacctagcactgccgccacctctggagcgatgaaagctcgaacactgttcgagctagccccagcttggactccccggcacaaggccaacgcctgattcaaatcaagcatgcagtgcccaaaacgatcgaggcagaagcagtccagcccgaggcaccccagcaccagcccctcgctgtgcaaccccatgatcacttcacatgcctccattacaaggaatccggcccgcaccaccgtctcctctctattgataatctcctcctccaacaattgggaaaccgtacgtgggtgccgttcagagaccatccatagtggcggcgcgtgaggggacatccagacaccgtagagc

SEQ ID NO: 14212 - DNA, 1119 bp, Zea Mays
catgaatttttaaatcatttctttctgcaggtgtgcggttttgatcttctaaggtgcgacatgggagaggcaacatcctatgtatgtgatgtcaatggctggagtttcgtgaaaagttcatacaagtaaacattctgtcacaactaatattataactttttttacactacataagagcccttgctatatcttatttagagggtgagaactttctaatccaggtactatgatgatgctgcatgcattctgaggaaaatatttcttgatgagaaagctccacatattccatcaaccattcctactaatctcccatggaaaatcagtgagccagctcaagcatctgatactgcgagatgtcgtgagagggtaactgttggattatctaggccatcagaagagctgcgctgtgtcatagctgttatacgccagtaagtataataattaagaacttaagctcctcaaatcctataaccataaaaatgctttctgatacgataaaggcatgcctacttcaaattgtaagtggggatcgcacaccgaagcagaaggtgaagctaaaagtaactgaagaaaagcttttgaaattgatgttgaaatacaatggtggaaaggcccatgcagaggtgtgaaagtcaagttcattttatctttcgttcattcagtgtttgttcttttccttgatcagatgtttttattgttattgtgcaggctaagcttaaaagtgctttgcagctgcaagatctattagatgcaacaagaattctggttccacgtgctaggtatgtttctatagtgtaaatttcttatctcttatggtttattaacgtttaggcaatcaccttatcaagactacttgtatgctcttacctaccttgaccgttttccacacaagccattatatcatttgctctcataaattatttggtttgtggcaagtgtagataggtaatttttaggttcctgtgtgacatttcaattgtgatgtacgacttggtttgagaattggattattttgttgtgctgcattattccgtagaatcaggtactttaggaatatatcttccatattttatattattgttttgattctgaagaaggctagaaaaaactccatatatt

SEQ ID NO: 14213 - DNA, 532 bp, Zea Mays
cgtgcctgctctcagcttttggcggaggtcttgggtgctgggtgtttccccgtcggggtaccgccctgggggagctaccggcgaggtgggagcagcaatgtctatggcgccgtcgtccctgcgctggcgccgccgtgttgacaaccaggggaggaaagagatggccctgtagccgttagatggggttgacggcagggattagatgtgggttgtccaccgctggatctttggtgaacggctcggacttgatttcgttgggttaaagtgtaggccgtagatttcgaatcgggcggtcatggttggtttgggtttcataaaatttggaccatcagatctcgatctagtggctcatagcgcataccgttttgagtagcagagatctaatccggggcgtagatttcttatcctacggctggggcattccgataacctttcagtcgtgtacttatgcaaaagaaaccctatgaaaactgtgaatcaacccgccgtcctcgactgcggcgctctgtgtcttagggattcttatgccaag

SEQ ID NO: 14214 - DNA, 604 bp, Zea Mays
gcattcagatcaaatatgcctcggtggcgcacccaagagccaacgggcaggtcgaaagagctaacgggatgatattggaggcgctcagaaagaaagtcttcgacaagaatgaaaagtttgcaggaaagtggatcagagagctgccgtatgttgtttggagcctgagaactcaacctattcgagctctgcatggaaacacacctttcttcatggtctatggttcggaagcagtgctacctgctaatctcaagttcggggcaccaaggttaatctttgaaaacatagcagaagctgaagctactaggctggaggatgttgatgtactcaaagaagagcgactgaacacggtgattcaatcagcacggtatcagcaaactctaaggcgctatcatgataaggccatacgacatcgatccttcgcagtgggagatctcgtcctccgccgaattctaacgggggagggatggcacaaattgtcacctctatgggaaggaccattcatagtagctgaagtcactcgaccgagatcatatcgtctcactcagatggacgacacgaaaattgggaactcatggaacatagaacacctcaggaagttttaccc

SEQ ID NO: 14215 - DNA, 609 bp, Zea Mays
gtttataggtatacaactttggtgcagaaggatgatgaagttgtcatgcaaaacttggagaaaatctgccttgaataggttctgtcaggcactctgaagatgattcccatggtacagtaacctgatcgggtcaggttcagtgaacttcgctgccgacgaccgtcgcgccgcgattcacgtcggtcaccgtgattcgtgcgctgtgacttgtggataacagtgagcaggtaaagatcttggcgtctggatcaacttgggtccggtcacggctaagctccccgtaccacttgctcatcgatcgatcgggataagacctcaccgccgttggccgattaccgccgtgcgcgacgtgctaaagcgttagaccacgtcgctgtgaatcgcgtctcgcatgcacggtgatcgtcggggtactgccacggtgaaagccactaacacgagcaccaatgacctcccacccctccgaccgtcgcgcgtctcaaacccaaattcactggccaccgcttagcgatcctataaattgatggccgagtctgttgcaccatgttatcacgaagccaacgcacccacacttgactccaatcgttcacaagagaccgcgaatttcgt

SEQ ID NO: 14216 - DNA, 452 bp, Zea Mays
gtggactgaagaagaatccaggtttagtgaactcgtcgtcggtgatctccgcgccgcgatccccatcggcgctgcgattcgtgcactgtggtgcgtgcatatcggctggcagtaaaagactcgcgcgggggatgagcttgggcactgttaccgctcagtcaccatacccacttccaccggcgacgtggctgtgcgaccgtcatcgggtttgccgccgtttacctcgatcacgacacacctcaagcagtttcaccacgtcgtcgtgggttgtggaggataaccagtgatggccgtaagtctttgcccagtgaatgccacgttagcgagctctggtgactcattccctcatcacagtgcgctcttctccgttcgaatttgtcgtactcgcagtcgcccgctataaattgacgccccgtcctgctccgctaactagttacgaacccaatacattg

SEQ ID NO: 14217 - DNA, 867 bp, Zea Mays
cagtgtcatcagcagaacccaaaactttgtcatcaggtacactagcctctaaagcgactccttgaccaaaggtttgggctaccaccatgcaaccagaatgtgaaggagatcctacgtgaacatccatggaagtacaagagggagaacccgctcagacaccctcgggggctgggtcatagtttgcgtcacccattcgagccggattgtctccggcaacaccctcgggggctgggtcgcagtttgcgttacccatctgagccgagtcacccccggcaacacccttgggggctgggtgagcaccaacaccatccttgagggtcgagttctctgcagcaaccacctctaaggctgaaggtccctcagtcacttccatgggagcaggacaatccaagtcagtttcctgaccctcaagaccgcgctccaaggtcgatgaggcgcgggacgctgcccgggatgaccccaacccggcgtcgaacacatcagcacaaacatccatcgcgtcaccatccgccggttctgataacagatcctctggaaccatatcttcaagagtttgatcaaagttcgccagagacaattcttgtaaaccaatgagggcagacagagcaggagaaggaactccactactttccccactggctacgtagcgccgactgttcttccgagtcagagggatctcatcttcttcctcctcctcatttccatcagcaacacggacagcacacccattggggtcagcgtcagatggatcacacccattgagggtcagcatcagatggatcacacccattggggtcagcgtcggtaaattcaggcacgggcacttcctcaatagcaggagccgaaggaccagcatcccgatccaag

SEQ ID NO: 14218 - DNA, 768 bp, Zea Mays
tggggttaggttttacccctttaatccctatttagggtaaagcttcctatttagggtcctatttgcaaaacacttaaacaatacaacttgtttgaaatttttgcctagtgaatgcattctaggtgtgtcaaacatatgcaatgccaatgcttatgatgccatgctcaagttttagttatagtaacaccaggggtgttacaagagggttccactacatcaaagatgaaacttggtcggggataggagcactgcaggatctaagttgggcagatacaccaccaagaacatcctatgattatgaaaaaataagcaaaagctagtttgccaaaggaagtagtaaaaaagcaaaagatgactcacctgaagattggagaggaacaaaggaagacccaaagcaggaagagttgatacattgcttgatgaggggagatcagcgggaatgatatcaaaggtatgactcagaggaacctcagccccattagcaggcggcagactcctggcgcctggttcactagcctctaaagtgaccagaccagtgagagttgtagatagatgtgtaaccgcaacctccttggactggactggcagcgatacaacgtggacgtctagggaagcaccagagggggagcctgccccaacaccctcgggaactggatcgcacccggcgccaccctcaggggctggatcctccgtggcagccacctttaaggctgaagatccctcagacatgtccataggagctgggtgactcgggtcagcgtcttcacg

SEQ ID NO: 14219 - DNA, 332 bp, Zea Mays
ggcggtggcaaagcggagagtgagtgaattgtcgcgaagtggtaggcgttatcgtagcgaggtggagagaggtcgtcttcgcgtggatggggctgggaagcgagaattgttgtcctcgctgattggggtgagtgtaggtgagggggagctgcgaaatctgttcgagggtgaggaactgaggataatgctgttcaactacagggagatgggtatcatcctgaaggttgagccaatgtaatatgtgatgccctcgctatgtgtatgtaaccataattttgtgtgatgaagctgcgcgctttcgttgatcaggccgctcccttaggggacttgtg

SEQ ID NO: 14220 - DNA, 420 bp, Zea Mays
cggggcccaaagatgatgcatacaaaacacagctgtacacatggctgactgttggagccgtaggacacgtgttgcaatccagtggctgctttgtgtttaaacacacagaacaccgaacaccaaaccaactttggcattattcattcgttcttttcgacttcgaatttgtggaggtcactcactcactctattctggttgtggttttgagatacatggtccatgttacgttttatttggcattattcatccgtttgctcgtccatcacctcaaattatttttcttcaatgacgaatgggccggtaagcgttacgtatatcaacgattgagataaaggattgtgcaaaagtcgtcatactatgaccatcactctctctgaagcgtagtatgaagtggattattttcatgtggaatatatagc

SEQ ID NO: 14221 - DNA, 705 bp, Zea Mays
agatctcggcaccaggactgagcgaaggagactgcctgaaagaggcttcaacgacggcgtgcttgggtgacggacaggtgaggaaccggcgatgtcgtggctgtgcacgagcgcggctctgatgaggtgggttagacgacattgacgacgagccgtaggcagcataacttggcgacgcctaagagcagagcgcaggagacactggtgatgaagagtaaagcgtcctgtgtcgagatcggcaaacggcagcgcagcgacaggaacggtcggcaacgaggacatgggaacggggcttcgagcgaaggagaaaagccgaggaggattgcagtggggcattcggattctccagggacagtcgccagcgatgaggaagattcggggagctccaaacgacactggtggggagggagctcaatgaggcggcgggtgcaacagtagggagctcgacgcagaggcgagtgcggataggcagtcagagggtatgagcggcggtcggtagcggcttcgaatagggcgctcggagacttgtcgaggcacgtagcgagcttcgacgaggcgttatcgagcagctggggcagcaggctttgtgggcagaggcaaccaaagaagtgggcgagtgggcagtcgaggagaaaggagcgcgaccgagtcatcattatatatccggagaggggaagctctgtggccgtcgtttagtgcaggctt

SEQ ID NO: 14222 - DNA, 413 bp, Zea Mays
ggaacgtgatgctgatcggcgatggggtcggtgccaccgtcatcacggggaacaagagcaatgcaacaggtgtccccatgaacatgacgacgacagtgagtgagtaacactggcgatcgatatttcactgcagttgagttgtcatgcatgcatactataaatcagaactattaatttgttgctgttgcggcagatgccttgggtcatggcttcatagaacaaaacctgacaatcagaaacatggcagggccggaaagaaggtaggacatggcgctaaggtcaaattcgaacaagtcggtcgtctaccggtgcagcatggaaggtcatgaggacaccttgtacgcggagaacgagatccagttctacctgcaggcccttgatctagggcaccatggacttaatttgtgtttggc

SEQ ID NO: 14223 - DNA, 584 bp, Zea Mays
atttaattcaagagcacatagcattcagagtatggccgcttgtagagagctgggaaatgctgaaggagaccatcaccgaatctagtgaaggtgaactggcccggctgaagtacacattcagatatggggataaattcgatgaaccaaacgatgactggctaaaatgcaacgaagttacaagtgatgaactgcttggatcatattctaaggcagaagataatgcactatccacagccttcggaggccggggaaaaaagagattgaacagagtttttgatgccattggctttgtttaccccgactaccgctatccgctgcgaggacagggaaagaagagaaaaactgccactcctgccactccagatgagcctgtgccaaagggcaaaaagttaaaggttcttacccaccggccgcgctatattgaaccagccgtggtgactgagtttggcggagaggcttcttcagctgctgaaccaagagaacttgttcctcccacacagaaggctgaagagccggctatagtgccgaaggcaccttcggttgagctagttgaaacggaggttaacaaagataagactaaaaag

SEQ ID NO: 14224 - DNA, 656 bp, Zea Mays
aaaacagaggcctccttacaggggccaacaacaagcatatatgaaaggatccatctacagactaagctcccaaatcactaccactaatgaactgggaggctgccaggtaggagaggcatttggctcctgccatctcccacaagcctctttcctcccccgctagtgtaagggctgctgctaagctgggtgtccttcctttaaaaacacatttgtttcagtggttccaaattatcgaagttcccaaaatgatgagagagttgaggcccttcttgataggattatacactgcttcggacgcctcttgccaccaattcatgaaagatgaagaagaacctggttgtggggctaaactctgcaacccaaattgccttaaaaggaagaaccagaattctctagtgaattcttgttttcttgttagtaactctgtagttgtatcagagtgttttgttgattatatagttggttcttatacaacataaacaaactgatcacaggtagtaacttgcactgatgcagactgatctcctaatccttgtgaatcttaccttttaccctgtcaaaattattagttaatttatgtgtcacattcttgtaagtatagtattttcttgtccatgagataaatgttttacttggcttatactccctccgtccca

SEQ ID NO: 14225 - DNA, 296 bp, Zea Mays
taagctgaagttaccttcaaagatgtctgccattcacagcgtattccatgtatctcagttgagaagtgtgttcgattgccgaccgagatcataacagagccagaattggagatagagccagatctatcgtaccaggagtacccctccaagattctgtattgcaaagaaagatcaactcgggctaaatcgatcaagatgtacaaggtccagtggagtaatcactcagaggaggaagctacttgggaaaccaaggaattcttgagatccaacttccccgattgcctacctaaggaagc

SEQ ID NO: 14226 - DNA, 592 bp, Zea Mays
gtggtttggacggaagagtcttcggatgatgatttggattattttgcggcattggatgtggctgcggcggaggcttctccgcgtgtggtgggtgctgaagttcccggtccaagtgttgggcgaaggcgtcgaagggcggtggcgaagtgtagagtgagtgaggtggagggtggtcatcttcgtgtggacaggactggcaagcgggaattgttgtcctcgccagctggggcgagtgtaggtgagggggaattgcgaagtctttttgagggtgaggagttgaggataatgctgtttaactacagggagatgggtattatcccgaaggttgaaccaatgtaaggtgtgatgccctcgttgtatgtatgtaactataatttgtatgataggctgtgtgccttcgctgatccggccgtgcccgtaggggaattgtgcacttgttctagcgcgtttattatgtcgatccggctgcacctgtagtcggtctttgcacgggtagtctttttgagagagacttcgattttgcgcgcttgttgtgctagtccggctgcacccttaggcgaattttgcacggatagtctttggaggaagactt

SEQ ID NO: 14227 - DNA, 934 bp, Zea Mays
ctctggtggataatcggaggcacgggtgggtgcgttgggtgcttgagtacatagcggggctgatggcacgctcaatttataggatccgagggcggcggcgttcaatttgaagagattgcactagcggtcggagagggaagaagctactggcgcaagcgattcctggactttacattggcaagaccaccagcgatgaatgggtgggctaaggcaactcactgcgacgtggttaaagggtcagggcgtgtcacaatcacggcaggcgatgtatacctcgacgatggtcgcttggccacgtccctggcgcaagtggatggacgacagagcggccacagtgtcccaagctcacctgtgacaaagatcttttcacgaccgagcgtaatccacttacccgaggcacgaatcgcggcgaccggcgcgaattcgagcgcacggttcaccggcgacgaggggagctgcacctaggatctatgtcagttactgtaccatcagaatgttattcagaacacctgacagagcagattgcagcgcccaaacctcaaaattccatgtaataacttgctaatccacctttaacaaagttgtagtcctatagtccaactacaattcgactatagtaaccatccccaaccgatcactagatcctactctaattcgacttcaaagtcctgctaatgtcacgggtggccataattcagttatcactgtgactgacagctcaactttgagctcattttactccaaattttatatgtgctcaaggcttagctgataggaacgggggtgcccgatcttccgtcaggtgaagataaccatcgatttggtggagatgtcacacaaacgatccggcttccaatcaacacgactagaatcccgcaatcgcagcaccacttctcctctggtttcaaccacgcgctgcgcgattgacctcgcc

SEQ ID NO: 14228 - DNA, 509 bp, Zea Mays
tggccatggagttaaatggtgtcaaagttgcctcccctatctgacgcacggctatcggtgtttagcaccggcaatgccctacatggtatcccacatagtgcttttgtggttggcgagatcgacaattagctcgatggttcatgcctaagcacaatgggacacaatataggttcgggtcgcagagatgtgcaataccctacgttttatgtgtttctatgatggatctgctcttgagtttaagattacaaagggtgtggatactatgctctagctagcatatcagatgatccaatcattctaaaggggcccctaactcgccttatatacgtgacgatgctagggttacatgataccaaacagattactattgtgacacctatatccacggaaccaactccgactaacacgtacatgtgtggtccggttggcttgtcttctttgtgtgtacaagaatctgttatggaacaatcgttatcctctgatgggttgggctaattgatcaacccacc

SEQ ID NO: 14229 - DNA, 637 bp, Zea Mays
gcaggggcagcactggaacttctcacctcgtgatcatgtgagcgaggtggcataggaggcggtggcaagatcccaaggtcatcatcatcatcggaacaggtgtcaacaactgtaccctgggtctcaaactatgttaaggtttcatcctcagcccgaacatctgatactggatctggcacagggactgggtcttcaggggctggatgatatgaaccaaactggagacgggaggcctcgagggtgccttggaactgaggcagcctgatcagcttttgcgaagatatgacagagataatgcgcatactgcagctgacggcgagcacgaagaccatccaatattgtgtcctcgatctcacatataagaaagtcaaccttgtcaaactctgaatgtgagatcaaggcaccaagaagccatagctgaatatgtgtagtggcctctctatatcccatcctgggaagcagtgtctgtctcatcagctcatataagtacttcgctgcagtggtgaagtcagctggagagcgtcgcgacccatctgtgaaaggaggtctgaacagggtcgcgatgtgagctgcggccgatgcaactccgttgtgagggcgatgaggaggatctgaggtaccatagcacagactgtgg

SEQ ID NO: 14230 - DNA, 501 bp, Zea Mays
gtggagatggcatagacgatgttatggttggtgatggaagggacaacaacgtgaaccaatgaatccatcaacatttcaatatgtttggagctcatctatgaaaatggcctgataagaagcaaggtatcataagaaagcgaacacaagaagaaattgagagggaggcaccagtgtgacccaaccattttgaggtggtccttgacggggatggcagacgatgatgatggaaacttggtgcacgaccgattatgatggaaagagatggtgtgagtgggtctagacaaggcagaaggatgagacactagtgtgggtgagcgtaatcaggcagggatgtactgatgacaatggattttgccactgaactagagctatgatctatgggtcaaaaggggggaaaagagggactacaccgacattgacgttatttaacggcaagggcacaagtgttggctttgccaccttctactcaagctcaccaacaaagcaacttgtgtacacatg

SEQ ID NO: 14231 - DNA, 566 bp, Zea Mays
atttatccctaagataacatctattccctgagtacccatcactatcaggttagcggggaactctatcccccttatttccacccttacattcaaacatattctattggttcggacttttctaccagccaaatcaatttgtattggtgttgtcattgtggttattaggggattatgcacctctaccaatgatgcagtaataaatgaacgtgttgctccagtaacaaataacacttctgtaaggtgggattcgattgagaacgtatctactatcatgcctagggtttcatggactgcttcggcctccagatggttcaacctcccatggttatagcgtgtctgaccacggttgccagctccctgccgaggcgcgttctgtcttgctagggcattgggggctggctgctgttgagccatcttctttgggcaatgcatggcccaatgccctactctccatagtgaaagcatcatctgcctcctccttgcactgggactgcctgactgctctaattggttactggggcaggaagacgaggtgcctgattactctgcctctgatactgatttcc

SEQ ID NO: 14232 - DNA, 815 bp, Zea Mays
gctgctgggcacacgaagactgcccctcgaagacacaagcattccgatgtttccacagccaccaagcgactaaaattacagctgaattgaagcctttctgctgacttttatccacccgttgctctgcattcctccaccagtcttggaaaacatgatcctaaggttgaggagtcaaaacttgccagcccattggggaaaaacatgacaccagatttatctagaaaatacacaagacactaaaaggtgttgcaccgcctccttctcctggtcgcaaagaggacaccggtcaggatggtcaatccctcgccacgccagacgatcaaccatccaacacctattacaagtggcaagccagataaagaatttacaccttggtggtgcccaacatttccatattctctggcaaggttttaaacccaacagaacctttaaaaaaaaccttttgtaggctgatttggagaagtaaattcatgagggtgctggtgtccagagatgatggcctggcaccccgggcatgagttgaatgcctagtagaacttcctagagcaagagaaactcaatcaaggcttgcacatgtagaccccctaatgtccttgatccactgcctatttagcaagacatccttgactgtcctttcattgaaacccctctttgggattagcagggagagcttcagagccatttggtccaaggagcccccatgcaaccatttgtccgtccagaaaagagtactttcctcattcccaactgaagtcaccaccgagattgcaaacatagcagcagcattaggaagcacctaaatatctaaccccgac

SEQ ID NO: 14233 - DNA, 397 bp, Zea Mays
ttttagcttgcgtcacggagggtcggccgaagcgagccaaccctaacagtttccacaaattatgccggccatatgtcttgatagccatacagcacccatcaatcgaggatggatgtggcatatatagccaaccggcccttttaatttgccacggtgccatcccactggtatttgaaagtacccgctcgcgctgttcatcgccgcctccccgatgtgggactaatccatgctgctttcaattccagctcccagacccagagacgggacttggtgtggctgcgcgagctctgctagccttctgggcctcatactctgtgcagaaaaatggaaggtctggaccatgactgtctgagaaacctgtagcccgcttcgctgctgcgaataatagactaacggc

SEQ ID NO: 14234 - DNA, 517 bp, Zea Mays
ccaaaagaaggatggcacgtgatgtttttgtgtggattatagaaaactcaatgcaatcacgataaaaatgagattccctattctagttatagatgagattttggatgagttggcgggcactaaattctttcaaatctggatttgatatcaggctaccatctggtgtgcaagctacccatacatgaacataaaaccgccttcaagactcaccatgactattttcagttccaggtcatgccattcggtttgaccaatgcccccaccacatttcagtgtctaatgaactctgttcggaagtttgtgctagtcttcttggataacatcttgatttatagtccaacgatggagcaacacattagccacctctagcaagtattttcccaactcagagcaccagttatatatgaaaaggagtaagtgtaccaatcctctttgcattatctcagccacatcatttcccaggagggggttgctactgatccttccaaaaccacagcgatgcgtgattggcccaccc

SEQ ID NO: 14235 - DNA, 577 bp, Zea Mays
taagtgggtcgatgggcatcacaggcatacgagagcacttaaacaaggtttgaattgggcagagttttaccaacacaggctggccacggtgaacttggtttcacggtgttcttcgactgatttggggggaatatgaaattggagcttgctggtgatcagctgggagcaatactaggtgtgggggtgcgcaatgatgttgcaaagctagttacgggctcaatttataggcagcttcgtcggtggcactcaatttgatcgaacaacgcggcggccggagataagaaaggactctggcacggtgaatacgtgttcaatgtcgtggcagtaattccggtggtcgacgggaagctagagggagtcacggcgatgcggtggcgaggttgggacacgcggcacaagaccggagaacggcagttcaccggcgagcatatctgctcaagccgcacggcagaggggaagtactgggggttcaccggagtgccgtccagcgcatgccttttccgagcggtcttatctggtcaccagcgatgtgaatcgcaatggcggcggcgtgaatctcagcggagatcggtcgtcg

SEQ ID NO: 14236 - DNA, 372 bp, Zea Mays
gttcaggacgttaaagagtaatatcatatgtcctctaggttgcttgattgtattacttggagggcgaaatggttaagtgtgtgtgtgggaatcgagaatttgtgttctatttgtggtgttctcttcgaggtgttttttgcgctgtccctttagaaggggtccccatctccctttcatagtccaagggagaggggttttacaagttatgtggggtcggtctaatagctaggcccctcgttcatgcatgcgcccacagtgccgcattggtcctgttgtataggcacaacaactctctgactccactaacttcttgatcagccgcatgtgggtggctaaacatgtggtgagctcaaagcctttagaggcattggg

SEQ ID NO: 14237 - DNA, 373 bp, Zea Mays
gacaaagcattatcttcggccttggagtatgccccgagtagctcatcactggtagcttcaatacacttcagccagtcatcgtctggctcatcaaacttctccctaaatctgaaggtatacttcaatcagaccagaccaccctcactggaatcgttggtggtctccttcggcatatcccagctctccacaagtggccataccctgaaggctatatgctcttgaatcaaatccctcgttccaatgaaggcacacacagtgctaaaggccttttgacatgcttcaacattgccatcaatttccaccttcggccttcggaggccgaagcgagaccagatggggcactgaatgatttctttgatgtcttcccttgcct

SEQ ID NO: 14238 - DNA, 572 bp, Zea Mays
atagaagtagagtagtgtattgtaggttgtactgttaggttgaacttttgtataatgggtaatgtatcctgttatgtaatatcgagtctgtatcattactttttatagtaatgtaaaatggaaggtttctctggcatattatgtttacttcaaatgttctttgccacagatgccgaccaggactcgaggacaggacgcagcaggaacttctgggggaagggatgttaccccaaacccacctccggttcctcccacattggccgaggcgattgccgccttggtgaatgccaccgcacacaatactcgctttcttagggaaatggcgggtcaacagcaattccagcagcaggcaggaaggggttatcagcaaggcccccgtgaaaccacctatctggacttctctgaaacccgtccacccctattcgtcaaagctgaagatacactagaagccgatgagtggatacgggttattgaacaaaagtttggtcttctccgttgttcagagacgcagaagccgttattcgcagcacaacaactacgtggccctgccagtacttggtggggaaattttg

SEQ ID NO: 14239 - DNA, 464 bp, Zea Mays
cgcgacacctcctccccgctgccgcaccctctccaccggccgccgcatgcgcctctatcgaagaccacaccttcgtgcctattctaatccagctgtaaacgcggacgctggctcttccttgtgagttgtgattggtgccgtgttctccatcccatgctacatcttcctccgacgccgcgcactcgcctccctctggatcccatcgctccgctcgccttctcctccgtcagcccgaccagcctcgcctccaccctctccctctcacttccttctctcgtcgccgcaacacacaactccattggccccgatttggatctcctagccgtcgcgacgtccctctgtcaggtcccgccatcgtgtcctgtacgggtgtgtctcgtttactaaaaactctcatcgccgacacgctgcgatccgacttcgggatgctcgcgccactcccatgcctaacaagcacactctat

SEQ ID NO: 14240 - DNA, 316 bp, Zea Mays
cctggaaataacgaccactgctcccccacaccgaccactgtgctcaaacaattcgggatgggacatgcgcacgtctgagcatggtctcaccctcgagagggaactccacctcgcccgaagtcgaccttagccttggagaaaacttcgcctcgcctgagctcggctttggccgattgccccgacaacaactcccagtgaatctcgcgggaggccattctgacaactatgctaacgcctccttgtacgaatgcatgcctcgaggcaggcacggccaaggcctcaggaggaacctccgtctcgcccgggcggggcctca

SEQ ID NO: 14241 - DNA, 987 bp, Zea Mays
ggcttacagcgcactcataacctgcgcatccctttggtcaccagcgcattcttgacctacgagcccctcagcccgcggatcactcatgacctatcaagcttagacctgagagcacgaatcgtccatagggcccataacgcaacgagacacgccgagacctaggctctagaggccaggggtcggcgtggcacaaaggtagtaatgatggcaccagggcccccgcaccgctcacactagccgtcataatgagtgggagcagaggttaccatacgacaatgtgcatgtgggcaaacggccttgccacggtaaggcactcggttttaccacggaataatggctccttctcaaaggagccaccaacagccgaaccccgccctgacctataaaaggacgaggttggccacaaggacgggggctggagacacacacggacccaaacgaaccagagagatacagacgtacgaagaagactcacgacagaagacgctcgacagaaggcaaccacacatgcccggagaaacctaaggacttggaggtcggagtcaaggcttagcgtaggactccaggtccgtagtctttaggaccactcccacataagagacctagaagccttcccaccctctctcgcctgcttgtaacccgcttgtaacccctactacgagcatcgagcaacagaggtgtcggtagtgcgagccaccgaagactggatgtagtggcgttatgcccaaaccactataaacattgcgccaaccgaacacaccatccggagccctaaacgcgcacatagaaatttacttctcggagcggaggttcgaaacatcaacagttggcacgctaggtagggggcttgcgcattctcgacgaacattcaatgctccaaatggccagtcgcgatgccgtttggatccctgcgcgacgattcgcttcgagaaccttaactttgtccttgacggtgatgaggagagggttggggccccaaaagcccga

SEQ ID NO: 14242 - DNA, 1410 bp, Zea Mays
tggtgctataaccaaagaaaaatagatgcaatatactaggagtatcacctatatgcaaataatctagatcaaaaattgtgcatgacctagctctggtaccactaatggaaatcatgcacgatacacactagcatatctaccatgtttaaccaagattgcatgtaactacagaatcatgcatttctactactagacgcgcaacacagtggaaggacacattgatgtagtggaagtcatcgaatgtccttacgtaccaacaacaacacatttgcccatcctcctcaagttcattattgatcaacaccacagtaacaacagtgtcaccatggtatatccatacgtgtgaagatgaaatatcgtaatatcggtgcgctaacaccatgcatatcgagagaagcggtgtcgacgtatcgagcgtctgcaaccataggaagagacagcggtagctaatatgattctctcaagcatgccagacctttggtacatatagacccttactaatgtgtttttaccataaagactcattagtgttatcatatgtcatgattgtctcttgaacatatattcaacaattggtattaaagatatcaattaattaatatcggtgcatgcaaccgagactataagctaagacatttagtttcgattgtctggtatccgttgaagccagctgttcaggctgctgcagctgcaatctatagagacaaaaatattgtagaaacagtagaaaccgatacagattaaagccaaaggaataagctgacaaatgttttttgtgtagcacttctaccgtcgctgtcccatgaagatcatggggaataatgtacaaggtccggtactaacacacatggtggatggggtgaaccgagaatgacaacctatctgtcgacgaacatggtggatggccgcactgacctggaattgctgcgccaaacaattcgtttttttagaaagttcatatggtaaactattggagggggtaaattaaggttggtgcttattttgttaacttgtctctggtttagcaagtaaattatacaacagagtcctgaagattctctaattactaaaaactactagagaggaagataaaaatagagccctctatttattttgttcatcgatcacttggcataatcatgcattgacttcccaaatgatttttaaggagggttttggagacattctgagtgtatgcatatatagagatagattcggtggaatttagcttttaaactgctacgtggtgcttgcaaaaaaacaaaagaaaacaaaaatggcatgtcctagagctcaggtacatgaacttttacattcttctttgaaaaaacaaacacaacgtgaataagtgtctgatgtgaaaccagacgtactcttgcatgattgtacgtaggacgtggtagaagtttg

SEQ ID NO: 14243 - DNA, 1338 bp, Zea Mays
aaagccgcaccatacccgttacccgcgacgagtacaatatgatacctatatctacaatctgcgggtgccacaaacccgcagacacaaagtatcggaaggtctctcccctcaacctttagagacatggggctcccccgacccctctcggggaagagcattgctaatcagaccatcaaccaactttcgggccaagggctttgaagttacgaccatctccataagctccatgtcactcaaagcatcgcaatagcctttgctcaaggcttccaaattgattcccctctcataatgggatatggtgacgaccaaggtttggttgacgccccgacggaaggcttccacctctggttcatgaatatggtccgcgaaatgctcgaagcgggagatcaggtgtgggggatagatatcctaaaagtcgcctagaggggggaatatgtaaaacctaaaatttacaaactttaaacacaaacttcaccccaggttagcactagaaccagttcatgaacatggtccgcgaaatgctcgaagcgggagatcaggtgtgggggatagatatcctaaaagtcgcctagaggggggaatatgtaaaacctaaaatttacaaactttaaacacaaacttcaccccaggttagcactagaacgagtataatgaaaattagagagcgggaggagagttcttcttgcttagagttgctcaatcagttgcagattacattgggagccaactcaaaacgatcacaagcaagagaacaagatagaggagagaggaagaacaaaatcgcaaagtaatgatcaacgcaaagaacaaggcgatttgtttcccgaagttctgctctgaataatgtacgcccctgttaagtagtccactaaggacgagtctctttcaaccctttctgccggggaaatgatcctcggtccttgggacccaccggtcagtgagcacgctaaggaaagagcccctcatccctagggcccattagtcagtcagaagaggctggtgagccaaccctttaaggacccgccctcagtccaatcccgcagcactgagcccggggtcaggcgtggcggaaccagacaatgaaggatgggcatgtcagaagggaaccgctcgagtggatcctgcgctcggacttggactggctcgctataaatgactggtcgcattaaccacgcctgacatcaacccacagcgtgggtgtcgatccacttcccactcatgacctacggacccctccggttgcatagcactcataacctacgaacccccaaactgtggtgcattggcctgcggcgcacttatggtctatcggactaggcccgagtgcgcagacctccc

SEQ ID NO: 14244 - DNA, 894 bp, Zea Mays
gtgagccctagagttgtacaaaaattggagtaaactggcctggaagttgagctgtcactcatgtgttggcctgaaggttagactgacagtggcatcagatcaactttagagctgaattgtgcttgatcgagtggaggtatgaacaagaaccctataataaaattgaagctggtatgatggacaacaactttgctatagacggcttggtagtttgttgaatgaaaatcgaagataaatggctctcaaatcgctttgtcaggcgagctgaatgaacatcgccatggtacagtgcactgaagaagatccttggtgcagtgaacctcaccgccagtgatcgagcgccgcgattcgagctcaccgtgaagattcgtgcacggatcaacacagatattactggggaagtgaaaagatcgtgactgtggataaacttgtgagctggccaccgtaaccacttgctttgcgaccggccaggatgtcatcgtcggcgtccactgctcgccgcgaggatgccacggtcttggatacattagcacgtcacaataggtcgctgtggacaacccatttaccgcctggggccttacctcaccgagcaccacgacagttgccctccggtgactcacccccttccggccgtgagatcatctcatcccaaattcacgacacactcatgtagctacgataaattaaaggccctccctgctccgccttctggttatgcgcctagcgcacccttcctcgcctccaattacccaccagagctcacaaattccagtttcccccatcttggtcatttacgccaccgtgaggcacctggccacgaccaactgttcccaggttcgttcattcccctctgtgccatgttttagcatccttgaatgttaacatagctcgtcg

SEQ ID NO: 14245 - DNA, 306 bp, Zea Mays
ccagttccgttcccccgtgtgaattgaatggaagcaggctgtccctgtgctccggtcacctgtcggacgattccatctccctgtggccgccttgttctctagcacggcgccccacatttgcctgtgctgtgccacatggtggtggacgccattattgctcgtgcatgcaaggcgggattggatctgaaggccggccccagctttgtccccgcggaaagcgagtcaaatgcgcacttttctttcctctcgacatggatggagccgagccggtgctgcttttattgagggcgaatgcagtgtcgaccc

SEQ ID NO: 14246 - DNA, 441 bp, Zea Mays
atctctatgtccttctaagtggtgcggcgaaaactactagatgaggactacgaggaagactttttcaaaggtcgtgcctctctcgtgtcaatcgggctgttgaataagggataccttcaagaacagtataggttaaaaataatgcattgtagccccacattcacaaaattaaagaacatataacatctcaccatccatgggcctttccgcctgtgcttgcatacacatccacctcgtcaatgtgtccatgctaccaattgtagtcttcaccataagtcttgaccattactataacgtactagtattaaatgttcttacatatagcctaccggtttatttatcggtcgattgtcttccctcatagagacttgaggaggagccacgtaatggttccttctatttcaccgctacacttgcccactgttgatcctttagtcaatc

SEQ ID NO: 14247 - DNA, 545 bp, Zea Mays
tagggaacctgagtctgctagagcttcagttgaggtgtccgatgagactgaatgtgatgagtgaatctacacatgtcgaacatcaccactttgcagaccaagtgctccaccttgctagatgagcgcgacgagttgagatctaggtctatcctattgggtgcgtgtaccgtttgtcctggcatgcaatctgagctagcagagagagacgctaggatagctttgcttgagaaggctagctcagtgagtgcccctacacctgtgtagtgtgcactttgtgagggtttgcaatctgcccttgagtcttgcagacacgacaagacaagaatcaaggaagaaaacacataccttagatctatcttgagttgggtgtcgtgcagtgagccccagttgggcatgatggtcagtcagttcaagaggggaactggcagaccggggttaggctttgctactaaggatgggagtgtcgctctctttgggaaggttggtgagtgcagtggtttgacaccttcagagacaccttcacccactcccaagcttatcaaaac

SEQ ID NO: 14248 - DNA, 407 bp, Zea Mays
gagaaatcccctgctgaagcggcggcgatgcgccctgaccgcgctgcgtgcaattctgtcctttctggttgctaccgcgggctaggttcgctggcagatgcagagcgggtgctggagactatgtcggcggttggtgtctcgccagatgtagagagctttgggtgtctcgccttcctgtatgcttggagaggtgttcccagtcgggttgatgaactggatacattgtttgatgctctgggcttcagcaagaaggggtttttcaagaacctggttagtgggtacctcaaatctggtgacttcgagtcggtttcaccaatcattcttcgtgcagtgaaggagcgcagagttggggatgacaatggacttgatgaggaaacctatactgaggttgctcggtgctttgtgga

SEQ ID NO: 14249 - DNA, 661 bp, Zea Mays
gagcctataggactggccgtagaccgcagccctgaccttaaaagttgccttaacaagaaaacacctcttacccccaagaaacacttccccctttccccgatattaacagacccttcttttcttctaccagatggaaggcccctgggttattaggacatcctattgctcagaggaggaaggctttcttcaccttcttcgaagttgcacgctacgcatggggatccgcaagaagcccgaatatgtctggaaggaataccgcgaaaatggaatagaaaagtgctctatggcagtctacctgggagaaagccgaaactacccaaaccaccctcccttccaaatcaccttcatcgggcaccgctttccagacacttgctagggtgttgcccgaaaagcccttaaacagctgtgccaaaactacagccgagagatctttgagacccccttcgatattttccacccagcaacaaaaatacccccacctggaggaaaagactccaggctctgtcaggaggagatcccacagaagatgaccccaccatcgtctacatggccggatacctccacaccctcgacaaccactatgatgagctctcctcccactgcacccacctaaactcccgagtggaaagcctagagcagcaggtcaaagagcttaagcaag

SEQ ID NO: 14250 - DNA, 498 bp, Zea Mays
ctttgggcgagcaccctcaggcttccgagtctccactgctttgccaagctcttatccagccatgatagccatcggctcagcatgggtcgagtcggaagattccccagccaacatactaagcacatcatctatctctgtctcgtctgggctagctggcatctcaaaatgagtttgtttcttatcattgggaagattccaaagaggggcaatcagagcctcaatgtcctcgggagagggtcgcactctaagacccagaccaccatcactagcaggagggttggacacaaattcagaaaatgacctatcaggtagcagattccaagcagaataggcaacaagagcaccaacatttgacactctgcccctcagaatcatgtccagtcggctcaccagatcttcagtgggaattctcttgttggtgacccgggtagagtcattgataccactgtacagataagctgggtatgccctgtctttcaaaggctgaatattcttgaa

SEQ ID NO: 14251 - DNA, 724 bp, Zea Mays
cagcatcagcgccaccatccttaccgtggcaaatcttctgactcgggtacttcgggaggaagtactcagaggtttcgggccgttcctaagcccgggctggggctggtgtgtttccgctgtggagatgcgcatcgccgtgcagagtgccagtggagtggcaggtgttctatctgcagtcaggaccacaaggatgtggtgtgtaggaggaatcccaatgggaagctcagatgggagccggtgacttcctcctcttctcagggcactatcaacatgatgtcaagtgctgagcagcagttttcagttcctcttcctccacagcagctttatgtgcctcggacttctcagttcgtgccgatgcagggttttcctcagtatcaggtcacgcctactcctgcaccgtctactcctatgtcgtctcagtttggagctccgcacctgcctcatccagtggctcagtggggttcttctgttaatttcactccgggggcttcctcttctgcgggtatttctggagcttatgtgctacccgctacggatggcagggagcaaggagacgtggtgacaggtacgatttcagttgattcgtttgcagcccatgctctttttgactctggcgctagctattcgtttgtttcggaggattttgtgtcgcgggctggtctttcggtgcagaggttgggtcacccaattttggttagatctgctaatggctccattagtagct

SEQ ID NO: 14252 - DNA, 734 bp, Zea Mays
atagaagttgcacaggcagaggatacctctcctatggatatcaatagtcaatccaaccagaagcaagaatcatgtggaccgaatggatccaaagatcgtatactaagatcaacttctcgttcatcatcttccagagaaaaaactatggagaaatcatgcagttcagcacacaagggcaaaagaaccttatggggccgtacttcagtaagtgaaaatgttattggtatagttcatattaatactggtaggataatcttacaattttatgggaacacttgatatacaggcaagaaaagacctgtcaacagaggagattgaatgctgcagcgatgatgagtaagtggcctgggaacctttgacctttgggcatatcctagctgtttattgaaagaattgcaaacatatatcctttaaaagcaccacgattctttttccagcttttctttatcaatactttattttttacttgtgatatcggtccatgtttaataccatcgcaaatttgccattcactgtgaagttgcccttgcatttgatgtttgcatgttgacttcaactagtaaaattataacatacaaacttaacagcagtttggaacgaaaaaaaatgcaaggaagcttttacaatttctggctgacatttgaggtattttctgatgtggcttctgaacaagggcccttgttgagaaacttgagagtaacaagattgatctccaatcaaaaattgcaaaggag

SEQ ID NO: 14253 - DNA, 276 bp, Zea Mays
tcgttgttccttataacatccctcggtaatgaacttctttacttcaaccattctgttgcaaccttacatatcttacccttgattgtttctctacttcgccacctagcgagtcttgcctgagctctatccttatgcttttcattattatcacctttacctttgacacctctatatcttacattgatgtttatcttataccagccctttaaattctcctcttttccatctcaatctgggagttatattttacctatttttcccttggtcgtatcctcc

SEQ ID NO: 14254 - DNA, 311 bp, Zea Mays
aaaacaccgacgtcgccagtaatcgttcggctgttacctctaaaacgccgacatcgccagtaaccgctcggtcgttatttctaaaacactgacgcggcctgttatcactaggccatcacctttaaattgccctgacatcgctgataatcactcggccaccaatactaaagcgctggcatcgggaggaaggcagtctgaggcacgactcaacgattctaagttgctacttaagcgttacgttcagaaacaacctctgcagaaggcatcaatacaaacaatgatcaacaagaaggcggaatgacatgcacaag

SEQ ID NO: 14255 - DNA, 354 bp, Zea Mays
ataaattgcctcactatacctcgtataaagatgcaaaatcctcactcactaactttagccttttttttcatttggttaccgctcactcatatgacaatccttgtttatctatctatatcataatatttgtactgaataatatttgtactcctcccgctctatctcgttgtcatccctaaccctggaggataataaagacctacactagagtacacgtgtcagatggcaataaagccctttacaccccctcaaatgcaaggtgaatgcaattgtgatgcattagaaaaacactaagcattatggatttgacacaatataacactaacataactgaacatctaaatcttagtctcc

SEQ ID NO: 14256 - DNA, 585 bp, Zea Mays
aaaaaagttgccagaaacatatgcatggttggtatgttgttgtgtggcgctggacgcctggaccccgagcgccagacagatgacaaaaactgtgtactacactgctaccaatcaagcagcgctgttccaaacccgtcagagacagggtcatcaatgttggcagcaatgatccgggattagtcgggtgggtgggataatcctgacaaaagaccgcggcagcatttcagcaggcagcatccaagccatgccagtgcgaggtcctgcagatctaacaattcagggaagattaatctatggttcgaggcagcatcgtgcaagagactccccctggtcctcacatgaggcatctactatatagttccagtgtcttttcccactcatttactacctattattagagtacatctcttagttcctttctgcttagttaatacgtacttaataccataattaacagacaacaaagcacgtggtttattttcttgggctgggagggagtgcccttgtgcgtttcccgtcgccttgtcgcccggtctgggaaacgctccgcaatattcaaaccaaggagcaggagccagtgtaagc

SEQ ID NO: 14257 - DNA, 475 bp, Zea Mays
gcagtactggcactcgaacctccgcgcgtcgccggccgccgtggccgtggtcgtggtggtggtggtggtagacgaggacgacgagtcggagcctccgccgccgccaccgacgttgccgcacgccggcgcctcgtccggctcggcttccgcttccgtctcccgggcccggcccagctcgtgctcctcctcggagacgtggaagccgaagagctttagcctggggctagtcatgttcataactgcttagtactccctggcagtacttgttgcagctgcaggaggagggatagagagaggtaagtagtggaagtggctgtcgaagctagagggtgcatgggttagagggagctgtgtcaggtgagaaggggcagtatatataagacctggagcctggagctggaggcacacagcacacgcgagtggatatatcagctaaattaacgagccatttgaatacatacatgaacagagagag

SEQ ID NO: 14258 - DNA, 388 bp, Zea Mays
acatggttaggcctttggggtcctcaaaaccgagaggttgttctacctatctaattcacaaatcttatcatttagaaaggcactttttacatctagagtttgatattatgggcacaagcataagcgagaagaatacgaatttcttccaatcttgctacgggagcaaaagtctcaccgaaaccaatccctctatttgagtgtatccttgtgccactactcttgccttgtttctcagtaccaatcaatcttcattgtgcttgttgcgaaacacccatttggtgctaataacattgtgattcttgggtctctcaacaagctcccaaacttcattgcaggtgaagtcgtttaattcctcatgcgttgcattcacccaatccacatcaagtag

SEQ ID NO: 14259 - DNA, 984 bp, Zea Mays
gtgggctctgggtgggggacgggggttggaaggtggtgcttcgggttcgtggctacgtgagggagctgctcggcccacttaatttcttgccggaccaacggagaaggagagggaggaggagaaagggactcaccggagaggagaacgacgccggcgcttcgcgaattgtgctcgggggaggggaggagagggatggccgaggctggtgcgaggaaggaggggctcggggcgagccttttataggcacgcgagggaaggggggcggtggagcttctgggctccggcgagcttcacagtgccgccattaatgccgcacagcgccgccgaggggacactacggcggggcggtaccggcgaggacgctggtcaagggggggacggagcggtgccaaacttccctgtgcggcgagatggcagaggggaggacgaaggcgatgaccagaggtgacttcggtgaggggacggcggaaggacgacgaagcaactgaccagcggggccattctgccagagggagcgagcgcgcgagagagagggcggctgacgggtggggacgccttgccagcgagagggatgcggggtgtggagcgggctggcgcgcgcgcgcggaggcaggccgaagatgggccgagagaggaggagcgcgggcgcgtgggaagggggaggtcgcgggtttgggccgggattcggtccagcagggagaggagaaagcttttctctttttctttttactttctaattcctatttcccattttgcccctttccttttgaacaaattattttgtggatactctaagtgtttagaaaatagaatctaagtgaggtgctttgtgatcaaacaaaatgtatgcatatgaagaaagaaaaactagtggaggtcttggaattagaggatgaaaggaggggaaaagggtagattagggtttcaaacctgggttaggatttttgggatgttacatttgggttgcctagttacaagagaatt

SEQ ID NO: 14260 - DNA, 1213 bp, Zea Mays
gggcactactttgtactctgttcacatgccaacccagttggcagttgcccctggattcattccgtgatgtagagcctatacactatatactacatagccacatagggtagattaccttttgttgttctttgatttttttttctctcacctgaataatataactgaataaatggctggcactatgcgtaggtaggtggttgaattcccttttgaagatttatttttgtcaactcttggcttgcatactgcaacaggttgcgcggtatcttcagttgataacttatctttattattcttccctgtcacaaaaaaaagagaggctggatgatatgatggtaaggtcgcatcgaatggcttaagaaacttgtagggggaaatggatatgccttgtgagtgtgagactgatcaaacccttgcaaaagttctgtgatagtcactgcttggctgattgaagtaagtttgatgttgatatctgctgggaatatatataatcaatataaaaacttatcaaagatgcagaggaccttttagacgtatgaatgactcgtgagcaactatatggcctggccacgggtgctttcggagagattcaaagtgcatccaaatgtggatagttgggagggggtactacctccatttttatttatttgatggcacttagtttaattgtgtactaaccagcgacaaataaaaacaaataaaaacaaatggagggagtatcaagtaatgcatcctaaacaagtctatccgcttgcgaatgagaattttgtagcagttgcttgatgcctgggtgatagtgataatacctatacgttacagtaccatgtgctcatttcttgtgcgctccgtaacatgtttggcgtggacacctctctattgcctgctatttgactaatgggggagtcgaactgattgcgtgttcgacaccctctgatgcgaaatgtattgcagcgtcctctagttaataatgcatccatatagtctgtgaacactatggtagctgtacaagggcatattactatcgtgggttcggaaaataaaaaggccctattactatcgcactgagtagagtagacataaggcggccgcgtgtacatctatctgattaacgccggaaatcgttcagtcgatcgaagtgcctccatttgtcgctggattaggaaatcgacaccactaatctgcattaaattatctctcccgcttggccttctcc

SEQ ID NO: 14261 - DNA, 764 bp, Zea Mays
acattgagatcacgtctcagttttgcagcagcatccacttcgccataccaatcagtaaactcactgcctcctccagcacatggcaagcccaaaatcagatgaaccgtatcttttgttattttcagttccttgccagcccctgggcgtatggtcatgtcatgaggatccaatttatccatcaaccacctgatgagtgatcggctctctaaggcatcagttcgcaaatcaaatatgcttgaaaatcccaacctagcgacagcatcgcgctgccgatcgctcattatccaagatgatacaataacatcatagggaatgcagcggatattcagtttctggaagcataaatgaatatacattaatacacaaagtatatatatagttagaactaatgatacaatatttacaaacaagggataattattacatgcttgtaaataactagtctacaacaatataaaaaaagtaaacaccatatttgttgttaataatatacataaatttaaagtgggggaaaatacaaacttgattggacaccaaaattaacacatgaataaacataaatatatacatgttacctgtgattttctaggagtcttctgtttaggagagttttttttgtaatgatattagactttggacttcttttcacgcaaggaacttgaggagaaagtacttttaacttctttgcactgatttgttctgaaggagaaggtgaggcagatctgaattagcgcttcaacgatggagcatccatgaaatcgtcg

SEQ ID NO: 14262 - DNA, 279 bp, Zea Mays
ggaaaatcaaagggatttggaggtgacaggtctaatcagggacctgagaagcgaaccaggttggtaatccgaccttttaatcagaatcgttcttcgcctcgtccaccctcctacccgttcaaacaacctgttttcattcgtcctgccactgcccccacttctacaaatcagccgagtgcccctggtgctcgtttccccgccctccctagttcttctactggctgcttcaactgtggaaagtctggtcattttataaaagattgtccatatccgaagcag

SEQ ID NO: 14263 - DNA, 491 bp, Zea Mays
tgaagactgagatagctttatctcaggggtgatctgtagtgaactcttctcaggacaattacggaagtaatgaccttcacgtccacatagatagcaagcttttcttgcggttaattcttgactttttccatgtttccctttttgtttcttggacctgatgcgacgacggggctgtaagtgtgtgtaagtaatagtccatccatcaatgtacactcatgtgtttcttcttagggttgggcatccttgtgatgtttcctttttggaaaacctggcaattcatcgtttgatagtgcatcttctactagttgttcttgggaagacatctgtctgtttatgccagaaaataaaatccggttcttctgttttgtggtttcactttcgtttgtactgatctggcgacaaggaattccatagtactcacaacaacaacatgttccaaggtcacttgtctgttggtttggttgttcatccttttgggtcttgaatgtctg

SEQ ID NO: 14264 - DNA, 507 bp, Zea Mays
ggaccttggtggcgcgtggatttctcgccagagttcacacaccaacgtggagccgcgcatcttcgtgggcgggtcacggcgctacgtgaattatggtatggtttcctcccctgtgttcgcgcttatccctatcgtgtatagcacctctcgggtgggattttggggcactgtgcaggggtaatcgaactcggcggcgatgcgctgtcgcggtggatctcgccgtcgccgatggtgaggacagggggttgatgacggtcgtggtccgtccatttgttgatgagcgcctaggattagatctggcataggatggccctcgcccgtcgatcctgcaacgaacgactacgattggaacctgacattctagcgcgggcgtgggttggtagccgttgatctcgtgatccatggctcgggtgtgtaggcaggtttgatctaatctcggccttcaatacttgatcggacagctgtaggccctggataccccttcggttctgcagtattgcaattgag

SEQ ID NO: 14265 - DNA, 470 bp, Zea Mays
gccaaggtgtcccatgagggaaatgagactgaagtaaccgatacagcacccatattagaagtgaggaggcgatcaggtctggttgtgcaagagggagctactgccaaaggtacctccaacgccgaagctgaacaagttatggctaaagtcgggagtgataacgaaagtgaagaggacaatagtattatgtgcccaaccaaacctagtcatattgaatttggaaaatccatagtaaaagcagaggacctggttgtgatgaagaagctaggttattttggagaaaatgaagatggactgattcgctttgctagagaggaagtaattctagagccgaaggatgatgaggttgttgtgtttgagagtttcttcaaggcggggcttcagttccccctttacgatatgataggggaggttttaaataaatttgagatatatctccaccagctgaccccgaatgctatcgttagact

SEQ ID NO: 14266 - DNA, 505 bp, Zea Mays
agatgaagaattctttgatgatcgtgagcagtttgccccgcctccccaccaaggggatccgggtcaatcctcttcttatcctccgccctaggatccttcgggcagccatcctctcccagctcagtctggggaagaacactttgcaactcacctggtgcatcagttctttgatcctcctcctcctcagtggtgattcgtggttggtggttctctccttttttggtgtttgttgccaaaaagggggagaaggattgcttagccctcagggcttttaatttctgtaatgaacacctggtctgtaataatttttatttgactttgcttgttgtgattcatgcggtgatggcctagagccacaaacattttatgatgtgatgaccttattgtaatagccagtatcatttcatatcttatgctatacaatgatggacttgtttgtgtaatgctattgtaatagccagtatcatttcatatcttatgctatacaatgatggacttgtttgtg

SEQ ID NO: 14267 - DNA, 584 bp, Zea Mays
gaaatagacacctagggtgtcacaatcagccactacattagccactcaatttagagttaaatcaaagaagttatgaatttatgaagttttaggatttcatttctatattaaaattcatttttcggtttattctatcaacttgaggttttatttggatggtggatgatgttttgaggaaacccagggtgctatgtgtaaatttcagggcctaactcgaattatttcctatcggacccggactacaggttagttttaggttcctctaagggctcttttgcaactgcaccgcaatgaaagggtactgatcaatcccacccgatccgcatcaacgacctagattagatttctcctaacacgaaccggtaagccctcctggccaaaggatcctcgatcgacgatcgaggatgtgccatgccacgatccagccagaaccgcccatatccgatcgaacggttgtggtttattgagtgaaggggtacttccctgttttaattagagccacccaggagaggatcaacggctctgctagcttctccctacccgaacccggacagcggctgtgccgcccctccccacagcggagg

SEQ ID NO: 14268 - DNA, 287 bp, Zea Mays
attttatgtatatgtgttgttcgatttggcaggaacatcataaatgaagaacgtagaccgacctccatctaatccaaaacggattataatccagtctactcaagagtgctttagtgttgacataccccgtgttccggcggaaactgttagacacgaaacaaggcaggctgctgatgaggacgatgactttatgccattatccaagaagcgtaacttcgacgacagtcctgggaaagtcttgaagaagatagtcacaaagcggaggaaagtagtggaccccccccccc

SEQ ID NO: 14269 - DNA, 1296 bp, Zea Mays
cgtccaactagtcgtcgacctgggcgattagtcgtctggtcgaacacttcctggtcgtttttggtcgttgcagttttggtactgggcttcactctggtggtttttggcccatctacagtagcccgcccctccaaaaaccctcccagctaccaggacccctcccagccgcctgaacccttcccagccgccagaaaccctactcctctcctctgtcctctctggtttctgccaacgtctctgctccagcctccaagtgctccagccagcaggtaatgcagtttggatgctctagcgcgatttgtttggatgctgatctgctctaggtagcagccagcaggttcctgctgtactttttactgaattactgcaagtaattatgccaatattactttcagtttggactttggactttggatggattctgttttacacttttactgaattactgctagtctgctactaattatgcctatattattgtagaaatacaatgtttatatagttaatatatagttatatacatatacatatgtccttaaatctaacggacgaccagaggtcgaccaggaccgattaggtcgactaatcgtcgccctaatcgcgattagtcgcctggtcgcccctctcactcgaccagctggtcgcccgacttgtaaacattgtgtagaagcatgtttggatggtgggttagactactaaatcattcagattggacctttacatatggaaaatttaaaaattatctcctgagccctgactaaaaaaatcgacaattatcgggcacatctggttcatgaacacatttcctgcatgataacatcgcagttgtgaagtccgccagcactaggtcacttgctcacccgtaccagtaccatcatctgccaccattgccaccttctagcacattgatttgactcgcatcttcagcagtgtcttcctctttaacgtgacatgccttgattcatgccgtcgattctctcacatgtttcattcatagggcagaactagagcctctttcatttgtcattttgttaacagtgtagattctctcacatgttttgccaccttggccatgaatgaaatagctacgaaggatttccttgttgctgttgtactatatgcaatgctagatttgtgacgtgaacttatatgcgattaatgtcattccaaccttggccatggttccgttcaaattcaagcatggctttgctttgttgcaacttgcaagagttacttcccataattagtgaatgactagatggtctcttttgatgtttcttgttcctttaacttttg

SEQ ID NO: 14270 - DNA, 531 bp, Zea Mays
tagcttttggatgacggtgcagtatttccccatggagtcattcgagcaatcccactctttgtttacttgacttatgaccaccagtgagtccccatataccatcagcctcttgatgtccagtgatatggcaatgttcagtccatgaatcaaagcttcatattctgccgcattattggatgctgagaacaataactagagagcatatttgagtggttcgcctctaggtgcaatgaaaatgattcctgttcctgccccctgcagtttcaacgagccatcgaaatacatcctccatacttctgcagtctccgggttatctggcacttgctgcttggtccattctgatacgaagtcaactagtgcttgggtcttgattgcagtacgaggtcgaaactcaatgtcatgagcccccagctcgcaggcccacttggctattcttccaatggcttctttgttgtggaggatatcccctatcggaaatctagtgactactatgactttgtgatcgtcaaaatagtgacggagcttgcgtgt

SEQ ID NO: 14271 - DNA, 314 bp, Zea Mays
gcttcttgatcgcgcagggatgtcagagtgcaagccttgcctcactcaggttgatacaaatccaaaggttgcttcaacaaatggtgcgccggtaactaacgcttcggattttcgcaatcttgctggtgctttgcagtggttgacattcacctggccgcctatgttgttcagcaagtttgccttcacatgcactctccccgggaaccacaccttgccgcgttgaaacgaattctgcgatacatttgtggcacccttgatcttggcctcttgttgcgaccgtctacagcgactgatcttgtggtctacgctgatgt

SEQ ID NO: 14272 - DNA, 410 bp, Zea Mays
ccgagaggctggttggtagtctacaccaccgccgcccgagctgctggggcaactgaagatgtgatgaccgcatacttgcccatcgtcctcgagcaggatgcactgcaatggctacgacacctaccccgacactgcatcgacgactggagcgacttcagtcggtgcttcatcgccaacttccaatctctctccaacaaaccagcgcagccatgggacctcaaatccatcaagcgccgaggggacgagactctccggtcatacctcaaaagatttcagatcatgagaaatcgtatccccgaggttgcggaagcaacagtaatcgaggacttctaccggggatccagtgactcagccttcatccgagccatactgcaaaaggcaccaactacctccgagcagctattccggga

SEQ ID NO: 14273 - DNA, 459 bp, Zea Mays
ctggagactaggtttctttatctctaccaaatctttttatcaacttcctaaatagatatttaggataacttttttaggtaactactatagatgctcttatcatggtgccattgttggtgcttggtaccgacgacacactatggggtataccatacggtgcttttgggaggacagtgataacgatcgcacctcgatggtttatgccaaacacgatggaacacaacagattatacaggttcgtgccacctagatgcataataccctacgtcctatgtgttttctggtccccacttcgaccccaacattggctccgcttcttacgcgcacctgtccccaccctcgtccatgccccatcctcctcctccacctgctcatcacacatcccatctgcccatcgagataggaggacctcatgtgcccgcttgcgctgctccacggccaagtcactctcctcgccac

SEQ ID NO: 14274 - DNA, 474 bp, Zea Mays
cagctcaacagtgcttgaaagtaatcagagggtccgtgctcttgctgaagcacgagcctcatgattgtaagagtcattcttttactatcactgctgcatcagggtcgctctacctcctcgcaagtatttactatcaattatatattttaaaaaaccaaatgaacaaacaaaccgaaatttcaggcaacaccccctatttcagattgtgcaagcataatgaaacagatcaccaaaagaattcatagaaaaagaagggagagggattcaagatcctagaggattggtgcatctcaaatcgaatcgagaggaacaaggtcgcaacgcaaagaaaggcgcaagcagagatgagcagaccggagggaaaaacaggagacgaatgctggcggcggacgcgaatgctgactggactgccatggcttcctgaaaagctctgttgttgatttatagcacgagcctagggttaggagcatcccc

SEQ ID NO: 14275 - DNA, 491 bp, Zea Mays
ctaggagaaatcgtcgcctcacccaaaggcacaatttctgcatcacccgaacctgtctcggacaggaggacagccctgagcccagcctcaagcaaaggccgcgtgaaccgtggagatgtgcacattaaatgcgacgattcagatatctactccatgtaacaccgcagtaaaacaaaggacgatggaactgcggtcccatctactttcaccaactacgatgacgcatgcccacgagtaacggacactgctcccccatgccggctactgtcctcgaacaactctggatgggacgtgcacgtgcctaggcacaacctcaccctagggagagaacaccgtctcgaccgaagacgacttcagcctcgagagaaaactctgcctcgcccgagctcggcctcggccaactgccctgcagcaactccccgcgaatctcataggaggccactctagcgaatgttctaaccactcccttcatgactgcatgccccatcata

SEQ ID NO: 14276 - DNA, 558 bp, Zea Mays
gacgatatggtcgccctcgacggccgcctgtacattcccctggtgtcgtcgctgctgcaggagatcttggccgcagtcaacaacgatggtcataagggcattcatcgccccctccacaggctccggcgggatttccattttcccaacatgcgtcgcttggtgtaggatttcgtgaaggcctgcgtcacctgtcagcagtacaagttcgaccacctcaggccagccggtttgttgtagccactatcggttccgtctggtgtgtgggctgacatcggcatcaacttcatcgaggcgctgcccaaggtgcaaagcaagacaatcatcctctctctcgtggattgcttcagcaagtactgccatttcattcccctggcgcacccctacaccgccgacgtcgctcacgccttcttcaccgacatcgttcacctccatggtgttctgcagcccatcgtctcggaccgcgatccagtgttcacctcggcgttctggcaggaactcatgcggctcattgggacgaagctctacatgtcgttcgcctttcacccgcagacagatggc

SEQ ID NO: 14277 - DNA, 433 bp, Zea Mays
ggacggaggagtcctcagacgaaggcttagattattttgttgcgttagatgtggctgcagcggagccttcgccgcgcgtggtgggttctgaggggctcccgggtgcgagtactgtgtataggcggcaaaggggggtggcgaaacggagagtgagtgagttgccgttaagtggtaggcgtcatcgtagtgagatggagagtggccgtcttcgcgtggacgggactggtaaacgggaattgttgtcctcgccgattgaggcgagtgtaggtgaaggggagctgcgaaatatttttgagggtgaggagttgaggataatgttgttcaactatagggagatgggtatcatcccgaaggttgagccaatgtaatatatggtgccctcgatgtgtgtatgtaaccgtaatttgtatgataaggctacgcgccttcgttg

SEQ ID NO: 14278 - DNA, 500 bp, Zea Mays
ccagtgctcgaatcacctcaagtcctataaacgatttgtagagtatacatcaaggaacaaatcttctgcagtgatccgggttcgattttacaaggaaaacgccaaaaatgggcgtccaaagtcgtcctgccatcacctgccagcacactgtcctgttctgagctctgcaggttgccgcccgcgtccaccaatggctgcagcgagcaccccctttaaaaatggcagcacctgccctgctctcttcctcccccacgccactattcgtcttgctcgccccctgctcggagcctctccttatccccacaccaatacaagtccgagagcagcagccctttctcctcccatggcgcctccttctcccatggctgctggagccggcgcccagctcctgtccatggccgagggcccgcccgaccacgtctcagcagggctcgcctcctccccaagtgctcggctgcaccatggccaaactcgagctctcgatccccagccgtcacctt

SEQ ID NO: 14279 - DNA, 597 bp, Zea Mays
cactggccagggaccatgccaagtgtatttaggccagctctaccccccacccctgtgccatctcttatgcagcggtgagcgcgcaaacggagaagccagatgtgctgagatccaccgccgccacagactcgagctgcgtccactgctctgggcgcgtcgtcgatccgccgaggccgaagcgtcaggcgaaatcggggggtgtcgtgggtcgtcgtgggcatcccatgccgattgctcgcgtggggacaggttttctcaccaggatttatggctccatcatggatctggtgtccgctgcggatgggacactttgggctacgagctccggtgagcttctcctgttcctcctccccgtggttcctgtttttcttctatacgtaccaatgcggaggttgggtaacctgggaaccatatatgccttgctccagtgatcctccttcatgggtgcgtgggtgcactgctcgggctccgccgagattcgtggcaagaaggaggacccctggccgtccaatcgcctgtgggtggtttggatcagaatggggtatacctgtgcgccaaataaaatcggagcccttggatcggtggcgtgcgtccggg

SEQ ID NO: 14280 - DNA, 491 bp, Zea Mays
gccgagtgccctaatttctttttcttcgcctaaattcaaaccaagcacacacttcactcatattgacctatctaaacctattcgtgaagtatcggctcatttccatatcatctcgtgcctcatttcaaattccaaacctcctatgtcactatttgtctgtcaaacgtcattttcacgtcgtttgacttcttgatcatcccgtctcgtgccatgtctctctgtgtatgtatttattcacatttcatatgcttatgactatgtgactaatacgtgcccacctcttctgtcatttcagtgaccgtgtgtgatcgtgtgccgtctcccgtcctgcctggatcgtcacctctcgtgtgagccttccaggtagacatctcactctttgctaaatctatcggttacgtttgctctatgcttagtctctctatctcatttgcagactttagttcaggatgccgcgcacgaagaatgcgtcggcgtcagggggtggcgat

SEQ ID NO: 14281 - DNA, 392 bp, Zea Mays
tggggatgctctaacactaaaggcgacagacaccaatgagtggaaggcattgtgtgggtagagatcgagttgggagcatgcatgcatggtattgatcgagtgatggcggtgggcttgaagctacccaataataaggacacaaacacaagagatgtagatgcatgcatatgtaaataaaggttggcagacatgtcgtcgaactaacgttaattaagggggtcgggaaaggatgtaccagtgtgacgtgtacatgtggtgttgggcgatgagcactgcatgccgcagctgctggtagttagctagctagcatatataggtaccacatgcatatgcatggttcatcctttatagtagccgtaccgtgttagttagcaatcattggatcggactgg

SEQ ID NO: 14282 - DNA, 383 bp, Zea Mays
ttgagaagaaagagcacttagaccagcgagatgcggtcatcacagaatttcatgagaaattgaaagcctataatgcgatgctggagaagcagtgggatgagtagaccgcgactgaggcggcactgtagaagctgcagcaggagcttgatgacaggactagcaacatctctctcgccgaagaaaacctcaaggcgaaggatgcctccctggaggagtgggcgatggatctcatccaacaggggaaggacctcgcctagagggaggagatgtgggaaaggcgggacaagttgctggccgagcacaagcttgaggcggaggtgaaggagaagaaactggaggagaaagagcgaacgctggaggagcgggtccgtcggttccaggcg

SEQ ID NO: 14283 - DNA, 407 bp, Zea Mays
tagggatttaagtgtaaacttttgtttctgtgatactgaacctcggttgctgcgcaagtgccgacgtttgggcctgcgcaagcaaccgctgctgacaatactgattttgtggcggcctcaaccgtagtgcctgttgataatagtttgtttgtctctgtgtctgagtgttttgagtctgatggtgaatctgggagttcgtttccttggatggaggagtcctcggatgaaggcttggattattttgttgcgttggatgtggctgcggcggagacttcgccgcgtgtggagggtgccggggatcttccaagtgtgagtactgggtgtaggcagcgaagggtggtgggaaaacatagtgtgggtgaattttcacgaagtggtaggcaccgtcgtatgaggatggagcgtgg

SEQ ID NO: 14284 - DNA, 367 bp, Zea Mays
ccggctgtttgcatgggctataaaatggaccaccacctcaatcgatagggacggtcgggtcacaatcgccactaccctacccactagtacatactagagcagccgatggcctcctcctctgtttcgctgctcgtcacgatcatgctgctgctgccgccgtcacatgcatgctcctcgctgagttgcaggcttgacttcaccagcgtggcgctgctctcctgctaggagacggccccacaaaaccctactgcctcatgctgcgacaccctcctcttttccatcgacatctgaccaattcatgaactagaaaaaggtctttgttgcctatgtgtgtacatggtttcaaggaacactacctttgacctgc

SEQ ID NO: 14285 - DNA, 679 bp, Zea Mays
tcgaggacttcggcagccttgacagctcgatgacccggacagatggcgcggaggcgggagctgaagggcactcagcgcctcaagctggacctggtgaagaccctgcagcggcatctgctccagcgctggtggaagggacacattagggttgttgggttttgggtttctttttgtgatactgaaggtcagttgctgcgtaggttctgacgtccgggcctgcgcaagcatcccccgatgatgttgatactaatattttgacggctgcgaatgcaacaccttttaatggaaatgtgtctgagggttctgaacctgggtcatggtcctcggacggggatgattttggtagccctttttcgtggattgaggagtcttctgaggaggatttagactactttgctgcgttggatttggccgcattggagtctccgcagcaacctgatgcgcgcgaagtgtctgccaccctggacagggcgatagtcgaagaaccacgcaggcgaaaagtggtgttgaaacagagcattggcaggacgtcacaaagtgggagacgtcgccgaatgggtatggagcggtcccgtcttcgactagatcggggtagtcaacgcgatcttctgtcctcgacgtccgggacgtgtattggggagggggacttgcgaaatctatttgagggcgaagagttaag

SEQ ID NO: 14286 - DNA, 855 bp, Zea Mays
gatcattacaacaaagttttagcccttgcattagggaacaaattctttataccgagttggacctagtgctgttcagaaattggagtaaaacacccccaaagtcgggctggcaggcggttgcaatggaaattcaggatgaacagtgactgcaatagatctatggttccgtgaacccaacgccggcgatctcccgccatgattcgcactcacctgagaggttcgtgcccagtggagagtggaaaactttggataggttcactgctttgcggattgagccaggggggtaaaacatctggccggcgtgcgacactcgcttgagtactccatgccgcggtgtcattggcgaccgagttgtccctcattgtgtctccttattacgtggtgtccaagcgcttgtgtcgtactctcatggccgtagatacctagccatgccattgttcctttaagaccccatcgagagtgacggtgttgagcttagtgccttccggtatggtcagtactgcgtgaaagaaaccaaaaattcacagtaccctcacctctttgacccaaattggccatgcaccatgaactagtgatcccttacgattgtatagctggagtttgaccgcctatcttcgcctgagttctccaccatgttcaagcgatctcgtcggaccctgccacacgcgctcacctctaccgtggctagtgctctctgaggtaaccatggtagatcctgtgggtgttttgagttcctttacatgtcgtgatgctcatcggcttgcccggttgaactccaccgtcgtcacaggattcctagaacaacgcgccaccggtgcggaacgctgtcgtggacactctccccgtcgacccgct

SEQ ID NO: 14287 - DNA, 363 bp, Zea Mays
atcccgcctcggcccattaagtgcgcgcccctggcccaactgaccacctcgcgccagtcatccacatcatgcactggcaggcgggtcccacccgcaagtctcacgtatgatgccactggcactgcttgtggacccgtgctgtcattctcacctgcgctcggacactgatcaccggggccgccttgacagtttgtccttcctccccaaaacgcgaatccgcgggcagcgcacaacaaactcaaccaggaatcacggggttcgttcactggaagatcttcccatgggctataaaacctgacctccgtgctcccctctactcatcacaacaaaaccaagaagctagaagctctcgtcgccatagct

SEQ ID NO: 14288 - DNA, 857 bp, Zea Mays
atctcatccgtcgagtggccatctaacggcggaatggttgtcttcctatccggcgccagaccgagttcggcagtcgcccacccgcggcggcgaccacaccggagaatcccatctcgacgcatagaacgatattccttagtcgtgtggcattgaagtgatgtagaatcgagggctattcatggaagtgagacttacccgcagaattgcggtagaagtcactggccactgctcggattgctccgcggcgacgcaaggagtaccacgagcaattctcgccacaccgagggtccgcgacacgataactcccagctctcgatctacacctccgccggttcgccggagatcaccccgtggctcccgagctatactggcagcaaggaatcacgacggcgcgcggcagattgtggagcaaaatttaggtgagggtcgtgcgatgggaaaataagggcagggcggccatagtgtccatctttaccccccatgcgccccgcaacaacctcccccgctgagtgaccgcctttatcgcgcgcatagttgtgcgaccccatggagaaggtggctctcccgatgggtgagactgacaccaatggcccacacaccagtggctaggggcatgaggtccacacgctagggattcgtggcatgggcgagcgatgcggacaagcggtctctgacaaggtgggacccaatcaccgtactcacatccggtgcgcgcgagtgcgagtggccgacacagaggacccacctattggcgcagtgctacagtggctagagcgcgcgcatgagttgggccatggcgatgggttcatggggctgaagtaggagtagcgtcccaacactagatttccttatctttt

SEQ ID NO: 14289 - DNA, 754 bp, Zea Mays
ggcaaagggaaggggtttgctaggttggtgtggagctccgtggtgggtgactcgctcatcaagtacgccaggctgatcagggacgacctcaaccagtggctggagctgcaggagctgacccagagcatcggcaatgtcatagcgtcgactgccagaagcacgccgtcgttggtgagggttaagtcggagcatggataccggtgtccaagaagtgcagctatgtcagggagctgttggagaggaatggggctcatcgagtcgtcctcatagtcggtctctctggtatcgggaagtcatgcctcgcacggcagattgcttctgatccgccacttagtttcgtggatggtgcgattgagattggttttgggaggtggtgcagcaggggcagcatgtaatgggagcagaagcgaataccataagcgccttgctaggaagatctgcacgttccttgtgcagatcggctccatgactctcaaggaggagactggaatagatcttgatgatgtctgttgcttgctccagacggcattggtcggaagaagcatgctgatcctacttgatgatgtttgggagcaagacattgttgatcgcttcacaagactttatgataatgattgccggtatctcgtgacaacaagggatgaagctatctacgagatagcagaagctgaaaaggtagaaatatgtaaagacgacatcaaggagatcagcacggaaattcttctctatcacagccttctcagtgatggagagc

SEQ ID NO: 14290 - DNA, 543 bp, Zea Mays
gcccaccggtcagagagtgcatgggataaggaccggactactggggaccatcggtcaacgagggagtaagggaaccgtgcccctggaagcgcctgcccctggataaaccctgaggcaccgagcctgaggtcgagcgtggcgtagctagagaggggactcaggcgaaccggagggaagccactcgagtggattcgtcgtctagcccaaggctggcccgccataagtggtcgtccacattaattacgcctggcaccaagctacagtagagggtcgatctgcctcccactcatgacatgcgaagcccctcggcctacaactcactcatggcatatcgaggctaggcctaagcgcgtagtccatctacagagcccgcaacgcgacgagccacgccgagacctaggctactgaagccaaaggtagacgtggcacaaaggtagtaatgatggcgctagggcctcgcgtcgcccacaccgtccgccgtaatgagcacaagcagagacaactaggcgacctagacgcatacagacaacactgcctcaccag

SEQ ID NO: 14291 - DNA, 496 bp, Zea Mays
gatcggagggagctggggacgaacggaagaggacaagtttactcggagtatctcgttaagtacaagcaatgtgagcacggggcttagaaaagggttgggactgtaaacaatctggtacgctaaatataacattttcaatcctccgaaaaccgtccaacaacatctgctacttcttcgctaaaatatagcgcttgtctttcatccgctacatttaccgatttactgtgcgtcctctatccatcgaatcctccagcccactgtcgaagggaggacgagcgcctcgacgccggtcgtcggagttttggattggcactcgtcggggacgttgaacacacacacgaatcgtcggagacgagaagtagcacacacggcaaatcgtaggagatgcgaagcagctcgcgcgacgaatcgctagggacgaggatgagctcgcgtggcagatcgacggggaggagcacgagtgcgtgggcccgtcgacgacgaggacgaccccgca

SEQ ID NO: 14292 - DNA, 479 bp, Zea Mays
aacacccccgggacacacacacagtcacacacacataaaaaaaaaaaaatcccccctcgcctcggattcgctcgcgcccccgcccgccgacgcaacagcgaggtacgaagcgcgggcggatgggcagtatctcagacgggccgccgaaccccgcccagctctgcaccccctcgtttttctcgatcgattcttgggtttctgacgggcgggaatgaatgcaggtcgttccgttccaggcttcggacggaggcggggtgacgtaaggaggtgcgcgggaggatccgttcgcgcccggaggaccgggatccggcgcccgtcgtcgtcgacgcccatgtcgggccacctcgatcgcttcgcgcggccatgtgagttccgaggctcctcctaatcctcctcctctgaccatctcgcggattcgaggctgctcgctgctgggttcggaatccctgctcgatcggccgcaataggcgtagggcgac

SEQ ID NO: 14293 - DNA, 470 bp, Zea Mays
tgagcatgttgcaccgtcttaagttgttgccgacttaagccgattgctccgtttagcagggcatagtggtcaccccgagttaagtaagcgcgagcatgttgcaccgtcttaagtcgttgccgacttaaaccgattactccgttggcagggcatagtggtcaccccgagttaagtaagcatgagcatgttgcaccgtcttaagtcgttgccgacttaagccgattgctccgtttagcagggcatagtggtcaccccgagttaagtaagcgcgagcatgttgcaccgtcttaagtcgctgccgacttaagccgattgctccattggcagggcatagtggtcaccccgagttaagtaagtgtgagcatgttgcaccgtcttaagtcgttgccgacttaagccgattgctccgtttagcagggcatagtggtcaccccgagttaagtaagcgtgagcatgttccaccgtcttaa

SEQ ID NO: 14294 - DNA, 391 bp, Zea Mays
gctatggtcaatcacgctggcatcaccgtcgttcgccgttatccggctaggctacgtgccttaacactttactatgtcgcgctgagtcaccataaaccgccccatggtcctggctcgtcgccggtgggtctgccacggtgaaggccacgaatcaccgcgctagtgactcatttcttctccgaccgccaccgcgtccaacccaaattcactagccaccgctcaagcatgctataaattgagtgcacccgcggctccgttaggtaattatgcatccattgcaccagtacttgcctcggattatccaccaaagcctcccaatttctctcttcccccaatttggttctccgcgccgccgtgtgttggctcactatggtcagcgaattccaggtct

SEQ ID NO: 14295 - DNA, 1005 bp, Zea Mays
aaaaccgccagctaaaatatgcttgctgcggtaatatccccagtcccattatcatattccaaattaattgggatagaccacccaaaaagagcagcaagagcctgcacatgactacgagacagagtatgcttgaagagcttggcgtagtcgtctaaagcttgacggctgaattcttcattgtctttaataatattaagagccaccatagcttgtttcttagacctttttccccaatcctgaattttaaattcaaccccaacccccgccacacgtcggctgcgccttggaaccgccaggggggtagaggactgacgtctgacagattttgggactggtaagacgcgtgtgatctggtttgacagtctgctgatgaattgctcttgagcactaatctccacagaatcttgtgttgctggaaggtcatcctcagatggaccaaccaactcagcatcaacgtctaaggcaatagcctccgacggagccgcgtgtgttgctgccacatctgatagggaggaaggtagcgttccagacggaattgccaacacagcatcaacatctgagaggatccttagacggaaccgtgtcagcagctgccacgtctgagggggagggaggaagccagtgacaggattgggagctccaaccccttccaaagtcaggacgttcttgagcctttgacgagagtaaactttcagttgcttcgccttcacaggtgaagtaaggaccttgtcatcagtcttctctatcagcctaggagacaaggtccccccatcggattccaatgttctcattagatctgatactgccatctccgagctaatgttccgctgctgcatgttctcatctcttggacccaaacgctcatgaactgaaagacgtcttgaatgaccatcttccccccccccctccacgacgcgaatggggaggtcttgaaaaaggagatccctggtgcacattcccaaaaccatcatcgcccgaagtaatagcccgaaggttaggatcgga

SEQ ID NO: 14296 - DNA, 1694 bp, Zea Mays
gcaggactgcttggaccatctggggcggtcgagtgctgcactggtgggcgacacgtgaagacctggccgaaccgttgtggcacagacggggcgccgagcggtgctgatgcaggagtgccggggacaccaggagagtcattgggagaccctggtgaggtcggcgcgactggggtagaggaaccaggcaacactaggggcgtacgaacgtcgggtactgcaggcgcgtcgagagcagcgtttggagctgttggggcactgggggcagtggcgcctggtactgcagagatgccgggagcagttgcatgtcctggagaaaacaaaagcggtgggcctataggtggcggtaccaggttagtgggaatgttgtccagaaaatcgaactcgtgggaggtgacagtgggtgactgttgggcaaaggggaaggtggactcattgaaaacaacgtgacgggaaagatgacatggttcgagagaagatcaagacaccggtatcgtttgtggtgaggtgagtagccaagaaagacacacttagcagagcggtgatcaagtttgtggctagtggtggcgaataggttggtataacaagtgcaaccgaagacgcgaaggtgttcgtaggatggcactgttttgaagagggcgaagtgcggggtggagaaatgaagagtcttggtgggtagaatgttaagaagtgttgctgtgtggagagcttcaacccagaaggttggtggaatgttggcctgaaatagaagtgagcgaatggtgttattggtagtacgaatgatgcgctcagctttaccgttctgaggtgaggtgtaggggcaggacatacggaggacaccatgggtgaggaagaacgtgcaggagctggagttgtcgaactcaagtccgttgtcacattgcacaactttaatggtgacaccaacctatgttttcacataggcgaaaaactgagtgagtcgggaaagcataagatttcaggtttaaaggaaaagtccataagtagtgggagcaatcatcaagaacaactaagtaatatttgtagcctgagacacttaaaatgggggacatccacagatcacaatgaatgagatcgaaattgttaaccgcacgagaagtagacgtacggaatggaagacgaacatgacgactcaactgacagacatgacataaagtggagctagcatccttattacacatgcgaatggctgatgtgagcttggatagggtctcgtgaccagggtgaccaagacggcgatgccaaagtgatggagtggagcttgcgacgaagctgtgtgtagcagggaggcacagggggtatagtggtctggaactattgcacctgacgatcacgttccgagacagcagatccttcacagaccaaccatagggatcaaattcaatggaacatttattatctgtggtagactggcgaacagagaccaggttcttaataagtttaggtgaaacaagaacattgttgagatgtaaaaaaccatgtaaagtggtggagccaatggaaagattggaagaagggagctgtcaccgacaataatggaggaaggtgcagtaagagagggatttgaagtgtttgatagggtaccggcgttggaggtcatgtgggaggttgcacctgtgtcgaagtactagtcggtttgctggggcggagtcagggacacagtgttgaaggctgaggca

SEQ ID NO: 14297 - DNA, 1252 bp, Zea Mays
agaagatgtggcgcattctggaccggctagaccaccaactcgagaattgggaggtgggacaacacagactgcagggccaggcggaactggttactgcgaggaagacggaggagcatggtagtcacaactgtgttccagtgatacttggaggtaccaatttctcagtgttcggtgaaaagtctgctgagaagatggtatggggtagggtatttggttcagattcacatggcctagtgcaacagctagctcatggggtaggtgatcagtggcacaataattgtgagcaggatgttgaacctaatgtcccatggatgtttgttggaatgccacagcaagcaagtacatacccagtgtctagtgaaatgggtcttacagtggcatgggacggggagatgcaagttgaaactcacacacatgagggattactgcagcaacttgctcaaggtggagaagccttagaagaattggctgagaagaagggtgatgttgtagatgagaccagcaagtctgacccaccaagtatggcagttgctatggttatgaatggtagaagcatggaggggcttcttcctgctagtgttatcagtgtgcttgaggaaagccctgagaaggagcagaatgctgaaaatgttgatgctactagtgctggtggtatcctttctcaagatttggtttcagaatcaacccatgaaactaatggtgcaggcgagattataagtgcccctaaggttgatgatgaggattgggagatactacaggttagagaaatcagtgaagaagaggtggaagattactttgtggtatctaaagaaggggctgtggatgaggtgatgcaggttgagttagcagatggtgggactggggaagaggaaatgctctgtggaaaagaagtagcagggaatttggtgcaggtgatagttatgagtgcagtaaggtggatttgtgatggtcaaggtttgtccgatgaaattcttagtaaaattcagtgggatgaggagttttcatctaacctgagtatgcgcagaggtttacttagagatatggttgtggaaaggagttatctcaatgttttccattcaggtgaaggggtgctgatcataacaccatcccaggggtaccaccctgaagagatgctagatctcagtttggttgatactgacatcttatgcattgtgaagcttctaaaggttaacaatagcttgctacttgaagcacatgggtctggttttgtgttgattttttatgggaggca

SEQ ID NO: 14298 - DNA, 633 bp, Zea Mays
cgccactccggctagccgcgatacttctcccctttctcaccgccctcagattagaatctcatcgccgttgtgccatcgtcgttgtccgccgcatgtctctggcgatctaccgcatcaccgtgactcacccttgctccccgttgatcgccggagcaattgccacggcgctggacacccagccactgcgccagtactcttcttcctcctgcgatcgccgcgtgtccccactggaattcccgaccaccgccaatgatccctataaattaagcccgccgcgagctccgtaaggtagtcaagtaacccgtacaccaactcacgtctcgaatcatctttcagagatcttcaatttgggacttcccccaaatccaccaagaacaccgtgcggtgtgtgctcaccgtggccagcactgtttaggtctgttcataccatcttcttccccgtttacgtactctcatgtatctacgatgctcgccgacccatgcaatttagttaggaaccctctgatcgccgggaacacgactgtccatccgcaacactctcggtcacagtggccagagcaaaccatttggccatagatgaaattgtgttgggggaaatggtcagggtaggtcatatttcgtgtccgccgctcg

SEQ ID NO: 14299 - DNA, 850 bp, Zea Mays
gttggtcgtgtgccatatggccaaggaccacatgctagtggttttggttcccacttccctagcagaccatggttttccttcttgtggtgatcgccaccccctttggaatcagggatgtttggtgctttccctaacacatttcagggaaattatcgcaacaccagtttccatatcagtatttcattttctcaccccatgtctttctactgaagcaggatgaaggcctagagagcacgtggctcatggattctagttgtttgccccacatgactggaggctccaaatggttctttagctttgaccacttgattagttaggaatacatcatatttggggataagtcgagaggtaaggttgtctctcgtggtaccatttgggtgaacgagagctttgtgctcaaggatattgctttggtttcaaatttgcatttcaatctactttctgttttgcaactccttgatgacgactatgaagtgcgctttaatagggatctttctcatgttttggatgcaaagggagatcttgtttgctagatttctccgtttggtcgagtttttagctgatttttcccattcttctggcccctctcgatgtcttttcgcaggatcttcctatctgatttggaagtggcatagaaggttgggtcattcgagctttgatcttttcagtcgactgaggtaacttggccttatccatggattgcacaaattgaagtttgagaaagatcttgtctgtcaccctttttgtcatggcaagatggttgctgcttcccactccccggtcaccaaggttatgaccttgcaacccaaggaattgcttcatatggacatggttggtccagctcgagttt

SEQ ID NO: 14300 - DNA, 957 bp, Zea Mays
ccgtcatccctcctcctccgttgtcgtgaaccacctccctgtaagtgccgcagccatgacagatttcttccccacgacgcggactcaccgtggccccataaatgcgcactaccatactcgtgctcgaaggacaccatcgccggccaccacaacaaagtgaggggagctcgggatccaccgtggtagattagcgtgcgtgctggtgttacgcctcaggcaggtgggcggtgtgttcattctggactgccgctcacgtacgttgtcaccattggctaggccagggcgtgggtgactgggaattcatcgtcgaactccaaccagagcgttcggtccgtcgctcgccgtggtcgggctcgtctgcgacaaattgtgtggtacgtgaccgttcgttgcattcgtcagatgtagggcatcatgtagcacccttcaatttagtgttttgcgcgtagtaccgagaacttgggtattccgaccatggctccgctggggtgggatgtcatgtcgccgcatctggccagtctgggggggggtaaagagagtctccgccgtccgattcgtaacatacgacctagattagtaggtgtcagtcggtgtgatcgattcaatgccggacgtagatctctggctcgatgattgtgattaggagatcgtgtaccgcttcgccgagtcaatccgtgtcgtaggatggtgatggggcagacgagcttacactgtatttcattaaaccgtgatcgtcgatcttagatctgatggtcacacatgtttaccggttcgcttatgatggcaatctaatcgggagcgctcatccgggatccatcggacgaaattgaatcatattgcttcgacccccactttgtagaaagaccctcggagaaatcactaaacaacccgcggtcctacgcagggcgacctgagtctagggatttatcgcactagggcccctgcacttctcaatat

SEQ ID NO: 14301 - DNA, 698 bp, Zea Mays
tcgatgaagcctctacacctctgttttgtcttggagaagcagtccattggttaagaagttgcaatacgacgctctttggtcgtctaccgggttggttgggaggtccgttcattccaaggcagcggtcagatccagggtcggtgggcctgtgtctgagtgaagcttgcctcttggctaggccccgtcgtatcgaatagttgtcctaaaaaggctagtcatgagaacccccatcaggacagttgtttgtcccgacaccatttttgcgagggcgtctgccgcctcgttatcttgccgaggaatgtgatttagttcgaggccatcgaatcgatcctctagccgttgtacctcctgacagtatgtcgccatcttagggttgtgatattctgactacttcattacttttcctacaacgagcttagaatcccgtcggacgcctaaacgtcaaatgcccaactctatggcaatgcataggtcgttcatgagggcttcatactcggccacgttgttagaggcttaaaaatggagtcgcacatcgtatcacaattcttccctcgatggcgacataaaaacgaggccaccatcggctgcctcctttgttagcgacccatcaaagtgcatgatccaacatttctaggtggtcgacgctagctccatttgggtctcggtccactccgcgatgaagttggcaaggacttgtg

SEQ ID NO: 14302 - DNA, 678 bp, Zea Mays
agaggaaaagcagctgcggtgttgtcatcgcccattgtttcctcttttcatcgcccatcagttcgtgtttttggatatattttaaacatttgccagtactcttttcttcttttaaaataaaaaggctgtgttcgtcatatcatgaagcaatttgtcatgttattctttctgataattatggttggtggtcggccaaaggatcaataaggaataaagaatcctactcgttatatgctagccatgggggtgggttctgtacttcctgtgcaggtgtacctggggtttgcagttggttgtcttttctggtcgctcaggtactgtatcgtgcaattattggttttggtatatcaaggtacttgaattgtgctaaccatagagagcggtgggagccctattctgtcctacttggatgtaatgccacttcccctagttttctctctctcttgtttcagctatccttgtcatgatgtgtccgcgttggtcctagttcctgcaatgcgaatttgtcatgttcgtgtggtatattgggtgaccttatccttggctgtctggtctacggtgctgattatttaatgtcgttgagctgcattttggggttcatcgcccaagttctttggttttattgtcatgtttttgttgaaacctttgtagcagagctcaaagctggttttttttttt

SEQ ID NO: 14303 - DNA, 859 bp, Zea Mays
catggccgtcgacgactacctcgtctagctaccaggaggacataaccgaccaacggtgacctaggaacactcgccaatttggcatgaacacactgagaacggtctgcccacgtgcacgccggaaaccgtgaccacgagctcgcgttcccgttcaaccctggccgaattgaccaaacggtggccacgatgagcatccagtgcacaccaagttgcgaaaacggcacttgagaggcgtagaaccttaccagagtgggctggccacggacgagctatccacagtggcttagagacccgagttgggggaaaatggtgtcgcggcggctctgggtgaaattgggggtggagattggggctacacggccgttaggaactgtagtttcatcatgcacactcaatttgagaggaggggtggaggctgggagaatttgggcttggatcaacgcattgggtggaggtgtgcataccccgccgtggatcatggtggtatttatagccacggcggctcgactagcgatctccggccacagatagattcgttagcgcatgcctaccacgtcggtaagggacacagtgaggaagatcgaggcatgggtgacaccgtggcaaaagtttaatcgagtcacggtggtcgccggtgactaactccggccacgcgtggctcggcccgcggaatgatgccacgtactaagttactcccaggcgatcaaatcctcaccgattcatccaagttcatccaaatcaacagtgccgtagatcttttgatgttcttcagattttgagcgtattggatcttcaggacttatctgaaccggcaaccttctacccaccatatctctagatttttgttaagaacagagca

SEQ ID NO: 14304 - DNA, 329 bp, Zea Mays
cggaagatgtttctgacgaaggtgcacctaccgctgaagctgagcaggttggtgctgaggaaggtgaatctgaagatgattacagtgccctgccatctaaacccaaccacctggagtttgggaggtccactattaccgaagatgttatgcctaagttgatgaagctaggttatttcagtgaagccaaaaagaagctgattcgctttggcggagaggaaattactccgaagccagaaaaggatgaggtggtagtctttaaaagcttctttaaagcaggattaagatttcctttgaatgagatgatagcggatgttttggagaagtttggg

SEQ ID NO: 14305 - DNA, 379 bp, Zea Mays
gctcggacagagtccaggggcaagctggagcccaagtgggagggccctttcattgtcaagacaaaggcctcccccagtgcttacaggctcgcaacgccaaacggcgaagacctggagcactactggaacatcgacaatctccgcaaattttttgtttgactcatcagggccgattcgcccttgtaattcgcaaaaacaattttattctggcccgcactcttttcctcccggggggtgaggtttttaacgaggcggagtcatgtaatatacaagcgaaaaatcccccgcaaaaacctgcgtcgaaaaaagaccgcgccaacggtcttcgacattcgaccaataaaaagtcaccgcgaggctcagcgccggccaccctcgc

SEQ ID NO: 14306 - DNA, 633 bp, Zea Mays
tcacacaccacacggatgtcttgcacccgcaaggcagcctcactctccatcaccatggagaaaaagattcccgacttccttgaccgacgatccggaagcaattggacaacaaggataatgtgaactttggagaacttcccaagaatagcacctccctacccgacgacgcctgcaataacactatcttccaaaaacaggatataactgcacgatactaagataaccaatccatacccaagataacatcaaatgcccccaaggaaatcaccacaagattagctgaaaagacctcatcagcaagaatgcgaaacaaccctgacatactgaacaactaataatggagccattagcggaactgaccacaattgggtgacccatcctctgcaccgaaagaccagcacgcgacacaaagttctctaaaacaaacgaatagctagcgctagagtcaaaaagagcatgggcaacaaacgaatcaactgagaccgtacctgtcaccacgtctccctgctctctgccatccgcagagggtagcacatatgctctggaaatacccgcaaaagaggaagctcccagagtgaagttaacagaagaaccccacggagtcgctggatgaggcagacacagagctccaaa

SEQ ID NO: 14307 - DNA, 688 bp, Zea Mays
cgccaagtcgaactgtcgacgtagatgttgcgccgtcgaattcctcacgcgttcgtcgccgacacacatggttttgatggcgttccatgcctccttcgtcgttccttgttggcgatggtcgaaaccatctccggtgggaccgcgcttgccaatacgttaagtgccatcatgtcgtcgtgtggatcagcacagcctggatcgaccgccgcccacaatgtcctgagctcctagccttgagcttcactttcatcagcgcggcccagtcagagtaatttgtcttggtgagcgtggggaagctagtcccgccgctgacctcatgaattaccggctgcacgacagcgtcaccgccagtgtcggtgtcgttcctcggttgctgagacatggcccactcaatcgcgattccaccgtcggtaccgcacgacgatcgaaccccggttcaaaaccggctccgataccacgtgtcagacctcgccggagactcaaccttctgttgccggcaagctcccctacagctttccacgaacacactctgattttggtgctacaaaagaactagcagcttttctgactctatttcactgaatataaaaggactcaacacagtacgtgaccaatgtccacgcgagaagctcggcacgcccgtccactacgtgtgccatcccacacgtcaagacatgccagccacaac

SEQ ID NO: 14308 - DNA, 578 bp, Zea Mays
gcagagtttgccgccctcggcctccaagcgggcgccaagaacctgatccagacgtcggaggcagtcaacagcggaatctagtattgggagcgcgtcggagatggacgctggccgcaccaatgccgggatgggactcatccccaacggtactagcgctgtgcttgcctcgctagcccaagcggcgaagcgctgagctccggcgcgttgctctgcccggaggtcgtcaagtgtcttcctcaacacctccactgcctgggggcccggggccgactgcgtcgcctacgctgcctggaactggcggacctgcccctccagcgcctgcactttcccttccagacgcttcactttctcctctgcctcgagctcaagctcatccagcagcttgttccgccttgcccacatctcctctctaaaggcgaggtccttctcctgccaagtgaggtcagtcgttcgtttcgctagggaggcttccctcgccttgaggtttccctcaacccgagcaatatcactggccttgtcggagagttcctgctgcagcttctgcagcttcgcctcagccgcagcttgcttgtcccgct

SEQ ID NO: 14309 - DNA, 730 bp, Zea Mays
gaatattctgattgatttgcatggaattacactgagatgccagaattaagccgagagatagtagagcatcaactgcctactaagtccggtttcagaccgttcaagcaggaagctagaacatttcgtccagacctactaccacgaataaaggacgaaattcaccggctgctagaagctaattttattagaccttgcagatacgcagaatgggtctccaatattgtgtcggtggaaaagaaagaatcaggtaagctcagagtatgaattgattttcgcaatttgaatagagcaactcctaaagatgaatatcccaagcccatagccgacacgttgatcaataatgcgtcaggaaatagaattattagctttcttgacggtaatgtccgatataatcagattttcatggccgaagaatatgcgtctaaaacggcctttatatgtccaggcttcattggtttatttgagtgggttgtcatgacatttggtctaaaaatgttggtgctacttatcagaggtctatgaatttgatctttcacgagttgttgggaaacactttggaagtctacattgatgatgttgtagtcaaatcggctgagttcatttctcatatagctgatttgcgcaaagcctttgataaaatgtgtcggtatggtctgaaaatgcgcttttggagtgtcggctggtaagttcttaggattcatcattcatgaacatggtatagagatagacc

SEQ ID NO: 14310 - DNA, 1024 bp, Zea Mays
tgaccgacactagcaccggctcgattggatcccccagtctagtctttcattcatggcaggtggcagcatacaagtggtgggtgcctgggtggtcactggccagggaggcaacgttacgcacacgtacgtggttgccggcatctatcgcagttcgcagtgcctctagtccggagccggcatgattgatctgcccgtgtaggaggagtacacatattggggacgagatccatcgttttcgggcgcgggcacattacagcgggtgtatccggagagatatttgcctgtcctggccgacgtacgcactgtccgcgcaccactgcagcctgcaggccaccgcttattcataggcagaaaccagctcaacaatctccgagtacccacagctccacctcatgagtcatgactcgtgtccagacgccaaacagtacatacaagtgaggtcggtgcggcagttagttggcggtcgcgtcgagacgtatccgcctacctgtccggataatggcgggtgcctggcctgctggcgacggaatggaatggaatcatcccccaggcggtgagagtgagacccttccaaacgtgcacgcgcattcgatccggcggtaagcggtgcagctcagctgtatgtgtgtccgtgagtgatgccgatgggaccgacgagaaaaaccatctgcgttcgggtgaagctctctggctagctggtgagatgtgtgtacggggaggacaatgcaagtccacttcggttgattgggcccggccgggcaggtggtgggcatgcacatggagctaccattatcttactgctaatggtagcactaatcgatcccaatcattcgttgctaatgctacgcgtactcatacgtggtggtggcctggtggtggggcaactagcgcgaggcagatgcgtagtgcctgcgcatgcctcactagctagtagtagtagtagctactgaataaagccgcaatgtgagctgatgatagacaggataaaaaagcagacagggcactacaatacggcttagcgcgg

SEQ ID NO: 14311 - DNA, 427 bp, Zea Mays
gctacgtggggctcgaaggtggatccgagacgagtggtttatactggtttaggtcgaaaccctagtccagtgtagtgctaatagtagtattgcttggagcgtgttacagttgggtgcttgtgtgaaactgtgggatatcttggatgatgggggttatcttgcccttttatagcttaagggtagatattacaatgaaaacttgtattctattggggtggagttcggtctcctgcttctaggcctcgtagcccctatggcgttgtctgctgggtcgtgtgtcattgtagccctggtatggcgtcgcatctcgtccgttcgtcaatgggttcttgtagctatttcgatatagacgtagcggtgcttggtgggtccggacgtgtcaattcaaggtaaggtttagggatgtcatcaatgcagcttcatcttc

SEQ ID NO: 14312 - DNA, 482 bp, Zea Mays
cccaaacacacacacttctaaagtacacaccaggacagggagacctgccacgcagatcctgacgactacaaagaagaaacacggtcagccaaaccaatgctccctaactgcttggtcccagctagaacccagcaagtgagctcatcaagaaaggatctcagcaccttcacaatggaaggggactcctcatggaagatcactaggttcctatgaagccaaaggcaccatgccccaaggatgataacactgttgaagcccttcttgtctttggggatctaattgatcactcctccccaccactccagaaaggaggcctccacaggactagggataaggtgtcctaggttaaaaggggatataattccatgccagaactgacgtgcaaaaacacatgtagttaggagatgttggactgtctcctgctcttgatcacaaagtgggcaaacaatagggtggggcataccacactttcgcaatctgtc

SEQ ID NO: 14313 - DNA, 883 bp, Zea Mays
gtcatagcttgcgctacccatccgagccggatcatctccggcaacacctcgggggctgggtcgcagtttgtgctacccatccgagccgaatcatccccggcaacaccctcgggggctgggtaagcgccagcaccatccttgagggtcgagttctctgcagcagccgcctctaaggctgaaggtccctcagtcacttccatgagagcagggaaatccaaaccagcttcctgaccctcaagaccgcgctacaaggtcgatgaggcacgggaagctgcccgggatgaccccaacctggcgtcgagcacatcaacacaaacatccatcgcgccaccatctgccggttctgataacagatcttctagaaccatgtcttcaagagtttgatcaaatttcgccagagataattcttacagaccaatgagggcagacaaggcaggagaaggaacaccactactttccccactagctatgtaacgccggctgttcttccgaatcagagggatttcgtcctcttcttcatcatcctcatcaacaacacggacaacacacccattggggtcagcgtcagacgggtcacacccattgggatcagctttagtaaattcaggcacgagcacttcttcagcaacatgagcagaaggaccggcaccctgatctaagctagacacctgatgaagacgtctctttttctttctatccccctcagcaggaaaagaggcttgatcggctcggcgagaatgttttggacgaacattgacagacttcttagcgtccaaaactttgtcagcctcattgatgggtaccaccaccaatgtttcagcaggagcggcatcagaagaatcctcagctaacatatcaagcatggcacttatctctgcatcac

SEQ ID NO: 14314 - DNA, 474 bp, Zea Mays
cagattcaaagacacctgccaagtcgtcgctcgcaaggcattgagggccctgtgtcagatctatgaagaagagtggccgacaccccgctcagatctttccgccattcagagagaccgccccgctttggatggccaggatgcgtgcattggaagagcagcaactgcttgaggacgaccccacagtcatgtacctcactgcatacctgctcacccttgatgcacagtatgatttcttggctcggcaccactgtcagatgattgcccgagcagaagatgcagagaagagcaaccgtcagctccatatggatctcaccacagctcaagcccgtgtagctgccttggaaagtcgtgaagccattgctgttgaagccctgaagcaagccaaggatgagcacgtccagaagttgatggaggcctacttggtaacccataaccaatgtagagccctgtggatccaagagcccgcttcatcca

SEQ ID NO: 14315 - DNA, 565 bp, Zea Mays
caaacccattgcttccctaacttcagctaaggcagtggaattcatacaagacataatattcaggtttgagataccgaatagtatcataaccgacctgggatccaatttcgcaagctcagagttcttcgatttctgcgaacaaaaaaacattcagatcaaatatgcctcggtagcgcacccaagagccaacgagcaagtagaaagagccaacgggatgatattggaagcgctcagaaagaaagtcttcgacaagaatgaaaagttcgcaggaaagtggatcagagagttgccatatgtcgtctggagcctgagaactcaacctagccgagctctgcatggaaacactcctttctttatggtctatggttcggaggcagtgctacccgctgatctcaagtttggggcaccgagattaatctttgaaaacatagcagaagctaaggctactagactggaggatgttgatatattagaagaaaaacgattgaatacggtgattcagtcagcccggtatcagcaaactctgaggcgctatcatgataaggccatacggcatcgatccttc

SEQ ID NO: 14316 - DNA, 530 bp, Zea Mays
caccagcaggaggattagacacaaaattgaaaaaggacttaggaggtggcagattccaagcagagtaggcaacaggagcaccaacatttgatactttgcctctcaagatcatgtctagccagctcaccaaatccttagcaggaattctcctattggtaacccgagtggagtcagtaacaccactgtacaagtaagccgggtatgctctgtcctttaggggttggatgttcttaaaaacaaaatcagcaaccacaacttcggtggtcagacctctttccttcagcagatagacttcagcaagcagaaccttagcctctgttacttccagggcagtgggagactcaatccaacttggagtgcacacatctggctatcttcccgactgggggggagggacttgccgtggttttccacaataaaccattcaagacgccaccccttaatgttgtccttaagcggaatatcaagatattccattttcctttcgtgccgcatttccagactcgcaccacccacgagttggtgctgac

SEQ ID NO: 14317 - DNA, 1296 bp, Zea Mays
agggtgataggcggtgctgaaatctagcttggtgcccatagctttctgaaggcttgtccagaatttggaggtgaactgggttcctctgtctgacactatctttcttggaatgccatggagtctgactatctctttgagataaatttgggcaagggtggctcctccaaaggtagttttcactatgatgaaatgggctaccttggtgaggcgatctattattacccagatagagtcattccctttttgcgtccggggtagtccggttacaaaatccatgcctatttcttcccacttccattcaggcactgggaggggttgcaataggcctgcaggtttttggtgcttggccttcgttcgttggtaggtggctgagcctgacaagagactgactttccttggtggtctatgagaaggactgtcctgtttgtgcaactgatgatacctttgtgtttggtcaaccaatccatccctaaggtcacatcaatccctttggatggcaagacggttaagtctgccaagaatactaccccacttaaaaggattttgacttgggagcatttgagctgacatagaaggtctgaccctggggttcgggtgaccaagggaatctctagaggggtagagggaatgccatgcttttccacaaaactagtggctataaaagaatgggatgctcctgaatcaaaaagtacggtagcgggagtaaattcaacaaagaactcaccgagcactactcccagagcttgctgagcctcctgagcatcgacgtgattaactcgtgcccttccttgataatgggtcttattctgctagctgatggaggagtgcgccttgggggaggatgctgaggtattcttggggtcattcaccgagttggagtaggcaggtcctgatggcttcagctggggacagttgttcttgaagtgactgggatctccgcagtgccaacatgcattcgccgggggttggttgcttgcaactgaggggcatgaaatgagctctgactctgctgactgaaccgtgatggggtgggtccagctggtctactgaagcttggtcccttgggtggaaatccaaaggatcgagttttctggtgccgatcttgctgctgagcccagaggacttggaattttctcttgagatggcctttttcttcctcctttcccctttccacttgcatggccttgttggagaggtgagagaaactgaggaagtcttggctggctaggatggtcttgagttctggcctgagtcccttcaggaagcgggccatcttcttgacttcagtactgacgt

SEQ ID NO: 14318 - DNA, 315 bp, Zea Mays
catagcatgtgaaagaacagaggtgagcaacgacgtagggagttacattttttatttaatccctggtttatgctttttgggtgcagaatgatatggaagttcctcaccagtatgtttctagggggatgcataccaaaagtagcagcagcaatagcctgcagagttcattccataagccatctaaagcaaatcaagctttgaagaggtctacaagtcaaaaggatttctttcattctagagacagcagctccgtgagtacctttgtcttcattatattccttggactgaaattggataagatatcaaataacgtca

SEQ ID NO: 14319 - DNA, 449 bp, Zea Mays
atgtctagcgtagcagcactctattttctcttcctgggcaccatcatgatttttcaaacagcgaggttcagggacaaaatgcgaaaagatgtgggaacttagaaagctagaaagcggtggaggaaacacaggaactagggttcaggggccaagaggacgtcgacaaaagtataggttggcacactgagtcgggcgcagaaggacagaccgatggctcgagagagttttggtcgcaacaaagtaataggacttggtcattacctctaaaaagctaacggaccgtcagataaaagaacaaaatacacaacagtgaagtggcatgaaaacatgcttcattcatcattccatcagttggggatcattacaaaaggaagaccgactcattatgagtcggccaactgcccctcgatccaacactacattacgttactacttaaactacattacac

SEQ ID NO: 14320 - DNA, 579 bp, Zea Mays
ggactggtcgtagaccgcagccctgactttaaaagttgccttaacaagaaaacacctcttacccctaagaaaaacctcctctcctttccccgatattaacggacccttcttttctcctaccagatggaaggctcttatgtcattaggacatcctactgctcagaggaggaaggatttcctcacctcctacggagttgcgcactacgcatggggatccataagaagcccgaatatgtctggaaggaataccgcaaacatggaatagagaagtgctctatggtggtctacctgggagaaagccgaagctacgcaaaccaccctcccttccaagtcactttcatcgggcaccgcttcctagacacttgtcgaagtgttgcccaaaaagcacttaaacagctatgccaaaactacagtagagagatctttgaaaccccacttcattacttcccacccagcaaaaaaaatacccccacctggaggaaaagacttcaggccctgtcaggaagagaccccaccgaggatgaccccaccattgtctacatggtcggatacctccacactctctataaccactacgat

SEQ ID NO: 14321 - DNA, 279 bp, Zea Mays
ttggactcatccgatgcatggagacccagaagtctttgtttgcggctcagcagttaagaggccctgccagtacctggtggggaaattatgttgccattcagcctaccagacatcaagtcacctgggacaaatttaaattggcatttcgtgagcactacattccagaaggagtgctccatataaagcaggaagaattcatgagactcaagcaaggtggagatactgttacgcagtatctcgacaaattcaatcatttgtcccggtatgcaattgaccagg

SEQ ID NO: 14322 - DNA, 546 bp, Zea Mays
aagagatatgggcgtgaaggggtgaaggatcatctcaagggtccgagaagcggtcgaggttggtgattcgtccttttaacccaaatcgctcttttcctcgtccacccgcctatcccttcaagcaaccagtttttatccgtcccgctcctgcacccgctcaaaacaatcaaccgaatgcccttggtacttgtttccccgccttacctagttcatctaattgctgcttcaactgtgggaagtctagacacttcatcaaggactacccctatccaaagcagaataaatctaatttccaacagacttctaggagcacatctcaaggcaagggaaatgtggccagcactcaggaaggcaaaaatacaagaaaaaactaggcaggtctactacactcaagtggctaccaccttggaaggagaccctgtgatgatgggtacgttttccattgccactcattctgccgtcatcctctttgattctggtgcatcacatactttcatgagcaagacttttgttgagaagcattgcatacatagtgttgaatcaaag

SEQ ID NO: 14323 - DNA, 738 bp, Zea Mays
gtggtattcaaagactcaggtattaccgtcaggcttaccctagtttagtttaggtttttcatcctataactccagataatttccataaaaaaattcgctgtcctagaacccttgtttagcctttgcaatttcgttttcagtttggctttgttcagttcgtgtccgtggtcgagtcgtgttactggtttagggtgtatcttcgtcgtagatcaactgccctcgctagccgctatcccatccaccattacccagatcacaagtcgatccacccattaatcgacttgccctcgctagccgccgccgcaccagccctagatagattgtagatacgccgctatcccatccaccattactcagatcacaagtcgatccaccccattaatcgctgtggtggcggtgcttgttgttgcgtctccaacacagcaagtctgtcgacgatctaggacaatcgtcgatccagcctctcgtaagtcttgccaaggttcatgtcaatgaaggcatcatgcactgacttgtggaccgtctcctccatttgctccttcaggagcttgttgtttgcctcaagatcttggcggctaacacattcatcgaagtcagtagggatccttgcttcttcgtcgtcgcctgccatcgaaacacaaaaactggaaacaaacggtgacggttatccctaataatttcactacacgctcctctcaggtggaacacaggaacactctctattgtatcttaccaagc

SEQ ID NO: 14324 - DNA, 574 bp, Zea Mays
tgccaaggtacagcaccagacaagttgttgctggacagatccaagaactggaggctgctgagatttagaatttcaagggggatattcccagaaaacatattgtggccaagtcgcaggaaacttaatcctgttagctctcctatccatgtaggtaaccgtccggagagcttattccatgaaagatccaacatcttcagattcgtgctgtttcgtagaaccgtgggaaaacttcctgccaaactgttattgctcagtagaaggaaatctagttgcatggttgcaaagcaccgaggaattccgccctccaaaagattgcttgagatatccaggtccgacaataacggcaaattgcacatcgattctggaatgctgccaccgatcttatttgagaacaaaagcaagacgttgagtacaggagcttccaaggacaatggtagtgtaccagaaaatgagttgaaggataagtctagcattccaacgtttcttggaaatgtctgtactggtccagtgagattgtttgaactgagattgaggtgtacaagggccatgtcaccaagatgtgctggcagattgc

SEQ ID NO: 14325 - DNA, 892 bp, Zea Mays
ccctatgctgctcaggaacaagatgggaattaaaattttgttctaccgtcatctcccagtctaagtaagcttcagcatcataagaacccatgaacggtggattagagaacttaatctcagcaaatggatcatggtctggttcaggattatgatgacgacgtctaccattacctcccataccttgtcgattacgtgcgaggcgttgtggcagcggtgcataaacatcatcgtcatcgtcgtcgtcgtccacaagagagtgagatggggctggagttggtggtgggggacgagcctccagtacgtccatgcatgtaacaagttcattaactcgtcgatcaagctactcataggatgtcgccgcagagtcctggtattttttttaaaagcttcagtcatcgcgcgcatcatctccttcaattccagctgagagacacactcatcgtcgttaagcttaggccccttgtccttgtccatttgattctttggtcatgtcattgttagcacaaaatagagacaaaaaggcaacaaacaatgtgaaccctacaactatctctcagggtggtggtggaatacaaattatgaagcgtcttaccccgctcttacaacgttcttaccagcactgcaggtggcaaacggtgaccgatttgactgtccaacgagcgtgggtgtgattgcaaaggaatactggttgtgctcgagagaaagctggagttctgggaaggctgactaaatatatatatgcggcacacaagtcagtaacagatagcaatgctgaataagtgttccaagtactcgtcctagttgctggcctagaaaatgtaatagaacagttggaccaaggcacaagaaaggaggtacaagtatatgggtgcagcaagaaaacaggcttggg

SEQ ID NO: 14326 - DNA, 346 bp, Zea Mays
agcaaaagcaacattgcactcttgaatcagtcttttgggccaaactatcttcctcctagctcgaccttcagcaagagattgaggatgagactccacaacaggtgacgaggcactgataggagatgaattttcagcaggttcaatagatggtggagcatgatcatcaacatcccccacgtgctccacctgaacactgatagactcaaaattctggttagtagcactggtagatacagccaaagtgaacatagcaaattcattgaacacaacgttcctactataaaatgccttcggtgtatcaggagtccacaatttatatgctttaacaccagatccataacccaag

SEQ ID NO: 14327 - DNA, 567 bp, Zea Mays
ggtttatatgggtgaatatgagtgaagtgtgtgcttggtttgaatttaggcgaagaaaatgaaatttgggcactcggctcggaaacgatcgctcgaaatggggaatttggtgaaattaaagcctggaatatcggatgggcgtgaaatttggcgaatatgttactggaggtgttgtgaaggtgcctgaaaaatttgggttcagtcggagcatttttggctggtttgggcatttcaccgaacacgtgacgtgtggagttctagggttttggagaaatggctattagaggttgtgaaaccctccctaaggagctagaaacctgcaggagtactcaaggaacataaagggactcaatcatgcacttggattcacaagatttgatagaaattggaattgggcacaaaggggtggagaggggagcttactgcagagacagacagagaggaaagagagagcagatgatgttcaccagagagggaagggaagcacgagcactggaggtcgccggagagatcaccgccggtgagggaggggtcgccggagcgcagagggtgtcgccagagaccgag

SEQ ID NO: 14328 - DNA, 625 bp, Zea Mays
gtttaaataggctctggactgggcctcaaatctagagaaacccagggggttctgggtaaaatctgctaagacacacaacgttgtgcacggactgtgggttggtttcaattttctgcaagggcttaattgctaatttgaccggccgaagaggtatgggccaatctcggccattggattagatttgcacggcacagattaaatccctagggtaacgaaacgatatgctctatagcttcttggatcacagatcaatggctcacattaatttgcgcacagggatgcatcatggccatctatcaacaactcaacggtctagctcgccccagacgaagcggtagccatagatataatccggcccctctattcccagatcaacggctggcgtgcatcttcctccttgggcctcaccatggcaacgcaagcgctctggacagcggcgcccgcgggaccttgccaccagctcaccctcaccacgaacgcaatcaaatccattggctactggctaatgaaatcaacgaaccaggctagagatcataccggtgagcgaggcgacaatggggcatgcccccgggagtacgcagatgtatggcggaggagggatcgtgacacaccgtactccgatgaa

SEQ ID NO: 14329 - DNA, 552 bp, Zea Mays
gttcaattggagcaagtttggctggtttgggcatttcaccgagcacgtggtgtgcggggatctagggttttagggaaatggccatttgaggtgggaatgccctcccgaaggagctaggaacctgcaaggatgcttaaggcacacaggggaacacatttcacaaaggaattcatcggatttcacagagattggaaggatttgcaagagggtggagttcactgcctaactgacagagaaaagagagagagagagggaggacagagggctgcttacggagggggagcagaaggggtgcgcaggtcgccggagatggaggccgccggagatggaggccgccggagagaagagatcgacggcgggcgctgggaagacgccagaggcagcggagacagagcgcggccagggaaagaatgaggcctctggcctggcacgagctggaggccgatttttaaaaacgcgagatgggcataccggacagtctacagtggctgtccggtgcacaccggacagcgcacagtagctgtccggtgaaccaccggacagcgcacagga

SEQ ID NO: 14330 - DNA, 685 bp, Zea Mays
gtcgacctcgccgggtgtacgctccagccgtgaacttcccctgctgcgcgccgaagcggtgttcttggaattacctgtcagtgaccgtcgtcgccgcggatccagaccttagcgtggctggcttgcgtcccgtcgtcaccattggtgagtcccctgcccaattgagcaccattatcaccgtgacgagtagtgctattaggatcaaaggttagaacccttgtgcaaggatgggttgcccggcggtggcgccgcgcgtcggtcgtgagctcactgcggtctgttggccgagtggaggaagatagcaggatggcccttgatgcgtgaacgtgcgttccagattagagttggctgattccctttcacccctttatcgcgtgccgttagatcgtaatctgatggtcgagagttgatatcggttcggtgggcgaaacttctaatcgagaccgctggatcggtagttgatggataggattagatcgtgcgtacaccttcgtcacattaaaatccgaccgcacgttctgatctgggtggttcatactgaacaataccccttcagacaactcgtttgcgtatgagcccctaaagaatcaagtatttaacccgcagttcactgtgggagtacactgagtcttagaaatcttgcgctaagacccctaagctttccagaaaatggggcccagtccag

SEQ ID NO: 14331 - DNA, 598 bp, Zea Mays
tacgaggccgcgatgatgtgtctgtcctccgagcaaatcactagggttcgacgaagttctctgccaaagagcccgagcgatggtacgccacggttccgcccacggcggcgctacacttcccctggttcgacggtggaggttctccgttctccctctctctatttctggcggggcgcttcctactgggatggggtgaggagaataggtcacggggctagatttatagcctggggcgaggacgagcatggctgagagtccggatgagaacgagcctgggaggattcacgcggccatcagtgttatgttgggattcggttgagggagcaccgtgaggaccgcgcggcttctctttcgcccgcctggttcgcgatctgttgggaacgaacaatctggcataaggggcccacccgccgacgacacggcgcgtgaccgtgagaggagttcccagtgagccaccgttcgctggggcccacctgccattctcacgcggaaaaagggaaaaggaagggaggggtgatgggctgcgtgggtgtgaaatgcccaatttggccggccgggaaagaaacggcccaagcgcacaggtgagcttttctctttt

SEQ ID NO: 14332 - DNA, 343 bp, Zea Mays
ctggcatggcattctagccccttttaacctaggacaccttattcctagtcctgtggagacctcctttgtggagtggtgggaaggagtgatcaaacagatccacaaaggcaagaagggcttcaacagtgctatcatccttggggcatggtgcctttggcttcataggaaccgagtgatcttccatgaggagtccccttccattgtgaaggtgctgagatccttccttgatgagctcgcttgctgggttctagctggagccaagcagctggggagcattggtttggctgaccgtgtttttgctttgtagacgtcgggtcctgcgtggcaggtctccctgtcctgg

SEQ ID NO: 14333 - DNA, 521 bp, Zea Mays
cccaccccttgctctaaatgggggtggattgaatttgagataaagtgaattttggttcttacccggcacgagacagcgatggcggcacgggaaaaaatagaaccatcatggctttgcccgcgcgtgggcggctcaatgggacgtgaaatgtcatgttcaccttatcacgtgcggaaggtgtgacggtgtggttaaccgctctgatcattgcggacaccttttctccagcgtactgtccggagcggtgcgagccccagtaaacatgccgtctccttgaagtgcccaaggcaagggggaatatcgatgtggtggatcctcgacgttgttcgttggggcccaccctttaggtgtcgtttcgcgttcctattcctccatataaataagcacttggagtcgattttgcttactgttctttctcgactaatctgctattgtccccgtctctcaaagagcccttagcatttttcacgttagctccttttccgcacccctcctttctgcctccatggtcgcttttaccc

SEQ ID NO: 14334 - DNA, 714 bp, Zea Mays
ccacaaggtctctttagcaaaaggcgcaggccgaggggtattgcggatttcagaccgtccgattagaaatcacgcatccagatctgttgattcataaccgtgaaccggtaagcgacacaggccatccgattatagatctacggtccaaactctacctacgaagggggtacgatggaacccccaacaaccgtccgatcacgatctggcgtccaagcattcatacccgaagcggtaccctaggtcttaatcatggtcgtagccacgagatcggacggtcgcgagctcttcacccatcgcggcggccccaaatggtggtgtacaggatacccgcggcagagctcaccggagaaatgcccgcctgcgccccgatgtacaacatccaaaaccgaaaggcgctactcatcgatgggccaacaggaaacaacagggaagagttcataccaattttagcacagtggggaaagttggccgcgagcgatggcggatggcggtgatccatcgattctggcgagcaattcgccgccggacgatggctcacgagctcgattgcccacccgcgcgcgatccacacagaacggagatcccttggtcaactcctcagccaacgagcaacaccgggcgtgggatgagcacatggcggcgaggttaggcttccttttcccccgtgattccggcgtgcacgacagaccgccctggtgatcttatggtggccgc

SEQ ID NO: 14335 - DNA, 570 bp, Zea Mays
gttgatttctgataagcgcatgaattcttttgtaaaatgagcggccgaagcggtacgctgagttctcggccgttagattagatctgaacggccacgattagataggcatcagcacgaatcggtatgggctacccaccattgattccgagatctacggtatggatttaattaatgcgagatctaaacccgtttgtgcgatgaggatcaatcgaccgaaacggtatccgatcacctaatcgtagtcgtcgattggggatcggacggtggccgcgggattagctgtttcctggccggaaccgagcggtgcacgcttcagggcacggcggcgtcatcaccggagcacgagacacggcgattcctgcccctaaactctaattagaacgcggcagcacgaagcggtcacgactgggatttgcgcaggatgctactcaccgcgaattgaagacgtgaaccaagctccccacggtacccggcggaaaccgaagtccggtgacgaattccagcggcgccagtggctaatcacgcgcaattcggtcgcggtcgccaccacatggccgagagggccctttg

SEQ ID NO: 14336 - DNA, 367 bp, Zea Mays
cccccgccaaaatcctcagatccccttgctgcagtgcagatctctctataatccgcgctcgtggcgacctctcctccagcttccgttcctgaaatccatctctagtttcgccatttgggttttttctcgagggtttcgctcctcactcatctgatttaacgaagggagctgggtcacacccacaggccgcggcttctgaaattcgatggccgtggctgcagcgcgcctgacgctcccagatcgattcgacgaggtttacatagcctctgcccggtgaaaagatgggctcgtgggttatacgcgcctcgcacatgcacgagctgaatttcttctcgccttttcgatcatgacgtctttcgtttttttg

SEQ ID NO: 14337 - DNA, 552 bp, Zea Mays
agggtgaggtgttgcgcaggccctgtggatgaatcgtgcctccggtcccgggggattcctcaccggagcttcgccttagccgcggatccgccgcgcgtcgacgctaggaggagtcacttggtaatcctcggtacagaccttctattccgttttgttgacccttcaattcgaattgcaccgggtagcgacggcgatttggcctcggaatcgagctcgggcgggatacggcgatggcaccgccgggggttcattcttcctctattggtgcgcggtcaatagggagtccgtggggaagacgaactcatgtcgttggatggggtttggacggggacgattagatcggagcatacccgttcgctggattcatccggaccgtttatctggcctcggaaagatgcaggcgggcgcactcattttaaatcgggaccatcgaatcttaatccaacggctgcagtcgtgtaccgattctggttgcaggcgatctaatctgagcccttggttcttgatcaagtggctccgggcgcacgataccctttcatcgttcacatttcc

SEQ ID NO: 14338 - DNA, 289 bp, Zea Mays
gcatcataagttgtgcaaataagaccgttcttctcacggaccaccaaggaaagtcattttcttgtcaggctcagccacccgccaaggatccaatggtgtttaatctagcagcagaaagcatatctgtggtagaagaagtcatggatgtattcccagaagaactgccaggaatgccgccagaaagagaagtggagttctacatagatctaatccccggcactgcgcctatcgcaaagagaccataccacatggctcccaccgaactagcagaattaaaactctagatcgc

SEQ ID NO: 14339 - DNA, 693 bp, Zea Mays
attgtatggtgtcaaatcgatggtcatatggtttccaataagacgaacccaaaccagacatactgatctcgagactgtctctgaacaattcggctatttcctcccaattcttatccacggtagccggtggtagtataccggctcttgtgatgtgagtctcaggtggtcatgatgattatctatataagggtaatccaacgtgtgtggtggtgtgaacctctttaactctcgacaaatgttctactctaggtatgggcatgcttcagtcttggtgcgccgaaggtagaggagggtaatgttgttgtggcgtagatcgtaattgtgtgttgtgtatatcataccactctagacgaccaattccgggcggtccaaagttggtcaccaaacggtccggtgcgactccagacagtctgtggtgatgtagcgaacggttcgatctgatgtcggatggtccaaggttgtactcagatggtctggatgtggtcaacggtgctgacatatcgcatagggattgtgggggcagtggttgtcctaggtattagtccattgacgtataccatataatgattgggtatgtggggggccatttgtaacccatgggttatgtatagatgtcctggtgctagcctcgtgtgatagaaaactagggacagtggatttctcaaatccacgtgtgagtttcttgaaggattc

SEQ ID NO: 14340 - DNA, 302 bp, Zea Mays
ccaacacctaggacataaattaaatccttccctacacgcgagggacggctggttgattttattactctccggggtttcttttagaaattatgcatagcgaaggggtattgactattttcgcctgttggatcctgctccaaccgcgcagattagatcaacctacggtaaaccaaggcgccactaggatcgttgatcctgagctcgaagcccacatctatacgcgatcaagggcatggtatatgagatctatggttcataaccaaacatgggatcggtaagcagccctgactactcgattccaa

SEQ ID NO: 14341 - DNA, 626 bp, Zea Mays
ggaaatctgaaattggcgagctctggtgagaaattggagacacgacttggtggcttggtgcttgactaccgtacggacccgtcggtgtgcttaatttatagtgtgcttgagcggtggtgcttcatttggatgaattgcgctggcggccgagaggggaatgagtcacggcggcgatctaccgtggcaatcgcagagcgactaaactacgacggccattggatggtcactacggctcatatcgacgcaataaacttcctaaggcgtggcatcctcacggtgaacggcgaacacgtcggtgattgccgctcggccacgttgccggtgtgtactgatgaaccatcaagcacacagtactttccagcccatccgcggcaagatctttcaccccgtgatcattatccgcgtttaattcagcgtgaatcatggtgatagcacaaatccgcgcacgtggtcgccgtcggtgaggtctctgagtgggcgatcaattcggttactgtaccatcgtgaaccttcatcagctggcctgacagagcatgattgggatcgattttgctctatattttatgtgatgactcaaccaatactctgcatcaaagtcgaagcctgataaaccagctctaactttg

SEQ ID NO: 14342 - DNA, 454 bp, Zea Mays
tcccaactcaagcaacgacaggggaactcacaccaaagccatcaacaaagctcccaatcatcagggacgcaacaaagttcctacaggccaccagctccaagaggcagaggaggaagaagcttcggtggaagattcaactcccaaccaagaaggttgttttgtttattctgtggagaagataagggacatacaacaaggacatgccaagtcacgatccagaagcagaaagaaatagctgaagctgaagcacgagagaatcagcctaagcaggtcctacataccgcttcgtgctattccccatacatccccgagtatgtgggcaaccagcggtccacatcatcagttgcttcggcaagccactcacaagctgcatggaccccgctaccaccaccaccacccatggctccaatcttgtctcacaatcagcagtcagaaggacaccgccaggcacaat

SEQ ID NO: 14343 - DNA, 292 bp, Zea Mays
ccctgttccttatcccaatcgatccaggaacattgtgagtatggtctaggtctaggcctcatgttagttcggttgtttaaggatgttggttgccactatgtatttgtaaccctttcctaaacaacacatttgtgatttccggtggcatttcccttctatcatggtatcatgagacctcttctgctgcttctccctaccaaaccctaaccctagccactgtttactatagccatagtgcccgcgggcactgttcatcttcttcctcgcgcacggtgcctccttgtgcctcatg

SEQ ID NO: 14344 - DNA, 737 bp, Zea Mays
gcccaaaccaaaaccggtggatatgactgcggggacgacgcgaacatggtaggggaggccatacctgatttctacacggttgtcgcccagtccacgatggtccacacctcaacagctttctagaactttgacgtgtgattcccgactgtctggtcgatgatcccatcgattggggaaacacccactccctcacggcaccatgaagccctgaggcttaatcctagaccccgagcgtcttcataggtgatcgtcaacggcggtgggtttctctctcgcacgattcatggtggcggtcagaacacaagcggcgtacgaagggtttggtagcgccagcgagactcgggaatttatatagcgtgcactaatagaggccgaggtgatagggaggttgttgcttcatctggctccagggaattgcagcggtggtttgttgtgcggttggatcccatggcaaagaagatgcacaacggccttgtggtgagatcgacatgcaggccccatctggcagcggcaccgggtgaggtcatgcatgatgccattggtgaccaagcaggcccacgcgcaagtgacccagcgcatcggagagatgtgggctggcaggaggggtggaggtgggtcgatcggcgacccacgtgcaagggagaaagaaaaagggattgggctacagggaagggttttggcccatgcaccggtttgggttttctctttcctttttttcttttctatttttgttttct

SEQ ID NO: 14345 - DNA, 469 bp, Zea Mays
ggctgcggcggagacttctccgcgtgtggtgggtgctgaggatctttcgagtgcgagtactggctgtaggcggtgaagggcggtagcgaaacggagagtgagtgaattgtcacgaagtggtaggtgtctttgtggtgagatggagagtggtcgtcttcgtgtggacgggactggtaaacgggaattgttgtcctcgccggctagggtgagtgtaggtgagggggagctgcgaaatctttttgagggtgaggaattgaggataatgttgttcaactacaaggagatgggtatcatcccgaaggttgagccaatgtaatatgtgatgccctcgctgtgtgtatgtaaccataatttgtatgataaggttgcgcgccttcattgatccggccacgcccataggcgacttgtgcacggagtcttttgggaacgactttgatcttcacgtactcgtggtgttgtttcggctgcg

SEQ ID NO: 14346 - DNA, 415 bp, Zea Mays
aaaaaaaccattttaacagtattaccagaactttatcagtatgcccagataactgatggggtatgattggatattgaactggagtggagatccaacgacgtggaattctacaataccattctaggtaacaattccttgcatgggtagcatctcaagtccttgtttcctggcgcttaacaacagagatgagcctgttctcccattccttaataatgtagttatcatggtaagtaggccaatgctgatcagctttaccctgcactgtaacaggttcgtcaatgttgattagctttaccctgcattgtaacacgttcaacaacctcatggctcgttcggtacaatgcgtttcagttccaacctgaacgattccaaggcaagtattcagtgaattcggttggttcgctcaaacctggtg

SEQ ID NO: 14347 - DNA, 1276 bp, Zea Mays
gaaaaccctaaatccaaaaccctaggggcatatgtgcaaaattagtccacttttggactaaagtgcaagaaccaagttaaataagtatattaagtcatttgggtcattcatttgtgaatttacaagccaaaccctgagttttggacttacttgcaaaagagccacatttgaactcttttggctaagtctgaatttcagtgtattgtgctcacctttgtgaccttgcaactttcaaaatatagggtttttgccctaggccaccacataaattttgtaaacctattataggagagcaactttgatgcagacatctcctgttgttgttatacaaaaattagagaaaaacacacccaaagtcaggctgtcaggcaaccctaggactgaatttccagtaacagtggacttaggcaggctttgaacctgattttgagttggattcggtaactattttatgttgagctccgtggcaaagttgaagatgaactataggtctataactttagtatagagacttaaatcagtcaccacagtaaatttggaggaaattcgagttcaacattggctatcaggttcatctgactgaaactcgcgatggtacagtagcctggattggatcaggctgccagcgcggaactctcaccgtcgacgatacctccgccgtgattcgtgtcgctggtgtttgggttcgtgcgggtggcaagtagataacgtcgcggggtgaaagtgcatcaccgtcggtgagctggactccactccggctagccgccgtgcccctcccctgcacactgatctttcggatagggttctcaccggcgtcgtgctgtcaccatcgtcgtgcaccacgtgtcttagcacgagacaccttcgtggtgactcgttagctgcatgtccgacgatcaccggaatcactgccacggtgagagctactttttcccccgcaccgagctcactggccgctaacacccctcggccgaattcgccaccgaccctcgatgcgcctataaattgcggatgccgcgggctccgtagggtagtaagctaaccagccacctcgaatcagcctcaatcattcactgagagccgcgaattcggagttctccccaaatcattttccgccgccgtgaaacccaccccaccgtggccagaccactctggcaaagttccgcgcctctcaagtattgttctagcatctatgtaggcacgtaaagctcaccgtagcaaccgtttgcccaatccgggcctgcgtaattgggaacatgggatcaacgccgcggtt

SEQ ID NO: 14348 - DNA, 787 bp, Zea Mays
ttgtactctatccattttgtgaatttgtcaatggcaaccagtacgtgagtatagtctccctaagatttcttgaaaggtccgatcaagtccagcccccagcatgcaaatggccatgttacaggaatggtctgcagctgctgtgcaggtaaatgttgttgctttgataagaattggcaagcttcacatctctggactaactcggcagcatcactcttcgctattggccaatagaaaccagatctgaaagccttctcgaagagagttctggacgctgcatatactccgcactgcccggtatggatttcatctaacagttgcttcctaataaccgagtgaatgcaattcatgaggactcctgccgcacctcttctatacagtgtgccccctatgagggtgtagcgggctgactgccttgcgatgcgttctgctgccgccttgtcatccggttcttcttcaatttttatgtacctgatgatagcctctctccagtcattggggtctgactctggttggctcaaggtgttgcactcttccatctgatctgagaggatacttggttgtgatatttcttggatgaagatcccgggtggagcctcggcccgactggatcccagcttcgacaacgcgtctactgccgcgttgcagtctctttccacgtgatggaactccaatccttcgaatttgtcctccaatttatggacggctgcacaatacttgcccatggaattagtcgagcaatcccagtctttgtttatctggcttatgaccactagcgaatctccatata

SEQ ID NO: 14349 - DNA, 356 bp, Zea Mays
gcttaggagacttatgccttaaaatgtttttttcttccggtgcaccattgattgtgatcatagccgtgttctggtgtacctaaagaaccttcttaactatgcttaagacatgatcgtgttgtttttcaattggtttatgtaatgcaatgatagttaagtatgaagcatgtctaagttgcgtgtaaaagttagacttcctgtgagtattcaattggcttaggtgctcctgaggcatgcattgttgtatttagtcaacctttcatttagccttcaatttgtattaagtggcttttggtatttaattgatatctctttgggatgaaagtgatagagtatgccttgaccaaggtatgttg

SEQ ID NO: 14350 - DNA, 409 bp, Zea Mays
cccccaatggttcatcctacgagatgggccagcatgttataatcaggtcaggtgaacttgacctaagaagacaaagaccagtgtccgagttatgcgctactgaaccactgatatctcgggagatgtagttgcacacttgcaaagctaagcgttcggcgatgactcgactgaaaaggtgatcgaactctggatatgtagggctaaaagttgcattaaagaaggagataagtagggtagatagatagtaaccacaacttgtaaagggataactctttgtcgtgtatataaggacgaggggggaaccatacaaaatcatctcatctcacccatctcacttgacacccaccctcatcgacaacacctgagcacccacaaagctcacttgtaatcttcatactccatagaaaac

SEQ ID NO: 14351 - DNA, 614 bp, Zea Mays
gggatatctctctaccacaatccactgggactcaagccaaattttgagagaattggctcgagactccaaaatgaatcgtgttatttgagtgtcttatgctttttgagtgcagctttgttccgcctttacatccattaggtgcaccgtggagctttgagttgatttgatcatcaatcaactcaaatgtcttcatggtcttgcttttgaagggttatgatttgccgtcttgaacgtgatttgcttgacacattggggtgtagccccccgagctgacgaagcggcgagtcggcaagacagacaacagtccagccccgaggtgacgaagtggtgaatcggcaaggcgaacaatagtacagctgacgaagggacgagtcagcaaggcggacaacaacctagttcctgagctgacgaagtgatgagtcgacaaggcggacaacagcccaaccccccgagctgacgacggcaagacgagcggtagtctagcccctcagcggacgaagggacgagtcggcaaggcggacaacaacccagcgatgacgaagcgacgagtcggtaaggcggacaacagcctagcccccgagctggcgaagcagtgagtcggtgaggcggataag

SEQ ID NO: 14352 - DNA, 723 bp, Zea Mays
cttgagtcctggtactgaagagaggcacaactgttgggtccctctgagatatcaaccaggactccatgggtacgtgtctgaaccgacgtacccgagccgcagtgactcgctgaaggtcgagcagacagggatcagcagctaggggtcgcacctcagtctcgtcacgctccctgaagcgaggtggtggaatgggagcgggagggggaacagtggaagctggagtggtggaggtggtgggtatagcggaagtggtggatggctctggagcgataggagctggtgaagtgggaggtggagaagacattgtggcggaaggtgtggagggagcagtggagcgaggccgagatgcgaggcgacgaactctgtaggctatctgatcagaagagatctgcaactgtcctccccgctctgcctgctctgatgccgctgccgctgcaaatgctgcacgagctgctctgtccatacatcgcttcttcctgccctcctgctgctcaagataaattgtctttcccttgactcgcctgaaggggcgaggagggtcctcgtcgtctcctcccctgatgatgagacattctttgcctgcaccatcctgaccagactgctgcacgatagagtgaaaagctaagtaggagtagagagcagctagtaggatctcaaatggagtgaaggctacctggaaatctcacgggagagagagaatccaggcaggacaagagatgggca

SEQ ID NO: 14353 - DNA, 314 bp, Zea Mays
gtaggcgcctacaggtggtactgcaaatgaaaatttggcccgttcgactgaggtttttcccccttctgctcccgcacatcgctatggaacaagacttcaacataatattcgacgaccaaaattgaggattgatggtacagtgtcttattctgtggcctgggtttcatctgctgaaccgacatctcatgttactgctttaaagcatcctctatggaggcaggctatggctgatgagtttcaggctctccttaaaaacaagacttggcacttgattccccctcgtctaggtctcaacattattgactgcaaatggg

SEQ ID NO: 14354 - DNA, 579 bp, Zea Mays
ccctgttcaatcttttcttcccccggcccccgaaggctatggataaggcatcatcttcggccttggaatatgtcccaagtagctcgtcgctggtagcttcaatgcatttcaactagtcatcatttggttcatcaaacatctccctaaatctgaaggtatatttcaatcggactaggccaacttcactggattcggcagtagtctccttcggcatatcccagttctccacaagtggccacaccctataggctatgtgctcttggactatatctcttgtgccaacgaaggcacaaacattgctgaaggccttctggcatgcttcgacgtcactttcaatagtgaccttcggccttcgaaggccgaagcgagaccagatggggtgctagataatttccttgatgtcttcccttttaatcagatcattttaaacataaaaccactcctccatctaggccctgggccacctttttcggtatgtcggcaccgggtaacttgcattagagcgggcaatgaacccgtagcaaccaaagttgttgtggtattgttctttgctggtagccttcatctcgtataaaagct

SEQ ID NO: 14355 - DNA, 590 bp, Zea Mays
gactgtgggcccttctccgtccttctatgttgatgtttcagagatactgaaggtaatgactgaacccttcctgtttgcaatgctaagtcccctggggtcagatctgactagcctattgcagtcaaaggagaagggtgttgaacaaatcttggaagtaaaggagactgcttcagctaccgggggaaatgctgggggttcgaagaagcggcgaatgatggacgtgatggaagccatccaaaagaccctgccctcggcttcggcagaaaaaaaaatgttgtgcctgctaatgttgaagatactaccgaagctgaagccaatgaagccagacctgaagctgaaaacctcgggactataatgtcagagattgactggcctatatctgatgtggctcccgagaaagacatagccgaagtatcgactggtaaagcttcggaggacacggatttggacctacggcacctgggtggccaagaactgtccgatgaagacatttttgagttgaaagaattcgcccttgccggcagatacaatcctggatctgttctttttggcggtgtggacaaacaaattttggggtgtatccctgatcg

SEQ ID NO: 14356 - DNA, 458 bp, Zea Mays
gttgaagagctgtacaggcaagccttttgtcatgatgtccgcgaactgatgagaggatgggacatgaagcacgcgcacttgtccaagagcaaccttctcacggacgaagtgaatgtcgatctcaatgtgtttggtgcggcggtgatgaatgggattggctgccatgtagacagcactcacgttgtctacagtagacgaccgtcgcagaagtaatcgacacgtggagttcctcaagaagctgccgcaaccagcaacactcagcaacagcgtgggccacggcccggtactcagcctccgcgctggaccgggagacggtagtctgtctcttggaggaccaagagatgaggttgtcgccgaggtagacgcagtagcccgaagtggagcgacgagagtcaggacacccagcccagtccgcatctgagtaagcggtgagagactgaatggggccgatgcccaga

SEQ ID NO: 14357 - DNA, 622 bp, Zea Mays
ggtcgtcggggtgatccgcctgggctcgtggaacgtgttactggtggatcggcgctgggactgcctcggacgtcgactgaattcctcgccggagctcaaccgatcccaccattccgccactcgccgtggtcgggttcgtctgcgacaaactgcgaggtaattggtcattgattgcatttgttggatgtagagcatcatgtagcaccgtcaaaatagggcgttaggcgttgtaccgagagcttggggtcgccgggcatgccttgccgtcgtgggtgctgtccgcgccgccgtcgcgtttcgtcgccagggatggtggataatctcggtcatctgattgatcatcgacggttaggattacaagtgcgtaccgattcgccccctgctcatctcagccattgatcggagcacgagcgggtgagatcgtgctctggcgtttatgtttgcggagcaaatatgggccgtaggatctagatccaaggctccacattgagtaccggttcagaggagatcagatctaatctatgccgcacgttgttgatcgagcggccagtgctatccgatacccgttcacctggataatttgcagatgaaacctcatagatttagagattagaacccgccg

SEQ ID NO: 14358 - DNA, 464 bp, Zea Mays
tgagcaagagaaccttctggagatgatagaccacaatatttcaatgtcacatcacaacatgtgctcttcggatacaacttagtgacaacctgaagctgatgaaatctaccacataaaacctcagttccatcaatattgatgatccttgcaccagcctggccaatggatacatccatcataaattgaatcacatttggggaaaccttctcaaggggaaaagacatatcttcatctggttggtaactcaacagcttattaatagcctgccactcttctttagtcagttgttcctcttcatctaactgtgattctgggtgtgtagcttcctcagaaggtaaaccagtcgtgttccttcaaccgaagagaagaaagggacttgagctaggatagaaagaagcataattggaactgaaaagttcattcatctaataaaagtaaattcaatttgaaacatgtatttatcc

SEQ ID NO: 14359 - DNA, 1208 bp, Zea Mays
gaagaatatcacaccatcaggggaggagacgactaggaccctccttgtcccttcaggcaggtcaaggggaagaccgtatatcttgagcagctagagggcaggaagaagagatgtatggatagagccgcacttgcagcggtagcagcagcagactaggctgtggggggaggccagctacagatttcatctgattagattgcatatcgggtttctctcctcgcgtctcgaccttgctccactgctcccccgctccttctgccacattttccactccacctcccacttcgccaactcctgtcgctcctgagtcatccaccaagcccgctgtgtccaccaactccactactccatcttccactgctcctgctcctgctcccgctccctctcccacttctgctccacccattcctccacctcgcttcagggagcgtgacaagactgagctgagactgttggttgttgatccgcatcttcttgaccttcagcgtgccactgttgcccgggtatgtcggttcagacacgtacccgtggagtcttggttgccagcccagagggacccagcagatgcgcctctcttcaacaccaggacttaggagtccttcaaggcgcagttgtcagctcagattgctttgagagcgcaccggctcttggatcttcctacttttctgtcaaccgccggtgccgagtcagagggtcacctctcttatctgccaggtttgatttcacttttgacctctagtggcagatacattgaggagtgggtcagagtattctatgcaaccgtttggattgaccctcatcattagtcgttgaggttccgctttgagcgcgaggatgtcattctgcattccactcatatcagacaactctttggatttcctgagtcgacgaccaggctccatagcttgtgctactgcatttcggatcctccccatcgccctcacgacggagttgcaccagctatagctcacgtcgctgccctgttcagacctccattcacagatgggtcacgatgttctcctgcagacttccctccagcagcgaagttcctctatgagctgatgagacggaccttgctacccaggatgggtacagggaggccaccacacatattcagctatggctacttggtgccctgatttcacactcagagttcgacgtggttgattttctcatctgtgagatcgaggatacagtgttggatggtc

SEQ ID NO: 14360 - DNA, 481 bp, Zea Mays
ggagaagaaaccaccccagcgccgaaggatgatgaagtagtggttttcaagagttttttcagagcaggactgcgactccctttgaacgagatgataggggaagtcttgaaattttttgaaatatatcttcatcagctgacccctaacgccattgttaggcttagtgtcttcatctgggccctccgaagacaagggatgagcccagatgccgaagcattctgccgagtgcacgagttgcactaccagacgaaggccagggcagacggtcttcatgaaaattttggttgctacaattttgcgtatcgcaaggatacgaaggctccagttctcagttaccgcaccaaatggtcaaccgactggaaaggtgaatggttttatgtcaaggctgatgagaagaagagggggaaactgatgacgatggtcatgtgcccgttgaccttaaacttcggaatgaccaggcccctgtgcaacatgcaactag

SEQ ID NO: 14361 - DNA, 835 bp, Zea Mays
ggatgtaacgataaccaaccttccagccttgcttaaaagaggggctttccatcatggcagcctatttgcaaccttgtcaatcaatggttggagatcattcttggaaggtttatgaatgttgagtgggatgccaaggtttgtgcaaggaaaattgtcaatagaacaggacatgatatcagaggttcttgcagtgttctcatttgaacattggatgggtataagggaactcttgaccaaattggtttttagaccagaaacatgtccgaaatactgcagataatctctcatcacataggtcagcagaattgggtctcaaaatgatgatcacattgtctgcataaagagaattttggggccaatgttgctgttcagctatggactgcaacaggtggctcctgaaagccagtttgattagagagctgagcacatacatatccatcacaagaatgaagagcaaggagaggggatcgccttgccggagtccacgagtgtgattaaaagatctaccaggatggccattcattaatatttgtgtgctggatgtggaaagaaccagacatataagattccatcatcgttgaccaaaacccaagtgttgtagaatctctagcataaaaggccaataaactgcaaaagctttagaaatgtccaattttaagaggtgtgaggctctttacttctgtgcagcactcgagcaagttcttggacaagaatgaaattatcatgaatgcatcttcctctcacaaatgcactctgattattggagacgaggctagacattagaggtgctaggcgattagcaagtatcttggttaccaactttgcaaagctgtga

SEQ ID NO: 14362 - DNA, 348 bp, Zea Mays
ctcgcacacaagaaaatccctagcaaccataaaggagatcaaggtctagcagaggtgacgactgtggcaagggctctggccaagagcaaaagctatattgcatcatccatggcaaagacatcgggcactaaattaaatattgccctgtcacaagggataccaaggagataatgtcaaggtcgatcccagatcaactagcaaaggctatagcacatacctatcaaccacaaggcccacctactaccaaaatgttcaaccccctacccgcattatcccttaactaacacccaaagctacaccatgaagaaagactgcaaccccctccaccaccacaaaacatacccccac

SEQ ID NO: 14363 - DNA, 570 bp, Zea Mays
cgctgctgcagatctgtgcatccgttcggccggcgttgcgcgacgggatcgtagggacggacaacgcccgatgccgacgggtccgctcggaaggagcgagcgaaattgcctactccagcccccgtcctcctctgcccgtatgtttaattttctatttgtagagtatgaatataggggtaaaagaaggtggcagtggagcagtcctaattctccacttcgtggctcctcgatgatgcatgtcggccgagggataacgtatgcgttcgtggttggtgggtgggcacgagggggctacatacaagtcgaccactgcgctaggtaggccgagggagtactaatagtttgttttttcacaaccaaactacaaaaagaaaatcccaccgtccgcatcgattgtgccgccgtctgctggccacgagccacgagccacgtctcaggtccactgcgaactgagtgcgcggcgcgacctgactgacctcaatggagggggagcgtcattgagtcacgtcacgctccaacacgccggcgtcgccgatatttcctcctctgcttcacctttttcctcccgga

SEQ ID NO: 14364 - DNA, 626 bp, Zea Mays
gttgattcgtatttttctcgagggctcttaagtaaaatgtccaggccgaaggggtatggatcaatactggctgcccgatccgaaacggacgcgcgagattagatcaggcgcaaaacgaatcggtacgcccaaagaactgttggatcgagatccagaggcccaaaatttatgaaaccttatctggttactaccgttcgatctgcgattcaacggcagggatcagtccaagcgaaggggtacacgcggttgaatctgggccgtttgcggcgagatccgcggccgagagcccatcccctacctctggtgaccgcacggcgacgccaacagacccgcacggcggcgcccaccggcgagcgcgctccacagcccgccaccacccccaaacccaaattaaatttcgctgcgcaccgagaaggtcatagcggacatctacgtgggatcatacctgcgctccgagaggtggtgaggccggaccacgacgatgggcgcagctgcggcggtgggagcagctccggtgccgaattcacgcgccaaatgttgcccacggatgaaattgtacggctgagcacgctctgcgcacgatatccctcccccgagcccgcgcggcaaatcaccactctctctgt

SEQ ID NO: 14365 - DNA, 764 bp, Zea Mays
ccaatttccccccgccgccggcctgctcctccgtacccgcgctttttcctctcgtcgccgcggcaattaatcaccaccaacactagtagtagtgccctcgcgcctggttactgctgattccacatctcctgccttcctctgcttttccgccaaaatcaagtcaaattaaattctctttgtgtaaatttcatcatcagttaattaacggcacgaccagtagatttcgcctctaattgcaacaattctgtagaaaactttcgtaggtagccgtgaattgcttctcgtacatggcagcttttttttagtttgctgactgccggtgaattcctgctccgtcaatgctggaaaagtaggagtcatttttttatcttccgttcaggaaaactcgtcaaatccgccccctggtaggaattaggatcacatcagatttacacgactcaggcgaagagtcaactcgaaccttcctagttgttaccctaggctacgcctcattggccaccacctgtcgtaacatagaattttctccggcctcttcgcctttccgatatggctattgttttttttttcagtctctgttttcgttttgggttgtgcggctagtatctgcggccaccgctagtacaattcacgttacggggcgttgtccggttcttgctgtgtggacgtgtttgtgcgccaactcccagcgccctttttccacagatttcttctcttccagctccaccatggtcgtcacgcatgtgcgtaattgcccacttggaccg

SEQ ID NO: 14366 - DNA, 285 bp, Zea Mays
ggaggaggacacatcaaggttgagtgagcttatcgctctcgctgatgtaggattacacggggaagaggaggatgacacatcaaggttgagtgagctcatcgcactagctgaggcaggattacatgctcaagaggaggaggacgagtttatgtctcaggccaccaaagaagtagaggccgcttattacaagcagaagtgtgatgaggctgaggtagaggaccagctattctccccagctatagatgaataagaagccagttattacaagagaaaggcggaaaagtg

SEQ ID NO: 14367 - DNA, 541 bp, Zea Mays
gtgttgccttgtttcatgattcacagtaatctagaataagtgaccaacattggcacccaccttcggtgaacttaaacgaccaccttcatcaagagaactctacaaccaccttcgtcatgctgccgaagaagacaacgacgctaggggatgtccttgctcccctagacaccaatcaagatgggatccttctaagggaggcccgaagccagaagaggaaagctattagtccaacaccacaagacgaagagttggatcaagagatcagagatctagaagctattcatcaacaagtggagaaaagaagggcttcggctggctaagcttcagaagaacattgaccaagtagtcgaagaaatgcgacacatcgcacaggacactgaacaagggcatcaaccacaacagaaagaccttcgtcaagaaggccccagccatgatgacatatggtatgacgactttcaccatgatagcattgcttttgatgacgcttcccctctagctacagagttgcaggctatcccatgaccaccttcatacaagccac

SEQ ID NO: 14368 - DNA, 887 bp, Zea Mays
gcgagcaccgtccaagaaagcagaagtttggattaagtcggcctggctctaggaatacttctcttcaatgtcagagcaccaccgagccaaatctgataaagcaacaaaagaagagcgcaagatttagaatgagcgagtaatgaaagcaaatagggaagctatgagctcactaacaattatttgatgccctcagatcatctatttgtttttgaagcagtagagggttccactgcatcagagacgaaacttgatcagggacaggagcaccgcaggatctcagttgggcagatacaccatcaagaacatcatatgattatgaaaagataagaaaaaaactactttgctagcaggaacagtaaaaaagcgaaagttgattcacctaaagattggagaggaacaagggaagacccaaagtaggaagagttgatgcattgcttgatgaggggagatcagcatgaatgatatcaaaggcatgacccggaggaacttcagtcccatcagcaggcgacatgctcctggcgtctggttcactggcctctaaagttaccagaccagcaagagccatagataaacatgtcaccatagcctctttggattggactggcgacgatccaacgtggacatccatggaagcagcagaaggggaacctaccgcaacaccctcggggactgagtcgctatcagcaccaccctcggggtctaggtcctccacgacagccacctctagggctggagatccctcaccacatccataggagctgggtgactcggatcagcatctttgtgaggaagaccgccctctaaggtcgacgaggcacgagaagctacccgggtgatctcttgcccgatagaatcatgtgatagaagaccaccatctgggacctctg

SEQ ID NO: 14369 - DNA, 549 bp, Zea Mays
gcataacctactcaaggcgaccaaggaacatgcatcaattggacaagaacgccatgagaacggcctgtccacgttcacggtgggaaccgcggcgttgatcccatgttcccaattacgcaggcccggattgggcaaacggttgctacggtgagctttacgtgcctacatagatgctagaacaatacttgagaggcgcggaactttaccagagtggtctggccacggtggggtgggtttcacggcggcggaaaatgatttggggagaactccgaattcgcggctctcagtgaatgattgaggctgattcgaggtggctggttagcggacgaccttgcggagctagtcacaggctcaatttatagggaggacgggcggtggtgatcaatttggccgagccgtgctggcggccggagctggagaggaacgtgggtgcggtgaattcgtgtccaccgccgtggcaacctccccgtcgacgatgggacgggtatagggagtcatggcgacgcggtggaaaggcttggacacgcggcgcacagccgggaagcggcg

SEQ ID NO: 14370 - DNA, 438 bp, Zea Mays
ttaaatgagatgaaggggtacgcgacttttaatcctgaccgcacacccgcgatcaggcggtcctggtgcttcttccccagccatcgccgggtaatggcggtgcccaagctcccacggcgacgcccgcgccgccgcgaggcaacctcgatcatcgctgcgctaccgaagacttaatccgtcccaaaataaagtggaggatagggcgaacacatgactggggaaattactgatgatcagagcgggggaggtgtctgcccatgaaccggggcggattgttggcgacgcaaatgctccgatgataaattaggggtggccccactatcgagtccgcccaagattgccttggatgaccgcccagtgactcgatggaggccccaggcctgatttcggacgtcgggtgacgccgtggtgtaagatccgcggcggcgctgcttctcg

SEQ ID NO: 14371 - DNA, 378 bp, Zea Mays
ccgtgactcactctagctccccgttgatcgccggagcaattgccacggcactggacaccaagccattgcgccagtaaactttccctttctctgaccgccgcgcgtcaccgttcaaattcccggccaccgccctcccgtagtataaattgaccctgccgcgagctccgtaaggtagttaagcatccagccaccaagaattagcctcaatcgttcaccagggtgtgcgaattttgaacttcccccaaatccgcgcaagaacatcgtaggagagacctcgccgcggccagctcaactcaggtcagtccaagtccctcaattgcttgttctagcgtccctaggccctcctcaagctcctcgacccctttaattgaattggac

SEQ ID NO: 14372 - DNA, 964 bp, Zea Mays
cgcagatgtagaaaaattttacaaaggttatgcacatgatggtgggttctcagttcgtattggacaacataagaaggttaatgatgaaattaaaggcaaatatttttattgtgcaagagaagggtatagagtacataaggacaaaaaagatattgatcagtctggaaaaaagagaaagaagagacataacgtgatggaaacaaggtgtgggtgtgcggcaaacatctatgtgaaccttggtaccaacaagaagtacacgatttcttcaatggttgagcagcataatcatggtcttgtatcgccgctccaccgacattttcttcgatccaaccgtcatgttacagagagggcgaagagtactttgtacaattgccataaagctagtattggcacatcctttgcattcagattgatgcatgttagtgatgggggatttcaaaatgttgggtgtacactgagtgatctcaaaaactattaccgtgacctaaggacaaaaatcaaggatgcagatgcccagatatttgtgtctcagctcgagaggaagaaggaagtcaattctgcatttttttatgactttgaagtggatgatcatggaagactaatgcgagtgttttgggttgatgccataagtaggaaaaattatagtatttttggtgatgtggtttctcttgatgcaacatattctactaaccaatataacatgaagtttgtgccgttcactggagtgaaccaccacttgcaaagtattttccttggagcggcattcatggctgatgaaaagatcgagtcatatgtatggttgttcaagatctttcttaaagccatgggtggagcagcacctcatttaatcgtaactgatgaatgcgcaagcatgaaggctgctatcaatatgattttgccaaacaccacccataggctatgtatgtggcatatcatggagaaggtacctgagagggtcagtcca

SEQ ID NO: 14373 - DNA, 1722 bp, Zea Mays
aatcattgtatcgcattgggcctcatgggttgatgattatagagtacataggactaacaccctatgtggacgaacaatgttttactacacctatttactctaacatgcccctgtagtcacagtgggagcatcgtaggcggtgaaactggagaagttgataagctaacatcctcttgtagtcataacgattgatgcatcacttatggagtggctggagaagctgatgagtcatcatgcaagatagtaaccctttgtgccaacgtcaaagtagttgagcgtgagagcgcatgagccgtggttgtggatatcatgatagagatagccatgatcaatgtaacagtcgaggtagccgatgtcacggtggctgcacatgaagccgtaggcgcgaagagatgccatggtgatgacgaagatgcattgaggcagtcattgtggaaggggtcagtgccgggtcgacatagttagggccatcgaggaagtagaagaagacatcgacacaatcgaaagagggttgatgtactcaagctgccaggacgaagtgtgcatcgaggttgcctaggaacacactatggatgaagcacgtaccggtgttgctaatactagaaatacgaggtagagggtctcaaccatgcatcaatgtctaagggaccaacacaggaggtcgcgacgaaagttgtggtgcgcaaaatggtggggtagaaggtgccgtcgcagcccgtggttgttggagtagacgaagtaggtggggaaaagacgacactgagggtatggttgtgctagatgaataagttgtgtagaggcagagacacgtctaactgaaagcgagcaatccaggtggacgtgcttgcccaaaggcagcggttcagacataaggtacaacgacgacgttagcactcaatgttagtaatggaaaactcgaatagcttgacaaagattaggtgctgataagtgtcgcacaagaggcacaacggtcgtcgatgcacataggatgacgaggtagatgtagctttgagtgccacgtggacaaaggcatgcctgtctttgtcgatggcaaccacgggcaacgatgctatggcttaaggaggctcacaacaaccattgcttggagaagatgcctgtagtacttgatgatggatgtcacgggggagccgggtggatcgcacacaccggttggtcaaaccgagtatgcgtgaggtgggtccacgatggaagaagtcagtggaggcgtctcgataagtggtggccgagacgtgcagacaagatgatcgagaagcgacgcaggaaggtgtctccttagtagcgcatgctcgaccaggtcgcatagtcgaaggtagatggtggtatagtcgataccaatggagtagacatgcgtgaggttggcagacggtgggtgactcaaccccgatcagtgatagggcaaaccagatcaaaactgatgacaatggagggcgatggagtagcccgacgtgaggtttggaaggatcacaaattcacagtgctcaacggggtgggtgaattgggcttctctatttttttgcgataattaaatcctaattgcaagcccaacataacccgagtgcctaatttgtacacagagttttgcaccctaataccaaccctatgctatcatggcaattctaagaatgtaaatactcaaagtaagttgcacgaatgtaattgtggaaagtaaagcaagggttgagtagactcctcaagttttcc

SEQ ID NO: 14374 - DNA, 1320 bp, Zea Mays
attttatatagataggttcgtgtctcatgttgtttgctgcgcaaggtggcactaaacgatgcgctactgctgcgttgctcacattgacgtggtgcctgtgctcgtcagtcgccattaggctgggcacggtgggccgttggcgtgatggtcgtgcggcctggccttgtgcgttatatatagtgtattttatttgtgtgtgtgtatatatatattgtgtattttatttatttctaatatcgagctacttgagtgactgggcattttttaacacagttggagcaagaaaaggttgaactttgactatgtgaacttgtaatctttataaaattgttatattgtgaacttgttatattatgtacttgtgatctttgtgaatttattatattgtgaattgtggacactactctgcgtgcctggggagccttgtcccttttgcacgaccagcgttgcggtcgctcgatgaacctgaaatctcccatttcttccgctcctgatggacgagacactactcggtgaagagaagcttgccactgatggtgactgacacggcgtgtggtggctaatcgtgattgtcgatagccttgaggcaacccgttacatcctcgatcgtcaatttggggagtccaacatagtctccattgctaaggcgacctgcatatatttcttcgggacgcggacgaacttctctatggattccttctcatcgatgttgtcattgccgtatcacgtcatctgatgcatcaggctggagagacagagaacaaagtcgttgacgtcctcgctcggtcagaacgccaggcaatcccactcctaacacaacttttcttggtggctctgcgggcgcggttgctacttataagtgccacgtctggcatcctaggtgttcttggtagtctccttgcccgtgaggacagacatcatctctgacgggatagcaacaaggagggcctccatcgcctgccgatcctcgtggaagttgtcgtcaccgtactgcaccgcatcccacatccgtcaagcatgcaacttcaccttcataaccaagcttcgctcatagttggcattggtgagcatgggccatctacctgccgaactcctttacgaggtcttgatgacggggggagctgtgtcagccatggtggacacgacgttgctccggtgaagaggagacatggcgatgtctgtggggcgtctgcgtgtccctgctccacgcgctcatgtcctgcagatcccgctcccgctcctggtcggcccacatgttttgctctggcttgctagcgtctgtgcgcccctgctggatgcacccgcgtcattcagatctcg

SEQ ID NO: 14375 - DNA, 698 bp, Zea Mays
tgaaattcaacattcaataacaattaaaggaaaatacattgcatataaaggaaggatattgacagtcgccccaaacaaccaagacggcgatgagggtcgcctacgaatagtagagacccatgtcggatgatagtgctcgatttacgatttcaaagggggggaagagtgagaaaatgaccaatggaagtgagggggaggttgtcgaacagaagggcgtgtgcgaggtaggtgggggttgctatagcgtgggtgagtgacacgacgctattggaagaagattgtatggagagagagagaatggtatgcacagactatgtaatcactcttgtggcgtcaggcgggttgtcacaacaaggtgtcgcgacgaagtcgatgaagcaacagttaccgtatagatgttcaaacgggtcggaccgcccataacccggtaagattttggtccggctcgaacacgacccacacggtggttacggggctgtgcctaggcctaggcatggtgaggcggtcacgctcaaaccaatcgtgggcccaactaaccacccaccggcccaatccacttttccttgcgcgtcccacgcaagcattcatatccacacacgaaggtcgactcattatcgtgtgggggctcgcagcccaggacgtcactgcacgaacccccatcttgctcacgctgtcagctaggacctaatcaccagtca

SEQ ID NO: 14376 - DNA, 928 bp, Zea Mays
gataattgagcctgaagttggactgtcagactgcctgaagtctgaaattcagattaacagtgtgatgggatgaactttgagtatgaattccaccttgatttagtgatcaaatgagctcagttcctatagtcgaattgtagatggtttatagctctacaactttgctataggtcactggatgtgttgccatttgaaaatcagagaaaaagtggcttaaacttgctctgtcaggcaactgaatggggggatcgccatggtacagtagctcgagtggatcaggacgccagcgcggcttactcgccgccgatgaccctcccccgtgcaaggattcgcgtcgccgcgttaaaattaacgttcgctggcaaccggataacgctgcatggttaaaagatcgtcgtcgccgtcgagctggaagccaccccggtcagccgcggtaccccttccctttgctcaccgccgtagataaagtcgctcgccgtcgtcatgccatctctgtgcccgctgcgtgtccgagcctttccacggcaccgccgtgattctctactgtcgtcccatcatcgccgatgaggttgccacgcctctggacacgtattcaccgcgcccaaggttcttccctatctccggccgccgcacatcttcattcaaattagtggccaccgcccgctagcactataaattgagccctccccaagctgcataacatcatcatcccacccagccaccgttaatcgctggcagtccttcgctagaactcgcgaatttttgattcgccccaaatccactctccgccaccgtagaatcaaactcaccgcggtcagccctttccaggttagctcatcgctctctctccctcgtttaagtactctgatggctctgtgatacttaccgagtcaccaatttgaactgagagaccaccaatcatcgggaa

SEQ ID NO: 14377 - DNA, 467 bp, Zea Mays
ccgggatctttgctgcggattccgcgacttcctgggcgtccgtggataaatagcgtgcccgtggactcttctccccgcctacctagcacctcctccacttattgcacgaagccgcaaccacggcgtcagctccgcgctcccccgcctctgacctcacgatcgccacgaccacctctgtgccagcccatcgcttttcttcgaccagtgggcgcctcgtcggagctcgggtgagcttcggccagcaccaatttcgcgtattgaatcccgacactgtgcgaacttcttgccgcgccgccacgcatcgcctcactctgtggacaaagcttctgcccacgccaatcaaggtgaggatcgccaccgagtctttgtttccctctgtgcattgcgtagcgcctcgtgcgaaaacgaattgcgggcccttggatcgggaattgctcaccggaattatctcattgcggaggatccgc

SEQ ID NO: 14378 - DNA, 603 bp, Zea Mays
atgggattcgtgctcgtcggcagttgccttatgctcactacttgtgccacatctttgcgcagctgattcagccccctcgatttcagagcacccttgaggcctcacgccttgtttttggatcctaccgtcctgcgcctgagattccggtgccagcttctacttctgtgtttgactctcaggccgaggatgcagctcttcgacagtttgacactcagggtacagcagatgatgatgatgatgatgatgattttggggttcctcctccgcctccgcctcctatgcctccacgctcacatgatcatgaggctgggagttctagtgctgcccctgctcctcctcagactatggaccctgctcttgcttcgattctggccaacctggcggccgagcaggcccggttatccgagaggatgctctcgatgtttcagaacatgcaggacaggcaggatgcccttcagcagcagctccttcaggatcgggctgagactagggcattcatggctcttatgcttcagcattctagtatctcagtacctccggttcagtctgctccacctcctccgcttcacgctccagtggtgccatcgattttgtcaggacccc

SEQ ID NO: 14379 - DNA, 418 bp, Zea Mays
gggaagttggctctgttcgagctgtccacaccgagacaaaaaccgtgtcaagttgtgtcaaacaacttagggtttggttcaaattttttccagggtgttctaggggtctttagtcgccattttgtcaattgggccctttggttttgaggtttggaaaaaggtgaacatgtttgatctttgaaagagggttggttttgaaagtgagaaaaatctgatttttcttttatgtccttctctttggttacctttttggggttattctgaattatttttggggtcactctctgactaatttttgtagggtattaagtgtactacaacttttataattagcccaagtcatgataatgtggtttacatagcccttttgtcataatcccctctagggctccatttgcctaaagggatttgaattagg

SEQ ID NO: 14380 - DNA, 887 bp, Zea Mays
ggaggaaccatcgaagaccacaccatatctatgcttccacaacatccaagcacctagagcgaccaaagagtcaaagcccttcttaatcagcccatcaagccgagcactattggaacgccaccagagatcaaaatcgtcaatatcttgtcctggaataaagccctgcagtccaaaaggcctgaacaattcgaaccagaaaagacgtgcaaatgagcaacccaccagcaagtgattaatcgattcgtcatgttggtcacaaagtgggaaaataagcgcttgagtcaagcctcttttagccaacctatatgctgtccaacatttgttgtgagccaccagccatagaaagaaccgacatgtgctaggggcccaagtcttccaaattcgactgcctgcttgaaaaacaccgagccacaaaacataggactaggccaacctaggcagtgtttatatataccgcccgagaggttcaatgcaatacatccatgtattatacataatccttctgcgattgtaatgatggctcactgtaggcattgatgggctgctgcactacacgtcatcatcgttaactcatccttgaattttccaatagcaatgccgatgttcgtagtcaagccatcttctcggtcactacctacccatatgatggcgccacccatgctaccgacccttgtcaagctggctctagattcaagtccatgaccattgaccctaagggacattgccactaatgttgctgatagatgacacatgagctcttgttgatacatttgagaagccccatttatcttggttgtttggtcatctcagcgtcctgctacagttcatcggctagaagctagtgattatgtttactcgtgtatctctgttgattcttttggacccgc

SEQ ID NO: 14381 - DNA, 621 bp, Zea Mays
gcctaaaatctcgatgataggagattggacatgctcgttcctccatgccaacattttatccaatcaatttctatatcaaatattgtcttataagtctagtattccacagcatgtaccaatattcttgattttccacctgtacacatcgaacctctatatccgtagcagtcaaatgtgtgatcagcgcactcgaattttacagcagtcagggaactataaccatttcaacaacccaatgtggcaatgtgaatatgagtgaaattctctgaaaatggcaggctcccaggttaaattacctccccaccaatcaaaattcgagcatatgaggatcaacatgactactttctagctcaatttcagaaggctccaatgcacaaatccaagctagataacttgacatagtcaatcattcctaacgaagccaaaggcaatgatttcacagggataaaaagccttgggaccatagctagtggaagcttcatgatgagccagtttcgaagtggtgcaatggtatctcagtacgaatttaatacactataaccccgagtacatttttgaaactgatcactactcttccatttgtgattaagtatagaatatttaaacacaaatgcatgcagg

SEQ ID NO: 14382 - DNA, 452 bp, Zea Mays
aaaataaatgtgtagatatttttgagcatcgaacagtccctaaatgtcagataaggagagcaaaacaaatacattcatgttcgaactcgaagacctagatgactgcaatctaaattttaatggtgtgttcctcacacatgtgtgacatgcatgaagccaaatgttttcagtagattaaagtagcccgagcagaagcgtatactgaccttgacgagccacggagaggttgaggggctcagctgtctccctctccggctgcggctactgctgggccatagaagccttgagcggcaacaccagaggtccagcggtccctggggagcctagatgtggccatcccgtcagtggtcctcactcctctaacaacagagctagcggctgcttagcatcatggtcgaccctgcccaccacggcagcggcactccgtcggcagcgacggcatggtcgaaatc

SEQ ID NO: 14383 - DNA, 690 bp, Zea Mays
aaagaattgaagcagccgaacgaactggtgctgatcgaaacgattgcatgcatgcacctccgaaatgccggaaagtgtcgtgcgtatgctatgcatgaaaccattgattttattgttattaattattaggactagttaattagcagtgacctatcattgagcaatccaccaaagtacttactagtagcagagggcaaaactttcctcgaaatgatgaggtgcataagtatgcatgtgtgagaaatgagaatggaaccaggcaaaaagactttgggaaatggattaataattaagtagtggtgacaagggggggcatggatgctgcttgatatggttccacttttttggtgatcagtggctaactagctagctaagtagtagtttggttttgacattgttatacatcttgctagctactagctataggttctgtctctacccaaccctaggtagcaacaataacatgtttttttaatttcatctcaagcaagcaatctcactagtacttctcacagctacatgttattatatgctgacacactttcgcaacatgcatgaacctagctagctagagcctagacctagacaaagaacctctaggctctactagctagctctcctttcccgtcgtcccgctgtattttggaaatcgatcgatcggaaattaaagcccctttagttctttatctc

SEQ ID NO: 14384 - DNA, 889 bp, Zea Mays
attttctcctgaagcaggtgcagcatttgatatgtacttagtgggtggttgtctgaatttgtgaggggggagggggataaaggattgctaaagttaaagttctatgcataattcaacgatgaaaacaatgaaacgagaaaaataataataataaattctaacagcctttttttattgtaagggtagaagctctgcttttttacttattaagatagggaaaacacatatctgtagtttatggaaaggacttaaaacataacacagattcggcaaagacaaaaaaaggctatatatgcagtatgcactgatgactcggcatggtctaatacatttagtttctataggccctaatttttctagtttagaatggtcttgttccatttagttgcgaggtcgctagggttacaagtgaccccttgtccaaaaggacaaggaaacgccatctttctgttcgtatcctcatatataaaaccaagcccggaagatgctcgatgagcgtgcattttttttctttctttctttctgaaatggcgtagcaggtggaacacacctttccatcaaaactttaaacaaggaggagctaaggatgtaagttggcaaccccgagatttggagtcctgattattgcttctgagttcggaaggcatcaaatggtgttaggatccaagaaacttctttcagactcgagagttgaggcagtgtagtaatgtatgtattgcagatggtcagtgctggtaggaagaggttatccagccaactaaatggcataagaaaacagattttgttctcctgatatgcgtgtagtcgctggattaatgaatttgtaggcaatagtttggtgattatttgagttgttaagcttctagcacagctctaacggcaagagttg

SEQ ID NO: 14385 - DNA, 735 bp, Zea Mays
ctttaaactaaatgtaaatgtgtctgagcataggagtaggcgtgatcagagaccttggagaacgcacgatactggtgaagcctttgatctccatggctggcgatagccacacgaagacgtctcaagggggctcgccgaggatgaagcccatgttgtgacagtcaagcgaagtctcatgcatggtgggttggatgccccgagcatgagtccccccctcatgcgggggagccggcatagaagacgcgaggggagccaagacgtttgggcgtcgggtgcgaaggctctgggaagatgaagacctaaggaaagcataaactccataaggttgcccatgttttatgggctgcctcactaggccagtgtatcattgtagcaactaggtaggtatttggtgtgcttgacctcgagacgttatgacactataattacccagttgcacaacatattcctaggatgtagttggtaaccaagggtacgactgtattttaggccattgtccaccggttgtcctataaatacccatgtcatgtagttagacgggacacgcttgataagacatttgcgctctcagtcatccgttttattgtgccacttgtcacccagttctcgagtgcttgggctcactgctctcagtccacaacaattgcctatctgtacgtgtgaacggtgatgaccttatatgatgtgatggtggatgaattagattagatggtatacaaattaaactttgcatga

SEQ ID NO: 14386 - DNA, 852 bp, Zea Mays
tgatcaggtataaaaatagaatcctagagatatagttggtttagacctactacaacttaagtaacaaagtcctacaaggacatgtaacaattgtgttgactatatataatgaacatgggcagcaacctaagggcttaagatcttaagccgttccaactatttccacactatcaatcaagcattgctgcatgatgagatttgttgcacagttcggaatagttgaagtggctaaaacttgatataattaaaactgatttagagtcctagtactattcaatgtggcaccatctctttgccactcaaaaaggcgagcatattagcggtctttatattgggataccatttgctatataagacttataagtgttccagtggacagtagagtttgggtgttttttaccaaagaaatggaatggagtgccatttgtgacatgcagaaaaggtagcattagggaacatttggaccatgtaaggtgtattcagggggtttgaggcttagtgatgttagtagtaggtatgatgaatatatgacagatgactggtttatgttagtcttgtgtggctgctcactcagagtctacgccggaactgtttgttgcatttgcatctatgtcctgcacactcctgcacactcataggtcttgtcaccaagggctgtcttactatagcttgctcttaaggccatcattgtgaactaccgcatgcactgcacttgtcaactattggtacatccaactgttctgatataactatcttcattaatactgaatatgaaactggaatttaccacttgtttcttagtgtttgtagcatatgaatctgatcatttcctccatgtcacttttacaaggc

SEQ ID NO: 14387 - DNA, 645 bp, Zea Mays
gcgccgcccaagagaggggtcgaaccccaatagagtggcgagcatgggaaagcgggggctgctttcccccaactgatattggagggttggattactatgggccgagaaggcatcgaaagtcggaatggcttgagatacaccagacacgacaagcatcccagaccttactcgattggtccagggatggagaatgtcagcagttaggatgacaaagtcgtggaagctggcgggaaggaggtcgttgcggctggtttgaccaacaaaacagagttggggcgtcgaatgtctaggcccaatagtcgttacccgtcgcacatgtggtccaagtgattgtatgacacgttaaatagaggcgaaggggagtctgtaaaggatatgaaaggtgaatacaataattcccacttcctcctacgcccagttcttcctcttcttcctattctctccgcgtcggtgaagcacctgacaaccagaccatctgatgcaccctattataccaaaagccatgctcgatgcccctgctttaggtgacgtggtagcctgccatttaaaactagtagttgtggtgtcaatggctaccatgacatatggtccaatgtccatcagaccaacgacaccctccatccattgcagaacagagaggttgta

SEQ ID NO: 14388 - DNA, 394 bp, Zea Mays
gccggtgcagagcgcgagcgcgtgggggatcgatgttggggaatgaggcgagcagagaggagacatggggaggattctagagacaacgagtgtgttgagacttgagagggccctgggcgtccgcgtgagggagcctggctgggtagaataaggagcccgacgtgtgagagcattccatagaaacatatgtgcttatcacaatggaatggactcgatggtgccagctcaaagtgaatacggatacgtggccacaacggaatgacgcacagatagactggcttctgttaagcggcaaaacccaggactagtagcgtccacacaggaggcaaataggtggacagcagcatgcgtgcccaaccatcgatcagagaattgaaactaagttcccagccgg

SEQ ID NO: 14389 - DNA, 390 bp, Zea Mays
attgagaaaaaaggaccaaagttattggtagtgccatgatcacaaatggattcagattagcaaaaatatgcacagctcaaaattcaaaacccattagtagcagacacaacagtgatatcacaagggtttaatttctgtacagtacagatcaacatcaggtctctaaagtaaactaaattacacaagcatgcgtgagttcctgaaacgatcagaaaaggcaaatttaaagtcaccaaacctcagagctcgctatgctgcgtagaagtccttgaaacaccagcgaagagatctttggcaatgacaagcaaaccctttaagtccttagctcccacttccaggcaatccttcagcaattccccttcctccacctcccacttaatatccatgaac

SEQ ID NO: 14390 - DNA, 804 bp, Zea Mays
aattgatcgggttgacaagcatgccaagcgtgcctgagtgctaaaataagggtgaggagggcgagaacggacctggagacggtggtccacggcgcggtggctcacggcagcgtggagatccgaattgggggaagaaaggaattagggcgctatggtggctaatcggaggcaagggcgggtgctctggcttcgtgacaacctaacggagctagtggcacactcaatttatagtgtccgtgagcggtggctctgaattttgaaggagaaggctggcggccggagagaggggtgagtcaccggagtcgcataacgtggcattaactggggtagagacctgaaacgatgactaaccaattcacacgacaccttgcgatgaggtaacagggtcagtagcgtggcggattccggtaaacgacagccacaccggcggtggccgtgcggccacgtcgtggcgcaagtggatgaggcaacaaagcggccatagtgctccgacttcatccacgacgagatcttttcaccaagggtcgttatccgcacgttactgggcgtgaatcacagcgtcagcgcgaatccgagtgcgcgggtcaccggcggcgaggttcagcgcatctgagatttttctggctactgtaccatggccatcttcttcagtcgttctgatagcgcgatttgaggagccttgttctccattttccatgtaacaacttactaatcggtttgtaacaaagttactgacctataatccagctacaattcaactatagaagccttgagcaaattctgattaaatcacacagaattcag

SEQ ID NO: 14391 - DNA, 515 bp, Zea Mays
gaaggatgcgcctcaaggatcccaatcgtggaacaagaatcggaacctaagctggcgattgaagccaaatcttggcaaatcggatgtcaaggaggacatcgtgacttcatcttctggcgatgggggccaatcaggtattctcaaaacccccctgctgctttgaaaaaagagattgagaatgtgcgtcgtcctttatgtcaaaagtgtggggtggagggtcatcatgctaaagattgttttcgatctctatggtgcgatatttgtcacaaagaaactcatatgactgctcgttgtgtcttgcccaaacaaaacaagccatgcatgcctattgttggtatggcggctgatggattagggttttattcttctcatttcgcgaaacccttgtccagaaaaccaaaaagaagcttcatcgggttggtaaaggttgtcgagggtctgatttctgctcaagactttgagaaggactttggttttcattttccatggggcaaaacttggaaagcaaccaagtg

SEQ ID NO: 14392 - DNA, 373 bp, Zea Mays
agaaaggagattgttgttttaaagcttgaattgacttaagcttttgacatgatggagcattcggtattcctttaagtcatagaggctttgggctccccatcagtttgcaaatgactaatattctttcatcggccacatcatttattttgttcaatggagtccctgggaaacaatttcaatgtaaaagatgggttaggcaaggcagtccctcttatttgttcttgctacaaaagtcctacagtatgctattaataaatcccttgatctcggcatcatccagctacccctcccgcaaagaaattggccttttccaataatccaatatgcagatgataggtcatgtctgttaatgctagacatcttttctatctaa

SEQ ID NO: 14393 - DNA, 331 bp, Zea Mays
ggaattttgtcaaggcaccagtgatcaagatggataacctgtctgcgatttctctgagcaagaatccagtgtttcacaagagaagtaaacacataaaactgaagtatcattttatcagggagttcattgatcgaggggagattgagctggaagttgttggcacctctgatcagttggccgacatcctgacgaaagctttggcaaaagtgcgatttcaagaccttcggggaaggattggagtaatcaaactgcattcgactctgaactaagggggagattgttagttagtttcagagtttagttaagtctgcatctttcatttcagtgtatg

SEQ ID NO: 14394 - DNA, 628 bp, Zea Mays
gcgagatcgttcgcctccatgggattcctcagtccatggtgtcggaccgggactctatgttcacctcggcgttctggaaggagttaatgcgcctcacaggcaccaagctgcacatgacgtccgccttccacccgcagtctgatggccagacggaggtggccaacaaagtcatcgtcatgtacctccggtgcttcactggggaccggccccatcagtggctacgttggctaccgtgggcggagtatgtctacaacacggcgtaccaatcatcacttagggacactcctttcaaggtggtttacggcagggatcctccctccatccgctcttatgagcctggcgatacccaggtggcggtggtggccaagacaatggctgaacgtgaggagctcctagcggatgttcactaccgcctggaacaagcccaggtcgtccagaagaagttctacgatcgcctgcaccgaccggtctcctataccgtgggcgactgggtgctgctgcgcctgcatcatcgggcagcctcctcccttccccacgcgcccaagggcaagctgaagctgcgcttcgtcgggccgtatcaagtcacagagctcatcaatccggtggcagttcgcctagcgctacctcc

SEQ ID NO: 14395 - DNA, 294 bp, Zea Mays
tggcaagcaaggagttactgctcttgagccgttgtaccggcaggcgccatgacgaactcgtctagtggaatatctcaccgccgctgtgatcgcctttgtctcaaattggcgaagcacatagccagctcctttaaattgagcattacccttgctccgcctctctattacgcgctcataccaccctcagttagtctctctcgtgcaccatagcccccagtcactggatttccctcaaaacgggtcactcacgccgctgtgagacaccctgccatgatcagccattcccaggtccgt

SEQ ID NO: 14396 - DNA, 481 bp, Zea Mays
tttgcttgtatcactatatcttcagctttagtggctaaacttaacctttcaactagattattagcaacctcaggagtaaggcccatgaatctgtaggctacaaacatattgtcaaagtcaataaaagatgctaagggcaatcaaagaaagaaggtcaaaccttcaagatcatgaaggactgagtcaagaccagtccagagtctctacaccagctcagataactcagtttttatccttttatccctggtcagatctagctccatggagtttgccgcttgagattttttgtgcgtcagcatgagcaaaagatatttctttgccaactcatttatgatggcctggtcatcctaggatggctattccagaacctagagttggcccctaaaggcttaggccttatcctgaccaagggacaggtcctgagaccctgctcgacgaggttcagaaacaaatccaaaagattgaaagcgttaggaacgac

SEQ ID NO: 14397 - DNA, 644 bp, Zea Mays
cctcaaagccagccacaaacccacccagggcggcctggagaagatgaccaacagaatccgagttcaacttgaaaatgcatgtgccgaaagaaaccaccaaccagaaggacgacagaagactgtggcgagcaggacaaaccgaagaggccaaattaagccagagggaatcctcgaaggccaactccgactgaaagtccaggcgggcgagttccatgcttgaggaaacaagaagaccagaaggcagaggcgagaggacctgaacttggtggccgacgagaggaaaggggaggaggaagccaccaccgccatggtcagatcaccggacgggagacgccacccggcatcaccggttccttcccgttagcttgccctggaggagcggcttgggggccatcaaactccctagtgtggtgtgggaaacattctcaagcatgtgactggtgacatttagtttgactaatctctactactaattatgttagtatcgtaggcgtccacatttctctacggtgcacggttctgccgtcgccagcgcgccccctccgcgctccatctgcctccctccgctagaatcttgcggcttcctccgctcttcgccatcagcgctccccgatcccccgcagccccgtcaccttcctccccaa

SEQ ID NO: 14398 - DNA, 602 bp, Zea Mays
gtggaggacacccccagcccacgagcctctagctctagctaggcgaggtcgaggagagcacggatgacaaccacagccgcatgcacgctcaagctctagctactcctacttgcacggtgtggccggccttttgtaatgcgcgggattgcggagccgagaggccaggtgacgggcgttggcagggggtgctcctgtccaggaggagaggcgctctgcgtggttcgtgaaaggggcaggtgaggcatttcgctccgcgctagcagccatcagccatggcagcgggcggaggtgctacctgcgctccgcaaccagacgaaacgacgcacgtggagtggttcaaacgttgtcctggtggagatggcaagtccgttttcgtatgttggcagatgaccgttgtgtggtgcgatgtgctggggtcgatacgacacaagtagttgtgcttatctggcgaaaccatgctactccattagtccagtgtctagagggcaaagcatcacaagaccatcctgctatggataacaataggggtggtaatctctactaactattaaggcattagtgtagactgaccccgcccccctctacgcgtggcaacccccacc

SEQ ID NO: 14399 - DNA, 369 bp, Zea Mays
cccgattatggggcatcgacaaaattagctcagcaaatgtacttcatcgacccccatattcactttcaagagtctcgagccaattatactaaaaaattgactcaagcctctagggcttatgggggtggatatcccttgggtcatcatggcatgaatatgcttcatggaccgcttatgcggcccgatgggtcaccaatgaagcatgtcgtgggcctcagcaagacataactgaagccgagtaaagcggccacatgccgtgtcgaagggataactggaggcacgtaccttgcatgtagcctgtgcatgcctcgtgaggagctaactgaactccggaaatactcaggatgtctatagcggatatgggtagac

SEQ ID NO: 14400 - DNA, 477 bp, Zea Mays
tcaaatttgacatcatactttcacctccatgaattacctccctgatggtattggttagtccagtcagctcattgaccaactgattcctctcttgtagtacaacattagacatatcagttgttctagacttaagctctcgcagatggtcaagctgaacagattcaacagtttgttgaatatcagaaatagcaatttctttctctgcaattagtgtataccaatctgattcctcttgatcaaacatattcatgatctcctgctccctgcatgaaaatttctgctcagcgaatctaagcctttcttccagctccaaaagttttttgtcagagatctcaacaatttcagaataccagttcttcacttcatgaatggacttgtcacactccatcttgataagacttcccaaatcaagtttcttgaccatgttttcttcttctagcacagcgacgtattgctgaagtttatcaatcatcattc

SEQ ID NO: 14401 - DNA, 424 bp, Zea Mays
aggttgcggcaatgggagctggtgcagtaggagcagctaacggaggaccttatggggagctggatctctttggagcccctccttccatgaacatcgtggatgattgtcctcctgaagctagcagtggagcaggagcagccaaggacgcggatgactcgattactgtagtagtaggttgtttccttatgtaatctaaataaggaaaagtgagttgtataagttaagtatgcataatttgaacaagtttggaataatgtaacacaggctgtgtaattgtgatatgtaataaccaagtatgttttcttctttagatgccgtccagaactcttggtcatgatggggatgaaacttcccgtggtggggaggaaactctgatcccaccgcctgtacctcccacgctagcagaggccattgctgctttgat

SEQ ID NO: 14402 - DNA, 798 bp, Zea Mays
cgcggtagaggtgcagcctcagccgaccgagtcataggtgtcacaatggtcctgggtccacccgacgtaggtgcaattctgcacggggcggaggcttatcgagatcctcatgccttagagttcgtcggcgtaggtcttgctatagttgggcgaggtaggcctgctaccgcatttggtgccattggagaagatcttttcctggatgagtccgcaatgcggtgcaggatgccttcctgatctgcaatgcggtgcaggatgccttcctgatctgcaatgcatcagagggatctaaagcagaggatctttccagcattgaaggtgaccgggatgttgaaggctatagccatggagtcgttgtagatcaatgttgcaccccctacctggtgggctagctgtcggtgtttgtgacacgaccgtgcaccacagggttacccacgtgatgcttttgggtaggacgacatcattgaccgcaactcgatggtacatgcaggagcatgttggaattgcatagggatttatacaggtttgggtcgcttgaatgtgtaacacattacttcctattgaggccatgtattggagttgctttggagtatatggattacaaatgagatgcgatggtgctcagagatcatggatgagtgctagtgtgtgatgggatgagatgtgatgttttcgtaggggtacccccttggacttatatagatgactagaggggtatccctttacaagttgtgatcactatctactctacttatctcctttatcacgacatgtcgtcctgtttatccggagttcaaa

SEQ ID NO: 14403 - DNA, 427 bp, Zea Mays
gcgagtccagatgagtcagaagatggaggaaacagagaagttggtggaacaactccgactggagcagaggagcaaagaacttggagaaatgctaggagcagctgtggaaggggaacaacaccatcagccaccagttcctccattcatgaggccacaacaggaaaggagggaaccaccacgaggttttcatggtggcatgcatggtggtcagggagaactacgcccacatggggagcagtatcatcaaccactactgaagctgccatttccgaagtactctgaaggcgatccagtggtatggttaaataattgtttggaatatttttcgatcttcagtgtggcagctactatgtgggtttcagttgcatcgatgaatttggaacatactgcggcacaatggtggcagtttcacgaaatgtgtaatggt

SEQ ID NO: 14404 - DNA, 625 bp, Zea Mays
gaggagtcaacatgaggcagaagtagaggacagatccgatggcgtgcggtgcgtcgtcaatcgccgtctcgaccgctccctcctcatgtcatttcatctcgtcagcgccggagcagagtgactgagtgagagagcgcacgcacgcgcaagacgggaaggagtaattaattattgtaggaaaaaaaacaaggatgggatgagagcactcgtatgtatgcaacggatgaaattggaagcctatccggcggcggcggcagttgtaacatttgcatttggctaggatctctcttctcactgtcgtagtctcgttctcgtctcatcacatctgccaaccaccgtccagctaggagcgcagatggatccaatccaaccagccgtgcatgcaagcaataataatacggcaacagattacaatgaaccaggcaaagcaactaactctcgactggatgtgtggccatcgatcaaactgccagagcagaagctagctttcctttattgacagctgctgtcgtcgctgcacagaacactgctagtaccatctaccacaatgatatactccagcatgagtagtcgctaggcactgcagtcagtacctgcgtcgccggaagcagcggcccgattcccc

SEQ ID NO: 14405 - DNA, 282 bp, Zea Mays
ggcggttgttaaggaggagcggtttctcttgtgtgtcggatcaatttaagactctgcagtccgtctcatgaactcttgtttcttgtacaggagcagaaactcggttgtctgaaacatccagcggttctttctctcgtgcccccgccccttcaagagctgaaaccgcgtctacgatcctcagcctctcacccctgttggtttctggaatccatcacgtcgctatcggattattacagctccatctgcttggagagcaagagctccatgcatccagcgcatgtg

SEQ ID NO: 14406 - DNA, 274 bp, Zea Mays
ccctaatccaagaaagaaacctccaagatacagcaacactgccatcactaaagattttgcacagataacaccacataccacaacactgcttactctgcagttctgccactaccaagaccttgtcaattatcatccctctctcccatcctgcagagtgcaggcagtcctgagatcctgataccccatcaatccacctcaaactccatcccctccaccatcctcatttatccatcatctacttatctactaatgccacgtgtggtaataggtgtga

SEQ ID NO: 14407 - DNA, 500 bp, Zea Mays
gcgatgcttccgttgcgtcgtgtaagtcaccagatcagacatgtcctcctggcaatttctgaattgttcgtgctcggtccaattcttcgaacagttgccatgtcggcaataggtaatgatatactgttcatgtttcgttgtcttggagatccagtgaaatggagcctcagattgtttagatccctgtgtttacccatgcctcaacaattccttatcataattaccatggaccgacggtgaattagatccttctttgccctgctgcagcgtgcctttgtttatgactactacaccattgaattagttcatcttatgtaaattcgaaattaccttcctggcattttgatcttagcctcgacttcaagactaatagacacttgatcgcaggttgatttttatagtctgttgctcaccagtaaagtgcatgagtcactgaggtgtcctctaatgctgaatttctgattgcatgtgtgctgactttgtcgttatctcgctaatgc

SEQ ID NO: 14408 - DNA, 516 bp, Zea Mays
acctaatgcaacaaacataggcaggtagtgcataaattaattactgcaaaacataggaaattagatgtcgatcaggacactattgagcttaagctttcggctcaccctcttcaatgagaacttcctgtagctcctcggcaatctctactggaactttctcctgtgatcctgtatgatgcatgggtgtagtatgaggatgggtgatgcatagtgcaagagatgcatgatgtttatgggtgcatgtcgaggttagccataaactggttctacaagatagtctacatcatccaagaacatgtagcttgacttttcttggttggtcctaattattgttttaagaaatcatacaacccatcaccatttacactacaaggtattcctacctagtagggttggaaggtatactcctattccaaattacactacacatacatgtgcacacacacattcaatatacttcatttattttaagagtagttcatctcttagtgagaaggacttactaaataatttgga

SEQ ID NO: 14409 - DNA, 460 bp, Zea Mays
tgtaaatcttgcactgggaacttggggtgaccagcaggtgcttggtcatagggtggtggtcctggggcgaaggaggcagatggtgaccatgcactaatcactagattgcttgaagtgtttgaggccgaaggtaaatttagcattggctcttgtaaatgaggttgaacatactatgggatataaggtgaacagtgcgatgatgtactgaacaccttctttgactaggaggattgagtaggtgacgaatcaagttccttctgcttgttatagtatgatggcatgtttttgtggtgtgccctttgtcctaaccacaaaacaagcagaatggcttccttggaggtgcattggaccttccaccaaaacttcggcctccccttatgcctctcatagcaggtggacaaaacacgttatgtgaaggttgctgctgagagcttgcttgctattgggaaattacttgctg

SEQ ID NO: 14410 - DNA, 337 bp, Zea Mays
atcggaggagacttctcgcgacgtttcaagccaagagcgggggattctgcctttaaagagtggttcatccctcgagtagcagccatgccttgcttctctcccactcgcggcgtcctctcgcctccgagctctctgcgcccctttgccttcaaggtctctgctttgcattgccatagttttccatggccttataagttcatcccgagcgtgcccagactgagtgagtgctcgacatggtataccgcctgcttggatgggatgcgccggcgttcggcggaaggatttgcgctggcgccatccacttcagtgaacttgttgctggagagttcgtgccttt

SEQ ID NO: 14411 - DNA, 713 bp, Zea Mays
gtgatctacaggtgctagatttacatggtaacaagattgaagggcggcttccgaggggcctttctaagtgctttcacttggagattttggacatcagtagcaacagaatgctgatacttttccttcttggttgaggaggctttgtaatctttctatactactcctaagatcaaaccaattctatggcaccattggtgatggggataccaaatcggctagtgagttttttcctagcctgcaaattattgatctttcctcaaacaacctctctggtgttttgagggcacaatggttgatgcagttgaattcaatgatggcagagtacaatagttctggagaaactattgattttgatagcaataattattcatatgaaccattctatcgatattctattgagttcacgtacaaggggtattttatgacatttgaaaggatgttgactactgtaacactaattgacttctccaataatagactggagggcaccattcctgaagctcttggaagccttctatcactacggatactaaatttgtcgcacaataacttcatcggaaatattccagctcaacttggtagcctcacagatttggagtcactagacctctcctgcaaccaactcttaggagagattcctcaagagctgactgatctcacttttcttgcgaccctgaacctatcagacaatgacttggtagggaggataccac

SEQ ID NO: 14412 - DNA, 664 bp, Zea Mays
caagcatccagagccgcccgatcataaatcagtggctacgattaaatctacattaatcgaacggatacgcgacgtggaccgcccgatccaacatcaacgtcatggattttattaggcgcgatctgatctactccctccgatccgattacaacggtccagatcccatcaagtgaagaggtatcgcgatttaatcgtgaccacccattcacgatccgatggcccacactgcctggtatcgtcttctccctcataacccttagacggcggcgcggaccaggtgaccaagcaggccacggcggcggcattgacggaaagcgcccatcgaagtccgagctccccatcggccaccactgtcaaattgaacggagctacacggtatgcgcggcatcacggtcacaatggatgtattcttaccggcattaaggtgcggatgaagcttggccacggcgcacggcggattcatggcggattttgtatgacggcgagcaactccggaataacaacccccagcaggaaccagatggagctcggacgcgatccttggctcccgacaacacttccaggaccaaccgcaaagctccgcccgtcgtaggggacggattcgatgccagcggcgaagctcccgtgatcctggcgcatggtcgattcctccccaagatggcgg

SEQ ID NO: 14413 - DNA, 893 bp, Zea Mays
ggagagtcgtgagtgaatgccgctggaggcaaagaatgtggtgagggcattattaacaaactcagtgccattatcagcctgtatagtcttgatagggaggctgaactgtgtgtggacataagcgcaaaaattaatgatgtgagtggctacctcggacttgcagactagagggaaagtccagcaaaagtgagtgaagtcatcgaggatgactaggtagtactgcgcaccagagacactggcaacgggagaggtccaaacatcacagtgaataagctcaaatggtagagatgaaactgaactggaatttccgaagggcagccgcacgtgcttgccaagttgacatgaatgacatagagtatgagcggacttattacatgagatggaattattttgtctaagcaaatttagggcagcagctcctggatgaccaagacgatggtgctagaggttggtggaggtggcgaggttggcttggggcgtggcagggacggtgtagaggccgtcggagctattagagcggagaatcacgcgtctggtctgcagatccttgacagaaaaaccaaacgcgtcaaattcgatagtgcaattgttgccacgagtaaattggcgaaatgaaagtaagttgcgcactagagatgggacaactagaacattgcaaagcgaaaaggatgaagtgctaccaggcaatgtggaggtgccggagcaagacacaggaaggtgatgaccgttgccaacagtgatggatgggacagaggagggttgatgggagagaagtataccatccgtgttgtgcatgtgggaggtggcaccagagtccatgacccagccggagttctggagcgccatctggttcagggcggcgatgaggctggcctgatcccacaccgggtaag

SEQ ID NO: 14414 - DNA, 603 bp, Zea Mays
ccgggggagcaaagagaaagagggttgtgagtattctcaaaaggcagaccattcgatccgtcaaagaagatcagagggctgttaagaagcataaagttctagcagagtcgaaggattcggctcccatagaacgaaagcttgttaggatggctactgcagagatgaaggtacaagatgtaccagaaaagactgcgggtccttctccgtcttcctctatcgatgtttcagaaatactgaaggtaatgactgaacccttcctggttgcaatgctaagtcccctggggtcatatttgactagcctattgcaatcaaaggagaagggatttgaacaaagctcgggaggaaagaagactgcttcggctaccgagggaaatgtcgggggtcagaagaaacgacgaatgatggacgtaatgcaagccatccaaaagaccccgccctcgacttcggcggaaaaaattgttgtgcgtgctaatgccgaatatactaccgaagctaaagctaatgaagccacacgtgaagctcagaacctcgggaccacaatgtcagagattggcagacttataactgatgtggctcccaagaaagacatagtcgaagtatcca

SEQ ID NO: 14415 - DNA, 709 bp, Zea Mays
gccaccaccaacgtcccagcaggagcagcatcagaagagtcctcagccagcaaatcaagcatagcacttatttctgcgtcactaggatccaaaggtacctcaaagtggacttgccgttcatcatcaggaatttccccgagcgaggcaaccaaggcgttaacttcttcagcagagggtcacactctaaggcccaaacttccatcagcaacaggtggattcaaagcaaaatgagtgaaggctttggaaggaggcaggttccaggccgagtatgccactggggcaccaacgtttgataccttgcccctaagaatcatctcaagtcggttcaccaagtctacggagggaattcttctgttggtaacccgagttgagtcagctaggcctcggtacagataagccgggtaagccctgtccttcaacgactgaatgttcttgaaaacaaaatcagcaaccacagcctccgcagttagacccctctccttcagcagtccaacttcagttagcaaagccccagcctcagccacctcctgatctgtgggggactcggtccaactcggagtacgaacgtccggctgtctccccgaacgtggggggagagaatttccgtggttttcaacgataaaccactccaagcgccatcccttaatactgtccttgagagggatttcaagataatcatacttcctcccacggcgcatctctaaactag

SEQ ID NO: 14416 - DNA, 641 bp, Zea Mays
ttgtcctccgcgctccacttccatcatggttggtaacagatccactttacctatcacaacttttggccactccatcataccgggtcccttttatcttaataacattcttgttgcccccgatattgttcaaaacctcattttagttcgtcagcttacttctgataacaaatgttttgttgaatttgaccctctggacctttctatgaaggatcttcattccaggaccgtgattaccaggtacaatagcttcgggaccctctacaccctcgatgctccaacatgttccccggtgttccacgccctttttgtcattgtctccactacttggcatcgccgccttggccatcctagacatgaggctctgcccacactcgctagtacttcttccatcggttgtaataaaattactagtgattccatctgtcatacttgtcaagttgggcgtcacactcgcctaccttttgcaaactctacttcgcgagctctcaagaattttgatttaatccattgtgatctgtgggcctctcccatttccagtctgtccggttacaaatattatcttactattcttgatgactgctcacattttctttggacgtttcctctttgccttaaatctgaaacattcactaccttggcta

SEQ ID NO: 14417 - DNA, 806 bp, Zea Mays
ttgatccatcgtccatggagggaccactgccctatttataaaccaagcggagcgtccgcagtgaagctgagtcttgtattcgaaggagagatgccctggcgtctgacatgacggcgaactgtgtagtagatttgtgcctgctgacttcccgtagagagccgaggccgagaccgagggatcgtctgtacgcccgagctccagagggagaggccgcccataccgtagtggttgtaacagcgtcggggtatgggccaaaggctacttacggggtgcgtcatcgtcctggcgcgtgatgatgtcgagattccctgctacactcatcgagatcaaagcccctggttgatgcggaagtcttcccgaggcgttggccgagctgtccctcgacgtgcgctacagtcgggcggagtggctgtctgcgagattcgcgacgtagttggtggctgaggccgagaccgagggatcgtccgtacgcccgagctcccgaaggagaggtcgcccataccgtagtggttgtaacagcgctggggtatgggccaaaggctacttacggggtgcgtcatcgtcctagcgcgtgatgacgtcgagattccctgctacactcatcgagatcagagcccctggtgatgcggaagtcttcccgaggcgttggccgagctgtccctcgacgtgcgctacagtcgggcggagtggctgtctgcgagattcgcgacgtagttggtggctgaggcagagctcgagcgagccagagaattcgctcgagagctgagcttgtcgtcgggcgaggaggagaaattgcccgaaggctg

SEQ ID NO: 14418 - DNA, 466 bp, Zea Mays
gccgaccgcggtcgagtcctgcaggatccgatgctgaccgcgccgccaggaaccagtgcgacgccgtgcacccgaccccgcgcccctgtgcctcgctgccatgaagccgagccatcgagcaacaacagaagaccaagcgaccccaagtgccgcgcgtccgttcctcacctgtgtaatggagcgtcaaccgagcgtttctccgagttattggcgccattactcctctctccattgatgccgacgccattattggccatgaagcaccccggccgaccctgcatctctctcccatcctctataaaagggcagccgaactcctttcttctccctcctccttctccatccccaagctcgctctcacacgctccactttgctgctcgcttgtttgcgtatgtgttcccgccatcacgccgctcgccgtgactagaggtccctgctcctcccccgtcaccggcgaaggtgaac

SEQ ID NO: 14419 - DNA, 929 bp, Zea Mays
gtctctttctagagggactaggtatgattttagctttgttactgtcttttgctcagatttggccctaatttcaggatagtggtgttgagcccactttctgcctcttcttgagggctattcatctttgcttggttgtgttgagttattgcccatatatttagggacaaatctttgctcacttttgaagacttgtctttaacctttgtctggcttcttgtcttttgagtgagtgtctcttcattttccctgttttttgttgattatggtgtttctatggttgtgctgacaatgcaatcatcaaggggagattgcgaacataaggttgacatgtgccaatgtgttcacattgtgatgagtggttgtcaatgggtagcactttaaggtgagtccttcggactaactagggtgtgagtttttatgtgtgcaaacatgtctctcggcttatggtgtgtaggtgtacagtgagacagtggttgacaacgaaagtgaaggttaagtgggtttgtgccaatggattgggtgcgacgaaggaggagtgatgagtcttgactaagggattggagaagtttggtgactagctaggtggcgaacacctagggacacggatgtgcgcgtggacgtagatgagcggatcgtgttgctgacgcggttgtggactagtaggacacatgtccaggacgtgggggacgcatatggagtatgttacccactaaggttttagaggttgagcatcaaaaccacctagcactatagtttgctggtttcactaggtttgggcctcaaaatctggaggtacaatttcgacggtaatcagggcgacacatggcatcatcatgaagggtgcgttgaagcaaagcaacttcatggagtgtgtggtcgttacataaaaaatccaggagttggtccatgttgcctctagttgagtggat

SEQ ID NO: 14420 - DNA, 570 bp, Zea Mays
ctcccaaagactttttagtcctttgtctcttactcctccttaactccaaatctggagtctggtcaaggacactcgagggcagagaatacgtccgagatggaccatctggggctaccacttccttatcccgcataggaaagatgctctcaaagaatgtcacatcccgagattccattatgacatttacagcgactttgctcgtctcggaatggaccactagaaatctataagctgcactgttatgtgcataacccaggaagacacagtctacggtcttagggcctagctttctcttcttcggtaatgggacattcacctttgtaaggtagccccaagtccgaagatgcgaaagatctgacttccttcctttaaatccttcatagggcgtggcctcacggttgcgaggtggcaccctgtttaggacatagcatatcgtgagtactgcctcgccccaccagatgttaggcatccccgaactttgcaacaaagcattagctaagtcacacaccgttcggttcttcctttcagctaccccgtttgactgaggtgaatatggagcggtggtttcat

SEQ ID NO: 14421 - DNA, 393 bp, Zea Mays
taccatcacaacctccaacgctggagggcaggtgcaggcaggtaaccaggtgcgggtccctatgctacgcatcgcagacggtccgacgcacaaacacggacggttcgggacaccaccggattgtccggatcattccagcggacggtccaacaacgcccaggagccacgacgatcacgtaccttcaaatcacggcgactagaaatagatacatagaaaactaacacggtcaaggcagctggtcgactggtcagatctggcccgacctttgttcaattattgtctaaatatgtaaaaaagaaggttagcctgagtgaccgcccaacaaagcgacctctctcacccactcaggagcgacagcaggtaagaccgattggaccacctcaccaatcgga

SEQ ID NO: 14422 - DNA, 610 bp, Zea Mays
tttttaagaacattcagccattgaaggacagagcgtacctggcttatctgtatcatggtattacggactcaacccgggttaccaacagaaggattcctgctgtggatctggtaagccgacttgagatgatttttagaggcaaggtgtcaaacatcggtgctcctattgcgtattctgcctggaatctgcctcctcccaagactttcatcagttttgtgtcaaatcctcctgctggtgacagtggtttgggtcttagagtacgaccctctcccgaagaggttgaggctttggttgtttcgcttggtgaaatccccaatgatgagaggcaggttcattttgagatgcctataaacccgagcgatgcaaaaataagtgctatgctggacatgttggctaaggattcctctgattcggtccctgcttaaacactagctgtagcaactatcccagagcctagaaaaaccttggacactcagagatctgatagcactcgcccgaagcgtcctcgccaggccattcatccaatttctcctgctgaggggaagaaaaagaaaaagagacggcttcggcgagtgtcatgcttgaatcaggatgctggcccttctgctcc

SEQ ID NO: 14423 - DNA, 394 bp, Zea Mays
caaatatatccaggtcctgcagtctggggtaccatagtcgaagcgaccatggggcggtgagcggtaaggatgctgaatcccgacagggacgggagaaccaccatccagatagtggtgtgctgtgcactcagcatgcaattctgcaacctccgcccgaaccttgcccaactcgtcagtggcgtggtccagctctgtgttgagcacgacgaccaggttgaccatgctgtttagcctgggaatgccttcaccaacgggtgagacaatcacacctccagcactgtcggtcgaacggcgagggtagtacttcaggtcaaggccgtcagctaccccactgaacaacgagcaataatgagaaagtgtctatcgtgctacatcttgcatggctacctcggca

SEQ ID NO: 14424 - DNA, 493 bp, Zea Mays
gtcggatgacgctgcttatgtggtccgtgacgccgtgcgggtccacgtgcagcctgtagggaaagaacgggtgggcgcgtagtcgtcgtcgtcgtcataccggttctcatctccctcgctcccatgcctcaacagtgacaaacatggctcaaacagcaccgcgctctgtgctgcacgactgtaagtactttcctcccctttaatattttcttccctctctcctcaattcatgttcgccttattaggtcctggaaccgatagcctctccagccgtctttgtcgttgttcgccactttggtttgggcacccaccgtcgtcatgggagcgtgggctctgctcctgccgcccgccgccccgtagacattgtctgtgactccgtaagtccacgtttgctctgctacaccccctcatgccgtctgcatctgcattagggtccgctccattggtgcttgctgcattagggtgtttgttttttgcaagaaccgtgttaccg

SEQ ID NO: 14425 - DNA, 1010 bp, Zea Mays
aggacctggactgccatcttgaacaggtgtgttggagtcaaactcagaaaaggggctctggggaggaagatttcaggcagaataagataaaggggcaccgacattcgaaatcttgcctctcagcatcaaatcaattcaactcaatatgtcttcttcaggaattcgtctgttggtgactcgggtagggtcattgaacccagtatacagataggccgggtaaactctatctttcagaggttgaatattttgagacaaaatcaacaacaacagcttcagcagtcaagcctctgtctttcaatgcgtgtatttcagcaagcagcactatggactcagcaagttatgaatatgtaggggcctctgtccagctgggcgttcggacgtcaggttgcctccccgatcggggaaggagggacttgttgtggttctccatggtaaaccactcgaggcgccatcctttgatgttgcccttcaaagggatatcaagatattcaattttcctacctcggcggagctccaagctagcatcgccaacgagttgatgatgtcctccagccatcccgggccgacaaaggtagaggtatttccaaagcccaaaatgaggaagaatcccaaggaaggattcacatagatgaacaaacacaacaatttgaagaacataattggggtttaagtgggtgagatgcagagaataaaagtcaagaaggctgcggaagaaaggagaagctggcagggctagtccccggatgagaaatggcacgaagataacaacttcatggatatcctctatcggaacggtaaccccacgccagattcgccaggaacacaactcttttggcggaagaacaccagtttcgacaaggtgcagaaggtcagtctcagaaataacagacatgtcgttaccggtgaatggaagttggttgttgggatcgattggcgggatgatcggaacagcaacgctctgtctcttcctcttgggagccatcgtggtctctcaagcgatgcaggtggat

SEQ ID NO: 14426 - DNA, 545 bp, Zea Mays
catggaactcagctgtctggagggcagaaacagagaatagcaattgctagagcaatcataaagaaccctaagatcttgctactggatgaagcaaccagtgcgttggatatggaatcggagcgggtggttcaggaagcattggttaggataatggttgaaaggacaacaattgttgttgctcatcgcctaagcacggtgaggaatgctgatgtgatatctgtcctacaacacgggaagatggtggaacaaggtatttgcttattgaccttaagaaaacttatttttctatgttcttcccataatcccatttgcagctttcctaactatcatctcttcattttgcaaaactgttcaatttctgtgaatcctgagcaggttcacacgttgacctgatgaagctacctggaggagcttacactcagctgattcgtctacacgagactcaacaagaggcagaagatgtccaccctgacatggaaatttccaggagatcaacaagtaaaggctcctcctcttttgggcagtctatccctgctccacttggc

SEQ ID NO: 14427 - DNA, 335 bp, Zea Mays
atctttgccaaatcatgcgccatataggagaaatccggaggaaacaaaagaaattcagcgacaagtgcaagaactactcgacaaaggttatgtgcgtaagtctcttagtccgtgtgctgttccaattattttagtgcctaaaaaagatggaacatggcatatgtgtgttgattgtagagctattaataatatcaccatacggtatcgacaccctattccagatatgcttgatgaattgagtggtgctatcgtgttttctaaggttgatttgcgtagtgggtaccaccagttcgtatgaaattgggagatgaatggaaaactgctttcaaaactaa

SEQ ID NO: 14428 - DNA, 797 bp, Zea Mays
ggcgggttggttcctaggaagttcagggactctttagcaaaatatcatggccaaagaggtatccgcgaaatctggccacaagattagaaaccaagggctaggattagatcgtacttaaaatgaataggtacggagcgaagaccgtcggatccaaatcctctggtcccaatattattatgcgctagatcgccctcaaccgtccatcctagatctacggtttggattagaagcgcgaaggggcatgcacgggtccaatcccaaacgttggccgaggatccaacggtggagataggctcatgtcgagttggccctatcttctaatcctggccactggtaacgcgatctacggctcacaggttgtcatctacctctagaatccagtagcgacagcggcgatccacacggtggcgcactccggcaagtagagcacccagggtcttaaacctagatacgattgaatctatgcagaggtgtggagaaatagaatccgatcgaagccataccaacggttgggagcagcagaggcggattggtcgcggtgggaggcgattagcgaggcgtagagaatgccgacgagcaattcgtcacccgaggcttgtccaacgcacgcagcggcaccgcgacttcctccagcgcgcctcttgcgacaaccctgtgtgccttgcgcactctacactccaacatcgatggtagacgatgtctacatcgaactctccaatcccgatctcaatgctggctccctctcaatcaccttctgcgctattctcctgggttctagtagaaagggaggatgtcgg

SEQ ID NO: 14429 - DNA, 621 bp, Zea Mays
tgttttgttttgaaattttagcctagtagatgcattctaggtgtatcatacacaatgtaatgcaagtgcacatgatgtcatgccaaaattttagttcttgtaacaccagaggtgttacacgcctcatgtcttcctcatgccggcgatcacgcgaagcgttgatgttgcttcacacgtctcgctgactgttgatggcgtggtgtagatcgttcagcgggtgagcgaggaggagaaggtggttcgccacttgggtgagcacctgccgatagccctccacatttggggtatgcggtaggccattagcgatctgagctaggaccccctcgacctcactcggcgtatttagtgtttgagcagagtcagggaataggttccgagcgagaagagggttcttgggttggagcttggcatcctgttcagcttgctctcgctcgcattcctaggcgcagcgacgatcacggtgatgggagttgcagcgttctcggagtgctctttcatcgacggtttcctctacttcagaggcctcatctcgggagacaggttgtgctggatcctattccccggcttcatggtgacacctcacgttgcggcacctgtttcggcaccggcacgcatcgtgct

SEQ ID NO: 14430 - DNA, 541 bp, Zea Mays
gttgagaatgcatcgaatcagcctagtgtgcgcttgatcagggcattggacttggtatgaagagatgatgttttagggctgtggtagctaggtgcgccacgctggtttcgacgtgcaaccaaactaaacacgtagagagctcgttttgaacttatgcaaatgggtgcactagacctatggaaaaggagtatggtgagcactgaaccaacaataaacacatcgatcggacgtgcaaccgaactaaacgcgcagagagctcgttttgaacttgggtagatgggtgcactggacctatggaaaaggagtatggtgagcggaccaacaataaacacatcgatcggaatacaacgatatgatgatgtggtgtggatgtgaagttcaaagaggcactagacggttcagtgagttctgatagctgataactttactaaatagccactggccggatacaagtttgatgtgcactgggcctgctacagtgaaaggtctagaaacattttggcaatgactagtttggtcttatagggctatctataccacc

SEQ ID NO: 14431 - DNA, 536 bp, Zea Mays
gaaagaagcaccagttgccaccccaagtgggaagggacacgtccaaggaataacgacccacgaggggatagttgtcgcagttgattgggaggcggaagaacggacatcgcccgaccacaaaaaagaaagggaagtccctgaagggagacactcccctcgggggctcgacggctagtatcgaggataagctccccagtccctaggacctattggtcagcgagcatgctggggaaaagcctctggtagctagggctcgttgatgagttggaatataggggaaatgtctaccctagaagcaccaacccccgaacgaaccccgcggcaccgagcgaaccaaagggaaaccactcgagtggatcccttgcttggcccgagattgacccgtcataagtgatcggcctcattaactacgtctggcgtcgagccacaatagaggcaccaatccacctcccactcctagcctacgagcccctcgggctacaacgcactcataggctactcaccccttagactatggcacatttatggcctcctcg

SEQ ID NO: 14432 - DNA, 460 bp, Zea Mays
gagatgatgaggcgattggaaggacgttctaggcaaagatatcctttatggtggagggaataaccaagaaatacacacaaggaagagcggggacatagtttgtgggtggtggtagcggtgagattaggatagcatttgcaaccgaaaacacgaaagtgctcgtaggagggtggttttcctaggagaacgaagtgaggtgtctgaaagtctagagtcttggttggtaaaatgttaaggagataggtggaagttcctaggacaacaacccaaaagatgggagaaatgctggcctggaagagtaaggagcaaacaactggtctgagcggaagtgtagggacatggcatgcaaagatgaactttgtgggagggaaaaaaaaatgtgcgggcgttgaggttattgaactcgcgaccattgtcgtactgatttccttggatggtgacgccgaactgtgtgtggaca

SEQ ID NO: 14433 - DNA, 331 bp, Zea Mays
gttaaattaggtgaaaaatgtaatttacgtgatatataatgggcgtttggaagatgagataggttaatttagaaaggtgtgttatcaaacatatgtgccgaattgtgatgtagtagtgattgcgtaagttgaaccgaagtgtcccaagtacatgtcgtgatatggttgtattgagataataaattataagtgttgcgtgatatgagactcgatcgatgtagttaatattgaattggcctgtagagaggtggtgacatgccgaagtagtcatcgcttcctctacggttaagtcggagtcatgcgtgatgatgttatttatggggtgaatgcg

SEQ ID NO: 14434 - DNA, 346 bp, Zea Mays
atcgtcgtccctgtttaaagtgcttttggcgctgcgcccgtgttctcttcttcctcccgacgttgccgctcgtctgtttgctcccgtcgatcaatctcttcatctgtttcctttcgtcgaccaagtatcatgattttttccagcgccaataggtttccgtgacacacgatttggttgtatgcgttggcaacatcttggggagccatgcgatcgaagaggttggccgttgtcggagccgggctcatgttgcatttgtactagaacgagccttaaagtatgcgttggtgtgtaaagctagatattataacaccggtgcaagtgtgtaaagctaaatattaaatgtttt

SEQ ID NO: 14435 - DNA, 318 bp, Zea Mays
gaacattgtcaggggttgactcagccccgccagcggatatcagaattcttgcagctggctccccgacctccaaggcgactcgtttgctcgaagtcaaagaagcatgcatcgccatcaccccatcagatcatggtggagatgacccgacatggacattcatggaggtgtgggaaggagagctcacttggacacccttgagggctgggttgtagctcgcgccacccaccagagccggatcattaccgacaacaccctcgggggctgggttgcagctcgcgctacccaccagagccggatcactaccggcgacaccctcgg

SEQ ID NO: 14436 - DNA, 655 bp, Zea Mays
atctgacgttcgttgtgacgtccatcgtacgtgcacatcaaggtagggcatcaggaacatggatcggccggacagcgaacataaaataccagtcaattggtgtggagctggaagccaagcaagactgcctaatcttcaccgtctcagtctagcatagctgtaacaccgacgagacagtagagacaatctacatgtcaaagattccccatccctcgatcgatctatagcagctagcaatttgactccggccgatgacctgtaccgattgctagctgcagcaatgactacgtacggccaagcacagtcagtacgagaaaagtatgcaaacaggctgctactatattgtattgttcctgaagaatcaagatttagttttgctctagtagccttgaccccataggggagccacttccaagcgtatctggcatatgatcgtagcaggtcactttgtcgaggccattattggtcaacgattctgacctttgagacgaatttagaccataaactaaggtggtcgtcggaggtctgggggacctcacagactggcagcagaggaggccggagaccttaactcaagatcctcggtgtgtcattagcaaatttaatcaggctctagacaaatcttgcagacacaatactgccgtcccacatgctg

SEQ ID NO: 14437 - DNA, 552 bp, Zea Mays
ggatgggttccggacccctctatgtggggtctgggtgacgcacagcagggtcccgtgattctgggacagagaatacccaggccttaatcaaggccaggcgggggtccggagccgacacctgtctggaccttactgaatatgttctgctccccgctcacgcgaagccccgatgctgccacgtggcatggtgcccgtgacgtaaggcctctgggctacgcggcctctgtatttattgcggataaggcgcgccgcctatccattccactggcaggcggtgaccgcctcggcatttattgagccctgtccattccactggcacgcgatgtgccgcctccgcatttaatgagacctgtccattccgctggcaggcggcgaccagtccattccgcaggcggcatgcctgtccattccattggcaggcggtacacccatactgccgcgtgcactacgctcgtgattactcgcacgtcaccaaggaagcaaccacccgtatatcaatactgcgtggactacagacatcatggcgccaggagactgctcaggtgtacttgc

SEQ ID NO: 14438 - DNA, 410 bp, Zea Mays
ctacttttccacgtatgaatctaatatggaatcacccgcgccaaacacatcgactacaaatgggtctcccttggcctagccatcgtatggtacatcgatgcacatgttcatgtcaccatcacaaccgtcgccgccaagcacctgactgactctagacgcaatcggactgcccgtgagtcatcttggacagtccagatatatcgaggaacgtccggcgtatttcgccggatagtctgaccctacacaagcccgcgcgcagatcactcaggtagcgtcatacatggccggaccatctgggtgtacccctggatcattcggctcggtagcggaccatccgaccccttacgccggaccgtctagatacgtcacggaccgtccggcgtgtttcgctgaaccattcgaccccacgc

SEQ ID NO: 14439 - DNA, 594 bp, Zea Mays
gtcaggctaactgaagaacaatccgatggtacagtaaccggatagaatcccaagttcagccccctcgccgccgacgagccgcgcgtagattcgtgctatcgccgtcgtgattcacgctcagatcagttggatagcaccgggggtcagtaaatatcacgtcgtggaaacactccggccattattttactccgaaaaccgtacccgagcagaccacggctgattcggatgagttcgccggagacaaccgctccacggccttgcgccacatgccttggcacattcaccgcatcgccgtgactcgcattagtcgtccgttcattgccggggagcttgccacggtgaaagccactaagattgcgcgctagtaaccttcttcccctccggccgccagcacatctttgtgaaattggacgccaccgcccccagagcctataaattaccgctctcgtctgctccgctatgtagttgtgcaaccagtgaagcaacccgtgcctcaaatcatccactagaactccccaatttagaatttcccccaaatcactcaagaacaccgagcagtttgacctcgccgtggccagcgtgtctcaggtccgc

SEQ ID NO: 14440 - DNA, 620 bp, Zea Mays
aagtttttttaaaaacagatagtgaggcaaccatgtaatttgtattggagagcaactggcaatatttagagaaataaatacataatatgttggatatagctagttaaatggtaaggatgacatttcactattaaaaccaacaaccagtgccatcttttgcgtagatcaaacaaccacgtcaatttgtttaagcaaactgttaactactatgaatctacctatgaggttcccaactatatagttttgtgaatcggggacatgctcggttggacgaaccatcgtgctaacgttgatgccggaggaattcaccagagcttagctgacagaagagataaagtacaatcccaatcaagcacgcgagtcaactcatcagagaacattttgctgccagtgaggccatcttgagaagcgactggcacactgagtctactggcacctccggtacgacgctgctaataaaacttatttcaccctcctataggaaagggaagagacaacattctttcgtataaacagacatagagccaacattctttcgcataaagttctgaaccgaactattctaaaaattgacttgctaatttgcacatggatatatatttcattatgatgtgaaaaca

SEQ ID NO: 14441 - DNA, 852 bp, Zea Mays
ttcacaagtcactaaaatccagatgattgcatagccatcagtgttagcagatacccatttagccacgccctttctttttttggccaggttggattccgacacccagcattgagattccaagtggtatttgacgtgttcccaataatttgccaaattggacactggcagacactactattctgcaatggggaaatatgatatgtatctgtgctttgaatctgttgtaaattcacgtataacaatatacatatacacatgttttttaattcagataattacattaagacaaatttttgtaatgacgtggatgaaataaatatgatgtacgtttctgagccaatcaatccatgctgtgacttaaatagggacagatggaaactatgaaggaaaagaatgatgctgtagataaaacccatacctgtcagtcataaaacaatgaatttgagcacaaatagcggtgaatgccgactgttttggatgttgctgatattatgatgtttcacacatttttatatttatagtcgtttgtgcatgtctccataaagtttttaatttgacaccaattttctgtgaatatgctttaatgctatcctgatatgccactttgcaatatggaggcactccagttcttttaaagttttctccttcagccttcagaatgtatagaagggtcgccgaacttatgcaggaattagctatttcccttttttctttgaatcatgttcatctttgcattagcactttctattttatcagccattatatggagcaattagctatttcctctttttcttcattgaaccatgttcatctttgcattttataactgcagtgtcctggtcagatcctctg

SEQ ID NO: 14442 - DNA, 528 bp, Zea Mays
cgatcaccaggatcccaaacaaagatggagaaattgccttgccaaatactgacagcacccagaccagaagtaaccaagccgcgatcaccaggatcccaagcaaaaatggaaaaattgccttgcccaaccaagccaatgccagcaccaatatctggaccaataagattgtgcccagcgcccatgccagtgactacaagctgatcaccacgcaacttcctgaggtcttcctctcctgtcgtcgctaacagcatggtggaagccaggtagaaagacccgattgtgcatacccactcgccattccgcaccaggtgcttgcagcactctggcagtcccttgcagatcttcatctgctcctcgtctgccaggtggccgtgaaccttggccaggtacaaatccgcgagcttgcccaccgtggcagggccaagcgcgacgaattcctcgaaccagcagatgcgactgacgcagaatccgcctcgcaggttgaggctgttgctcttggtgtcagacgagaaccagcacgtcgtgctc

SEQ ID NO: 14443 - DNA, 463 bp, Zea Mays
gtcgcggatgagtttcaccgtacccacttgctcgtcgatcagccgagatagacctcgccgccgttggccgcttaccactgtgcgccacgtgctcaagcgttgtaccacatcacagtgaatcgcgtcttgcatgcccggtgatcgccggagagtcgcaatggtgaaagccactaagctcgagtgccagtgacccctttcatctccgaccgccatcgcgccaaaccaaattcactggccaccgcttagcgccgctataaattgatggcacggtctgctgcattaggtcatcaccaagcctgagcacccgctcctgcctccgattagccactacaactctccaatttcccatttccccaaattctgtttccgccgccgtggtagagccctcaccgtggtcagcacactctaggtctgttcgtgcttcctgccctcttgtttcagcatccttaggttctcctaatgc

SEQ ID NO: 14444 - DNA, 503 bp, Zea Mays
ggagaagagagaagcgtctattttgcatcgtgacagggagtctgctgggaggatgaacagaactcgtgggcgtgcaaaataatgatatggagctgtttactgtgtttgctggagttggtcttaagccttaacacgcatgcactgcttacgtataatacacgccactggtacgtgctttacgtacatgcagattctttgggcactgggtgaggcggccgtgagcccgtgagggtcacccacccaagtgaatgggacttgtaggcgtagctcccatcaggctcttcagcccgggtcaccttccctccgctcagaacaccagtaacattcatcccccttcctccccgtcgctctccgacgccgctcccttgtctttccaacgtcacatcccgatccgcccgtcgcggcccccagatctctctctgctttagcgcaactcgcgctccggtgcgcgtccactcatcgcgatcgcctgctcgaccgatcgatagctcaagcacgacgag

SEQ ID NO: 14445 - DNA, 329 bp, Zea Mays
cgggggcagccaagggcgcacgggggcgcgcgtgcgggcgtgctttgggtgcgttcccaagtgcctacccacgtcgaacatgtggtggtttggttctgccggtgttcaatggcctgtttggtcgccttagcgtgtagatctcagcaaaaatcccgtgtaagatctcttctctgcaccatatcctatcttttccatgtgagttccaagcgaagatatggtcggggttgagagatattgtggtgtgaagttggctctatctgagttgtccagcccgagacaaaaaccgtgtcaagtcgtgtcaaacgacttagggttgggttcaaattttt

SEQ ID NO: 14446 - DNA, 1215 bp, Zea Mays
cgagcactactcccggagcttgctgagcctcttgagcatcgacgtggtttcttcgtgccctgccatgatactgggccttgctctgctggctgatggaggagggtgccttggaggcgggtgctggggtattcttggggccattcaccgagttagagtaagtaggtcctgatgccttcaaatgggggcagttattcttgaagtgactggggtctccgcagtgccaacatgcattagctggtggttggttgcttgcgactgagggggcctgaaaagagctctgactctgctgactgaaacatgacggagtgggtccagctggtctattgaagcttggtcccttgggtggaaatccaaaggatcgagttctctggtgccggtcttgttgctgagctcggaggacttggaatttcctcttgaggtgacctttttcttcttgccttgccctttccacttgtatggccttgtctgagaggtgcgagaagatgaggaaatcttggccagcaaggatggtcttgagttctagtcttagccctttcagaaagcgggccatcttcttggcttctgtgctgacgtcgtcagacgcgtagtgagctaattctgtgaatttgtgcacgtactcactgacagatcttccaccttgagttagttaccgaaattcatcttccttgagctgaacgatcccttggggcacatgatgttctcggaaagcagtttcaaattctgcccaggtagcatctctgacggcagtgctgaaggtatcccaccatgatagggccatctcggaaagttgatgagcaaccaattgaacacgctgattctcagggcatccaatggcttctaacttcctttttatcgtgtgcaaccagtcattagcatcgaggggattgctggatccagcgaatgtgggaggcttgagccttagaaaatctcccatcctgtcttgtggtcttccaccattcgggcgctgattctccagacttctagtgaggacttcaatcagtcgggtttggttggctagaacttgggctaaatctaatggcagctccggaggtgcagggaggtgggtctcactcccttctccaccggcttctccttcagctcttaggggaaccctgctccaatcccggaggcgataggcgtggttttatccgaagccatctaccagggggagagaattactactatgcatgtgccaatttttttcaaccatgttat

SEQ ID NO: 14447 - DNA, 630 bp, Zea Mays
atacctaaaggaagctagaacggatagtaattgggctggaattaccataggagaaggtggccacggaagagtcctcttcggcggcgatggcgaccgaattggggggaaatcgaaattctctggctacggtggctaatcgagggcgaggggcggtgctctgggttcgtaacaagttagcggagtaggcgggggcgtcaatttatagcgatcaacagcggtggctccgaatttggggaagacaagctggcggccagagcaaaggtgagtcaaccgagttcgctcaatgtggcattcactgtgcaaagacttacggccatcactggttatcctccacaactcgcatcgacgtggtgaacggcggcaaccccggcgacggtcggacaaccacgtcgctggtgcaagtgggtacggtgagactggctcgatccactccccctcatatctttttacctcccgcggttatccacttcacacagggcacgaatcgcggcggcagacgtgaatcgcagtgcggagatcaccagcggtgagttcactgaacctggattcttattcagtccactgtaccatcgtgatccaattcagtcgttctgacaaagcaacttgcagggccttattctctaattttca

SEQ ID NO: 14448 - DNA, 383 bp, Zea Mays
tgctcctaaaacttcaaagtcgaagctgtgtgcaggtccaggtcccagtccagaggtaggtagtctcaaactgtagagactacctcctaggggccgggccaccactttttttctttggtacactggtatccagcctcaacacgtcgagcctacctcccaggggggctaagtaccacgtggaagttgatgacgctacacacaacaagggcaaataacatacagataagttccagtgctacttgattgatggttcttaaaatatgttacatagccaaaagttattacaaccgccctagcggaaccctcgccttgtctctataggttcaactattcggcatcggcaggatcacgctgaaagcgagcggccaccatctccactgcat

SEQ ID NO: 14449 - DNA, 429 bp, Zea Mays
tccaagcggtacgcactagggaccaccggatccgtgatcgacggcccatattcaatcaagtcggatacaatccccaccacacaatctcccatccacggtctaagttcaatacatgaagggatatgtttcttttaatctgattcgctcactgcaagatcgacggtcgaggcaacactaagcgaaagggtatgtgtgttatgatctcagccgtccacataggatctgatgtcccaggcgctttcttccccaacccgcgcccagacggcggcgccgccctgcgcccaaggcagagactcgccggcgcaatgtccagtactgggttctggccgttgatgcggaatacgactaggcggaaaagggaccggagcacctaacaaacgtgatagagagctccataccagggatggatgtgctgaccgacccgcccac

SEQ ID NO: 14450 - DNA, 556 bp, Zea Mays
gatttagagtggttcggaccgccgaagtgtaataccctacgttcattatgagttgtattgtctaattgtggagaagatgagtctgtgcttccccctttagcgcatgtgccatctcttttatagttcaagatggcacgtacacgggagctgagcctcgactagtgggcctagacaattttgtattaaacatatactatatggagcagtaggtgcaacgatgaacaaagatctcctcggtcgctgtgcagatcattcgaccaggcgtgttctccgcctcctttgtcggcctatgcctcctacggagtgtacaaggagcggtaacgtatgtaggggtcaggcatgccgatgtgcacgagagttaatacgatagacatcgtgtgctgtaagagacacaaccgcttacctcggtatcccgcggtgcactgttcaggcctgtgcacggcgctgacaagcaacagtccgcattggaaacgtgcggagcgatcattcgcgtctgcaccgcctgacaaaagcctgcacatgccctgtgcgtggcagggcacaccttcgacgcttg

SEQ ID NO: 14451 - DNA, 972 bp, Zea Mays
agaggcttttgagtaatagttgctctttggtgttgatgccgacgtcgagaccagcttgtaagtcttcatcatcattcttcgggagcatcccaaatgggtgatggtggcctgccatggtggcaaagcctggaggggacagaggcaggttccttgttaggtccggccaaactttatcttgatagggttggttttttgggtttgatagatggtcttttgaattttctgaactggtggtattgaccttggcctcttgctcggtggagattgctatctgcttttgctttaccgtgaggtcctcgccatgcaggttgctggtggtcttcgggttgggtggtcgggaatggtcggcagcgagggcaacatagcctttttggtggcaagggctgccctggcgtcatcgtcatttggtggtgggctagaacgagtgctcttcttgggggcatcgtgggtttagtcttcatcgtacgaacggtgggcgccaaatgttgagtactgacacgtggtcaggtgggcccaaacacttagagacagatagagagtacgagagagcgacaagacggctggtgggaactatagcttctcgttatgtgtgtcccatcccgctacaggacggtggtatttataggcccgtccatgggtaggtggtccaaagtatggttctacccctggttaccaactacgtctagggaatattccatgtaacgaagtaattacagcaccgtgcgtacactagacagtgcacaccaaataacacacccacaaactacgctgataggtggacccctagggatgccctccggtggactggtgacatacatggcctctctgtagccctcgcccttggagcccttgcgtcatggtacccttcgttgagcctagtcaaatgaggagcagtggagcccctagggcgacgcagtcggtgaacaccctgtcctatgtcaatcgctctgtggcctctaccgttgttaccac

SEQ ID NO: 14452 - DNA, 609 bp, Zea Mays
ggggaaaggctgtcgtggccgcttcaccaaggattggacgcttgtggtgccggaattgctcaccggagctcggcatccgccgctcgccgtgggcggagctgctgtgtgattaatccctggtatgaactatctagttaggatcgccaagttctattattcgcaaaggagcttgccacgttaggagtagggttttagggtgccggattggggcaactccgggcagcatccaccgctgtgtgggcggcgctgccgtcggcgtggtcggatgggagaagattgcctcggggccgtccgatctggtacgaacgacaaagattagatcgtagtgttaccccttcgctaaatccatcctgaacgctggatcgtgatcggagggtggaaatcagatcgcgtagactttaaacctaggccttagatctcggatccgagggccttggctgcgcaacggtttggatctaatctgatccgtggatgcatgatccaacggtacgaatctcccaataccccttcggctacgtagttttgcataagagccctcgtggaatctgggattcaacccgcagtccgggcagtgggaaattgagtcttaagaacttttatgagttagac

SEQ ID NO: 14453 - DNA, 566 bp, Zea Mays
gagggaagctagaacatcaatcaaagaggctcgagctaacctgtagaaggctggccacgacgcggtagttcacggtgtgcggaaaaccaatttgggggaaaagagaaattggagctctctagtggttaatctgaggcacgagctggtgcgttgggtgtgtgattacctagcggagctgatggcacacttaatttatagggcccgagggtggtggctcctaatttgggcatggcgtgctggcggccggagagagggactaagtcaccgcagcgatctaccgtggcgatcactggttgaggagctacgactgtcaccactgagctactacggctagcagcaacgtggtaaaagggtcatggcgtggcgcgatcatggtgaactatgtatacttcgatgacggccgctcggccacgtcgccggcgcaagtggatgggcgatagagcgaccacaatgctccgaactcatccgcaggaagatctttttactgccaagcgcaatccactgacccgaggaacgaatcgtggcggccggcgtgaatccaggcgtggggtcacaggcagcaaggg

SEQ ID NO: 14454 - DNA, 576 bp, Zea Mays
ggaaaataagaaggctcctgatagcggagaagacgatagagcaatggcttccccgatgtgcataattgttacatgatcttcggggggacaccatcaacctctcttcgaggcagcacaatcaagaacatcaggaggttttctcggttgaggtagcgacctcagtctaccaagactggtcggaccgcaccatcaccttcgaccgagatgaccacccggaccatatcccaaacccaaggagatatccacttgttgttgatcccatcatcggcaaatgtgcctcacgaaggtgctcatggatggaggcagcagcctcaatatcatctatgcagacactttggatcttctaggagtcaggcggtcccagatcttgtctagggtcgcaccattccatgggatcacccccgacaaaagtgtgcatcccctcgggcaaatcgaccttcatgtctgcttcgggaccatcgccaatttttgaaaggaaaccctcacgttcgaagtggtggatttccggggcacataccacgctgtgctcaagcggccatgttacgccaacttcatggtcattccaaactatatgta

SEQ ID NO: 14455 - DNA, 573 bp, Zea Mays
tcgagacgtactcagatagctattccattctatatctctacttatgtactattctactgctctctcttaccttttctcattatcatacagcgtgtcagtagtcagtgcaggatgatgcggacaaagaatgtcacaccgtcagggggaggagatgaccaggaccctcctcgtccctttagacaggataagggcaaagcagtttaccttaagaagcaagggggcaagaagaagagacggttggacagagccacccatgcaaaagttgtcgcagcagcagcagatcaggcagagcagggaggtcagctaagaatcgcctgtgaccagattgctttcagaatccgttgtctctcatctcgtgcttgctcctccactgctcagtccactcccttagaaccagtcaccactcgacctcccacttcgccagctcctgccgctcttgagccttccaccacacctgctgcgtctaccacctccaccacaccaatttccaccgctcccgctcctactccacccattcctccacctcgcttccgggagcgtgatgagactgaggtgcgacctcttgctacgaac

SEQ ID NO: 14456 - DNA, 492 bp, Zea Mays
tccgatacgattgccctgtacctgacacactaacaccgagtttgtccctgaacaccccagctacttcgtctctgatcctctccgccaggtctggcgaccatccattgactttgtgggtggaaatctcaggttgcctgacatcactctgtcgactttcctcccagggatgtttgaggtgtgcgttaggtgtcctattaatgtcaccagctcctgccctatacctctcaggcactcttatggccgaacagtattcagccctatgtccatgaggtggtatggtatgattataatgtgttcctgatggggcaccataatgttgctgcgatgaatgtggaaattgtgcatattgcgcagctctcggctctgcgtacgcatatccggacggtccggcgtaagaggccggatggtccgtgacctggccaaatggtccgaaggtataaccggattgtccagccgtatatggtgctacctgggtagtatcgtacccagacc

SEQ ID NO: 14457 - DNA, 595 bp, Zea Mays
tataactctgccagcaccgcattgttgtagctagtcttgactggtatgaaatgagccgcctttgttaagcgatccactactacccagatggagtcataaccggctcaagtgcgaggcaaaccgactataaagtccatcccgatctcacccacttccattgagcaatctgcaacgactgcaacaaacatgcgggcctttaatgttctaccttaattctctggcaactttcacatttggcaacatactccgcgatctcctgtttcataacgtaccactagaatctattcttcaagtcttggtacatcttctcgcttctagggtgtatggaataagctgtttcatgggcttccttgaggatcaactcccaaatcgacttgatgtcaagaacacatagcctatctttgaaccataccatgccttccgtgtcctcccagaagtctttgccttttccgtctaggatcatctgccgaatttcattgatcttctcgtcatttttctgcccattcttgatatctcgttctagagtgtgttccagctcaactgtcactccctgtgtactgtttagaaatccgagactcaacctgtcgaattcttt

SEQ ID NO: 14458 - DNA, 496 bp, Zea Mays
gcttggcccactggaggcgagggtgaggtgtcagagaggaggcaatgtaaatcttagggccagcgcaagcgcaacagagcaaggaagatgggagagggagggaaggttgagtgatttctcaacgtggtgggaagttttctcctcggctctacgaaaatgcgacactacgacgaccagtgggaggagcacggagcacctagagactggagcagcgggcagcgccacaacgaccagtgggggagtagtggacggtgccgcgtcaacatgtggggagtaataggtggtgcacgtgtggccggggaataatggaggaagcagggaataaggaagcgatgactttagggcaagcgaatcagttgggcctctaccttatatatatcacgttatagggccatattttaggcttgcatactgttcgcacctatggaaaaccgtcatgtagtgttcaatacccgcgccgaacccgtagactgccatgtcccctattggatcgaaa

SEQ ID NO: 14459 - DNA, 653 bp, Zea Mays
ctctatgggttattcctcgatattcttctaaattataggctaagcttgtctttcaccgtggtaaattcttgaaaacgtataatgcccacccacactagacagagggagcccacaaccacctatggcaaaacacatgcgtaaataaatcgtaagcctgcctctagccgccttggcatttgtgcgtcctggcaagccccacctacaccctctgccctgagacagccttgtcatgcatgccgaactgctatattaaagtgtaggttgcagaccttgaagtgatacctcagtgcagaaagtcactccggcaagacctcgtgcacccgtctgagcacacgccagtcacttgtcacaatcacaactaaatgaatgccccaccatgagccaagtaaccctgccaaccttgggatgttgcaactgcactgtggcaatgtcgccaatcacagtacgccggtcaagactccctccattataaatcgtcgttcctctacctataaatattgttgcccttgccacagaatctcatagtccagccaccatctcattgtcacccccacatccgaacaacacgtgccttactcttcaaaccagagaacaagccctcaccgtcgatttgagccataggtgagcatgccatgatcttcgacctcttcctc

SEQ ID NO: 14460 - DNA, 802 bp, Zea Mays
aaaagattgtcgcagacactgctactcctgactctacgaccaccgctctgtacacctctactacagctttgtcgactacctcatcaccttctcgtcctcctgcccagggaactcgaccacctacccagggaagggtgccgggttcaagtgctggtcgtcgcaacaagaatcgtcgtcacgacaatgtcgtggtggtggctctccttggcattccgtctacaatccctggacaagtacaatccacatgtggcctagatccatgtctacaggttcctctcctcgccctagacaacagcagcaccatcctcctgctccgtcgcagtcctacctggctgcgccaggactgcctaccttgcagctggcctgctcggacccctcctgtgcccctgtcggcccttcctgcaactcctgcaacatctccagctcctcaaccttggcctccttgggctggatcttgggatcagcgagctctcgccatcaccttcagtacaatgacacttcagccaccagccaccgttactgattggattccggaccaaccataccacagctcatgctggtaacatctctctctttcgacctcctggcctcgctactccttctatcattgttggaaatggtgccactctccctgtcacctcagtaggcgacacggttttgccaggacctttatatcttaaaaatattctccacactccccacattattcaaaaccttctctttgttcgtcgttttactactgataattgttgctctatggaatttgatccttttggtgtttctgtgaaggatctccgctcca

SEQ ID NO: 14461 - DNA, 782 bp, Zea Mays
ttcgtatatactttagtattttgggtctaaaagaaactatagaattacttttcttccaaatatgccttaagtattttgttagtcgtgctatggaccgatagcttagcccacggactggcaaaacataactcgtaatccctactactaattaagcacctaacgtgggcgctcgggcgcgtccatgcccccgccatgttttcattgccgtgttgcccccaccgtcaagtctcgcacctcgcctccacctagattccaggaatgcgtagaaatctgtccgctaacacctctcctccaatcccggtcgccagccaacccataccaactctcgagctccaatcccggccgccatgcctcgcctcgattccttactctccaatcctggcctccaatcccgaccgcgatcagcgcccgccgccaacacctaccaaaatagagctccaatcccgttcgccctagccgctacatgccatgcgctgcttcgccgctagtgctccaattctcgcccgctgccaacgcctaccaaaatcgacctctattctagattcgccatgtgcacgactgtggaggagctcgtcatcagccatggccccaccgcctcgcccccatctacctccccaattttagcatgaacacgatctcagacgcaaacctcgcccccacacctcgccatccatccacctccccggatggtgtgccttcctggaattaaaagaccgaagggaggccacacacgagtttaccaagcagacgcacgtgagtacatccgacgtccaccatcagcc

SEQ ID NO: 14462 - DNA, 317 bp, Zea Mays
catgaggacgagagccatctcgccggccacgccgctacagggcccgaacacgtctcctctgaccacaacaatcatgcaccaacccttgtacccctggccctcctccttgcgactataaaaggaggaactcgaggccttctacggggcgggacacttcacggcacacaactctcctcacccctgatattggcactctgcctcaatcatactgaagagacttgggacacactccctgtctcgactgcttgtaacccctactgagcgcttaggtgcaagataatacaaaccttccacccccattggaagtagccttctcc

SEQ ID NO: 14463 - DNA, 671 bp, Zea Mays
gcccaggaatccaaccagaagcagcaaagaaaaatgatgttagatgggtcaagtaaatgattttttccaaagcaccaatcatttctagtgcgccaaatagcccagaataaagcaccacaaccaaataacacaagatgagccatcttgtcttttggtttacacaaccaattatcatacaagtctttgatatttttcaggattgatctcaaattcaaggaaacttgaataaccctccacatgtattgagcaatggggcatttaaagaacaggtgatcaatagattcatccaccccacagaagcagcagtttaaagatccaatccaacatctctttctcaaattatccttagtaagaatcttatttcttaccactaaccagaagaaaaccttgattttatgaggcaatttagatttccacaaaaatttatatggaatcaaagattgattttccatttttttcctgtacaaagaattaactgagaagccttttttccccagggtccaaacaattttatcttcttgattagatagatttacctgattacaataactaatcaactcattataaagcaacttcagattacccacaatccttcttctgaaagtaagggatgcaaattttgaagtgaaaacttcgttaacagaaacatctttgtcataggtcaagtcaaa

SEQ ID NO: 14464 - DNA, 474 bp, Zea Mays
ccgtgttccaccagaaggaccgctatggggtgtgggagagaggagtttgtgtgcgatttgggccaccgtgggtgattcccgtcgctgcgaggtgtccgtcctcggtgaagggccgaggagggacgtcatcatccagggtagccgggcgtaaccacaattgggaggcgaagccactgaaccagaagcaattcctcgccgttgatcgatttccgccgcgagcaacttcgccccgtgaccgggtacttctacgacgtcaaggctggtatgtcacccatccatgagctcaccatagtcttcgcattgtgtcgatgttgtcaaatttgggaatggttcccgtgggcgtgggcgcgctgctcaccggcgaaatcgtcgccacggtggaggccttggctgctgttcgcccaatgtagggaggaagacgaggtgatttccattgatcaagaggtgtgcggccacgattagacctcaggtacc

SEQ ID NO: 14465 - DNA, 518 bp, Zea Mays
cacagatatatcaaagccacctggggcttcggggggaggtttcatccaagacatgtacgaagcatccacaacctagcacaaggcgaagaaaagacgacccagtctcatggtcaatcaagccagcaacaaacaagctcccagcagcagtcctctcatatatgtttcgatcgccaacttcgagaggaggacggggaggctgaagctttggcgacaagttcaatgcacatccgaggaagtcgttctgcttattttgtggtgaagataggggccacacaacaagtagttgctaccacaccattaacaagcagaaagagatttctttgtcagcatctcaaccttctcagccaaaggaggtgttcagtacatctttgtactgttcacagtatgttccatagtacgttcatcctcaatcacaagagccaagtttgcttcaaccttcggcctcaaatgcttcgagtaaccctgtgatgagcgcatggttgccatgtgctaccttcttcctgtgaccaccccctttt

SEQ ID NO: 14466 - DNA, 700 bp, Zea Mays
cattacccattatacaaaagttcaacatattatacaacagtacaacctacaatacactactccacttctattacaccattagtcctgcttcccattactcttggcggcctcatcgtcaggtgtgggagtccagacatcaaccaacctcaaggaaggagggggctcaaaaaggtctaactccccacccagcgcgcatcccgcaacatgagatggtccggcttccgcctcagcagggtgtgcaggcacactagggtgtaattgtgagtatagtacatggacttcctcatgcaacgtattgcagtagacctgcaggttgtcgacagttgagctaagttctttaattcgggcctgagcccttgcttccttagcacatgccagcaaacgagactgtactgcccagtcaagtgctaagtcccgatcagcaagctgatcctgcaggtgacggatgtcccttcttagttcattgattctatctccgtctgcgacccaagcatcggtcctgtgttgcagcgctgcttgaagtcgactcactcgggcttcatgatctcctatggggtcattacttccactgctgctgctttcatgtcgaggggctagttgatgccggggtactccaattggtcccgttgacttgcgtgtcgttagccttgtgcgtggcggcatgtttctaaggggggaaatgttattagtataattctta

SEQ ID NO: 14467 - DNA, 608 bp, Zea Mays
aaaaatgcccatgcaagtaaaataattctgacaacacgaatcaacagtgtaggccagttctcctgcactccagatgagggttttatctatcagatgaagcctctttgcagaaacgattctgaaaatctgtttctgaaaaggacactatgtgataaagataagtttcctgctcagctggaggggattaaaaacgagataatcgagaaatgcgatggtttgccactggctattgttactctagctagcatgttagctactaaacagagaacaagggaagaatgggagagggcacttgattcaatccattctacgcacaagaaagatagtagcctggaagtgatggacaagatactgtctctgagttacagggatctacctcacaacatgagaaattgcttgctgtatatcagtacatttccagaggaccacacgatttacaaagatgctctagtatggagatggatggctgaagggtttatcgctgaaacacaaggctttactttggagcaggttgccgagggctacttctacgagtttgtgaacaggagtttggttcagcccataaccttgcgttcaagatatgaaatgcgtggagaaggaggttgccg

SEQ ID NO: 14468 - DNA, 658 bp, Zea Mays
cgttgtgctatatcctgctagcctattggtgtcgctcgtacagttgccacacacgctggccatgctcgctcagagttagagcaagtccttctagaagagctcagagttagaacaagttcttctagaagaaactgggaagcttatccagatttccagagggacaggcatgtcctcggtttaacccaatattcactccttgtggtcccaaaaccagaaaacagaaccgatcaaccgacccatcacatcccctctattcttctaacctaacacactatttagggcgtgtttgcgcctggctggctcggttccctggccgtctcggtctatccaactggtctaggctgaggctagtctatcccagctattacaactcactttatttatgcacttgtaagaagccttgcgccatgaacagtcaggctcttaggaaacggaccttgatcttgtttctgtggagccaatctaaaaggccaaatttgcacgcgcacaaccagactcccgcgtacagctagactcccgagcaagccaggtagacgcaaacacaggagttacagtccagaagcgcagccaggctgctgggccatgacggcaaacacagccttactaaacaatcaaatacttacagtaataacacgccaatcacaaaagtactcccttc

SEQ ID NO: 14469 - DNA, 443 bp, Zea Mays
gccatcgcggtcgtcgccggcgactcgccaccgtgaccagggcgcgacgctgccgcgcgttgctcagattaggagatggatccgggggccgtcggatgatgcacagacggtcctgatcagatcgaacataccctttcgtccaaacgaacttcaaccgtagatctgctagcgggcgactctggtgcactggcagggttattaaatccgtgccgttaatctttaatccaactgtcgcaggcgcgtaccggttcgcggtgggacagatctaatccgggccaaccgtttctgatcggacggtcctgaaagcctgatacccctttggattacgcgttttgtaaaagagaccctgagaaatagagaaatagaacccgccgtccacctctgcagtgttatgagtctcggttacatttacgcctgggcccttgagctttctgaaattcgtg

SEQ ID NO: 14470 - DNA, 939 bp, Zea Mays
ccaaacgacggaggaagaagctccttagcccccggcgccaaagcaccgaaggtgcaaccaaccgaagcagacgacgggcactcaaaggtgactgcgaagaccatccaggtcggcgcagacccatcccggaccacccgcatcgcgggagatctgggagagaaataggaactcgcgctcgtcaccttcctccgggcaaattccgacgtattcgcttgggagccatcgcagatgcctgggatccccggggaggtgattgagcaccatttgaagatatatccgaacgccaagccagtaagccagaagcctcggagacagtccgtggaacgacatgacttcatccgtgaggaggttcaaaaactgttgcacgctggcttcattgaagatgttcaccaccccgtgtggctgaccaacccagtcatcgtgccaaaagcaaacgggaaacttcggatgtgcatcgactacaccagcctgaataaggcatgccccaaggacccgtacccacttccacgtatagatcagatcgtggactctacctcagggtgtgactttttgtctttcctagatgcctactccggttttcatcaaatccggatgtctagggaagataggaagcacactgcttttgtaacggtagatgggttgtactgttatgttgtgatgccttatggtctgaaaaatgccctgccaacatttgttcgggcgatgagtaagacctttggggacctgatccgggacaaggtggaagtttacgtcgatgacatcgtggtcaagactagaagggggtcgactgtagtagaagatctaaccctggtcttcgacaagctgcgggcaacccgcaccaaactgaacccggagaaatgcatcttcggcgttttcgcaggaaagctgctgggtttcctggtttcataccggggcattaacccagaaaaaatcaaggct

SEQ ID NO: 14471 - DNA, 498 bp, Zea Mays
acgcctaggcttaccatcttagaaccgctgcaccggtgaacgccacgactgagccaccagtgaccttcttcctctccggccgcaagcacgccatgccaaaattaggagccaccgcccttggaaactataaattgatgccccagcctgctccgctgagtaattgtgcacctaatgaactaaccctcacctccaatcgtccctcacaactccccaatttgggatttcccccaaatcagtcaagaaccctaccgtgtgtgagctcgccgtggccagctctccacaggtccgatcacgccctcctcgctcttgtttcagtactcttgtgtgctcttgatgcttctcgacccggccaattgaattagaacatgtaggatcatcgggaacacctcaattcatctgtagttcgcgctgtcaccgtggacagagagattaggagctagaactttgcaattgattgaagcgaaatggtcgttaggggtagaattaggtttcagccac

SEQ ID NO: 14472 - DNA, 467 bp, Zea Mays
atggtacgacggtgcggatgcagcacggaggtcatgttgtgcccgtggttgccggctagcagacggtgtgaggaaaatggagaggtaaacttgcgcgagaggtaagctctcaggattttgattctgttttcattcttactttctcatctcatgagttcgatacttattagagttcgggcctatatgactaacacaccaggccacaaccgatacccacccattacactccatcacaacaacacgcacatcacgcaaacgcactctcaccgcctcatacacacggccttcactgtgacgtgcccggcacggagagtgcgtgacaaggtagttgttgcttgcccgtaagcaactatagatggaaatcgagcctgcaacacataccagtcttcccactttgcctagtctgctagcaagttgctccatttgaccaagacttaacgaactgctttcgatcccttctacaccag

SEQ ID NO: 14473 - DNA, 482 bp, Zea Mays
ctaagtttcacacaaagaattattattgacccatcttaataatgtggttatgtagcctactaatccgatcaatttccttctctaaacaccttatgaccggcaatcattagtacttttgcaagccacactcgcatatcgttcttagctttaggttcgtttgtagctttctatttatgttaaactcataagtgcttaatgactatgacataatgaaattgcacaatcagtactatgatagcataaaagctactccatacttttctcccagtgtgggatgcactaaagcacataggtcatcaccacttcctcccgctatgcaggacaagctctatgccaacttcaactccccgtacgagtatacatttcagactttacctgccatgcgggtaatatctcaaacttttcccgctatgcgggtagttccctcgaagggacataaatgccaggattggctcatattcaatcatcaaattcagaaatga

SEQ ID NO: 14474 - DNA, 311 bp, Zea Mays
cttttggtgacctgattagggacagggtagaggtatacgtcgatgacatcatggtcaagactaagagagggtcgaccctagtggaagacttaaccctggtctttgacaagatgcgggcaacacacacgaagctaaacccagataagtgcgtctttggtgtctccgcagggaagttgctgggattcctggtttcgcaccggggcattgaagcaaacccagagaagatcaaggcaattgagacaatgaggcctccggcccgcatcaaggacgtccagaagcttatggggtcactggccgcccttagccgcttc

SEQ ID NO: 14475 - DNA, 758 bp, Zea Mays
aaggtggactttgaatccaccaggataacgcgaacaggcagacacctgctgctgctcgccaaacggctgctccctgctcaccgaacggctgggcaacaggtgctgctcgccaacatagatggccacgaacacggatacgaacagcattatggtcacggataggaacaggatgcgaacagtatgaacctcctcgccgagcgtggctgtcggtgcggccttggccagccggtaggtggagaacaatggagatatctccgtggtcggaacgctggtgtgaatgttgtgattggagtctgaagtagctcatgcagatgataaccttttgtatcgataatatcgaggtagccgagtgcaagggtgtggagccgttgtcgaggtgtcgtgcgtcgatagttgtggtcgatgtagttgtcgagaatgccgaagaagccaaactacacgagtcccgggcgcagcacgcgggaaggcccacggtgcgccaagaggcaccaggttgacgatggcgtagaaggagggtgtcgtaggcaaagacggtgacacaatcgcggtagtcgatgaaggagaagccaacgcagaggacgatgttgtcaaaccgccatggacaaggcgtactccaggttcaccagatctggaaacgcatcgtggacgaatgaacgcgctggtgtttccaatatcagacgtacaagggagacggtcccaaccatgtgtcagcgcctaaaggggctagaaaagaagacctccacggcggttgtgatccg

SEQ ID NO: 14476 - DNA, 907 bp, Zea Mays
cagtggctccggcgagcttataccggccgaaaaacgcaacgacaaggcctctcctttgttcgacacctaattccaaccccgacgaccttaatccctcaaccaattgcacaaatctgggtcggaaactctctgctcacgatggcgatggaaaccggagataactcaacgtgttctaggtgattcaaggcggtctagttcgatcgaatgggtctgtgagcaacaggggacatgagggaggctagaacatcacatagaagagcatgaactaacccgtattcgtctggccacaacgagatgtcacgtggcggtgttctgaccgatttgggggaaataagaaattgagaggctctggtggatgatccgaggcaagggctggtgcgttggatgcgtaaatacctagcggagttcattggggtggcaatttataggttccatcggcggtggcgtccaattttgcgaaggcgcgctggcggcaggagagagggaagatcactggcgcaagtgattcgtggctttcaccgtggcaaggcctctggcgatggacgggcttgctacacaggttcactgcgacatgctaatcttccaagacgcgtggcacatgatcgttaagcggctaacgccggtgaggatcatcccggccagccgcataccaagtgggtacgacgaacttaaccatgaccgagcccgagccaatccggtgccaagatcttaactccgccgcaaatatctcccctccagagagcacgaatcgaagcaatggcgcagatcacggcgcgagggtcaccgacggtgaagggtgatgtacctgaagatcttttgcgcattgtaccatggccatcatctttttgtttctgacagcatgatttgtggagccttgttctccattttctatgggacaacttactaa

SEQ ID NO: 14477 - DNA, 318 bp, Zea Mays
gcatctccttccttgcagagagtttgattctactagcgtgctggatcattccattccattccattgagaaatcgagataccataccccccgtatacacacggcacttgctgtgttttctagactctttcctggcacgacatgacacggcagattcgtaggactgctggaggcacgagcgcggaagcagacgttgtatgtacccagagaccaagggaatcgaaaggaatgtgcacggttggcgacgcggtcggttctttcgcggcgggcggcgaaccggatcttccccggggatcctgtaccgtgcatatggatgtggc

SEQ ID NO: 14478 - DNA, 366 bp, Zea Mays
ggaagagggagcaggagcagtggaagctggtgtggtggaggcagggggcacagtaggtgtggtggaaggctcgagagcggcaggagctggcatagtggaggaagctagagtggtggttactaggactgaagggtcgaagcgagcaggtgtggagcgagcccgagacgagaggcgacggactcggaaggcaatctgattggaggcgatcctcaactgaccaccctgctcttcctgatctgctgttgcggcaattgctacatgagtggctccatccaaccttcactttttcttgcctccctgctgctcaaggtagacttcctcacccttgtcgtgtctgaaatggcaaggagggtcctgatcatctcc

SEQ ID NO: 14479 - DNA, 638 bp, Zea Mays
gataattcctgtagaccaacaagagcagagagggctagagaaggaacaccactgctttcgccactgacaatatagcgtcggctgttcttccgagttagagggatttcatcctcctcttcctcaccatcatctacaacgcggacagtacaaccattggggtcagtgtcatccaggttacacccattggggtcagcgtcatccaggtcacacccattggggttaatagcaggcaggctacacccatcgggatcagtttcagcaaccgcaggcaccggcacttcttcagtagcaggaacggaaggaccagcatcctgatccaaactagacactcgacgaagacctctcttcttctgtttcttcccgtcagcaggagaagcaggctaattggctcggcgagaacgcttcggacgaatgttgtcagatttctgaatatctaaagcttcgctatcctctaggatgggcgctaccgccagtgtttcagtagggactgcatcagaagaatcttcagctaacatatccagcatggcacttatttctgcatcactcggatttaaaggcacctcaaaatgaacctgcctctcgtcgacaggaatttcttcaagtgagacaaccaaagcactaacctcttcgggagaggg

SEQ ID NO: 14480 - DNA, 480 bp, Zea Mays
ggaaaaagggggagacaggaagagcaagcccacgaataagaaaaggaatgtaaacgatagattcatgggtatcctctgtcggaacggtgacgtcacggcaaatccaccaaggatagagctcttttggaagcaaaaccccaacttcaacgagatggaggccggattcagaaatgatagacatatggttaccagcaaatggaagctggctgttggggtcgatgggcgggatgattgcagcaacggtgctctacctcttctgctttggcgccatcgcaatctttctggcggaacgagcaagatcgaaatctgagggaagcagaggagtggttcgaagggaaaaagttaagttagggctcaaaaatcaaaaaaatcacgtcggcgcgagtacaaatggggtttcctgggttgggcactatttctgaagtgccaagtcactactcgggaaagcaaagctttaggcatcactcggcggttacctct

SEQ ID NO: 14481 - DNA, 730 bp, Zea Mays
cgatcatgaagcgaaggggccttcgactcgtcgaatcgttttgactaatcagcacacaggaccacagacgaagaggccttcgactcttcgctcgactataacgaaggaagaagtcaagtggaggccacgggacgatcgacaccgaccaaggccttcgccatggcgccgccacatcaactcgcgccatacatccgtcggggaagagcgaagggcattgagtcgtgaagactctggaggtggcggcaaaggctgcgacgcgactagcccgtcgttggtccactagaagacgcttcagaggcccacatgtcaatgtaatgtatgggtgtattatttagtgtgtgtcgtgtgcagggagcatggtgttgtaatattcttcgaatatagttggtcgacgggggtaggaccatactttggaccacctacccccccccccccccgacggtcctataaataccctcggcctgtagatggacgggacatgcataacgagacgttatagttcccactcaacgccttgtccctctctcttgttcattgctttttgtctctgagtgtttggcccaccaaaccacgtgttggtacccaacatttggcacccaccgtttgtgcgatgaagactaaccccatgatgcctcctaagaaaaacacctgacccagttgaccagttgatggcgacgacctagttcacccgaagacggcgaggtccacaccgctagctcagacgatctcc

SEQ ID NO: 14482 - DNA, 510 bp, Zea Mays
cataatgtgattttacgtatgaccgccaacaaaatgattatgacatacctaggcacagtactggggtagatttaaggtccctctaggaagggcagtagtatttctatggttttgttgttatctacacgttgaaatcctctacatgggcatccgaataccaaaatactatagttaataatctctctgaggagggcggtagtactgcctctatgactctattatagtatacactttgaaagaactcctacgagcatttgaagaccgagtctcaataactcggtcatcaaccacttaaagaccctccatgggcagtggaaggctaggtccttgtaactcagtcattcgttgaaaaataccttccataggtgtagtaaggctgagtccccacaacatggttctctctcaaacatccctccacgggcatgggaaggtcaggtccttataacccaatcatccattgaagggtcccctctgagggcatagaaaggttgagtctccatgacacggtca

SEQ ID NO: 14483 - DNA, 304 bp, Zea Mays
gacgaccgcccccaccgcttccacccgctgtaatctccgcgcttcatcgattcaccgccgtcgttctcctcccctggttcgcttcccctctcattctttcgagttccccacattcttttacatagttcagtcgctaatgtccatcaggttcgccccgccccttctacatcccttcaattgattcgaaattaattgaatcgcctcattataggtagtatccgataacggcttccaattttttcaattgcatatttgttacatactgttcatttttatataggtactgaatgttgtttataaacat

SEQ ID NO: 14484 - DNA, 417 bp, Zea Mays
cgagagggcacctaggagcgtggatgtcagcgtgctccaccgtggggatacctggcgccgccaccgcctggatgtgccatggggaagagaagacgttgtggcgttgatcttgtgatcaacagctccggatggttgatagcgacatgtgcgcgtggccgttggatcccagccgggcgatggggatctagttccgtttatttaaatcacgaccgtcaatcgccgatccactggtccgcatttcataccgcttcaaaggaacttaaacctaatcccgaccctttatctcagatcctgcggccctcgctgcgtaccatccatcatctaatcttgatcgctcagatctgatcgggcagctcacagttaaccgtaccccttcatccgctgttttggaaataagtccatgcatttttatgaaat

SEQ ID NO: 14485 - DNA, 583 bp, Zea Mays
cacaacaagtgcgcaaaatcgaagtcttcttcgaaagactatccgtgcaaaagtcgcctaagggtgcaaccggactattacaacaagtgcgcaaaattgaagtcttcctaaaaagactatccgggcaaagaccgactacaggtgcagccggaccgacatcataaacgcgctagatcaagtacacaagtcccccacggacacagccggatcagcgaaggcacacagcatcatcatccaaattatagttacatacgtacagcgagggcatcacaccttacattggttcaactttcggaatgatacccatctccctatagttaaacaacattatcctcagctcctcaccctcaaaaagacttcgcaactccccctcacctacactcgccccaaccggcaaagacaacaattcccgcttgccagccctgtccacacgaagacgaccaccctccacctcactcactctacgcttcgccaccgcccttcgccgcctacgcccagcactcggaccaggaaaaacttcagcatccgtcacacgcggagaagcctccgccgcagccacatccaaggccacaaagtaatccaa

SEQ ID NO: 14486 - DNA, 445 bp, Zea Mays
tcatcaaacgctcccaccgatcgccatcctccttcgccttatccgccatcgcttccagaataaagcgagactgcaccgatggcttcgcaaccggcgccgtgatgaccgccggggaccctccacgccgagatcgaccgaatctgataccactgtgacaccccttggccgacggcgagtcgccgcgacgtgagacaacacaggatgaacgcgcgcaactctcaggtgagtttgtgcggtggtttttctctctattattttctttctgctcaagtcttagagattacagtatttaagccacgcttggccgacccacaccaatctccatagctatgagaatacggcccaacaacggcccacacaaccacacacgcccaatgctgcgcaaccagcaacctcttgcctttctcttctctgatgacgccttgtcagttaggcacaggcctga

SEQ ID NO: 14487 - DNA, 876 bp, Zea Mays
tggcgtcgacgcagtggaatttgagggcagaatcgcggagaagacggcgaacttctccctctacggtggagctcccctgggcggtactctccttgccggcggcgaactggatggcggccagggagcccaccgcggcggacgctatgccagagcataagccggactagcctcgcgcaggagcagaggggtacggtggagcaggagcttgggaacgagggtgtggacttgctaccatggatgagcacaacgtccaagagccaaggcgcagggcaaggatggtcaggtaagcggagggagttccactggcgacgagggaggaacgtgtcgggggggttgacggcgaggctggcctaccatggcgcccgcactctctctctttcagcgctacctagcgactcgatgttctaggggctcgaccctggtgtggttcgcggcgaggccacacgatgtgggactttatccccggaatcaggtgacaacaacccacccgaatcctagtggaagactccgagccggcatcttcgtagtttctgttggcgctccccgattctcttggggaggttgacgatgtcagacaggtgggtccctcggctagagagagcagtagcagcacgcgaagcgtaccggctgacaggctacccggttgggccgagtggtggagggaagtcgtgggctaaaagcaaggttaaggcccagttcggttaacactttattctttctttttctttgttttgtttccaatttcaaatattcaagctagattcaaatccctattttgaattccacatttcaattgcccagtaaaatctccctgtgaatatgactcctactgtttgaaataatattatttgtttgattattattattactttccca

SEQ ID NO: 14488 - DNA, 411 bp, Zea Mays
gaatgcccaaccctacttacatcaatctcagtggcatacaccttgacgtcgaggtccagcatctatttcatctttctctcacttgcgtcactcgcaccgtctttctcgctctctctctgtcacgccctcaccctcgttggtgtcgtcgctcttgccaggcgctcacccacgctcctaccatcgcttgctcctcccgtgctctatgtctctcccacaccactgcccctgtccgacacatccgaccgtggcgctgccctagctcgacgctcactcgcgcgcatgcccccacctgccctcccatgctctatctgtctcccatcccactgcccctacccgatgcctgcacctgcgccatcgctggtcgatggtcgttcatccataccctcatgccctcgaccccaagaggctccc

SEQ ID NO: 14489 - DNA, 316 bp, Zea Mays
ttgatcactttgttcctggtaactcgggtcagggtatcgatgatcttgatggggtactctgtataggttagatcaccctacacactaagttcatccatatgcaacaattcttctgggatttggagacatttctttgactgtgaaacatgaagcacatcgtgtacatccgataggtgactaggtaactccaactggtaggccacttgcctgactctatttaggattttaaggggttcaataaagcaaggggacaactttcctttaaccttgaatctccgcatacccctgattggtgacacttttaggtacacgtgat

SEQ ID NO: 14490 - DNA, 1138 bp, Zea Mays
tttgaactcctctccctcctgaattcggatttggtgataacccgctctgtggtccaatttggtaaagatagctgccccactcaactcatcagttatctcatcaaaaactggcataggaaacttgtttttcaccgtataagcatttaacttcctgtaatccacacataatctccattcaccatctttcttcttgacaagcagcacaggtgatgagaaagggcttgaactttgttgtataattccattactcagcatctcctttatctgtttttcaatttcatccttctattgtggggtgtatctatagggtcaaaacctgaaaggtgtggctcctggtagcagaggtatggagtggtcatacattctttttggaggcaatccttgtggcggcagaaataactcctgatagtgctccaacagtttggatatctgctctggtattgcactaccctccaatgcttctgttggtctcagctcaaacatgtgttccacaacctctttacttaacagacccctcaactgcttgtcagacaaaggaatacaggaatctagttttggttgaattccttgcagctgcactgtctgcccttgatgacagaattctaacttcttttctgcccagtacacagacatgggactataaccttccagccaatccattcccaaaataatatcatagccactcaggggtaagaatttgaaatctgtatgaaaagtaatacccccacacaaccaaggacactggggtgcccagcagttacaccacagtttcctaccatcagccactttaactggtaaaggtttaggcaattgctgtacattcttgacatctcccatcaaatgtagactcataaaactagctgaacttccagaatccaccagcaccaacatctgtttgtggtgtattgaagcccacagcctgatagttttgttggtttcactgccactcgcagctgctattgatacagctaacaccacctcctcatcctctagtgccacctgactctcacttccatcgacttcaatttctcctaccgtctgagaagtaatcgcccacatttcttccacaacatgtaatggcacactactggaacatgtatgatttgggttccatctttctccgcacttgaaacacaac

SEQ ID NO: 14491 - DNA, 349 bp, Zea Mays
agcatcgtgctcacctggatcgtggggacgatctccgttgacctccacagcctcctccgcaaccttcctcacgctcgggctgtttggcttgccatcgagggccagttcatgggcaacgccgaggcccgggctcttcgcctcgacgctgcttttcgcaccttcatccagggggacctcagtgtcagtgcgtactaccgcaagatgaagaccatggcggactcacttggtgatctgggctgccccgtggaggaccgcatcctagtcctcaacgtcctccgcggcctcggcaatcgctacacccacctccggtcgttgatcatgcgccagcgcccctttcctaccttcctcc

SEQ ID NO: 14492 - DNA, 413 bp, Zea Mays
attcaccctagaagtactaagatgtatcaggacctaaaagaaaagtattggtggtacggttggaaaagagatgtggctactcaagttgcactatgtgacgtgtgtcaacgagttaaagccaaacaccaaagaccagcaggattaatacaacctctcaaagtaccggaatggaaatgggaagaaatcggtatggatttcatagttggactaccccatactcgggatggctatgattcaatatgggttatagtggacaggttgactaaagtggcacactttatacctgtgaagacaacctactcaggagcccagttagcagagttatacatgtcaaggattgtttgtctgcatggagtaccaaagaagattgtctcagatcgaggtacccaatttacctcacgcttttggaaaag

SEQ ID NO: 14493 - DNA, 433 bp, Zea Mays
tgcggagaggggtctcacctaagtcagagatgtggagttcgctgcccacgaagaggcgtagtccgcaccagagggcatgcatcggcgagcaattgccgccactctgaggtactccgcgtgccaccggtccccacaaccgaacccacttggttgcgctagggaccctgccacccccagactcggattgaagaggccccgcgggatctcacctcgccaactgcggcggtgctccacaactatggtgatggcgacgaggttaccttgttctgggtggcgagagatggtccaagggttccaggggtacggggctcagctctttatagcatggagtctgacccgcacacccgggcaacggcggttggagcggcccgaccgagaaacctggcgccgctattctgttgtggtgtcttcgattgaggggttagtgatgacg

SEQ ID NO: 14494 - DNA, 547 bp, Zea Mays
gtaaaaagctgaaacaaacagggccatatgtgctggaataaccaccctttgaacacttcctacagaagacatatatgaatggtatgtattgtttcttgatgctaatgccacccaatacactctattagaggaggatgactgagatagtgtaatgccaaacttagatgatctcggagctaggtataactgggcatgattcataggtttgtagcactgagtggagtcgtataaggatcaagaagataccgaagaatgttctttgtttccctagtgggatgggactatgcaataggagaccaccgaccatccaaaaactcaaggagtatgggtacctcaatatccacaacatcaagctagggcatgggcaagactacaagtgctccatttactcccaccaattgaattacaaaaacaatattgtgaccaaactgaggaccactcgctcacttgaatgctcttagagatgatgacactctagtgcaccatctcttgatctccaaccactttttgcggtggtctttgtgagaccaccatatgcaagagagac

SEQ ID NO: 14495 - DNA, 524 bp, Zea Mays
gaaatatttgtatcattgtcgccctgggatggccggaggacagcatcagctggtgggggcgtgagcttggagatgcgccgcggaaggaagactgattatctcgacatccccctcaaggacaacatcaaaggatggcgcttggagtggtttatcgttgagaatcaaggaaattctctcccctcacggtcagggagacagccggatgttcgcactccgagctggaccgagtcccccacagaccaggatgtggctgaggcaggggttctgctagctgaagttggattgttgaaggagaggggtctgactgcagaggctgtggttgctgactttgttttcaagaatattcagccattgaaggacaaggcatacccgacctatctgtaccgaggcctagctgactccacccgggtcaccaacagaagaattcctgctgtggacttggtgagccggctcgaaatgatactcagaggcaaggtatcaaatgttggtgcccctgttgcatactcggcctggaacctgcctcc

SEQ ID NO: 14496 - DNA, 801 bp, Zea Mays
gacacttgttagagcttggtaagatacattagagtgtgttcctgtgttccacctgagaggagcgtgtagtgagattattagggataaccttcaccgtttgtttcctgtttttgtgtttcgatggcaggcgacgacgaagaagcaaggatccctacagactttgatgaatgtgttagccgccaagatcttgaggcaaacaacaagatcctgaaggagcaaatggatgagacggtccacaagtcagtgcatgatgccttcattaacatggaccttggtaggacttacgagaggctggatcgacaattgtcctagatcgtcgacagacttgctgtgttggagacgcaacaacaagcaccgccaccaccaccacctcgtccacgtcttcccgatgatgaggtgattgatgaagaaggtaattatgatgaagcggccaccagagatttgcacctccgtcgtcgtcttcatcaaaacacagaaggtatgccacaccgccagcaaggtaataacaatcgtgctcctgacgacccttatgctaagattaaattttatataccatctttttcgggtcattatgatgttgaaggatatcttgattgggagatgacgatagaacagaaatttgctgcccaccttgtacctgaacgatatcaagttagacaagccactagtgaatttaaagattttgctattgtttggtggactggtctagttggggatggtagagcacctacgacttgggaagatcttaaggtagctatgcgcgatagatttgttccccatcttatcatagagaattgcgta

SEQ ID NO: 14497 - DNA, 527 bp, Zea Mays
ttatcctctctctcccatgctcttcatcttagtcatggatattctgaattctttggttaattatgctacgaataaccatctgctttagccccttgctgtccatcatgccaaacatcggattttcttttatgcagatgatgcagtccttttttaaggtctttttaaactgatttacttgttatcaaacatattcttgatatgtttggccacatctctggactgcatactaacctatccaaaagctccattgttcccattcattgctctgatgaggataggttgttattggtggaaactctggcttaatattaaggagttaccctgcacctatcttggactgccccttgctgtccacagatcccccaaggagtccttgcagctgcttgtggttgtcgacgatggtatagatagcagtagcactgtacacaagcagcaagcaacaccccacctccttgcattgactgttgcattttttatgaaacctaaagccgtgtttccatctaattgtaggcccatttgactctagt

SEQ ID NO: 14498 - DNA, 591 bp, Zea Mays
cacaaacaaagaaatctcggcatgatgcgtaacttattagcaaaacaaagggtcaaatcgaccttattattattcctaaaatagtaaaatacgaactactggccaaactaatatttaggtcttacaaatagtaaaatatatatatgtatctatatttatgtttatctctattcttgttgttcgttgacttcttcaccgactacttcatcttcaactagctcttcttcttgaatttccagttcacctggttcaacctctacttctgcatgatgggcatgtccccggttgatagataggggctgactctttcctgccgaggcttgtccttgcttcatcggagccggtgtagtgtaggcagctctgttgggacagtagttggcgtagtgtcccggttgtccacacttgaagcatgccctgttggtggttgtgttaggagcaacgggtcctgctggggtgcttgctttcgggggagcagttggtgcctgttgagtttgttgtccggtacttccactagctagtgtacttggagtggtagtatagcaaggacgggaactacttccagcttgcccatggttatcagcccttcttttc

SEQ ID NO: 14499 - DNA, 492 bp, Zea Mays
tcctcgacaaatatgttgtgtgttatgatacaagctgtcattctttctccaagatgattctgagcccaaccaaaagcaggatcccgaagaacaacacaacgtgcatgtaaaaccccaaaagctcgctccacatctttcctgcaactctcttgcatttaagtgaaatagactttcttctcttcccatgggtgcctaattgccttaacgaatattagccaatctggatagataccatcaacaagatcataacccatgttataagaggtgtcgtttaaggtgtactccaccagtggcataatgcccctccataaaggattgaagaccgaggatatttggagaatgttaatatcgttgttggtaccatacatcttaaagaaagcatgtcggatccacagatcgtaaaaggctatagcctctaggatcatactaggactcaagttcctacaacaaaactgcccccgccaaactatcaggcaattcctccattcccag

SEQ ID NO: 14500 - DNA, 1043 bp, Zea Mays
ccggcccatcctagcgtaccacacgcatcattggacgtgacactagcaagccaggcccacttgtcggccactcagcgtgcaccagtcattcttctagctgacgtgtggggcactctccccagccttgtttgtcttccacgtcgcggagctttcggcgaggaacattacaacaaccgccccgatggggtgagccaactggggggggatcctctctgctataaaccaatgcggtagggtcgcctaggccatatcgacccaccccaatcgcaccaggagcaatagccgagagccacttcgacgcagagtgtgaaacgagagtgagagcaggccgccggcatgggaaatcggaaccgcgacaagtctgggcttgggactcggctttgggggatcatcgcacctcgtagaaggcgtgctcctcattgattcgggcgaagttcactggagccctgtgtaatttctcgtcgtcgagcctaatccaccacagatccgctcttccaagtggattgcccgcctgcgcgcatcatcctcggtaaggtttcctcacccgcattcgcttttatttccgcatcgtgtagagctgtttgggttagaggttggggcgctaggaccgtagactcgcctcatcggtgaagtcctccgccgtggtagtcttacgattcgacccttggttcctgggccatagatttcgtgtgtaacgaccacgattaggtggggataccccttcggttgtattgcactcggaccattgagatcgaatccaagggtcagatttgggtcacgtttcataaaaccctagccatcgatctcacgttgggcgtttcagattagcgcatgaacataccccattgcgacaataagatttggccgtcgatcggttagctagtggttatgttgtcacgtgggcctcggaccgtagatccccgatctgaggactcgtatagcatactgatcttctcaccgctccaatctaacctgaatcgtctgtgttcgttctggtggcccatatgcgatggtaccccttcagccatccagctatacaaaat

SEQ ID NO: 14501 - DNA, 529 bp, Zea Mays
gtcacagaccatgatgcagcaagaaacatctgcaacgatatcatcaggaaccacaacgccgggtatcttcatcaagatacggctagcacggatcgccttgtccatcacgttgtcacaccacaccttcatgatctcacagtcgctttctaagaccttgatatctcgacgagcagtttccaactcctgcgacacaaacttcgtcgaggtatgaagatccttgatggtagaatctttttgaagacagagacttgctaagcatcgacacctcctcctaggactctttcagctcattcctcttgcgcttgacctcctccatggtaaaccgatggctccccaaagtagtgagagagctggaggcatccctatacaacttatcactgttattctgagaggcaagtagtgtctggttctcagtcttgagcctttgtacctcctcctgcggatgggagaatccttgataacaggtcgacaacatggaataagcaacctaaagctcatggcaaattacctcgtgggttttcttctccaa

SEQ ID NO: 14502 - DNA, 357 bp, Zea Mays
tcggtgtaaagtttcccaagactcagaacgctacttgtacggactgcgggttgatatatgtaaagcgcagggtctctttagcgaaaaggcatggcgaagaggtacgcacagatcagagccgcccgattatggctgaacggtccggattaaatcatcccgggacttaaggctgattcactcggagccgttggatcccaatccaaggacacacattcgccacaaccccgatccgatctgcccattgggttagcgatcaacgatcacgaatacaaaatacccgaggtcggatcccaggcgcaggatcacgatccaaggacccagggtcgtcttctccaccacgccatccctgtgaccgag

SEQ ID NO: 14503 - DNA, 615 bp, Zea Mays
ttctgcagataacctttttcccgaagcatgtcgtacaatataatccagagtttcggaagatgcttcgggaataggagtggcagatttttcaggcagaatttgttctgcagattcttttttcgcttcttcttctccgatttccaaagatttctccttggcgggctctgagggcccagcttcggtttcggcatgactttgtgcagcttcggcttcagtttgttttgtctcaattcgcgtttttgaagcttcgactgttttccctggagtggtgcttgaagactttattgtctctagcacatctagtacattgaccatcctttttctcttcggagttgccgtgagatctttttgtgccttcggcactgacattccagccgaagggcttataacttctaatatctttgttttctcggcctctatctcttcaatattatcggccttcggcatcatagccggctcttcattcttctgtgtaagagcaggaactttggcttcagtagccgaagaggtctcaccaccaaattcgggcactatggctggttcaatgaagcgcggtcggtgagtaaggaccttcacctttttcctctttggcgcgggctcacttagagcagctga

SEQ ID NO: 14504 - DNA, 1058 bp, Zea Mays
ggagggccctttcatcgtcaagacgaaggcgtcccccagcgcatacaggctcgcgacgccatccggcgaagaattggagcattcctggaacattgataatctccacaaattttttgtatgactgctcagggcccgctcgcccttgtaattcacacaataattttattctggcccgcactcttttcctcccggggggtgaggtttttaatgaggcggagccatgtaatatacaagcgaaaaatcccctgcaaaaatctacgtcgaaaaaagaccgtgtcgacggtcttcgacattcgaccaatataaagtcaccgcgaggggcagcgctagctaccctcgcgtgcgacactccgcgcaaaagtcgcctaagggtgcagcctgattagcacaacaagtgcgcaaaatcgaagtcttcttcaaaagaccatccatgcaaaagtcgcctaagggtgcagccggactagcacaacaagcgcacaaaatcgaagtcttcttcaaaaagactatccgtgcaaaagtcgcctaagggtgtagccggactagcacaacaagtgcgcaaaatcgaagtcttcctaaaaagactatccgtgcaaaagtcgcctaagggtgcagccggactagctcaacaagcacgccaaaacgcaaagcgttacatccgtgcaaaagtctacaccaagaaactgtccgcgcacagaccaactacaaggcgcagccggaccaacgtatgaaatgtgatagaccaagcgcacaatgcccccatggacatagccagacacgcgaaggcgtacagcctcattatacaaaccatagttacacacgtacagcgagggcatcacaccttacattggttcagccttcggaatgattcccatctccctatagttaaatagcattatcctaagctcctcaccctcaaaaagacttcgcaactccccctcacctacactcgccccaaccggcgaggacatcaattcccgcttgccagccctgcccacacgaagccgaccgccttccacctaactcaccctacgcttcgccaccgcccttcgccgcctgcg

SEQ ID NO: 14505 - DNA, 406 bp, Zea Mays
acgagatggtggctaggagggatgttgtgctcgcggggaagctgcttgcaggggagcgcgcggaagatgccctcgttggccgagggatgttgtgctcgaggagaagctgctcgcacgggagatcgcggcaaggcgccacttcgctaggggaagagaggtcgtgtaaccgagtagccgagcagctatagagcgttgtggggaactggccagtgagtttgttgtaggaaaggtcgagatactaacgctatggggattgagtagccgagcagctgtagactgacgctgttcatgcactgacccctgcccagttgcagtagccagaaggacgctgtccatgagctaagcccagatggactgccccagcctttcttgattgctagaagtgttgctagctcgcttgcgtcag

SEQ ID NO: 14506 - DNA, 671 bp, Zea Mays
gattcccccctcctccccctaatggaaacttgccaaccgccccaattctcccaagagtcagcgtgttacccatgcctttcccgtataaaagtagaggagccctgccacccagcactaatgaagtcattatacatgtttgaatctcactagagtgaggtcatagtcgtcggcaccaagttgtcatttgctccctagtcgttgccttttgggtcattgttgtgctttgttgtgaggtgacaaagctccaccaagctctttatctccgtttgtcatttaatgtcgccaacattagtagggaactatagttcaccctaaccagccccactcttatcatgcattcgtcacctacaccaacccccatcgtgagttttgtagtgttcccatgtctgccccatgcggttggtttgcttagctaagctcttgagccctcgaacagataatgccgatcacttcctcgtcagattctagggcatcgctgtccaccacatggtcctagctatcacaaccaccgaggcccccagtcgtccactcgtagatttatgacacaaattataacacataaatgcataatagtgcggtccacaacaacacacaaccggaatcgaggacattctcatcggcttagtcaattcttgtcgacctttgacgacgagaattaagtaactctcgtt

SEQ ID NO: 14507 - DNA, 274 bp, Zea Mays
ggacaggggagcaatagcattcatcctcgctatgtcccaccctagggtacactagctcgtactggaggaggacaacgcccagctcattatgcaccataggggactccatagactccacacactcgttaggctacccccactggcaccccggcgagacctgcaagatagagtataggcaccacatgcttcaagtgtggtcgggttgggcactatgctaatgtttgtccgtaggggattgccagcacacccgtccaaagcaagcaaccaactccag

SEQ ID NO: 14508 - DNA, 666 bp, Zea Mays
ggcggaccggccgaccaaaccctgtcaagcaactatgcaaggcggaccagctgaccaagccttgtcaagcaactcggcgagacggaggaagcacaaggcccgtagcgggagccagtacgcttgtggcccccgaaacaatgccctcttgacacacatgcgtcaggagcacgcatgtacccgactgacgaggagataaggcagactctgttgcccactccaaccatggcagggcacgtcaccacacacatatcgtcttagatgacgccacatcacattggagggatgccggagagtccctgacaacaggataggacgtcacctcgtacgccccctcgtgccctccaacttcgacccatgggtcccaccaggcatcactatagggaaactcagcaccggagtcgctacagtgacccgcatgcggggtagatagaagcgagaccactgtggacaataggttacgccctccttcggatgacaactccctatgcaagaacccccttaaactataaattggaggggggcaaacaatcaaagggcaggagcatctagctagagttcctcactccctccttcccacacttgcacctatgatcggcactacactggactagggcacaagcctgaaccagtataaaccctctgttggaatcccttgagtccacgcta

SEQ ID NO: 14509 - DNA, 533 bp, Zea Mays
ccgctccaaaaccctttctcttcctcaccacaccagcacaaccaccacaacacccctcgcactacgcgcgtcgctgccgcctatagcgctggtgagacgagtacggaggagcaacacagggatggtggcggcctcgaggatgagcaggaggacccgagcttcctcaaaccaccacagcacccctcgcactacgggcaccgccaccgatgtcgcttccagtgtcggtaagacgagtagggaggggcaatgcagggatggacggtggcctggacgacgagttggaagacgcgggcttcctcgacaaggtattacgcgcgacggacgaggtcatcgcctcatgcaaccctaaccccgctcccgctcccatccccatgtttgactccttcgtcattgtccccgtctcagagcctcctatcttcccaccgattcgatctcccacctccccgtcgcttcgtagccccgcttcacgatcagcttctcccctccgctaatggaatgagtatttttaccggttaaagtttggttaatggagg

SEQ ID NO: 14510 - DNA, 332 bp, Zea Mays
aacccctcacccgaaccacccggtccgcgagtcttcagccgggccatacgacgagcgtcgttccctgcccgtttcagagccccgactaccatcaccaagtactcgggggagacgaggccggagctgtggctcacggactaccgactggcatgccagttgggaggggcggatgatgacaacctcatcatccgtaatctaccccttttcctcttcgacgccgcccgagcctggctggagcatctacctcctgcgtagatctccgactgggatgatctggtcaaggctttcgcggggaacttccaaggcacatacgtgcgccctaggaactcgtg

SEQ ID NO: 14511 - DNA, 543 bp, Zea Mays
aaaagtttgccttaaaagaaaagacctcttaccctctaaaaagaatcttctcttctttccccgatattaacaaacccttcttctcttgctaccagatggaaggctttttgtcattaggacatcctactgctcagaggtggaaggattccctcatcttctacggagttgcgtgcttcgcatagggatccgcaagaagctggagtacgtctggaaagaataccgtgagaacggaattgagaaatgctctatgacagtctacctgggagaaagccgaaactacccaaatcaccctcccttccaagtcaccgccactagacaccgctttccagacacttgccaaaatgctgcccaaagagccctccgccagctatgccaaaactacaacagggaagtctttgagacaccccttcgctacttcccacccagcaacaaaaacacccctaccttgaggaaaagacttcaggccttgtcagggagagattctaatgaggatgaccccaccatagtctacatggccagatatctccacacccttaacaacca

SEQ ID NO: 14512 - DNA, 1029 bp, Zea Mays
gttcatatgaatttcctatgatttattaaagtcctagcacttatttttgtgttaaaaaatattttttaaaatcaaataactgaaattacagggctgcgaactgggcgcgctatttatagggaactcaggggcctcggggtaaaaatctgtggacacaaagcactattcgtagtactacgggttaatttccatagaggttagggtctcttttacaaaacctacggtcgaaggggtatgggccacgatgggccattggattagaatcctacggatcagatcagacctacctgagattgaattggagcgaggtgagaaccgcacgatccatgatctacggccagatcgcgcactagcaatcgttacgcgactatctaaatcataaccgcccattgaaccacccacgacctagatttaacccagccgaaggggtatcctatttctaatcgtagccacccacgcgatgatcaacgggcatgaccacatctccttcctccgaccaaccgagacggcggcgccgccctgaaccacggtggtccattgccggaccacacccaaaactctactctggccgccgtgaatcgatccaaggagcgtaaactactgcatatgggtagtgagatcggtggagggcatcataccggagtaattcgcgacggtcgagcgggtccactgtaggggatttctcggagtagatttgaaatccggcgagcaatcaccggcataccagtcaccaaccgcaaccagaaagaagtggcacacggttcacgtgatcccgtatggcaccacggttgagctccagacctggagcgccctcgcggacgaacgttgtcggtggcggcacaccttcacacccggcgatgttaatttgggcggctggcgattacccaacgatatcggctgctcggtttttttcttttcgcgtgggttaatggagggtccaggggaggtcctaatttatctacgtgccctgggtgaggggaagacggggagctttgccgcgatccacgtgcggcggcaattccgcgcgag

SEQ ID NO: 14513 - DNA, 405 bp, Zea Mays
ccgtgatatttcaattgtaagggctggagaggaaaataatgttcccctgcccgaagctgacgaggtggtagtttatagaagcttcatgaaggtagggctttggttccccctgataaattgctagttgaagtttttaagacttttgaaatttaccttcatcagcttacccccgaagctatcatcaagatggggatttttatttggtccatgaggagccaggggttggaaccgaatgcaaaatgcttttgcaacatccatgagctgtcctatgagacgaaggctactggaaaggaacaatatcacaacaattttgggtgctacaactttgtgtttcgctcttagatgagctacccggttccaacattttggaagagatggccaggggcctggatgcaagagtggttc

SEQ ID NO: 14514 - DNA, 586 bp, Zea Mays
catggcctccccctaacaaacattagttaaaaatgggtagcaagaaatgagttggaatagataaatctaagttgatccacctcctttaaaacttaagcacacttatctccttactgctaccttaacacttacatttaaccctctttcactgatgtcttcatccacccccgccaatggaggagacacccgcttcagctttgactacctttcccatgagggctttccctctatcttgtgggaggttctctgctccgctggataccccacatcccctctgtacatggtgcagctatatgaggagcatcgggtgccacgttgcagggtttggctgaccctggagtctcacccctgtagcctaggtggcgttcccttgattacgagactgtcgggttcagggcggacgacaccactgaggccacagcgctaaaggccttgacgaccttctatggatttcatcccctggagatgatgatgcacccacttggactcttccccgccgagaagagggatgacccaatgtggtgcaacagagtgagtcacgtgaaggatgtgtgggccatgcatcctcaccaggttgggaggatca

SEQ ID NO: 14515 - DNA, 282 bp, Zea Mays
gccatttaggcccatttgtaagcccctccctagggtaggatttactgtgtatttgatcatgcatgttgtacttaacatcgctgtaatgaccctgtagggggaatattccagggctgtagcaggtaaccaggggcataattgtacttagaagggcacacccacccacctggttacctataaatactcccacactgtacattgatgggacacgcctaacgagacgatattgttccgtgcctactgttttgttgagcacctaaatatcttctttcccaatgtctt

SEQ ID NO: 14516 - DNA, 818 bp, Zea Mays
gttgacaaagtatcacgtcatgggtgtgttgtcgctttcctcagtgtggacgagtgttgatcggatgaaggcggttgtggggagagaggagaatatgacatgtgggcccctcatcaactgctatagaaaaatctgagcggaggtgggttttcagcaactgaccggtgggcccgcggccagggtgtggctgattggctgtgcgtgcacttgtacctgcgagcacgatttggggctgggagcctaggagactagtgggccaaggtacatggacgtactcccctttttatcttgtttttttatttcttttatatagatattgtagacatacatatctctactactctataagaacctaacgtagaccgtggtgcactgttctggatcctcacggcgcataaggcccacatgttagtgtctcccttcttccccatgcgcgccctctcccctctacccctgcatctgcatggtcctcgtcgcaatcccctcaccggtcaatgtctcagctatggaaggaaaaatcacgtcactgccacagaaggaaacacatcccctcgcagcaatccagcacgcaggaatcccatcgccgacgacgcgcaggaccaccccgcccaatcgttcttcccatgcaccgcggatgccccgcccatatcctccgcgccccaaacacaatccacgcctcgccgccatggaaggaatcgcaacccaatccactcatcgccatccagcgcacaggaccaccatcggcccgcatcccatagcaagtttgcaggaccaccctgccatctcattcttcccattctacgcgctagccctgcttg

SEQ ID NO: 14517 - DNA, 658 bp, Zea Mays
tctctgcatcactgggattgaaaggcacctcaaaatgaacttgcctctcgttgttaggaatttcttccagtgaggcaaccaaagcattaacttcttcgggagagggtcgcactctaaggcccaaaccgctatcatcggaggaggattcgacacaaaactggtaaaggccttggaaggaggcagattccaggccgagtacgcaacaggagcaccgatgttcgacaccttgcctctgagtatcatttcgagctggctcaccaagtccacagcaggaatttttctgttggttacccgggttgaatcagccaagcctcggtacggataggttggatatgctctgtctttcagcggctgaatgttcttgaaaacaaagtcagcgaccacagcttctacagtcagacccctttctttcaacaatccatcttcagctagcagagcccctgcctcagccacctcctggtctataggggattcgtccagctcggagtgcgaacatccggctgtctccctgaccgtgggggaggtaattcccatgattctccatgatgaaccactccaggcgccatcccttgatgctatccttgagtgggatgtcgaggtagtcagtcttcctcccacggcgcatctccaagctcgcgcccccaccagctggtgctgc

SEQ ID NO: 14518 - DNA, 527 bp, Zea Mays
gcaggaacatgcagtaggttagggctagaaaactctaaccttccccaaaatttgaatggttcaaatgcacaagcactatccaaacacatagaaaatattttgggaccgcacaagtcatagaaacgcgcacagaagcccagatccacgcattaaaactccatcaactcgatcccaacattacattagttcacatctcatacatacattcatcacagatagagggctcgagttagaggagttagatctgggcaagttcatagtagacgccacagggtgtagtaacttaccattgtagactggtaagagcaccgacctgagtcccctccgacggcggtgagctggacctaagggagcttgctcactggtggagggcccgagggccccacattgcatgagacttttggccagcagaaaataacaaagatgagagggcatcggctggggccacatcgccggagaacatagtagtaaggagtgttagacaggaaaacgacgagggtgaagaagtggtctgattagggtttctc

SEQ ID NO: 14519 - DNA, 732 bp, Zea Mays
gcaagttgggctgtcaggctgactgaagaaccatcccatggtacagtaactgaaacagatcacggattcatcccccctcgctgccggtgacctttgctccgtgatttgcgccgtcaccgcgatttgtgctctctggtaagtagataaccacgacggagtaaagatcttggcaccagatcagctcgggctcggtcgcggatgagtttcaccgtacccacttgctcgtcgtgcagtcgggatagacctcgccgccgttggccgctcaccgctgtgcgccacgtgctaaagcactagaccacgtcgcagtgaaacacgtcatgcatgctcggtgattgccggagagctgccacggtgaaagccactaaccccaagcgctagtaacctttttcctctctggccgccagcacatcgttgtgaaattggacaccaccactcaagcctgctataaattgccgaccccgcattctccgctaggtagttgtgcaaccagtgaatccacccgtgcctcgaatcatcccctagaactccccaatttgggatttcccccaaatcactcaagaacaccgagcggtttgacctcgtcgtggccagcgcatctcaggtccgttcatgtcctctgagtcctcgttttagtatccttggatgctcctgatactcactgacccatccaattagctagagtccctaggatcaccaggaacgtgttcggttacccgtggtgtcagctgtcac

SEQ ID NO: 14520 - DNA, 408 bp, Zea Mays
ctctattataccttgactggtaaaacaaaatatcctagcttatacctttgccttgcatcttacttttacgattttctacaagtctctgctcctgcagcatcaatgatctcccagatccaacaatgtcaggcacttcatttgtcttactcttatcaatcttcattcttgtagagcacctgcttatctttgtggacttcatcctatctcattcatggaactcataaaacatgttagtccacctagttatattaattaccaaaactacacatagagctttatttacattgttatgaaggaagagaaagaattgttgagaataaaaattagacattgtagacacggtgtgattcagggatgacggtggaacttcaaacatcatcagggtgtgatgtttactttatagttcag

SEQ ID NO: 14521 - DNA, 319 bp, Zea Mays
gattcctccgtcgctacgggatttgcggcgcagcgggtagggatgtagaatttgggttataatcaggactcaggagcggactgcgggagccaacttaattttggaatgttgctcgcttccatgagttaatggaggagctggagcaatgaacgtcaagtcatcgtgacgataaatgcaaatgggagtgggattacactggtttttaggaagttgggttggtcttggtcatcagtgtggttgctgcagattagttcaacagattccttaacaaagcatcagaatcagattcgctgattcgtatcttgaaatggctttgctt

SEQ ID NO: 14522 - DNA, 556 bp, Zea Mays
cgggtttcagagaactttagatatgtggtgtctcgtggtccttgaggttgacctctgcctccaagttgctgaaattgatttcttgcgaattcacgcaggaaacgcgtgttgtcagtggtagcattgactaaggcagcgataacctcagccagtgtaggaggtacaggtggcgggtttggagtttcctccctgccatgggaagttcctgccctgtcatgagcacgagttcttaatggcatctgaggaagaaaaacatcctagattattacatgccaaacgtacaccatctttattacattgtgctgaactgtaataattatacatacccattagtacaactcaacttccttatttactttacataaggacactacttaaactacactactctaattatcttcgtccttggccgcaccattgccagcatcgggagaatgttcatctgcgaggttcatggaaggaggggctccaaaaaggtccaactccccatcaggtcctccattagctactccagatggtccggctcctatagctgcaacttctggtggcacatttg

SEQ ID NO: 14523 - DNA, 334 bp, Zea Mays
cccctgccatggaatccggcagtagcaagcgataagctaggctgccaactcgggccaagatagagaatggtccaatgtatctcgggctgagcttcctagagacaccgaaccacacaactcctttagtaggtgataccctgagaaggacttggtcacccacagcaaattccagatcccgcctcctcacatcagcataactcttctgacggctctgagctgccaaaatattctgacgtatttcctgaacctttttagaggtctgctgaacccaatcaggaccaaccagagatctctctcccaaagtctcccagcacagaggggagatacaccgcct

SEQ ID NO: 14524 - DNA, 474 bp, Zea Mays
ctttcttattctgttgttaagtcgttatctttcaacaacttctattcccttggtcttagtatgctcatatccttggagtcttgcatactctcgtatttttatgtatgcttatcttcataccccaatgtttgtttaagacatttcagttaacatgcccttgaccacccttgcttcttaatggttcatgatcgaccattttactttgcatatccttggtgatctcgttgtctccttgtaacttcacttggtaatgaatctttacttcaactcttatgttggaaccttacctatcttagccttgattgttttctccactttgtcgtttcgcgagtcttgtctcaactatatcctttgttatgctttttaattattatcatatgcacccttgacacctctatatcctatattgatgtttgtctcatacctgccctttaaaatcgcccctcttccgtctcataccttctttctcttggc

SEQ ID NO: 14525 - DNA, 363 bp, Zea Mays
cgcggatgagactcggggctggccgtcgtacccccttgccttacggccggtccagataagttcgctggagttggccgcctgccgattgggcgccatgtgccttgaagcttcaccacatcacagtaagccgctttagatagctggttcgtcgccggtaaacctgccacggtgaaagccacgcatctcttgtgccagtgctcttccccctctgcggccgccagcgcgccattccaaattcaagaccaccgccctcgggccctataaattgagcatgccgtgagctccattaggtagtcatgcacccatcgcaccagcccgtgcctcagatcgtccatcagaacgctccaattttgaagtcccccc

SEQ ID NO: 14526 - DNA, 522 bp, Zea Mays
acctgcaggacatcaggtcacgtgggcgaagttcaaactggcattcagggaacattatgtttcagaaggagtgctatagatgaagctggaggagttcatacgtctgaagctagggggagattctgtgatgcaatatctcaacaagtttaatcacctctcccaataagccatcgatcaagtggacactgatttaaaaaagaaaaattgcttcatgtgggtattgaatgacccactccagtgcaaaatggctacgtgtctagaccttacatatagaagggctgtcagcacaacactgtcagttgaagccaaaaattcgggacaaggaaagtcaaaaaaagatatgcgggtgaaggatcaactcaggggtctaaaaagcggacaaggttggtaatctgacctttcaacccaaatcgttcttctcctcgcccacccacatatccttttaagcaacccatgttcattcgtcccactcctgcccccgcccagaacaatcagccaagtgcccctggtgctcgtttcttc

SEQ ID NO: 14527 - DNA, 314 bp, Zea Mays
catggaacgccacctgctcgatgcccaaaaagcagcgacacccaccaaggatagagacgacacaactaccgcccgcgacattgcagtcatcgcgcacctccacactcagacaaccatgatccaggacatccgcgccttggtcacgatcgtccttgatctctcgaccaccaagtaccccacatggtgtgacatggtgctgctcgctcttcgccgctacgcccttgacgatcacattctccctaacaatgtcaagaccaccgtgtactggcaccactatgacaagctcgtcctttcatggattctcgacaccctct

SEQ ID NO: 14528 - DNA, 586 bp, Zea Mays
gggaaatccggtggctgggggctatggtgcacgagagaggctaactaagggtggtatgagcgcgtaacagagaggtgaagcgaagggtagtgctcaatttaaaggaacaggctacgtgcttcgccaatttgagtcgaagatgatcacagcgacgatgggatgtttcactggacgagttcgtcgtggcgcccgccagtacaacggctcaggggcagtaactataggcttgccactgttatagctacgtggtgaaagggtcacggtgtggcacaaccgcgaaggacgacggccaccacggcgatgatcgccaggccacgtcgccgtgcaagtgggtacggtgaattgaacaggactcgagctcatccttacgccgagatcttttacctctagcagttatccatgcgccacggagcacgaatcacaatgccgatgtggatcacagtgcgggttcaccgacagcgggtgcactacacctgggatcttgttcagttactgtaccacacgatcttctttagtgcgcgtgatagagcgatttgaggagctttgttctcaaatttttcatgtgacaaactgctaacccgactac

SEQ ID NO: 14529 - DNA, 529 bp, Zea Mays
gaaacgagtaccaggggcactcggctgaatattttgagtaggggcagcagttggacggatgaagaccggttgcttgaaaggataggaggatggacgaggaaaagagcgatttgggttaaagggacggaccactagccttgaccgcttttcggatccctgagaggatccctcacccccttcacatccaaaccattttgtctttccctgccccgaattatttgcctccaccgagagtgttgtgctcacgaccctactgaaagtgagatctagacaggtggccatcttttgttgttgccgatcattcagacttctcatgaaacaattcttctttttaggtccgtatcaacttgctctatggcatactgagagagatggttgaacttggcaaggtattgcatcacagagtctcctcttgctttaagcgaacaaactcttccaatttcatctgcagaacaccatctggaatataatgctccctaaacacttgcttgaactcttccgatgtaacaagatgacctttaggttgaat

SEQ ID NO: 14530 - DNA, 355 bp, Zea Mays
gaccagaagagttaaactcaacagaacaagaattatcagcggtaaaacggcgaatagaaagaagattgtggaccaaagaaggagcgacaagaacatcgggaatacgaaaagagccgggagtgccggcggcacccacagatgtgacaagaagacacgagccattcgccaccatgatggacgaaggaagagaggaagaagggggacgaatagaggtgagtataccagggtcaggagtgatgtggtaggtagcaccggtgtccgcgatccactcgggacacatcaacggagtcagagtgggagtctggaaggcagccagggcggccgcgtcccaaccaaccagcccggacggtggagc

SEQ ID NO: 14531 - DNA, 497 bp, Zea Mays
gtctgggacgccatcgctgcgacccgcatcggctgcgaccttgaccgcaagaccacactgcaggtacttcgcaaggagtgggagaacctggccttcaagctaggtgaggatgttgatgactttgctctccgcctcaacactctgctgcagaagatggtgcagttcgggcacgacacctacgatgaggagagagctgttgagaagctcttccgttacatccccgagaagtacaagcagattgctcgttctatcgagtctctgctggacctctccatgatgacaatcgaagaggcggtaggtcgtctcaaggtggtcgacggcgacgaaccacaggctccctctgggcctatcactatcggcgggaagctacatctcactcaggagcagtgggaggcctgccagggtgacaagaagaagggggagtccttgacacgaggccgcaaacgcggcaaggcgcgtggaggcgcccagcctggggcgcgaggacatgctgaggg

SEQ ID NO: 14532 - DNA, 750 bp, Zea Mays
ataattccatctccacaatggatatgtgttctgatcgtaggatcaaccagaacatcaggaatgtctcctgcaacaaggaccaaaaaaagaataaaatggcggcaatgaaaagaacaaagtaggtatgctcaaaaatgatgatcggctacaaagagacctacaaagggacttactgcaagggtccctgccaaagggataccctcggtagaatctaggtggaggtaatgagttccacaatcatttgtaggctcacttaatgggatcatactggggggcagattgagcatcaggcacggttggcacgacctcaacaccacgatcatagttttcgtcttcagggcgagtggcaactaacaaacatcgtaccactacatccatgacttgcttttgtgtcttcatagctgatttaacataattatcccactctcactgacactcaattgggaagataagtctttgcacgttgggtagaggacctatgtttagcaccccatcaacgacgatgtcgtcagcatcatgacaacaaatcttctccttagccttagcaaccacctcactaaaggagggtctatcgtcgaatatcacagccacacgttgcatgtcaacgaactcagcatttccataacgatcttgttccacgatgcatccatggtatatgcccaaaaaattgtccatctatttgaaatacgaattcaacgttgaataaccaattgtgatggttagtgcataaccccatccactatgactaac

SEQ ID NO: 14533 - DNA, 457 bp, Zea Mays
ctcgggcgtgtagcgggccagttctgtgaacttgtgcacatactcactgattgtccttccgccttgagttaactcccggaattcatcctccttgagttgaactatcccctggggtacgtggtgttcacggaaagctgcttcgaattctgcccaggtagcatctctgacggcctcactgaaagtgtcccaccatgctaaagccattcctgaaagctgatgagctgccagttgaacacgctgattctcgggacaagcgatggcttccaacttccttttgatcgtgcaaagccagtcatctgcatcgaggggattgctggaccccgcgaacgtgggaggcttgagtctcaaaaattctcccatcctgtcctgtggccttccaccgcctgggcgctggttttccagacttcgagtgaggacttcaatgagtcgggtttgattggctagaacttgggctagg

SEQ ID NO: 14534 - DNA, 359 bp, Zea Mays
ctctggccccgaccaagggagggcttagcactagaagacattatagaagtgtccggatgcaatgacttctcaaatgtcagaaggccggtgttctttcgggcgacccacatgcaatgaagattggacccctagcgccccaatacctccatgttatgaccggcatccaatatgtcagacgccataagcgccatagcagctagctagtttattggccagtttattgctggtttgttaacagccggatagataagatgagaattagcagtcgtctagataagatagggttagttggagaataatgtggagatccacctagatagatggagattagttgaagaggcaatcaaataagttagaaa

SEQ ID NO: 14535 - DNA, 525 bp, Zea Mays
ctcgactgcgcggctgcgcagaggggacggtgaggcgggggcatggcgtttgggcagttggggcatccgaggcgggtgcatgggctaggggacgcgagggcttcgagacggccgaccacaccgtggagaggacgacgctgaggggacggcgtggtgcctggcatggttggtcggacgggctccgtcctaggcaagtcggcgacatggctagtgatgcagaggaaacggcggcgcgaggggaagtgaagacatcgcgagcgcagattcgggcgatgcagtgggtgtgggggaggacgagggcagcctcggcgagaggatggagggggagtcgtcgagcacggggcgtcgggctgcggcgggcgtgtagcggagtgctgaggatggggagaacggggcggcgcgacggtggctggggtgggggcgggcaacgtgaggggagcgtaggacgggtccactatggcagtgacatgttggaggggagggcgagggagaggcgaggcgggggcatggccacgccgagcgccc

SEQ ID NO: 14536 - DNA, 484 bp, Zea Mays
gacgggtacgccacataataatgcaaacacataatggcggcagggagccctgggtggtctgcgacgtcagcctctgaaacataaaaccagtagtcccaccagttgccccacttgttccaggcacaggggaccagctccaccactttcatcgaagtcttcccggacttcgacgtgaaagtgcacgatccaaattgcgcaatcttctgtcctatctttctcttctaccagtacagacagtattgcttggcaaagacctccaccgaaggctggctgccatatgaagtcgttgcccagacatacttcgccaacgcaaccacagcgttcggtgtcaactgatgaacctggacttcgaacttctgcaaaatctccgacacaaaacgatgcgcctgcaggcgaagtccggcgatgaaaaatgcctcaaaaacaaccaattcaccccggcctagggacctcctccgccctagggacccgaccaaccccgccg

SEQ ID NO: 14537 - DNA, 831 bp, Zea Mays
gcagggtccacccgagcccctcaccgtcgagctcgtcaccgcaatcgagaagcacaacccctgagctcctcaagggtggccgggagtcttcgacaaaatgctaaaggagtcgtgcccttaccataagggctcggttaaacagtccctcggcgagtgcgacatgctacgacgcttctacaacaaacccgatccctcgactgaaggggggaagtaagaaggctcccgacaacggagaagacgataaggacgacagcttccccgacgtgcataactgctacatgatcttcggggggacaccatcaaccttccttcgaggcaacacaaacaagaacactgggaggtcttctcggtcgaggtagcaaccccagtctacctagactggtcggactacgccatcacctttgaccgagacgatcacccaaactatatctcgagccccgggagatatccgcttgttgtcgatcccatcatcggcaacacatgcctcatgaaggtactcatggatggaggtagcagcctcaatatcatctatgcagacaccttgaaactcctgggggtcagacaatcccagatccggcccatggccgcgccattccacgagatcaccccccggcaagagggtgcatccccttaggcagatcaacctacccgtctgcttcaggaaccacgccaactttcaaaaggaaatcctcacgttctaagtggtggggctctgaggcacatatcacgccatgctcgggctgccatgctactctaagttcatggttgttccggactacacatacctaaagctgaagatgtcgaggccagcgggcgtcatcaccatcggcc

SEQ ID NO: 14538 - DNA, 1391 bp, Zea Mays
ttttttacaatggtttaaggttatatatgttataacacaaaagtgctgattcccgaactcttcctgtattcaaaacctaattagcaaaacgagtaagcggccaaataatatatgtggaattgctgttcaattcattatatagaagcatcaagcatgtaacattcaaaacatgatatctttatagggccatattgtccttgcattatgggcacgaaagaaatggtgataggcagtatacgatggccaaaatattgcgcaaagtaattgcaagatgctttatctttattgtgttttcgtgtcatagatcatcttgtaatgtgctctatgataaattcgtggttttggggctgtaatacagaatttagttcattactaattttgttatggcccagaaatactgctttcaagtttcatctacctcttatgtcctagagcaaatgtgctttttaatgatatttggacagccttgtaaacattgttgaggatttatgcctttggacaggggaattgactgtaatgtttctggaacaataacctggaaagttaattttcttggataaatttaggattcaaaagcctcttcaaaatttcccatatcttggtgctgaacacataactggtggtcaatagccactagccagttctcagtccaattccattctctttcaatttttctttagttaatttctgcagtcaaccggccccagtttccaacatgttctgttagccacaaggatttttcagtttctgtggtgggttttgggacctagtagaagctcaaggagtttcatgctaactcgttgattgaaatatggctttccaacaagatagcaaataaatttaacttcaattgggggcttatggcttgctagatccaggatgtgcatagatcaagcccttttattttattgttattttcttgttgcatggtacaggtttcgtaagtgcaacatagtgttcacccagtggaaggcaattgccgtttaattgtaaattgtgactaagcatcaactagtcgtctcaaggcagcttattgcactattgcctagccaatttggctgtctcagtaagcttcatgaaaagtcaatgtattttcctgtttcctcctcatttcagctggcagctaggtcaaagccagaggaggctgtcttagtatatagaggttgtggtggtatgggatggacatagttgttgtcagcctgttagaagcgactagttgttcaactagaaagggcttggtgggactgcttttcctcgagtttactcaagacgctccccgtcgtcctgcgcggttcatctcaggtggtgctgctgtgtcaccaagacagccctccccgagatagtctcgcttcatgtcaaagctccggcagaagacgtctgccatcctcgct

SEQ ID NO: 14539 - DNA, 536 bp, Zea Mays
cgaaggggtatcgcgggatcttggccttcggaatagatctggacggctctggtttactatttttgatgcgcgactcacagcagctggatcgtggatcaatggcgccgattttatgactgaagggttacaccccaacctaatctgagctctcgatcttaaaatctatggtccaaacgagatccgatcgaatcagtggctaagctctaatctgggccggcgaatactgaatcaacggtgcccaggcgtcttctacctcgcgactagccccgtagcggtgccgtgctccccacggcggacgcccccggcgagtcactgaccaccgattcacaggcccgcaagccttcctaagaccaccaatccaaccctaacgacatagcgaacactagggtagagttcataccgtgattcacgacatggaagaccctggccccggcagcgcccgagcacagcggctttatcaacactagcgaggaatttccccattacgaccggctcccaagttccgcgactccacgtacgtgctcccaggaggttgg

SEQ ID NO: 14540 - DNA, 473 bp, Zea Mays
ttatatggatcaatcgatatgatgcctgcgaacatgcttgcattgaagcggttgatccctattggaatgggttctgagaggaggttgttggagacattgatgaacctgagctctggctgggagaagtccagcatcgagccctcaaagcggttgttggcgagcgacaactcgagcagtcgtgtttaggtgatgtaccttgggatggggctggagaacttgttggagaggtgtagcttgcggaggccgcgcttgggtccgaacgtgccctcggggatggtgtcggacaatcgatatcacgacagttagagcatcttgagcggccgcacatgggtccgaacttgccctcagggatggtgtcagacagtcggttttgcgacaggtagagcatcttgagcgagcgccgacacattggggaacgtgtcagtgagcttgttgttggagaggctaagcgcatgcaggcttgggagcattgc

SEQ ID NO: 14541 - DNA, 299 bp, Zea Mays
cggaggggtctcggggtaagtttgcctaagacacagaaaacagcactgtggaccgcggattgattactgtaaaaaagaggggttctttagcaaatgtccccacacgaaagggtatcccgaaacctgagccgtctgatccactttaaacgatccagattagatcacgccccgctcaaatcagtacgcgaccggggtcatcggatcccgatccaacggcccataaaagatcatgaactgcgcgatcttccagccatccgatcaaggatcaatggccactaccgactcggtcgaaccgttcc

SEQ ID NO: 14542 - DNA, 498 bp, Zea Mays
aaacggtgtcgcgacggctctgggcgaaattgggagatgggatcggggctatagggtcataagaggctgtgctttcaccgtgcgcaatcgatttgggagcaaggtgagaaggcagtgcgaatttgacttcgatttagtcactgtgtttgcgatgatctcacctcgccgtgaacccgatggctatttatagccgtggcggtccggcgatcacctcgcggccacggacaacatcactagcgcatgccgaccacgtcggtagaaggcacagtgagggagatcacgacatgagtgccaccgcgacggaattaactggtctcggtggccgcatgtgaggtctccggctggactcggggaacggtgccacgtatgcgctgtttaactctgactctatccgtttcttatcacgcgtgaatccggacggcggcggcgcgaatcttcgcgcagggaggtcaccggcggtgagcacgcagcgctggcaatctgatccgtttcggtcac

SEQ ID NO: 14543 - DNA, 431 bp, Zea Mays
tcatattgatggaataccgattgctaagatgttgctagatggaggggcgaccgtaaatttaatgccttactcattgtacaaaaaattaggaaagcaagatgatgaactagtcaagaccaatatgatgctcagcggtgtggggactgacagttcgatcaaggctaagggagtcatgtccattgtattaaccatcgggaccaagacccttgctatcgcgttcttcatcgctgatgtataaggaaattatagtcgaatcttgggcagagattggattcatgctaatcaatgtgtaccttacactttacatcagatgttgctacaatgggtaggcgatgatgcagaacaagtacatgttcatgcattggcctgcattgctgaggccgatgcccctgtactttggacctacgagactgctacatgtctcacaggag

SEQ ID NO: 14544 - DNA, 323 bp, Zea Mays
gaccacccttgtttcttaatgatccatgagcggtcattttattttgcacatccttggtgatctcgttgtttccttgtaacttccttgggtaatgaatttttacttcaacccttctgttggaaccatacctatcttacccttgattattctctccacttcgccacttcacgagtcttgccttaactctatccttggttatgcttttcacgattatcatctttacccttgtcacctctatatcttaccttgatgcttatgttatacatgtcctttaaaaccttttctcttccatctcaattttatagttgtattttacctatttt

SEQ ID NO: 14545 - DNA, 610 bp, Zea Mays
caacagttgataaaggtcgtcataggcttgacctcgggctctactaaccgctcgctttgcatacttcttcgctatcctgtacttctctacgttgtctgcacacttgtcatgatgtaagtgtttgtagcaatctttcttctccttgatagccttttggacatcttcgttccaccaccaagtgtctttaacttcccttctgtttccttgactcaacccaaactcttatgaagctatctttcggatgcatgttgtcatcttcctccacatgatgtttgtgtctccctcttctacccaagggcccacctcgataactctctccttgaaagtttgggccacatcccctttaagcttccaccattttgttctagtgaccttgttatgcttatgatttttaggtataactctagccatagttggctataacgggtgctctgccactgcctaaggccacattcttctaagagctctagccccagccataccccacaaaatagcatcttctctgatgttctattgaatgatgctacagtttggagatgccccataaaaaaatacatgaattcctatgtttccaaagataccatgccactaggattaccaaggaattgaa

SEQ ID NO: 14546 - DNA, 563 bp, Zea Mays
tatgatgaaaagtgtgtgtgacaaaatacattcatgtgttgttgatccttgtggatgctagattcttgaatctgttgttccgtgcttggtatcgattgctgttggtgcttgtgaaaatgataaatacatgagtaagctcatctatgaaacgaatgtggtcaaggcaacattgaccttgatgtgtaatgagaggtggaagagcctcaatgatgccaccttagaggtatgtctcatcatccttccttgatttcgttgctatcttttagctttcttggaacctgaggactcaatggaacatgtctggcagggcattctggggctgtttagagatcttgcttctttctccgcaaaggctgtgaagtctctctttgaattaaatttttgtgtattgctcgaggagatgataagttattacagctatgtgcaccacgatagtaatatggtactctacttcttctctttgtattacttagtgtaattttgtggccatgcacttgcagttaaggtgccttaactaccccgtaacgtgccaagtttcacgcgataattctaacatcatgtgt

SEQ ID NO: 14547 - DNA, 527 bp, Zea Mays
cgagtactgacaggcttctaaacatccaaagtcgtatcagcctctggaaggggcgccactaccaacgccccagctggagcagcgtcggatgaatcctcagctagcaaatcaagcatagcgcttatttctgcatcactagggttcaggggcacctcaaaatggacctgccgttcgtcatcaggaatctctccaagcaaggcaaccaaaacactaacttcttcagcagagggtcgcactctaaggcccaaactgccatcagtaataggtggattcgacacaaaaagggtgaaggctttgggaagaggtaggttccaggccgagtatgccactggagcaccaacatttgacactttacccctaaggatcatctctagtcgactcaccaagtctgcagagggaattcttctgttagtaacccgagttgagtcggctagccctcgatacagataagctgggtaggccctgtctttcaatggctgaatattcttgaaaacaaaatcagtaaccacagcttcagcagtcagacc

SEQ ID NO: 14548 - DNA, 1869 bp, Zea Mays
gctatcgcattaggactcttctcctctatctttctcatgtggtagtcgaacttgtcacttgtacaagccttagcagctgcccacatattctgagaaaacaaagggccaaaatacttcttcttcatattcttccatagatgtctcatacactctctgtgttccactcctgggtacacaacatctatagcagcccctatccccttgcctgaaacatattaagtgttagcttcataaaacattgtagtaaactgaagttacaaatgaatgaactcaaatttacctgcatctgtactaataaccaatcccataggagtaccaattgattgcttcaagttttggacaaaccatgtccaactttcaatcgattccgtctcaatcactccaaaagccactggaaaaagccagttatggccgtccactgcaacagcagctgctagttgccctcttgatcttcctgtcaagtgagtggaatccatagcaatgtacggtctacatccttgtaaaaatccatcaatacatggtttcaaagcaacaaagaatcttttaaaacacatgtctcccttatgatcttctgtatctaactcaacaacactgccaggcattgctctacaaagctcatctctatatgtaggaagtaagtcatagctatcatcccatgctccatatatcatgtcaagagccttctctttacctctaaaaactctatcgtatgggatatccatcttgtacttctttagaagttcctgctgcaacattttaggcccaagtgtaggtgtctcccttaaccaatcaactattctttcggctacccatgtatgtgatgccattgtatcaccacatttattaactgaaccacaagtgtgttttggtccatttagcttcacctacaacacaacaatacaaggatcatcattagacaaaagtatgttatgctaatgaactcaaaaatatataagatgcataagaagagttaaattaccatgcacccaatgtattttttgctagttgatgcaaaaaactgccatttacaacccttatctgctctcttgcacttggctctaaaccttttcttgcacttcttaactgtctcataagcataatcatgtaaaataacatgatgagttactgcagacttgcatgcatccacatctgggaacatcacatccttatcaatacaaggattatccacatcatatgcaaaggtagggatatcatcatcttcatcttcatccaatatttcagcatcaggatcatattcagagtcagaaaaatcaagatcagagtcggaggatgcggctaaatcactatcatagctgctatcacttagtgccttcagtgattccgtgtcagagtcatcatgtgcaactctcctctttgatcttaacgggtcactgatgtttaatgtaggctccccatttaccactctactcctcacttttgggtggaacctacgttttgtaggtgaaaacaacaaaggtccctcaaaatcatgaacctccccttcaatacgcactactcccttttgcatagtgacttcaaaccattgtaacaagtcctcgtcagtttttatctctacgaaatcatcatccaaacaacgccacaactttaaatattgcttagaaccccatatgaatgtctcacctataaagtctaccaattgtaatagtctaaatttggtgtcaacagcaagtggtcttaatgttctacgtgggtaatatctctttggctccccatccggcgtggcaaaatatgagcgaattgtgacaacaagtttcaatttaatgcaaaatgtcctacaacacaagataaggcagtgacaaactgacaatacatatagggaatgttagctgtagcctaagtacaaatgct

SEQ ID NO: 14549 - DNA, 530 bp, Zea Mays
accaatttgtgtaaccattttgtgttctttttttcaaatagaacaaaacattgtgctacttagattagacaacaaaatcagttatttgtcttctaaaactgtaagttgcacaggttcatgatgtagaagctcttagtatccactggaagttcagaacaacctgagagaagtatgaaacagaacgatacaattggagactaagcaagcggacaaaaaaaacataagactaacaaaatccaacagtttttcaaagagtactaagagatgactcaattcatgtgaaaaatacttgttcactcatctatacctcctcttgttgttccatgtattgacgaatccatgcagcttgtgacaatcgcccatcatccagtgacacattctcatctctccgcccaccaattctaacttccaacccctcggtgctcaccttcacctcctcaggttcacgactctgtggcacccaattgtccttggctgtggacagtactttaacagaaccttcagctcctacaacacatagaaacgatgta

SEQ ID NO: 14550 - DNA, 450 bp, Zea Mays
cctcaaatcctagatgaccaagacgttgatgccaaagcgtggttggtgtagcgccagctagcaatgcatggggcgggtgatgcgttgggagatgaagaggatacaatcacccagtactattgcacctgacgatcaggttcctagtgtccagatcctttacagaaagaccaaaaggatcgaattcaacggaaacattattatcagtagtaaattgccgaacagaaataagatttttaataatatcaggagagactaggacatgacgtaagtgcaatggacgatctggagcagaaaaatgagtgtgaccagtggaagtaacagggagcagggacccgttgccgacaataatagatgttggactggattgcgaaggggtttgagaggacaagagattaccagtggtagaagtcatgtggctgtcggcgccagtgtccatgtaccagtccgttg

SEQ ID NO: 14551 - DNA, 559 bp, Zea Mays
ccactcagctatctgctggaccccagtgcggtgttctgcctagagatcttccagggccttcttggtggcctccgtcgcctggggacctggcgccgcctgtgtaacaccccaggtgttactcagggtatccgcccagggctacaccatttaaacctattatcacatgtggttaaaacttggaggagagggagtacttaagaccttggaagcatgagtgagttaagaaatgccagggaccaaggtattacccaagcctttaggcaatgaccacctagggcaaaggaggattgaaccttggactctctctctcttgaagcctttagttgagagaaagattaggcaaatgcacattccatgatttaaacccttaaccaaagtttaagagtaccataatgtttacaaaagacagcaaaggaactttacaaaaagacccctaaaggacccctaaatcagccccaagtggagaacactatggaatcaccccattccctctaagtcccaaaatcagccctaatctagagatcaggggtgttcacctagctaatgacaccaaaacccc

SEQ ID NO: 14552 - DNA, 760 bp, Zea Mays
cgagcggagcggaagcaatattgcatgagagcagagaaggcctggatgcagaaaagcaaaaactagggcacagaatgcggaggcgtgcgacagtgcagtacatatggggtttcctcgggccaggcgccacttccaaaacgttggcatgccatgtcatcacccgaccgttatttctaaaatgcgggcgtgccacatcatcactcggccgttatttccaaaacggccgacgcggcccattttaacttagcggttatttctaaaaacgctgacgttaccagacttcacccgaccattgtttccaaagcggccggcgtggcccgttatcactcggctgttacctctaaaacgccgacgtctccatcgatcactcggctgttacctctaaaacgctgacgtcgccatcagtcactcggctgttattcctaaagcggtgacgtggctccaaaggattcggctgttacctctaaaacgccgacatcaccagtaaccgctcggtcgttatttctaaaagaccgacgtggcccgctatcactcagccattacttcaaaaagcgccaacatcgccaataataactcgaccgctaccaccaaagcactgacgtcgcaaataaagcagtctgaagcgtgacccgatgactccaagttgctactcaagcgttggagacagaaaacatcattggcggtaaatattaaaacgatcgacgactgaccagaaggcaaaataatgcacacagaagtggggcgaaatcattcttcataa

SEQ ID NO: 14553 - DNA, 315 bp, Zea Mays
ggatttcaggatactgtgcatgctgtttcggagtcagttgggaatgtgagttgtccatatcaaaccctatatcttaaactgcggaagacatccacgagtctgcgggcttggaacgataagcatgttggtcacatcagatcccagctggccttggcaaaggaagttttacataagatggaaatagcacatgatgaaagggtgttaactcctgctgagttttggctgaaaaacaagcttaagaaacactctttgctgctgtcctccctgaagcgtactatggctaggatgagatcaaggattttatggcttaaagat

SEQ ID NO: 14554 - DNA, 392 bp, Zea Mays
aaaaaaagacaaataacatctcacgactcacgtgttcctttgcgtgacctcatgtgaactgggcatgttaatttcttacatatgctcattctccagttcaactctggacgctggatgatagatgcttgttaatgaataatgcaatatttatttggtgctgtttaattaaaatcctgatgtattaattatgctgctgtccttctagtcattgcaaaataaagctgcgaaacaaaacgttgatttattgaacaaagttgaaagtcttataattgagtttaaacatgtaagagacgactatgacagtttactgtcttatattgcaacatgcaacgaaatgactgaaaaatgtcattgaattagacagcgtgattaaaaaagtctctaatatttag

SEQ ID NO: 14555 - DNA, 411 bp, Zea Mays
ctacgctgcctcgatcagcgatgctgcccgtcggaccctgtggtcgctcagccacacctaccggcagcagctacagaacacgaggtttaggcatcttcctcagcgtctgcgtggagaaagccagaccaacattatcccaggtgaacctggtgaggatcgcctcaacaccctagctggtgtagtggccggtctcaacaccgacctggacagtgccaccctggacctctacagggtgcacttggagctggagaatgcccacgccaggattgcagccctagaagcccaactgcaaggactggatccgccagaagctcaagaccccgccatggcgttgtctcctccccgcaagaggctgcgctatggagagcccggatccgtcactaggctgctttaggagttttgagtcatgat

SEQ ID NO: 14556 - DNA, 380 bp, Zea Mays
tagacatccaaaaaccaaagagctgaacctccccatgccctgtcgatcacctagcaatttcaccatgtccttgttaatcctctacacttagactacctcctccatcttttcccactcatttggttcactgtaaaagcttgaactcgaagaaaaccctagaggtggtgaccatgtccacagaatcccccacctccccgtggccagcctcccctaaaaggtaacatgtttgatgtgctcacgtttcaggacctaggggtcatagtgatgctcatcaagtcttccttttgaactctaccgcagtgttttcaccagaacaccatcaagtcatcaggtgaacaccgaccgggacaccttccatgtcgaccgcctgaaccctaaac

SEQ ID NO: 14557 - DNA, 452 bp, Zea Mays
gttgccgaaacaaaactcgctcttcggacaaaacgccaacgccagggcgagcgagcgaggtgaggtcacctaccagctcccacagtcgcactcccccctcgcgccgtcccgtcgtaggaatggaatgaggccgaggcccctcctcctcctcctcgtcgtcgtcgtcgtcgtcggtgcttctcccgtgacaggcctcccttcctccggtccggtcgccctctgacccaatccgcatacatccaccaaccagtacgtgagcactcactcctccgtctccgtctctgtctctgtaatccgcttttgtttctctcgtcccgacctctccttttcccaggctttgatttgcgctgtttccgattgtactcgtgctccgcccgctacgatacaggacaggggaggatggatttgtccaggctcgcctccgtcgccgggcccagccgcgcggccccgcg

SEQ ID NO: 14558 - DNA, 451 bp, Zea Mays
gccgccgccgcagcagccgctgccaccacaagggctggtgcagggggaggtgctcgtcggccgacaaactgtgatgaacggtggcggtgcagttgctgacaagggcatggacatgatggacgtctcttcagtgtatggcggcgccggtgcaatggcgttcgatctggagctgatggagtcatgcgcgttgttttgcggcagcaccggcaacaccatggagcagctgcaatgggactgctaagctcactatcgtccttacccctaattagtttgttgtcttccatgcttcatccatgtctttatttttcctcttaattttgatgttcgatttactgggttcttgattcagatcgtccttttaaagcaagaaatccatgctgagcttagtgacgaactcgatctaattcagatttcaataaagttatctcaaattttattgattgcatacgct

SEQ ID NO: 14559 - DNA, 515 bp, Zea Mays
cgagcactttatcttcctgactagtgagcagtctgccgtctcgaaccagcaatctgataaagttttttcttcttctgttatttgccatcaagtgaaaaagttttgtgtttgcatcacccaggcgcatccagacgagtcttgaatgttgcttagctcttgccttttgaactgacactaatccgaggattttcaattttagacttctcctgaattctagctcatccccagagagctgtctggattcctgtgctttctcaaggaaggtaaggacagtctgaatgattgctagttgcactttaaaattgccgacagtctttcgactccagatctttagagctttagccgttcggaccattttcacatgcagccgaaggatggcatctgaggaactaacactagacgtccacgcttgctgaaccacctcaccgaacccatctatttttgtccaaaaagcctcaaatcgaaaccccctgtagaaaccaaaatccgagcaaccttgcataactagagggcaa

SEQ ID NO: 14560 - DNA, 551 bp, Zea Mays
gtcagcaggtgtttagagaagaaactgactggattagtaggatagacagtcgtactattaagaggggtcaatgaacttgaatggtgtatgacttagtgcctcgtagagtacaaacgataatatgtgtataagggggtaacaacgctacggatttcaaaattaagtttttcttgagatagcgcaaaatcttgcttccctgaggtcggcggaccgtccgcgactctgctagagaggtatgtccctgcctcgttgtggcggaccgtccgcataaggaaaattgagtttgggcagggacagtgtatttttgggtctttgtactacggaccgcccggggtttttagccggacggtaagtggtccatctgcggaccgtccggccatgattggcggaccgtccgctcgttctactgagacgtttcaagttgtctgttactcaagtttgtcaggttccggaccgttcgaccccagtgggcggaccgtccgaccttggcttttctgacaactttgacagggttcaaacggtcgatatagccgttactggtacgatgaacc

SEQ ID NO: 14561 - DNA, 317 bp, Zea Mays
gtgatatgtatgtatggctctacctttaaaagctgcgattgtatgctccacgcagcctgattcatttaaggtatctgtgtgtatattgacctgtcaaaatcaggtaaacattaaaataaataaaccacaatataccataaagactagataacattagacacttacctgaatatcaaaatcttctgcaacagataaacaattatctatcgcggatggggtagttccccaatcttcatgcagcttcaaacccattgctccagctttaatgatttcagccaatccttcaggttttgaagtatttccctgctcagtttaca

SEQ ID NO: 14562 - DNA, 980 bp, Zea Mays
ccctcttcctcctccgttcaccgcagctggtgctgttgggattgaacgagatctccgcctaccagattctacgaaatttctggcctcctctctccgcgcgcactaagttggtggctggctggtggatccgcctcgtctgacgccgtctcttcctccccgggatcttctcatgcaacgaacccacgatttgggcgcgaccgagtcacaacaggaagatccgagttcgccgtagaactcgcgtcgcccaacctccttgtcgcgggactcgctcctctgacgcatatatatataggacgctgcccttgggtcatccggtatgtacgcctacgcgcacgtcgaggtagcctagcatacaacaagaatttggagaagaggaacagtggactgcggccgccacggggatattcacctatggcggcgtcgggtccccggtggacgacggttggcatcttcggtgtgcgcgggatctcctcggggggggggggtctccactggtagattctaactggagctcgcgtgattcgtcatcggagcttcaagcatgtcgtgattccgccgtgttgcgtggctgggggtctctgctgcgccatagccggtatgtcctcctcccacgtgttagccattgattctgtgtaggttagcacccgattgcgttgagattggggcgttcgggcctaacatggggggatctgaccatggcgccgccgcgcccgtgcttacgttgtcgcgtcggatggctgggtggagaagaagcctcttcgtcgtccatcctgggatagacggttgtgataagaagtaggaatattgcttcgcaggaaagatcagggccgcgtattgagaatcgaacggtgtagattcgatcctgtggatcactatgcactttaaatcctggctgtcggacctaatctgaatggctctggatgcgtcccccttcgtcgtctaatccgggccgtcagatgtggatcggacgattgatgccg

SEQ ID NO: 14563 - DNA, 466 bp, Zea Mays
tgttcccccggccctttcgtcaagtctctcataatctggatactcgaagttcagtgcatccattacccgatttagcattcgtttcggtcgggtgccgaaggcagcagtcattaattgatcctctttcttcgtgtaattgccaagaatctcgttgacatagtttcgatcatctttagccattcagtgcatggtttcttgaattacttctcaaatttgaaacggtacgggagccgaacaagctcatatttctttccccatctttcttcttcggcatccccaaccggtagaggtcggaaaggtcttgtttgccaggtattcctgtactaaatctctggtgctaattttggcagccaccactctgaattcaacttcagccagctggcacggggagccgagttgcatatggcagaatggccttgtcatcccgaagcttaatcgcataggactcataaccatggtcatcatt

SEQ ID NO: 14564 - DNA, 780 bp, Zea Mays
cggacacaaggatccggggcgcagaacttggcaaggacccggggcgcagaacttggcaaggcagcgatgcaaggatgaagaatgacgacagccacggcacggtgttgatgattcgtgaagttttggcgaggtgccgacgtcccgaccggcgatgacgagcagtaaaggcgagtgttgtagcagccgcaaggtgtggtgcagactgcagaccatgcaggcgagcggtaagtagagtgctggtgctcgggatcacggccggcaacggagaggaacggagcaaccagcgccaagaggacggcaagcagtagcgcggctccacacgagcagaattagagatgagcaaggagaggcgggtaagcacacggcacacggacgacatttatatggccgaagaggtaggtagaggggcaccgggaggagatgaagagcatcagacaccattaatggggaaataacagtctgcagttagtgagaaaagaacggctgggttagttggggagatggatcgacgtggttaggtgggtgcgtagcgtgctccacactgaagatgcgaggaggcgctcaagaatctgactggtcggcgcgtgcatgctcgacgaagaacagccgaaatgaactatagagaaagtgatttgctctaatggatggggcgcccattgagcagggatcgtgtgggaggaagggagccggaaaaattctaattgtgcctcgcatgccaatcaaaggagaagagaggggatgaaccatttggaaaggctcaccgtcggcctcatttttttc

SEQ ID NO: 14565 - DNA, 783 bp, Zea Mays
ctggttataagatatggtattaacaatcaccatacgaagaaagtaggcacatgccttgtgatcccaggaggcaagttccatggaagcgacattctagatgattattgtagggtagaagtgacgatggtcgtccaaggatttgaggatgatatgctagacatccagatatccctgggaccgatggtatcgagaaacttggataagccatcaagaatttcatcctttggccttaaagggatgtcgaattgtttgatccaccaccgccgtcgacatcacatctccaaccatctccgcctcctcaaactgtagttactattgtacatccatcatcacctcctcaaacttcatatgttgctcctcatcctctttctgacccaccgtctctaccacaagaatcgccattcagggctccaccaccttctcctcctcatcctcttggagacccattgtctacaccagtagcaagggacccaccttctccacagacatcaagggatccatggccatcaaagaaatctaaatttcctatagcaaaattggtgtccacgttcgagaaaaataagagtaaaactactactgctggcacaactcgatttttgaaagggattgcacgggacctcatgtcgcatactattgatttggccgagcatgaggagtctgcaaaaaaggctgaggcaatgtccgcaaagataaagatgccaactaagacagattataaaaatgcgcctaaaaatatgtgccgggcaaacctctactaccttttgagaaactaaggaaggtccc

SEQ ID NO: 14566 - DNA, 571 bp, Zea Mays
aacaagtgcgaaaaatcgaagtcttcctcaaaaagactatccgtgcaaaagtcgcctaagggtgcagccggactagcacaacaagtgcgaaaaatcgaagtcttcctcaaaaagactatccgtgcaaaagtcgcctaagggtgcagccggactaagcacaacaagtgcgaaaaatcgaagtcttcctcaaaagactacccgtgctaaaccctacaccaaactgttcgcgcaaagaccgactacaggcgcgccggacagacataataaacacactagaccaagtgtgcaacgccttcatgagcatagccggatgcgtgaaggcgcacagcctcatcatacaagctacagttacatatgtacagcgaggggcatcacaccttacagccgttcaccttcggaatgattcccatctccctatagttaaatagcattatcctcagctcctccaccctcaaaaagacttcgcagctccccctcacctacactcgcaacggccggcgaggacaacaattcctgcttgccagccctgcccacacgaagccgaccgccgtccgcctcacttactctacgc

SEQ ID NO: 14567 - DNA, 691 bp, Zea Mays
ttctggaggacagctcgaaggagtttctgcctacgccctccccgttggcagaatcactatccttcgcagctagatcgtcagcttcagcactaccagcaccagtagtccaagcccgtgctcctggaggcgacgacccagacgactctagtgatgatgatgaagatgacgaagatgaataagatgatgaagagaacatcaatgaagaatagcaagaccactacgcggggttatggcctgtcactgaacattatacctcaatgttcgagacagggcacttccctaacctgctgcaggatgttctgcatgcgttgggaacctacgtccgacccctgtacgagacaaggcgagtgtacgagcctcctcgggcttgctactacatcactcgcattcatgtcagggtgatggatgcaggtgatagagggttcaggactctgtcagctcatgagtctctgacgccgctatccacctacgctgcttcggtcagctatgctgctaggcaaactctatggtccctcagccacacctaccggcagcagctgcacaacacgaagtacatgcatcttcctctgtgtattcatggagaaagccacaccagcattgttccaggtggagctagagaagatcacctcaacaccctagctggtgtggtggtaggtcttaagattgacctggatagtgctacctggacctc

SEQ ID NO: 14568 - DNA, 561 bp, Zea Mays
ggtcgcttggtatgtattgatatctcttttgatttactgaagacttcccagtgtccctattaggcaagtcttgaactgacgatgatattgtttttggttttgagatcttatcaactggatcaaaatagaatttggcatcagcatagaaagtctctgccattgtgaatggctttttgtccgcaaaaattcgcactatgtcccccaaggtatctttgtatttaatacattgatggagagtagatggaacaaccttattttcatgcaaccatggacgactgatcaatgcattgtacgaggtagccgcatcaatcacatggaaattcacaaatgtcacaagcttttctaactttagcactagggaaattgttcccaatgcttcctggccagactggtgaaaaccatgaataaacgttagactggcttagatcaccggcggagtaccctattcttttaagagtacgtagaggtaacaaattaatagctgaaccaccatcaatcatgatacggttaatgactaagtcatcaatctcaccaagcatgagaaggggtctattatgtttc

SEQ ID NO: 14569 - DNA, 566 bp, Zea Mays
gtgccctcccttttatagctcaaggggggcacatacaaggatactgagccccgacatgtgggcccaggggaaaaatggaaggaagtaactaatgttgtaacgcctgggcgatctccgagcgccataatgtttgtagtgcatatagtattgacatgtcgtgcggcttcctcggtaacgcgcgagtgatgatgagcacagtgtacgccgcagcacgggcgtattgcctgccaatggaatggacaggcacgtcgcctgcgggatggcctggtcgccgcctgccagtggagtggacagggcacattaaatgctgaggcggcacatcacctgccagtggaatggatagggctcattaaatgccgaggcagcacatcacctgccagtggaatggacaggcgacgcgctttatccacaataaatgcaggggctgcacggcccagaggccttacgtcaggctccgcccgctggcttacgtcacggacagtaggccacgtggcagcatcgggtctccgcctgagcggggagcagaagcgtacacggtatggtccggacacgtgtcggctccggac

SEQ ID NO: 14570 - DNA, 673 bp, Zea Mays
atctccgccaacgctggtggttgatcggattgcctcggccatgtgtgcggcaccgccgttccgctgttccgccgtactccgtcgtcgagatgctgcgcgacttaattgccggtaataatacctcatcaacattcgcaatgttatagacatcgaattacgcctgtcaattttggtaatcaagcctcagtgagcgatgtgcagtttgtgccgatggcgctccgccgtggggatgcctcgcgccgccgtcttgtgggctgggggtggtgtaacgcgctaccgttggatcctcactgtagggtctagattagataagcgaatcgataggatgtgggatgttaatgaccgttagatctgcaatggacggtagagattagtttgggtgtagcttttcgtgagatcggatcgtgacctcagatcgtggatcgtgcggtttggatgagtggaaccatcataaaatctgtgccgtccaaatgaaatctagcggctatctgagcataccgattcatatggatccgatctattctggatcgtccagatgggatccagcggttaggaaatagagataccctttggtcgaacactttttcgtaagagcccctcggtttcattgaaataaacccgccgtccagtgagcgctgttcactgtgtcttgggcaattttccctgtggcccc

SEQ ID NO: 14571 - DNA, 761 bp, Zea Mays
cggctggtggacccacgccgagatgcaaatgtggcgcggcctagtgcgaagggtatctctccgcctgcgacgatgcctccccccgtggtgtcggccgctacgaaactgcccttgccgccgcgtgtgactgagactatggtgtcggggaccggggggacgagccaggagttgttagtggacgactacctggtgggcagagtcaccatgtttgacgcccagactgggctgccgtctgctggtgagttgaaaaacttaattcttcttagccgggtgattctatattttctaagttggttttgatgtaggggcagaggctgggcaactggcggtggtaccatctacggtgcccgtcggccaagtgggtgcagcaaagggtgacacagggacttcgccggacccatggccaaaattttgcatcgccgctgatggcggaggcgaacttgcctcgacggctgccgctgctagcgtagctgcgtctgtcgtgtggcagttgcgatacgtgtgttttttttgctgagtttggaaaattgtgatgtcaggtgacagcattcgccgaccaggttgcttcgggggcgctgacctcacaactgatttctaagaggaaacagcttgagggtagggttgagcaccttcggacgcagcatgccaaagcaatcagggacaagtcagcagccgaaaataagagttgtaaccttctcaacaaggtgacggcgcttgagaaggagaaagaggaccttagccgccaacttaatgatgaaaag

SEQ ID NO: 14572 - DNA, 780 bp, Zea Mays
agtgcataatatatctagagcatacaagagatatagaaacacgaaggaaaaagacatggaatagtagtaagagaagtaacaatgccaaaccctaaaccttttatcattgatttagtcaaatccgcatgcaaactgtccatgacttgagtgacaagtagtacgatcagttgaaatctaaaatgaataaaaaaacctcgagtggttcatctattaagctcttggaagtttggcataagatgtatacaatttatctctcagaaagaaagaaaacaaaagagatcagttctctcatctattatgttctctcatctattatgtattgtatcatagtgatgtgaaatgaaatcttttcaaatacaacttgtttattacagttgatataagcatagggaatggagacgacaaaacatgtacacctttatcatattgtcacaacaaacatgtattggtgtgtatccatatatgaaccatgaaatcaaaactatgaactgaacaagctgagaatttcaacaaatgaaagaattgttgtcattcatcaagtagagttgacagaccaactaaccatatcctttctcaccgtgtgcattgcaaatgccacatcgtcacgtatcttgtaccatagagagagaaatttgcatgaaatcgtgtttttatatatagaaaaatgaaattttaattcctacaaactacaatagaactctttactgcaaaaagttgtgcatacacgatctatttccctaccattaagggcacacaataaattaaatgtggttttcaata

SEQ ID NO: 14573 - DNA, 641 bp, Zea Mays
acgaaagcccaaggacacaccgtagtccagcaggacatgggtcaggccctcgcaatcggacttaagccgacaaaaccgtacccagtcccaggtgcacaacatcgctaatcagcagcaaactcgggacaccgctcgtcgtcacgaataccctccgcagcaagcccgcatcagtaacacaactagaggaagggcagaggccaaggcccatagcaacgaaggttctattgtcttttccatggtgaagacttggcacgcccaaccaggggttgccctgaaaccaaagccacaaaggatcgaatggccagaaaccaatcgactgacaaccaaagagttgtcgcccacacctaccatccccaacagtacaaccagcaccagttccacaatgaacattaccatactcatcagcaaaaccacaactgataccagcaacaccaagagatcctaactctaccacctccaccaccacatcatccaaatcaaccattaccaccaccagcagcatcgaaacaagaggactttgctgatcaacctttttgagggatcattcacatgattacaagaggatccagctctgagttcgacaccaaacgtcaaaagaaagaccactatcgaagggtcaatcacgtagccctcaccgggac

SEQ ID NO: 14574 - DNA, 661 bp, Zea Mays
gaggctgtcttcatcatcggctgcatggctgacgacactaggggcaaccatactaggactggtataccagcccccggcgccaaccctcgctgctgctaccatgccagtgaccgcaacaccccactccttgcccatctacgatggcagcggtgaccctctgggatggttaaacgacagcgaacggttcttctggagccagcgcaccctggagtccgacaaggcctagttggcatagtatcacctcatgggccacgcacatacgtggttctagtggctggaacacggcgagcatcaggtcacgtggccacagttcaagatcatgtgccagcagcgctttggttccctcgcggtagtggcgacttctgctgccacgtttgtcgtgtcctcgtcgccgacaccgcccccgtcatcaggggcagccatcaccactacccttgaccccaagagcgacgtctagcagagtgtggttgctccacgacagacgacgacgatcgtccacctgcaggttgcagcacgcggtttactagcgcgtcgacgagtgaagcagatgttggcgatgttccattgcggggagtcgtaactgcaccagcgcggcccagcaacatggtggttgttcacctcaccgtacgagaggctgcaagacacgacgcccctctgcatc

SEQ ID NO: 14575 - DNA, 543 bp, Zea Mays
catcctgacggtcctgaatggtctgaaatatggagagcatctgctcggactgctactgctgaactgctacctgtcgagcctgctcggcgaccaaatgagcttgctattgactcaactgctaaagaataggtgctaaggccagatccatcgatggaggagcaggagaaggagcaacactggaaccacctgtctcgtgatcatgtgagcgaggaggcacagggggaggcggtggtggaatacctagatcatcatcagaggagttggaagaagtatcaactgcaccaaggggaaccagactctgcttctcaatctgcctaatcgcctcatcctcaacctgacgtttagaggctaaatgatcctcagtacaactatctagggcacgagctcctgtatgagtctcatcctcaggctcagggtggtaaaatccaaacacaagtcatgcgtgaccaagaattgcctggaactaaggggtcaaatctgctgcgcaaatatgtgacagcggtagtgggcataaggcagctaatgacaaacacatagtctgtc

SEQ ID NO: 14576 - DNA, 554 bp, Zea Mays
tgggaatgaatcggatgagtctgcgtctaagttttctgattttggtgactctgggagttcggttgagtggacggaagagtcttcggatgaggacttggattactttgcggcctttgatgtggctgcggcggaggcttctccgcgtgttgcagatgctaaagttgtgtctggtccgagtgctgggcgtaggcgacgaagggcagtggcgaagcgtagagtgagtgaagtggatggcggtcggcttcgtgtgggcagggctggcaagcaggaattgttgtcctcgccggctggggcgagtgtaggtgagggggagttgcgaagtctttttgagggtgaggagcttatgctaatgctatttaactatagggagatgggaatcattccgaaggttgaaccaatgtaaggtgtgatgccctcgctgtacgtgtgttactatagtttgtatgatgaggctgtgcgccttcgcgtatccgactatgtccataggggcgttgcgcgcttggtctggcgcatttattatgttggtccggctgcgcctgtagttggtctgtgcg

SEQ ID NO: 14577 - DNA, 751 bp, Zea Mays
gtcacagcgacacggcagaaaagctaggccacgcggcggaggaccgacgaccggagttggagaagaaacgcgagctgcggatgcgctggcaagcttccgcgcggcagttcccggtgagggcacagggtcaccgcttaaccagaggtcgccaccttggtaactctttgccacggtgccaagaaactttaccgcgaccaccgacgaccggttacgccgcggtggcgttcttatcgccggcgaggtccaagaccttatcctctgcgcgatattttcagatgatggtaaacagtgctctgaattcaaaaagagcttgactgacagagcaagttcaggtcactttttctctaaattttccttagcaactcatccaaggctctgcatgaaagttgtagtgctacataccagctacaactttgctacatggtgttgtcacaaaaaatcactggatcccattcaaaatcgggctcaaagttcatctcataacactgttattctgaaattcaaacctcaaacagtctgacagcccatctttgattgggtttttctccaaatttctcataggatcatggtttgaacccttaaacaaagttgttcccctaagattgatcttcaactttgatgtggtcacctatcatgaattctcactattttgaaagctacacagccccaaagttgggcctacaaccctgttttcagacttagcataggaatcaaaatcaaggtcctttttgcaaatgagtccaaaacttag

SEQ ID NO: 14578 - DNA, 744 bp, Zea Mays
ccgagtgtcagccctcgtcgaacacgtgtgggtttgcttctgccatggttcaacagccgatttgagcaccttatcatgcagatcttggcaaaaccccagtgtacggtctcttccctgcaccaaatcctacctttttgatgtgagtcccaagcaaggatacggtcggggtagggagatataggtgtgagaagttgtctttgtcctagctgtccaaaccgagacaaaagctatgccaagtcatgtcaaatgacttagggttgggttcaaacttttccagggtgttctagaggtattttggcgccactttgtcaattgggccaagtggttttgaagcatgaaagagggtgaacatgtttgatctttggaaaagggttggttttggactttgaaaattctgatttttctcttatgctcaaccctttggtgaaccttttggggtttttctgaaatctttttggggtcactttcttactatttttagtagggtattatgtgtactacaattgttataattggcccaagtcatgatcatgtggtttttatagccttttggtcatacttacttctagtgctccaattgtccaaaggggtttgcattagggtttgggcaattctccccattatatgtgcatgacaagccaaggtatgacttataagatgggttgcacttacttaggatcttgagttccatgtttggtgtactttcccaaattaagtcacatgtgatgatgggcttacttgtgt

SEQ ID NO: 14579 - DNA, 365 bp, Zea Mays
agtggtcacgcgcgtggtcaggtcgggccagtggtgcgcgtgcgtccacgcgattgtggggcacgtttatgcatgcgtaaacatgtgctatattttgcgtaaacagaatgtgcgcacgtggtggggtcgagttgggatgtacgaaggtgggtcagcgtcgtgttcgctggtcgggtagttggttcctactcgtgtttatgctagcatatttaatggtttagacttgcataacatgagagcggcaacgaacttttcattggttcgttcaggtgggtccacacaccatcgtgattagtgcgcccacgaagctggaagttaccgtatatatcggaacagaagatatggagctgatcgtgcgtgggagt

SEQ ID NO: 14580 - DNA, 549 bp, Zea Mays
cttgatgttgtatggaaattgggataaaataccctagaagtcgggctgtcagacaacttcaatcctgaaaactaaagttcagtgacatttggttaacttcggagacagtttgttgttaattcgatgaagttaaggccagggtcactgtggtaaagttgaagccctaacattggtgaacaaatttgttgtattaagcttggcctggtgctatacaatttttggagtaaatcgctcccaaacttcggtcgtcaggcactcgggagggtgttcagtgatgaacagtaacctgatgaagatcgccaggttcagtgcactgccgctggtgatctcgcgctgagatccgagttcgccgggaagatttgtgcttggtgcagagtggataaccgcgggggggggggtggatttggtcacgggcaggagcttatcggctgcacttgatggccgtgcgacgtggccgagcgaccggtgtcgccgtgggacgccggcgatctcatttgcgccacgccgtgaccctttcaccacgtagctataaccgtggcacaacaagaa

SEQ ID NO: 14581 - DNA, 1163 bp, Zea Mays
ctgatatagactgaacttcagatggacagtgactttgatccaagattgggagccatttagactaagatccagtgggaatctaccttggattgctataacaaagttatagagctaccatacaagaacaactttgctgcagaaacttaggtgtgttgccattggaatttaggagcaatttggccctaaactgtggctgtcaggcgcatttaactgaatttccaatggtacagtgcccccaatggatcagatcgagcgcagtagaaaaatcccactgctggtgacccctccaccgcgattcatgtcgtcagccttaagattcgtgtgcggggtggattgataacgtcgcggaataaggatccttgccgacggtgagctggagatcactccggtgattcaccgtggcgttctcttttactttgcggcggagcggattagctcgccggtgaaccatcgtgcctcggccctgcgccgcgtgtcctaactgcgccaccgcatcgccgtgactccctctaaactccccgtcgaccaccggagttactgccacgacggtgaacacgtgttcactgcaccagcattattcctcacttccgaccgccgcacatcaacgcccaaattcacggccgccgctgaagggtcctataaattgaagcccccgctagctccgcaaggtcatcctccacccagccaccgctaatcgctagcagtccttcgccggagctcgcgaattttgaattcgccccaaatcgactctccgccaccgtaaaccacccatcaccgcggccagccttccccaggtctgctcattcccttctcgttcctgttctagcacccttacatgttggtgatgctccccgacccctttaatcgaaccgaaccgccagggatcgccgggaacacaatgctctagccgccatgctctcggtcaccgtggccagagctccttagttggtcttagatgcaattaggttgggggaaatgatcaaggtagccccgatttcatgtctgctgctcggagaacccagctgttgccccaatcggccgttacaatggctcaccggagcgcggctgcgttcaccgtcgtcgtggacttggccgtgcgaagaaatagaaatcaagggggctttctgtaaaccgtcagcgacacataggaatagtaaaggaac

SEQ ID NO: 14582 - DNA, 600 bp, Zea Mays
gttcaagctggcatttagggaacattatgtttcggaaggagtgctacaaatgaaactggaagagttcatccgactgaagcaaggggagattctgtgatgcaatatctcaataaattcaatcacctctcccaatacgccattgatcaggtggacacagacttgaaaaaagaagaattgcttcatgaggggactaaatgatagactccagcgcaagatggcaacgtgtctggacctcacatgtagcagggctgttagtacaacactgtcagttgaagtcaaaaatgtgggacaaggaaagtcaaaaggatatgcgagtgaaagatcaactcaaggacctgtaaagaggacaaggttggtaatccgacctttcaattcaaatcgttcttctcctcgcccacccagatatcccttgagacaacttgtgttcattcgtcccactcctgcccccgtctcgaccaatcagtcgagtgcccctggtgctcgtttccctgcacttcccagttcctccagtggttgcttcaattgtggaaagtccggatatttcatcaaggcctgcccatatccgaagcactcacgagagatcccatgcgctagccaccg

SEQ ID NO: 14583 - DNA, 668 bp, Zea Mays
tggccttgcatgcgctgtatggtgtcaaatcatcgttagatgagattgaggagctttcagtgctgttctcctcaaatccagctgacagaacctctaaccgtgttacaaatgtgtggttacgttcctcgagcaccatatctgtggggagtattctcaaatctttacgctctacaggtcttgtggtcttcttcctttgcaagtttgtgcacttttatcttgtccaaagtcgagaaatgaattgtgcaagtagagaagttcatgaacatgaacatcctggtgataaagacactgaacagcatcggccttacagtctagtaaaccaagcatttgcagctgcagttagtaaggtcctcgaaggctatttctgttccttgaatactttaccagcatcaattaggcttaggcgttcagttggccaatctggtataccttccaagacttcagatggaatgagttgtaattccactgcagaagtcactcttctggaagtttatctacacactgaagagttaagaaggcatgttaaatcccttggaaatatttgtttccctaagtttgcaggtgctacattgtgccatgatggtttggatactgaagcaagtgtggagtttgagaatttcccacggggcactgatttgctttcgtatttgtatgtctatattcgtgta

SEQ ID NO: 14584 - DNA, 471 bp, Zea Mays
aacagtgttatgggctcaacttttaagctttgtaactttcaaactatagggtttttgccctaggtcaccacatcaaaattgtagcccaatcgtaggggaacaactttgcttaggagtgtgagcatagttgttatgaagaattctgagataaatgagcctgaagttggactgtcagactgcttgaaatctgaaattcagattaacagtgggatgacatgaacttagggcttaattttaagctagatccagtgactttttgtgggaacacattgtagcaaagttatagctggatggtagttctacaactttgctacagatcattagttatgttgccatatgaaattgagagaaaaattgccttcaacagggactgacaggctgtctgaatgagttagtcgccatggtatagtgctccagatggattaggccgccagtagggaatcctcaccgccgatgactccctccgtcgcg

SEQ ID NO: 14585 - DNA, 503 bp, Zea Mays
caaacaagcactctagaaacacacatgtctctatgtctagatctaacaccaatcacttaatcttgcaaagtaatgcactagagagggttattctattgttaggaagtgtgtatgcaattctcaaagcttggcccaacttgttggacgtgtggaggtgatttatttatagcccaaaggccaatctagtcattggcagatcctaccttacacgggtgcatcgaaccggtctggtgcaccactagacagtatacagtcccacgatcatagagatcatgatagatactttttgatctgggctagcactagaccagtctggtgcaccatcggacccttgccacatcagctagccattgcagtagcccgttgacctgaagtagtcattggattaggaggtccaatgcacaccaaacccgcgatctggtgcaccagtccaccaagtcttcaattctgatctctctggtaaagtatttcggtgcacataggccaaaggtctggtgcgccag

SEQ ID NO: 14586 - DNA, 397 bp, Zea Mays
tgcagggggacttgtccatacccatattatggtcctggtggatacatatgtgacaaatttgaatatggcggtgcagggtgtccatacccatacatgatcgatgctggtatttcgcctggtatagtcccttgtcgagttgtcattgtcatgcataagggttatagattgggtcttgtccaagcagatagttagaagaactggagctacttgagctacggattctatcttggacagaaaatgaaatcgaacgacgtcgaccgcttattgtctcccgctgtgaacgaggtgcatcatggtacgtatcttgtgtggcatgggtgaaccgacttcctctagtggacctgcaatctcctgcaccactccatcctgccccactctcttgcaccatataatctag

SEQ ID NO: 14587 - DNA, 651 bp, Zea Mays
gacggtgctcgacgtcgagggtacaacataattgatgtgggatcgggtcgcggcgtgggacacatggcagaacgatggcgtgtcggtggatcaatatcgcgaatagagaagctccggtgaggctcgggtgtggtggagaagtaagcatgggagctcagctccgaggggaagggagatgatgccacaccatttatagagaggagaggggagacaaaatcttgccaaatttatacttatctgaagcttccattaatggagaaacatagaaggaaggggatcgacacgtgggagaaatggatcgcgagagagaggaagtaaatcgcgacgggagaaggaaagaaatctgatcgaatgatgcaattgttgttaatggtggtagacgagaaaggaaaagaattaatcatgtagggaattgaatcaggggggaaatgaaagggtctaggcgattgacatttattcgtgagcgatgattcgggcaggcgccaggcgcggaggaggaggacacgcgagcgaacacaggatgcgtgcgtgggcttagcaatagacagtgtcgaccatggtcgagcaaagattaggggaagaagaaacatatgacatatgggccccacatgtcatagcgtgaggaagagaagagtgggagaaagggaaaag

SEQ ID NO: 14588 - DNA, 492 bp, Zea Mays
catcttcattgagtaatttaaaaagccatttgctgagtaaacaaatgttctttatgtcaagattggcgactcccagcccacctagctctttaggttgacaaatgatttcccatttggctagtctatatttctttttatgatgtcctccttgccaaaagaatctggaccgaatagcatctagcttctgtagcacaccagccgggatttcgaagaaagatatcatgaaaatgggtaggctacttaaaacaaaattaatcaaaacaagccgccccattgaagacaggaatttggctttccaattactaagtctcgactcaaaccggtcaacgacacaacgccactcactatttctcaatcttcggtgggtcataggaatcccaaggtacttgaaaggcattgtgcctacgctgcaaccaaagagttgtgagtactggggctcacaatctttagccatcccataacagaaaagttcacttttgtgaaagtttatct

SEQ ID NO: 14589 - DNA, 437 bp, Zea Mays
gttgatatggcgaagagggtaggggacgtggagacgttgcttggtagggcggcggccaccaggcggaggttcccggcgaaggtgctgttagccgtgtagtagttctcgccgctgctgttgccgcagactccccatatcataccagccgcctgcggtggcgtgagggcggcgagcagcaggccgacaaccccgtagctagtcgacgtcatggccgaacaagtacatggccaaagccaagcattgtttcaactggattggcctgtgcggccgtatattgacctccacccccaagttatttatttagaaccgattcctagatactatcagttcctacttcctagctactttagtaccggttcctggaaagatccgttaccagtcaacagctcccggctctcgcggtcccgccctcccgtccagtcaacagctcgccctcg

SEQ ID NO: 14590 - DNA, 350 bp, Zea Mays
ggacattgctgggtgctgattgacgaaaacacaaaaagggggggggggatgcagatgaagcaaccagacagtggagtttcggggtcagggagacgggcgatttggggaagacgactgaagatgaggagagttgtgatgactgtgagcagcaaagcaaatgcctccgatgcaaggcgtacggacgaggaagagggaggagcaggcaggcaggcagaggccacccagagccggggcagtaaatgggggatggtgacggtgatggcgcccctccctttttcctttgtcctcacccttttgggactgccatttccggcgtggctatctgacgacctccattattgcgcttggtg

SEQ ID NO: 14591 - DNA, 519 bp, Zea Mays
gtggatggcgggttgattatgtaaaaacagagggtctcttttgactatttgcgcctgcgaaggggtatgggagagtctctgccgtcagatctaaaatgcgcgccacggattagatcattcattacccgaaccggtaccggatgtggactgttagattaaaatccgacggtcgatgccagcgcaagacccaagccctccggatctgcccgatttcagatggacggcccggattcaatatcgcgaaggaataagcaatttctaatcccaaccatctactctcaaatctacggcccagagttacacgcgcggaggtggggtatgccatcctccaatcatcgccgttgaataacagatcaacgatcacggtgtgctccatggaaaacagttcgctcactcgatctgagccgtccgttaagatcagacggccgaacggcctgcccccccttctccggtcacggcacccggcggcgccctgcttcccccaccgcagagctcgccggagcacgacgaaactacaca

SEQ ID NO: 14592 - DNA, 468 bp, Zea Mays
ctccacagcattataccaacttaccaacaaggtctaatcgccatggcttacctttatctgcctgttttgatcttccagttcatggtttgtttttgccaatccgttgacaggctaacacctgcaaagccgctcttgcatggtgatgttctcatatcaaatggtggtgtctttgctcttggcttcttctccctgaaaaactcaacttcgagctcatatgttggcatatggtacaacaacatccctgagcgcacatatgtgtggattgccaaccgtgacaacccaattaccaccaatgcgcccgggaagctagtttttaccaacagttctgaccttgtcttgttagactccacaggccacactatctggatgacaaaaaacaacatcactgcaggagaaggtggaactgctgccatcctgctcgactcggggaactttgttgtccaatcacaaaatggcactgacatatgg

SEQ ID NO: 14593 - DNA, 750 bp, Zea Mays
catggaagtacaagagggagaccccgcttggacaccctcgggagctgggtcacggtttgcgctgcccacttgagccgaatcatctccggcagtaccctcgggggctgggcagtggcttgcgcttcccacctgagccgagtcatccccggcaacatcctcgggggctgggcaagtgtcaacaccgtccttgaggaccaagttctctacagtagccgcctctaaggctgatggaccctcagttacttccatgggaccaagatgatccaagttagtctcctgaccctcaagaccgcgttctaaggtcgatgtggcacgggatgacctcaacccagcatcgagcgcatcagcacaaacctccatcacaccatcatctgctggctctgataacagatcctctggaaccatatcctcaagagtctgatcaaaattcgccagggacaattcttgcagaccaatgagagcagacagagcaggagaagaaactccactactttcaccactggcgacgtactgccgactgttctttcgagtcagagggacctcgtcctcttcctccccgtcgtcttcaccagcaacataggcaacacccacattggaatcagcaacagatggagcacacccattggggtcagcagcagatggagcacccccattgggatcagcaacagatggagcacacccatcagggtcagcgtcagtaaattcaggcacaggcacttcttcagcagcaggaaccgaagtaccaacgtc

SEQ ID NO: 14594 - DNA, 527 bp, Zea Mays
gtaaccccaagtcaggaggagctacgtcatagctcgacgaaggaagatcaaccggaacaatttgaagaacgttgtcaggggttggcttagccccaccagtggatgtcagacttcttgcatctggctcgctgacctccaaggcaacttgtttgcttgaagccaaagaagcatgcatcgccatcaccccatcagatcgtggtggagacgaccctacatggacatccatggaggtgtgggaaggagagctcacttggacaccctcgagggctgggttgcagctcgcgccacccactagagccggatcactaccaccaacaccctcgggggctgggttgcagctcgcgctacccactagagccggatcactacctgcgacaccctcgggggccgggttttctacaacaaccacctctaagggtgaaggatcctcagtcacctccatgtgagtcgggcaatcccgaccaacgtcttgacatcaaagactgccttccaaagtcaatgatgcacgagacactgctcgggatacc

SEQ ID NO: 14595 - DNA, 1020 bp, Zea Mays
caggcgtggagctccaaacttggatggtacaagagcggttagtgcaggagtgggcgtggctaggtactgaggaaaagcctgcataggcacgaactgaagagtcccgggcatatagaactgctgctgaggggtggtatagaaaattgctgctcagcgcttgacatcatgttgacagtaccctgcaaagaggaagaagtcactggctcccatttaagtttcccattgagattcctcctacacaccacatccttgtgatcctggtgcaagtatttaacaagttttccaaacgaacgggtatcggctgatctcgatcgcacgatcattgatcaacggccaagattagatctgagcgcgagcgtaaacgggggcgcgcaggtgagcactgacaagcgagccaggggtgtcagtgactagggagggaggcggactgaccagccaggcccaggggcagagtgcgcggacgtgaatcgatgttcgcagatctgaaccgttggattggggacagacggttgtgatggggtgtgcgatggtttttacagctcggtgactggcgttgctccctccacagcggtgaggtcgccggaggtgaggtagacgcagtcacagggggtctagggttgtcggtgagggctagaatgggtgaagaaggttcggcgaactcactggtaggattccggccgcaagaacgggaccggaaacgggagaacgatgatgggaggtgctccagtcgggtcgggcaactccggtgaggattcccgcctaggggagggggtttagggcgcgctaaggcctggactagctccgttagggtaaggggaacattacgggccaaagcaggggcatagggcagggctaaattggccagtaagcgcgcaggcacggcgaaccagcgtggccgaacgccagcgaggccaaattggctaaggcaaagtgaaattgagagaaaccgagcacgagaacgagtgtctcacctcgggacggtgttcgggacggcttgacacgacttttggcgggctagac

SEQ ID NO: 14596 - DNA, 688 bp, Zea Mays
caaagcggcaccacggcgacaagggtctccggcgagcaattaacaactcccgagggtattaactaatgaatcatggggtgctacaagtcctaggcagctagaggattcaatcgggagcatctcaccggttattactgtcggtgcaagtctagccacggcgtggggaggattggggtagaggccgaactccagtgagtgatttcttaggtccacgaggttccttgaccaaggattaacatgcctgagatctcgcgttgtctggtagtcccacgcgacacctccccgggtcccgaatcatggtgagcgtgggatgcgggagtggcggtccgatctcctccctacaccagcgatgggagcacgaggtgtagtcgcagcttgagaagacgagacaacatcgatacttatacccagggggaggaacacggaggttgggacgacctggattcttcccgtgatccacggcacaagcccccccggcgaccatgcgattctgttgcgcaccaaatccaggaggaagaagcaggtgggggtgaccgacagagccgacccacaagttagtgggggtgagccagggcgtgtagggaggcagaccacctggccccatcggttagcgcggcagtagcgactgggctggcacggacgaaagggagttgggccgcgtagagtgaatcgaaggagctgggctggg

SEQ ID NO: 14597 - DNA, 1782 bp, Zea Mays
ggcacatttttttggaagttacttactgtgccttcatattctggcagattcttctgtttgcagtggagtgtcaccgctagaaaattcttgtgcaaattgtgaagagaaaatggtattacacagtgcaaatgaccctgttggagtaacagtgcatggtttgcatctttcaccttttaactgtgactgattgttctgttacctctccccttgtatttacgaaaatattctcaatcatataccttttattaaatatgcatgacaacaatctgtcgtacttagggaaaagtaattagatgtgagtatacaaacttgtatgatttagcaaaccacattatggtcctgcactcctgcttgttaagatgtataactggcttactttaacatttaaccacatgtcataaatacactaacctgttttacatttattttgattaagaaaatggtgtacgtgtcctggcagattccactaccctaacccaagaatatcatgtatcttacacattacacatggaacaaatgatagagcaagctggactgcattgttctggacattcaggcaagttgcttataaccccagctttatctttagctatagaatgacaaaggcacatgattcttttttatgttacttactgtgccttaatatactggattttcgcagatatcctaatacacactacagatttttgtaatgcactgctgctagaagattctagcacaaattatgagatgacagtttgcttgcaaccctaccaggcaactttgcctgggacacaagcaaaccggcctgaagtgcacatggtatcaaccatatcatacagtgcaaatagccctgtggaatcaactatacatggtttgcacctctatacttatggaatgtgacctgctgttctattatctctcctgtcatatttaaatcattaaatgcacatcaaagccaaaatgctttcaacagcaaactattctgattcatctcaacttcagagtatttggttacgaagtttcccttacatgattgagcaaaatagtataattaattttatactgaccattttatcctcataatcataccgaccatttatgctaggattaggaagtaggaaatatgatttttacagttcaatacaattgcttcgctagtataatgaaccctactaccgtagggttaaatgctgatatgctagggattataaattggaatggcttaaattgattcttcattgcttgattccctctaaagggtgccaaccgtgtgccctgatccgggtcttgggcctaacttgactaacaaactatagtctttcgtttcacatttgactaacatcaagctgttacaaccatgttactgctatcaaggcgcagggtttattaacaggactacagacaccttccaccaataatagttcgttaatgttgttcacaataacccctttggaggcctaccatgtctccctgaccatttatgctataggaaatcacataacagcttcgccctcaatcaattctgacaattaatcattttattttaggagatatgacagtgactcctgcacataactgtgaccattcctctttctatgcttcctattgcatcttctgcaggaacttgcacttcacatgactctagcacaagtgcgtccagctgtgctgacgatccaagtatgtcgactgacagcatggttaaatctgtggacatggatggtcagaagcacatgaaaaacgacaaaattaaggtgcacctagcccctcaaccagaaaacgcgtcatttaaggtactattat

SEQ ID NO: 14598 - DNA, 738 bp, Zea Mays
agccagtcgagcagcttctagctcctgtgcaacaagtttctttgaagcacgaagatctctaatggttgaatccttggttgataacagttgtccaagcctctgaacttcatcttgggatacttacagctcgtgacgatggtggtccaggtccgacatagtgaagcggtggctcctttccaaaattgtcaaggagttgctagcatcacggtataacctgtccagattatcacgagaggctgcgagagctcgtttctcctcctacgaacaagaagcaacattcagcacccagccaacaataagcgtggcaaagtcaaccaagggagtttacctcatgcgccatcctttccgagtcaagctgagcattgagggaggaattcaaagaacgcgtgccatccaaagaagcagagacttgggccaagttggcttgaccttgagaatacttctcctcaagggcagagcaccgttgggttaagtcggcttgatttcgaagatatttctcctcaagttcagagcaccgctgggccatatccgacaatgcagctgaaagggatgcatgactaagaacaaggtgatcaataaaaacagttagggaagctataagaacacaaaccagcattggacgccttcaggtcatcaatctgtttttggagtaacaatggattccattgcatcagagtcagagcttgctcgggaacagtggctccacaggatctcagctgagcagaaattccatcgaca

SEQ ID NO: 14599 - DNA, 535 bp, Zea Mays
aggtcggcgctcgcagggcaccagacctgggagtgccgccactcgctctttctcctagtggtctgggtcctggtggcctcattcctgctagcctggttgccccagccgccgccttctctggccttggactggacgaccctagcataccctcccatctagcctctcggtcatggatccaccgatgtccatctctacggttccgcgacggttgaacctcttccacatgacgcaattgctgcccattctacacttgttctcgcccttgcggctaccaaggctattgtagcagccactcaagagcgcatgcgcgtcacgaccctcatttggcaacagaaatgtatcgttgtggatgctctcgctcgtcagcttgtagaggctgagggccatcttggcagcccttcccgtcttgatccatccccaacttccccagtggttgagactccctcggcatccgaggctcccatcatcatcaacctacatgaccaggcggcgagtctcccgccacgtcgtcttcgacaaaacaaatttccccttc

SEQ ID NO: 14600 - DNA, 384 bp, Zea Mays
tggtcaccctgagtcgagtaagtatgcagattgacaataaacaattcgagtgcctttgagaatgaagtcattttattgatggtgtatctcccaattacagaatacaatgccgtcccaatagcttttgaaatctagctagaggtaaaacttcctaagatgctctatattccatgagttccctatttccgtgccatccatttgagtaagacgatatgatccaggccgagtgacttctgctactatgaataacccttcccatagtggcgacaatttgtcccgtccctcccccgttagaattcggcggaggacaagatctcccactgcgaaggatcgatgccgtatggccttatcatgatagtgcctcagagtctgttggtatcttgc

SEQ ID NO: 14601 - DNA, 403 bp, Zea Mays
tcctaaagatcagatgtgttcacctttgtgctggcgccaaaaccacttggacccaataacaaagagtggccaaattacccaaggcacacccctgagaaatttgaaaacaaaccaaggtcgtttgacacggtttgacatcatttttgtcgctggtgaacagtgcggacatacaagacttggcgcccacatatcttgtaagctagggcagatcttccattggaacttacacaaactagctagccctaggtgccaggaagaaatcttgcacaagacctttggcgagattcgcacggttgtgacctctacaggcgcaagaacttgggcagatgaacacgacacgtgttcgacgcgcccaggcaatgccagagcacgccctcagcgctcagcccccgcgcgcagcccc

SEQ ID NO: 14602 - DNA, 708 bp, Zea Mays
gtaagtttaccgagactcagagaatagggtccatggactgcgggttctattctctaaaactgtaagggttctttaataaaaatgtgtcgcgaatggggtatccgtagatgtgggccgttggattagaacccaagggctaggattagatctcccataaaatgaatcggtatgcaactagggccattggatctaacttcaatagtctggattttatttgaccgagatcggcacgaatccatctgatctcacttcaacggctgggattcaaacatgaagggggtagctaccacttaatcagagccatccgtttacgatcctatggccaacgatcctttccctgcttttccccctcccagcttggccagacggcggcgccgcccaccaaatcacgacggccatcgccggagtagtgcccgcactaatcccgtcgccatccagcaattcacttgcgctacactgacataagaccatgggaaacacgatggaggtgaagaataccgggaatcgggcgcgcagacgggttgttctcgcgttggggcggctcggcggtgttgaagacactccgacgagcaattgtcggagtcgtggtgccctcctgcccctccggtgaccacccgtactttcgcgatgaccaaccgaacaccccgaagctacacgccgagaccaaatggtggcgtaggcgcgattcctccgtcggccatgcgggac

SEQ ID NO: 14603 - DNA, 505 bp, Zea Mays
gcgaagtcgaagcacatgttttatgatgcttttggcaacattacgttcctgatgcatcaaatctatgttatggggtaagattaatgcctacatgtatggtagctcccagagaaaggagatgtgcgtccatttgtgttctttactgtacccttcgaacccacctccttctgctagtttaggtcaagatgttgtctcatgatatcttcacctgtttgtcgcttcgaatgcccatctgtaaccctcttgtctttccgaaatgactttgtatcttttctaaaaggatgattagcgtgaaggaaatgtcggtgcacatcaaaaaatgtttcttttttccatgctttaacctatatgcttgcgactcactcatacatatcagacaacgcaacctacggtggacacaccacccacaccaaatgccatatgccaatagatcatgcattgagcatatatatgtcgctcatagattaaatctacaattcagatggctatcataagcctccacccc

SEQ ID NO: 14604 - DNA, 1246 bp, Zea Mays
caggcaattggtgtctaaatgacttgttttacatctgctcgtgcaacacacgcgttctaggtgcaggcaaccaaacatacacttcaacgaagtcaacgcatccaatgattcaggacgaagcaacagaggcaaccaatcatatggtatagtacaaataaaaacctcccctggaccctcccatttaattctaaacaccacatctattccctttgagattattattcacgtgggatgattatccagacaagatcttcacagaagattatccagaaaaattaaaagatagtactgatgcagtattaattatcccctcatgttttagctaacatagacagcacgaccagcaccttctttcccggcccggccgttttcttccaaccaacccaagaatctcgaagtggcacatcaggccagctgcatgcctgcatgcatgtgggggtgagagggtgactgaggaaaactagctagctagttgctgtcgctactactagcagaaagcaggtgtgtgatgtgtctcagacatggcgacctaaccctagctagagagtacgtagtagagacgacgcgaccccggcccggcggcctcgtcctgctcgtttagattcctcatgccctagcgctagctacatgcaccatgcatatgcatgtagacggagagcgacctcaccgagcacgtacttgtgcgtgcccagtaaaaagctctacccctctagtcgacgaccatgccgccacacatatcgatgccctcctatatgatgcatgctacaatgcatgctacccggccctaaagcgtggcccggcttgtgttgaacaccgcagtgcgcaggcagcaacaaggccggcagctagatcgtagtaggaggccggctggctggcctggctggagtttacagccgggacaagcagaagccgacgccggttggtggtcacgcacgcgcccggcgacggggacgggacgggctccgtgcatccatgcccccagcccatgggaaggagaaggaaagcgactgttggatggacatggacatggacatggacgggaccctgctgctgcagtccctgcttgatcattcacgccggcccggcaagcaagccgaccggccggccggggacctcacgtcactagagcctgtgcgcgcggatgacacctctagaatctaggccttccgatatggacgacgcgccaacagaatgctgtccccacatcgatcgatgcggcagcggatcggatcagctccgcttcagc

SEQ ID NO: 14605 - DNA, 488 bp, Zea Mays
cagaacctccgcggctcctgctgacgtactcatatgccgataccgccgtgggtggttacaccctccctatccatcgcgtgctgcccgttgctggggagttctaccttctcggacaataaaactgagctcgaacctatcctcctggccatctccacggtcagggcatgagggagttcgtcgtcgacatgatcacgccacaccattgttgagaccctcaacggcaaactagggcggtcaacggtgctcgcctctggtgagtcgcatcttcaccaggcgggtgggagactggagtccaagaagtgctcaccggagcctaggagccatggcgcagccgcatcatcacgtggacaagggtgcacacgccgtcattcttcggtgagaaacccctctgggctcccattatcatccacgcatagtatatacccgagtattgtagatatcgtcgcgtcgtggtctaggaatttatcactggagttctccctccgccg

SEQ ID NO: 14606 - DNA, 395 bp, Zea Mays
caagaccagcgcctagactaagactaaaccaaatccatgaccaggggagtatttcccccaacataattgcactaatgatcaaggggtgtgctctggccacggtgactgtgagcatcacggcaataccgtcgtgttcccggcgatctgaggctacttcgtacaaattggtggttcggcaagcatcccagagcatcaagggtactcaaatgagggagagcgagggatgaactgaccgggaaagggctggccgcggtgaggtgggtttcacggtggcggagacttgatttggggaaaatctcaaattcgagttctctggtggggggtttggggtgcaggtgggtgctctagctgctcgaatacctaatgaagacgatggtgcactcaatttatagact

SEQ ID NO: 14607 - DNA, 610 bp, Zea Mays
tgatgatattttggtgggtggaaatgtagtgattcttagtagtgacgcatctgatgtatctgatgttgggtcgtggtcttcgaaaggtgaaaagttggggagcccgtttgcttggatagatgacgaatctttggaagatgatttagattattttgtggcgttagatttagctgcagcggagtctccgttgagggtcgccccccttgaggcgccggcgacttcgggcggtgtagcccctggtgaaccataggggcaaaaaaagattaggatatcgaaacaaagtgtcggaatggtaggagagtcttcgcaatgtattggagtctcccgaagacatcgccgaatgggaatggagagatcgtgccttcggattggaccgcggttggatcaagggacccgtcgtgtcatactggcgccgacggccaggtcatgcttcgaggagggggatctatgggctctttttgatggtgaagaattgagattgatgctattcaattttcgagaagccggtcttattgcgaaacaagagccaatgtaacaatgcgtgttgtcgtcgctgttctttggtgacgataagtgaaaatgctaccattgcccctcttcgccaaaggac

SEQ ID NO: 14608 - DNA, 1139 bp, Zea Mays
tgattgggttgtgtgtgtgggttgaggtggagtggagtgtgcacttatcaatagaagacaagagccgagaggaagggccacaatagcaagacgaaaattaagaggggcacacgacacacacaggcagccctacaagtggagctttggagggagggaggcctggcctcgtagtttcggtgccagtggtgaaaagtggcagctctgcccacattcctacaccaccgcccaccgcggggccaccgtctccatggcaccacttctccatctccaatccaactgcccttgcgatgctctgcctgctgcacattttcctcccactactacactttattaatcacacagaccgaatcccacgccttctctttccttccccttcgttctctccctgctgctctgctcctgccgcctggctgccgtgccgccgctgatccctctccctctcttccccctcaaagccccaattgccgggtgctcctcttccacccccattgccgactgcttcccgccagagagtggggaagggaggggggtgagaagggagatggcttcttggatagggagtgggtaagaatcacacgatgcagttacctccacctttctctcttctccttttgcgggcatattcttcacctccgcctgcctagatccttctttctttggcccggcttagcttccagtctcaccaacagttctgacctcggagcatctatcaatcggcccactccactctctggtaaggcaaccagccacgccacggcaccctttttgttcgagaatctgcttgcccgcgtcgccgtcgtggctttgttcctcctcgcgactgattcgtcggcctgagtcgtcactttttgtctaattggtttcagcgccggttccatcgggttttgatgcaagagtagaggagttgttgctaggttgttgtgactggttgttggagagcaggagccagattgaggagaatttcagccaattttagcggaaccgtaaaacccatcccgagaatttttcctgcgcctcctacggttaggagctgtggctggacagtgcctgcctacgctctggagttttagtgcagttttacaagttttcagtcaattttgatcaagctcaggggaagtaccaatttgggagtgctagct

SEQ ID NO: 14609 - DNA, 718 bp, Zea Mays
tgggcaaggttcgggcggaggttgcggaattgcgttctgaatgcgcggcacaccactatcttgatggtggttcccccgccccaattgggattcagcacccttacagttcaccgccccgtggtcggttcgactatggtaccccagactgtaggacccgcatagatttagatccatagatcgatggagtcgaagtctgtaataatgcttaattcagtgtcttagtctagtcagtcttagttagagttagtttggttatcttttgttggatgcttgtcatgatgaacatgtaatgaagttggatctttgtaatgattgtcaccaaggggtgggtatctcctgcaacttggtgtagttattaataaactcagttatttagttgggtaatccattcatttccactttcctctttatctaagaagttgtcagtgaagatgatcaattgttcagtgctgtgaagatttctgtatatcttttcttatgctaaaatactgcagagtcagatctgatatgtgtgtgatttctacagatgtctgagaacaggcgcagaggtgcgaggcgtgctcagccagagcagcaggcaccccaggaagaggtagctccgcaacatcatttgccaccgccacccccaatgaccattgagcagatgttcttgatgcaaacccaggcagttcaagcgaattggttagacattagcggcgatgcagcaggttcagcagca

SEQ ID NO: 14610 - DNA, 566 bp, Zea Mays
ttaacggactagttaatactagtgaaatagattagatcctgctggccatgttttaacttaaattagtacatcagaccaaaccacccatgaacaaataacttaccagcatattcatggtgaccatccatcccatcatagatgttgccataatacacttatcttatgccaccagtctgttaaccatctgtccatacctacaagttatcctaactacatgtccctaattcggataaaaacttcaagaacgaagatcgaagatgatcgagctcatcaaatcaaggaaggataagattcaagctagatcttcaaaagtaatcaagatccacaatcttggatagattctttcctagccctaccctttcataactaaaactatctatgctctaaagacatcttctatcctacataataaagtggacatacatatatatacgcatgctctcctaatcactcactgatgaaaaaaagagagactcttgatttttaaactaattagaaactaaaagctaaattacaaatcactcttcctatatcctctttcttacaaatctcgaggacgagatttc

SEQ ID NO: 14611 - DNA, 475 bp, Zea Mays
gtgggtacatctagcaccagttttgagggtgtgcatgaaggcttaggctttgggactaggaatcaaggagaggaaatcctgaactttgccctagcctatgacatgtttatagcaaacactttctttaggaagaggaaatcccacctggtgaccttcagtagtggccaacacactagccagattgatttcatcctcttgagaaaagaggacaggcatgcctgcttagattgcaaggttatacctggagagtgtgtggtaacccaacataagcttgtcgtagctgacttccgttttaagatttgtttacaacggaataaacataacaaggtcactagaacaaagtggtggaagcttaaaggggatgtggcccaaactttcaaggagagagttatcgaggagggcccttgggcagaagagggagacgcaaacatcatgtggaggaagatggtgacatgcatccgaaagatagcttcag

SEQ ID NO: 14612 - DNA, 613 bp, Zea Mays
caaagttcttacaggccaccagctccaagaggcagaggaggaagaagcttcggaggaaggttcagctcccaacccaggaggttgttctatttgttctgtgggcaggataaaggacatacaacaaagacgtgccaagtcacgatccaaaagcaaaaatagatagctgaagctgaagcaagacaaaatcagtcgaagaaggtcctgcatactgcttcgtgctattctccatacatttccgagtatgtgggcaaccagcagcccacaacatcggttgcttcggcaagtcactctcaagcagtgtggaccctgctacctccaccaccacccatgacaccaaccttgactcacaatcagcagccagaagggcatcgccaagaacaacaacagtgtgatgcacgtgaagagtccgaagcacacacagtaaacagtattgtgcctgagtcaagacatatttactgaagcaatacagggcctcaatcagaagattttcatgcttaatgtactcgctacaattctgtctttatattttttttctctccaaaagacaataaagaaggttcaaccttcggcctgatgtatctggggttacaacatcaagtgtaacagaaaaggt

SEQ ID NO: 14613 - DNA, 636 bp, Zea Mays
aacaacccaccacaatctatgcgagtacaagctctagtgtatctggcgtcaacgcgtgtgcgaccatcagggctacgacaacacaacaagccttcgtaataagtacaacaggcaaaattattgctcggtaattgaggtacacgataaatccacgcaacgtgcgcaacaggcgcaatcatggttcgatgatcacggcagacagacagtgcctacaggacatgcgaaaaatacgcgactccgcgatggcggttcgactcaacgggagctgtccgattaaacgagagtgctatatagcaatcacatgacgcatccaagttcgtacgacacaaatattgcgtcgtgttgctagggcgcagccaatgccaaaactcagccgataaataacgcagcctcatcggtgtgcccgagtatccactatacaatttaatcgctcggcgtgagtctgaagctcaacgcaacacaaatatttagagcgatttaagtatgtacatacagtacaatatagccttaacatgcattctcatgaatttctaccgtatatccaccatgagaatagagcagaaagataataagcttatcatgtgcaagaaagcatttttctatgtttaggcatgtattattctattcattattttc

SEQ ID NO: 14614 - DNA, 759 bp, Zea Mays
aaaagatcttggcgccaggataagctcggacccggccactggatggttcaccgtacccccttgctctacggccggccgtgatgatcctcgccggcgttagccgcttgctgcccgtgcgccacatagtttgtggtgttatcacgtcgcagtagaccaccgtaggtagtctatccattgcctgtgacagtgccccggtgaatgccacgatagataacttcggtgactcctcccctttctcactgcccgcccttcctcgcccaaattcatcgtattctcgatcgcactctataacttgatgccctagtgagctccgctaggttgttacgaagccagagcaccagccctcgcctccgattagccaccgtagcgccccaattcctttcttcccccaattcggttctccgcgccgccgtgagccaccgcgccgtggaccgccgtctccaggtccgttctcgcccttcttccccttgttttagcactcaggcatgcttggcatgcttgtccactcgatcaattgagctagaccacacctaatcaccgggaacacctcggtttgtccttaacgttcgccgtcgtcgtgggcagacaagctccagcccggatttgtgcaattaacggagggcttagggtcgccaggggtaggaacaggtgtcaaccaaattagggcatcagtctttgcgcatctcggccggtacaagctcgctggagggcgcgctcaccgttgttcacgtcgtggacttgacgctgtgaagaaataga

SEQ ID NO: 14615 - DNA, 480 bp, Zea Mays
tttgcgagctacagtggctaatcggaggcgagggctggtgcactggacgcgtaacaacctaacagagctcactggggcattgatttatagggtccatcagcggtggcgcccaatttgaagaaatcgtgctggcggccgagaagaggggatgagtcaccgcggcgatctaccgtggcattcactggttgaggagctacgacggtcactattgaactactacggctagcaacgacgtggtgaaagggtcacggcgtggcatgatcatggcgaatgacgtacacctcgacgacggtctctcggccacgtcgccgacaagtggatgggcgacagagcaaccacagtgctctgagttcatccacgacaagatcttttcaccaggggtcgttatccgcaggttactgggcgcgaatcgcagcgccgacgcatggatcaccagcgtcgagatacgctgtatctacaatcctgttcagttactgtacc

SEQ ID NO: 14616 - DNA, 509 bp, Zea Mays
cactagtggtgttttcagtttagataaaataaatgggaacacacagtgggaagttgtagcactccttctattaatagcctggcctaatggaactctttggatggttgatactcttttgcatgcttgtacgtgtgtggacagcaacctggttgctgactgccttcttaactcacaaatttatttgacatccacggctgatctgcatggtagctgaatggtccgtccttctccctttattctcacaagcacgtccaagcaccaagctatcattattcttctaagtttcacactgcaatatcagcatgtcacagagagagctgatcatcacaatgttggaaggcaaaatccatcatcgtcccatgaacttgggtacacgccatcattcctaagaatattcaaacaacaacttgaaagcactgactgatctggatcattgtgattaattaaaataaggttagcattcacctgagaataaatttccttctctagttgtttagctcgcattcttg

SEQ ID NO: 14617 - DNA, 479 bp, Zea Mays
ctggtgctcctgttgcttactatgcttggaatctgccacctcctaggtcattttttaattttgtgtccaaccctcctgctagtgatagtggtctgggtcttagagtgcgaccttctcctgaggtcattgaagctctggttgctcctcttcgtgatcttcccaatgatgagaggcaagttcacttttcagtgctggcaagtccggatgatgcagaaatagatgatgtactcaacatgttggctggagaatcttctgactcggcccatgctgaaccaatggttgttacggttatacaagatcttaacaaaacagtggacacccgaaagcttgagggtattcgcccaaaacgtcctcgccaagttagccgcccaactgcgcctgttgaggagaagaagaaaaagagacggcttcggcggctgtcatgcttggaccaggatgctggcccttctgctcctgtttgtgaagaagtaccagcagag

SEQ ID NO: 14618 - DNA, 425 bp, Zea Mays
ctgaagtctgacaagggagaagaaggggtgctacaggggctataggggcacaccaaggggggtccgaccaccacggctgaggctgctcgccgaaggatgatgtcgtggctgcgggtggcgcacagcgagataaggttgcgaactgcggtgcgagatttcatggatggcaacgatagcacgatggggtacgaaaggaagatagaagacgactcaccggaggggtcttctcaccgtggcgagcttgaacgcaagaagtcacgaaccgttcgaactgaggcttggctataactcttttctgaggcgtggagcaggtttttcagtagaataaagctcccagcaatcggcgcacgagatcgtggggtcggttaccgatccaggcgcacccacgatgttgttcagctccattcgaccgaggaatgtgcggg

SEQ ID NO: 14619 - DNA, 397 bp, Zea Mays
gaaagttatctaaccaaacaaaagatgcaccatgaagcataccaactccctcgctagctaaacagtgagctacaacattacatgaacgtggtgcatgactaattttgacaacactaaaatctgatgagattaagaacttgacctccctgatcacaacacctttaaaggcagcatcccaatcctttgataacagtgcagtcttcagaacttgacaatcagtatccgattcaatgtacattatatttttttcaactgcaaattttattgcctggaagcaaacggtagcttcagcttgaagggggtttgctagggattggatgttccttgttcctgctgccaaaactgctccagtatcatccctagcaatgaagccccagcctccagacttggtatcttc

SEQ ID NO: 14620 - DNA, 1903 bp, Zea Mays
ggccttgatgaatcttgattgatcagtcaaacggatacacatgctacatcatagccatgagcacgactgtactttctggtcatgtgcgtgaaagcttctctatgcatgtgctattcacatatgagcagactatttctttctgtgttgttcacatgcatatcaatcgattttgccaagtgcggaaacattgggagttgggatgacaagttgttggagagggttttctttcaatcctgccaaaaaaaccaagattgggagtgggttctgggaaatattggagatgctttgattgggattagtggttgttcacatatcttcgctactgatggctggaacatgaatacttctcctgattcgctgcattggtgatctccttcccctgcagttgcctctggaacatttaacttttttgccatcttctctccttcacccttgccttttctccccttcctcttctctccgcttgtgctctctttcatgttgatcactgggtggcagctgccgctctatgcaggtgccttggtcttgttgggccctttgccaggtcttaatccggcactttgctggcgacagaatcacttgctgcaaaagctgaatccttagagcttttcagtgttgagagacaactgattagttccaaaggtaggaagttaatctccagctaggtaacgactcgttgatagctatgaaagctaggttttacggcttacagaaccttgttaagcaaggaatcagcaccacagctgggaatgtttgtgccattttcacttccagctcctgctctaatcaagtcaattccaacttggactatcacacagatagtgctaggcgagtaatcactaatcaggtaagttgacttgccataggggcacacacttgcctgttcagccatccctttttgttcgtggttttgcctaggatggtcacttggatgacaacaagcacagttcctgttggaactgcgacttctgaggtggtatgtgtggtgaggggaaggttgaggctcaggaccacggagcttgggcaccgtggctgctagctggaagagtcgaagggacgaggaactgttcacgcagcgtggcgaacagtagttgtaggtgaatagtgacgcgaatgaacagtaccttggatgaaccgtatgcggcgagcagtatatgggtttggggaagcacgggcaagatacttgcctgcttactctttcattgatcgaagggtacattagcaaccgtccttatctaatattttatctaaccaatttcttatccttctaaacaaactctgtttgttctcatacatccaaacaaactctatccccagactacgactggcgcttatccatctaaacaactagctgattttattagggctgttgtgctgccggtcataacagttccactcacattaggatgagtaaattgggcagcaagagaagggaggacctggtttctatgattgagcacaggtgatgctaagccctttttgtatggtttatgctgcgatgctttatgactatgtttttttgtttcatactgcacttgggtggctatgatggttcaactttccattaacgagcttctgcactctactaccatcttatgagctggactgggatattttatgatgtttgctgcttaactaggatggcccatgccttactagaaggtggttctatctctgtttgcttcttaactaggatgccttgcgcctctagcagtcacccaaaaaaaaacaagtctactgctggctggctggattggatacatgtattggtcatgatgattctctcgtcattactctttagcacagatgcgctgcagtgatgatccccagatccactgctgttgcctgtgttgccatctgctctgatgaccctgttcacccctgccttttcttctcgtgttca

SEQ ID NO: 14621 - DNA, 472 bp, Zea Mays
ctcgtgactcgattcgcggcgcagattatagcgggccagtagaacccttggtggatcaccttggcagcgagggccctaggccccgagtgagagccacaagttccgctgttgactttgcactggatctcgatgccttcggtttcggtgacacatttaagcatgggttgactgacctccttcttgtaaagctggcctcaatgattgcgaagtcccagcttcggtgcttgaggcgattggccttgttgacgttgcttgaatggtaatatccctgcaggaacagggtgattggggcccgccaatcttcggtcatgatgaggttgactatgcgatggcccttggtgtcgttggttatttgtagaccctctggacttcagacggctggcgtgccgatgacgtggtagaacacgtcggagggcaaggcctcgcctctggcggcggctttggccaatgcgtcggcctcctcgttcttggc

SEQ ID NO: 14622 - DNA, 529 bp, Zea Mays
tagaaaccagtgttggaatcgtcaggactagaacgctagacataggacgaaaggccttaggaatagtgggaaaataggcggttaactaagtaggccatataggccaatcttagaagtgtaaggatgccttaaaagcacccttctgactggtgaggagacattttattcagcatgcatgcattataaaacatgaaaagagtgaaaattaaaggaagaatgcatctaagtgttaatgtagcaaatagggatgataataaataacatgagaagtagaatctaatttaacccacctcctgtaaacaacccgagcacatgtgttttacttttccaccaccataacatttatatctaaccctctttcacagatgacttcaccacccccatcaacggaggagacactcgtttcagttccgagtacctttcccacgagggtttcccctccattttgtgggaggtgctcagctccatcggttaccctacaccccctctgtacacggtgcatttgtacgaggagcatcgggtgccccgt

SEQ ID NO: 14623 - DNA, 560 bp, Zea Mays
ggcgaatcgtcgtccgaggatatcatgagcgatttggcggcggtggagctgcacccgggccacatggtggagttcggcgtttcgaggatctccttggttcgcgtgcaagacatgcaacagttgggtattttgggaacggagttggacgagttccaggggcagaagagattcctgagctggagggtgagatagttgtgttcgaggcattttttactgccggccttcggttacctgcgcattgttttgtggcagaggtgttgcagaggtatgacgtgcagatccatcaattgacacctaatgtcgtggtggccctggcgaagtatgtctgggcagtgactgtcagccctccgtagaggtcttcgccaagaattattgtttgcactggtagaagagaaaagttggaagcaagattgcacagtttggatcatgcacctttacgccgaggactggcaagacttcggcggaagttgcggagctagttccttgctcccgcaacaagtggggcaattggtatgattattggttttatgtggctggaggcgaagtcgaagacctcccag

SEQ ID NO: 14624 - DNA, 475 bp, Zea Mays
ggataacgaacacaggccaacatgtgtatgggacaaccattagtccataaggattgaacccatctgtggcaagcgcaacacgtacattacgagcctcttcggctttcacatggtgaacggaatcaaagtgggtccatgcttcaccatcggatgcatgtatcatcttgtcgggattgtatcgtttgccatttttgtgccatgtcatctgtttcgcggattcctcggtcatgtatagccgctggatcctaggtatgaacggaaggtgccgtaggattttcatggggatgtcaagctgcctcttctggccatcagtagagtctacctccatgaacctagaggatttacactttggacagtactttgcttcctagtattcttttctaaataggatgcaccccttcgaacaagcatgtatctgctcatatggcatcttgattgcacgaagaagtttttgtgcctcgtacatgctctttgg

SEQ ID NO: 14625 - DNA, 573 bp, Zea Mays
gtttggttagagggaggactgggactttctggcgtctagtaaagtggagtcgagctgagaagcttcaggttgtgaagaggttcaaagtatctgcggtggagtccgtagctaccttatcactagttgcgttgcctgcccaagctcgatgccttgttgtgcctgtgaacctgcgtggtgcctgggatggaagccacatgctcaaacccaagcagcttgtggcacctttggggtcattccttatcgtggaaaaatcgagcttggccagcgcctgtttcttatcttgttgcttgcgggcatagtgtagtgaagctctccactaccccactcgctagtcctgttcaccgtgtgcctctggggttcacatcttcacgttggagttaatcccagccacgccgtctattttgcttagtcccctcacatcgtcgtccctatgtcctgtggccacaccaccggaggtccacctcacctcggccagggctcttcggaggttgtctcagctgaactgtgcacgatccttgttcctcacaggtcagtgaagtttctaaagttggttttcggatttttaggtcagtt

SEQ ID NO: 14626 - DNA, 356 bp, Zea Mays
tgaataaatatgtttttttttgcagtaaaagcctggagaaatcagaaacgtagtcggccgggccgacaagtactatgcaatactagcgtgagttttgtttttgttttggagctagtgggggtggtgcattgtttatgcccgggaatttcgctacgaggaacaggaaccggaggttgggttgggttgggttgggtttggacggatcatgagaagtcagtcatggagccctgcggagataaggcgatggatggaaacatgcacgctggacgcgacgcagcgaatccaacacgcaacgaatctacctcagtctactgctgtctgctcctggggcagtcgtttttctttatgcttccttt

SEQ ID NO: 14627 - DNA, 349 bp, Zea Mays
ggctaccaagtgtcaacgcaatagagctatcaagtcatagattgagatatgagttttcgatttgttaaatttgggattagctaggttcaattcgagattgtagttgtttgattgatgaggggaggggcatcggcgcaggaacccatcgtggcaccaccgcacgctacgcctgcaaggcctttaagtcttgaggacgtgaacaggaccccactgccaccatcctcgcaagccgctcaaggctgtcgaatgcttattgtaaaggtttggaacatgtttgaacaactatctcgtttgattaaggtctacctatgtgatatatagaaaccgtaacaatgcacatgcatctaag

SEQ ID NO: 14628 - DNA, 885 bp, Zea Mays
ccaatcataggagaacaactttgcttaagagtgcaagccatgttgtggagaaaatattggagataattatgctcaaagtttgactgtcaggctagtttcattctgaaattcagcttttcagtgtaacagggtcgactttgagtgtgaattaaaccttgatccagtgcccaaatgagttcaatctctatagtcgaattgtagctggtatgtagcactacaactttgatgcagagctttgggtgagttgccatgaaacatttggagaaaacctgccctaaatattgactgtcaggtgcacagaatagaaattctgatggtacagtgcccaccggatcataccgccagcgcggctgtcttcaccgccgacgaccgatcttcgccgcgattcgcgccatcgccgttgtgattcacgtcgacgatgacccgataaggccgccaagtaaaagccatgcacttggggataactccggtgactcaccgccgtacccctcgtactccgcggctatggaggataagttcaccgacgagagccaccttccggccttgtgccacgtgcctgagtacctccaccgcaccgccgtaagccttagtaactctccgttgatcgccggaacgaccgccacggtagaagccacgaatccattgcgccagtgctttcttccacctccggccgccgcgcgtcctcctcaaaattcacgaccaccgtcttaccccccctataaattgagcccgtgactagctccgtgaggtcgtcagctaactagccaccgctaatcagccagaatcatctaccagcgagcttgaatttccaatttcccccaaactggtctccgccaccgcgaagaacacctcaccgcggccagcgcaaatcaggtcctatattgc

SEQ ID NO: 14629 - DNA, 707 bp, Zea Mays
ggtgatcaattaccgaaggttcaaaggtgtcaaggcaagggaggcacaacgacagctatgacaaacaggatcgtcgtccttatcatggaaactgatgggttgagaagccgacagaggattgtaatgtccttgcgatggagacttggcgacgacatcggtgacggtgtcagctgacaatgtacttggtgaaggcttggccactacctcagcccaagtcctcgattgttgaggatgatcacattgcacggatgagttaactcaacagacaggagaggaagaccgaaagcaacaatgctgctctagatgaccaggacgacgacagtggatacaacagaaagagcttttgcatgagctgacttggtgatcatgtgcgagacagcaataacacctgcaccgatccaacctcttgaaggaaaagctcctctctgacttactccttgcaacaacatctgaggatattggcaacatggtctgaagagggaagatccttgacgacgacgtggccggtgatggcgggtaccccagatgacggttgttggagacggggcggggcctctgttagcgctaagaccggccaccgccatcaacggcaacaaccaatctagggaagagagcatccctacatgaagcaggacaggacaggacaggaactcgggaacgagaaaccggcgagctcgaacggtggacttaaggccgataagatgctc

SEQ ID NO: 14630 - DNA, 873 bp, Zea Mays
ggacataagctttcctttccaactacttagctttctctcgaatttggtttccactgttttccaatcaccattagccagcctgcgatggtgcatagggattccaatatatctgaaaggcatgcctccacttttatagctaaacaatcttgtgtacctcccttcctcctctttggccttcccatagtagaagacctcacccttgtggaaatttattttcagacccaacagctgctcaaaggcacataatatgagtttcatatccgttgccttgtccaagttgtgctccataaacaagattgtatcatctgcgtattgtagaatggaaagccctccatctaccaagtgcagtaccaaacctctacttgctcgttcacctttgctctattaatcaaagtggcaagcatatctgctaccaaattaaagattataggtgacaacgggtcatcctgtctcacccctctttgagtctggaaaaacggacccatttgatcattaactttaaccgccacatgacccccttccataaaagtcttaatccaactacaccatgtatctgagaatcctttcatacaaaggacttgctggacgaagctccacttcaccttatcgtacgctttctcaaagtcaattttgaaaatgaccccatctcttttcttggtgtgaagctcatgcaaggtttcatgtaggaccaccacaccctccattatatttcttcctggaagaaaagccgtctacgatgggttgattacattttgcgcaacgactgtgatcctcttagtcgccactcttgtgaaaattttgaagctaacatttaggagacatatcggtcgatattgttgaacagtaatcaccccattactcttaggaagcaag

SEQ ID NO: 14631 - DNA, 481 bp, Zea Mays
ctaagactcagccgaactcctctacggacggcgggttctatttcatttaactcgagggtcctatttgcaaagcgcaagccgaaggggtagctcgcgctaacagtcgtccgatcaacatccgacgatgaggattagaagtctattcgaacaaaccggtattcactctgggccctcagatcctggatctacgtttacgatttaatgaagtccgatgcacgcgccgatcgtccgatcccgatcggacgttccccacacactaccttcactggtatcctcgttcaatctagaccgttggttcacagatcaaccatccagatcttcactaactagcctgagccgctgatcaaatctagtcgtgcataatcaaaccaacggcgcgcacattatcttctccccccaacgcgactgcccagaaacacggcgtcgcgacgagtcagacggtggtgtcctcgccggtgactacccaacccacggaatcaac

SEQ ID NO: 14632 - DNA, 361 bp, Zea Mays
cgagccgctggggcaactgaagatgtgatgaccgcttacctgcccatcgtcctcgggcaggatgcgctgcaatggctatgacacctaccccgacactgcatcgacgactggagcgacttcagtcggtgcttcatcgccaacttccaatctctctccgacaaaccggcgcagccatgggacctcaaatccatcaagcgccgaggggatgagattctccggtcataccgcaaaagatttcagaccatgagaaatcatatccccgaggttgcggaagcagcagtaatcgaggacttctaccggggatctaatgactcgaccttcgtccgagccatactgcaaaaggcgtcgaccacctccgagc

SEQ ID NO: 14633 - DNA, 434 bp, Zea Mays
gctagacgccgactttatcgaagaggtccatcacccagtgtggctggccaacccagtcatcgtccccaaggcaaatgggaagcttcggatgtgcatcgactacaccagccttaacaaggcttgtcccaaagacccgtatccacttccgcgaatagatcaaatcgtggattccacctccgggtgcgaccttttgtctttcttagatgcttactctggtttccactcaaatctagatgtctagggaagataggaagcataccgcttttgtaacagtggatgggctttactgctatgtcatgatgccctacggtctgaaaacgccttgccaacatttgtgcgggcgatgagtaagactttcggggacctgatcagggacaaggtggaagtatacgtcgatgaaatcatagtcaagaccaagagagggtcgaccctag

SEQ ID NO: 14634 - DNA, 525 bp, Zea Mays
cggtgaatgtgatagtcgatgcgaatgaggagtatgattagtcctgttggagacacttgtgctgttggtgtcatgtgcataatgtggggggcacgtatgtgtgtgtgtgccgaaatatcataatagtggttgcgttagagttgtctgaagtatttcggatgcatgccgaaatatggttgcattcgaaatagggaaggagatgtgttgtgtgatgtaaaggctagattgattttataggttgtataaaaatgttctgttaagtgtatacatcgagtgtgttaaatggatcctacgtctctagagtgtagtgtattggctaggcgaagagttttggaatagaagagtatgaggcgtgcagttaagccaagatttaagtgcaaatcctatgcaatgtgatgggattcgtgattatatggggatatatttattgatgtgacgagtagtttagaaaatgctaatttgcgtggacgatgtattgttaagacatgagtgtcagagttcatatactagtggttacgctttttg

SEQ ID NO: 14635 - DNA, 500 bp, Zea Mays
gaggcgcctccactcattctgtggggtttttatgaggaaacttcacctaggcttgtgacggcggcactcaacatcgtgtctttcttgaaggcgacacctagaagatcttgcaccgctttgatggatgtcgatctgccaattcgcgtggctgatctgcaagccctgggttttcgacgaggctgagctctctctagctcacgattttcttgtggcacatctcaggttcttttggagtggatctgcagtggtgaagtcggagctgctttggttttgagggtgcaacaaagctccacaacgatggcaaattgttctttttctcaagaggtcgtggcttgttgcgagtgagtggcagcttagtatgggctttgactgaggttttttgtgggaagtcggagttgcttatcactatcttgggattaagctcggcaacgatggcgcacggtaggctacattggttgtgtgacacttttgtgtatttgtgggttgcttagggttagcta

SEQ ID NO: 14636 - DNA, 613 bp, Zea Mays
caactttggtacagatagattggtagctttccacatgaaaatttgagaaaagggctccttaacttgctcggtcaggcgcactgaatggagttcccatggtacagtaacctgaataagattaggtgtagtgaaccttgccgccggtgaactcatgccgtgattcacgccggccgccacgattcgtgcgttgtggtacgcggataatggctggcggtaaaagatctcgcgcgagggatgaacttaggcactgttactgctcagttcgctgtacccacttgcacaacgacgtggctggacggtcatcaccatggtggtcgccgttcatcatgattgtgccacgctgtgacgatttcaccacgtagctatgaccgtggaaagcttggaattaccatccttgaacccttgtatcagcgagggccacgatagatagctccggtgactcattctctcatcaccgtgggctcttctccattcaaattcgtcgtactcgcagtcgccctctataaattgagtgttcggcctgctctgctaacttatcatgaactcaaagcaccattcctcactgccgattagccaccgtagtgctcgaatttggattttcccccaaattggt

SEQ ID NO: 14637 - DNA, 600 bp, Zea Mays
cgggggagaatcgggcgcaggaagtcgcgttgtgggggaaattgctcgccgccgagtcatctccgccgtggagccgcgcatcatcgtcgccggggttctctgcgacactagcattggtgagatgtccttcatgaagttcgcatttccttcacctgcgtttagcaccactcctcgatgggtttaccactgtatggcggaagaacgccttacgccggcgaggcgccgccgagatcagtgagtagcgtcgccgttctgctcgggtatattggggagagatgggcgtgaccgttgatcctgggtcgacggctgcgattagatggaggatatcccccttcgcttgtacaatctgggccgcgggatcattgatctagggtcaggatgagagttcgacgtggtgaatcgtggaccatggatcctggatccagtggccttcatttgctaccagttcacagttatgaatcaatttatctggcgcgctggtttctaatcgtgcggctcacaacagacgataccccttcgcggctgaacaatttacaaaagagcccccggtctattttagatttaacccgccgtcccacgcactatgggctgtgtcttggg

SEQ ID NO: 14638 - DNA, 681 bp, Zea Mays
caaaattgagagaaaaccaagctccaaaatggtatgtcagagtgcctgaacatcattgccatggtacagtgctatcggggggggattcagagcacttcaccgccgtcgatcacccctccaccgcgattcgcgtcgccggccttaagattcgcgtgcggggtggattgataacgtcgcggggtaaggatcctcgccgacggtgagctggaggtcactccggtgactcatcggggcttccctttctaccttgcggctgggcagattggctcgccggtgcaccgccaccttccggccttgtgccacgtgtcctaaccacgccaccgcatcgccgtgactccctctaaactccccgtcgaccaccggagttactgccacgacggtgaacacgtgttcactgcaccagagttcttcctcacttccgaccgccgcacatcaacgcccaaattcacggtcaccgccgaagagccctataaattgaagcccccgctagctccgcaaggtcatcctccacccagccaccgctaatcgctagcagtccttcgccagagctcgcgaattttgaattcgccccaaatccctctccaccaccgagaaccacaccctaccatggccagccttccctaggtctgctcattaccttcttgttcctgttctagcatccttacgtgatggtgatgctcc

SEQ ID NO: 14639 - DNA, 402 bp, Zea Mays
gagattggtttggtacaagcaaagcagcacggcttcccgtttgccttcccttttgggagtggctttgaggtaggcacacacgtgacgtgacgtgagtaaccaaggaaaggaggcacaataataattcgtacgatacgagctactccagtaagctcgagcatgatcctacattgatgtagcaaaggtgaaggaatgtaggttggatgacgagtgtctgccatcacatcagcagcggccttggcctagcgggagagagcaaatcagcagatgaaaggcaagcagcaaagcgattactccagtagataagatatgagagaagaatttgtggtaatcgcagggcctctcttttgtatcggatcgggtaagcgaggttttggtactgtctgtcctcccccgctggcc

SEQ ID NO: 14640 - DNA, 772 bp, Zea Mays
gtggatggcggctataatataccagagtctagggtctcctttgcatgattacttgcgggtgacggaatagggttacttggcgcccaaccactagatcaacgcgaactgctagaccagtgatctacggttgggattcaatggtgtgaaggggtacctatggcatctaatcagagcctcccgaacggagatctaaggtccaacgatcgtcgtcaacctacagtgtgctcgacggtggcacaatctctcctcacggcggagcaaccatcggtgtgatcgattcctggcccctggtgccccacagctcgatctaaacctcgctacttgatgtggtgcacacccccaacacataccccgccatcatacctccgatttcaaagtgtcgcgcactgctgacgagaattggcggccaagcgacgtggattgttcaccggtgagtaatctgccttgtggcgcgggtgatcagcccttgatttccttgcgtatgcgcccgccgtgctccgtggtcttcccctaggccactatcatggccaggtttccctaggggccacaaatcaccaatggcgagcctcccttcacattctcctcacagctctcccacacacggtgctatcggtcggtgattatcacagaggtggaagaggagccgtataaggttttcgggcaacttatagaggcggggtggggagggttttgaccccgagtccaccgccagcggcaccagcgcacccaccatgcgcggccaaggttgttgagggattacggctgacttccc

SEQ ID NO: 14641 - DNA, 647 bp, Zea Mays
gtttgacaaagtcaataaaatcttgacaaatgcacatatactgctcccgccgactgacgacaatccactcattttgtacgtcgcaaccacctcgcaagtggtcaacgtgaccctcattgatgagaggaaagaggaaggccatatcattaagatctagtaccatgtatactttgttagtgaggtcttgtcggactccaagacatgctactcaaagatccaaaagctccactatgtggtcctaatcgtgaagagaaagctacaccactactttgagttgcttcccgtaatggtggtgacatcctgctgcctcggtgagttcatccaaaaccagggctctactggcaagatcgccaagtgagcgctcaagcttatgggtcaagggatatcgtacgcccctcgacctaccatcaaatcctaggtacttgtagacttcattgctaaatggactgaaacaaggatgtcaccaacgactatggatcaggagtactagacaatattcttcgatgggtcagtgatgaagaacggtgcaagggtcagacttgtcattgtttcccctcttgggggtacacatggatacgcaatccaactccactttaccatatcaaacaacatagctaagtatgagacactcgtcaatagcctatgca

SEQ ID NO: 14642 - DNA, 350 bp, Zea Mays
gacggagggaggttgcattgcatgagagtgactcgggcattcttctctgaccgatgcgggcgtaaaacaaacatcacaagtgtactacaaacgatagcttacgttactaccgtgggtcacgtttttgttgttggattagatggcttcgcgtacgtggaagaatctggacgcaaagcaagacgcgcggcagtagtatcctatgtttctgcgtgggcggcgactgtacacagaaatagctgtagaaatccaacacgcgcgctgtggcggccccaaggaagcaaggatgtccagtccagtacagccactacactaggtcgttgacctctcgtggattcccctgtgtctgtctg

SEQ ID NO: 14643 - DNA, 386 bp, Zea Mays
aagttttatacgctaagtattcttgaatcaggtcccgagtactgatatgttcagccacaaccctgaactctacttcagctaattggcaggggagccgagttacatgttgcataatggccttgtcgtgctgaagctcaacttcaggggactcgtcaccatagtcataagcttctcccttctcttttcatcagctttcacataaaaccattcacttgtctaaccggccggccacttggtgtgatatccaatcacagggccttagtatcctttcggtacacaaaattgtaacatccgaagttcttatgcagtccatgtgctctcgctttagtctagtaatggagttcatgtaccctgcaaaatccttcagcattggcactccttccttg

SEQ ID NO: 14644 - DNA, 731 bp, Zea Mays
ctttgaatcgattatttcaaaatcaactcaaagattggggcttgtgggggacaaatatcccctggctccactcgggggcgaaaactctgctcggggccatatgtcagtcgttcctcagtgacgtctcatcgtgtgtcgggcaatggaaacgacagaaatgggccgaccctggagtgcgaagggcccacgcccggattactcacgtcttgggcgtgatcacgttgaggctggtcgtttttcccgcacccgacatcctcaaacgccggagatagctcagagcggaggcgccgggttttcctcgggatagcgaagctaggagataagcagaaaaagggtgatcagcgtgtacgcgggaagcaccctacggtcgtgtatataaagccaagggggatccccatcactttcatctcattagcacctcacaacttggtagacatcgcttgtaaacacttcacacatacaaagccaccctaggaagtagggtattacactcctcaaagtggcccgaacctgctgaaactcgcttgactctctctctcgtgccctcggcacgaaccatcgagttacaatccacgacaccgtcctacccaaaagcaccatgagggtacccccgggtgtgcggtcggacactaaacaccgacacctatctcatcactctcaagtagatctttcgctaccttcgcggctccatcgactatgacctcctccttcgaccctcctcgatgtcgaag

SEQ ID NO: 14645 - DNA, 679 bp, Zea Mays
ggaatcctggccacggggagggggaatcgggcatgctaaggctcgggctagctccggcgagggaaggggaacactatggaccacaaccggggctcaggacgggactaatttggctagacatcatgtgggcgcggtgagctggcgtgtccgagctccagcgaggacaaattcaccacgacaggacagaattaagggaaaccgagcacgggagcgagttcctcacctcgggatggtgctcaggaaggctcgacgcggcttctgacggactggatgatcagcacggtgggcgcgggtcaccggcgagctctagcggcgacggcagagcacgagagagggtgagcgtgggcgaaatgaggctagggagagagagcaggtgcgggcggggctcaaaaggagctagggcgagtgggcaggcgacatggctggtcttctcggcgtgcgtgcgtgggtcaacggtgattgtgcggaagacggagctgacagggctggtcagcggtgcagcgagagagaaagagagagagggtgcggagtgaacggtttgccgcactgacgggcggcgcccgcgacatagagagagagagagagagcggggcgcgcgcacgagggaagccgtcaccgacagattggctccaccgagcagagggagagagggagcgagagcacgcggacacggctggtg

SEQ ID NO: 14646 - DNA, 289 bp, Zea Mays
gcccaggactcaagtacgataacatcaaaggagctgactcgctgagatagccctcatggaaactgcctaatcaagaatcgatcataatcctattttatgaaaacaatgtaaacaatctaagtaaattctttggcatttcgttcctaattgtcgtgtggcggtcacaacgtctatggtgacaccggtcattacatctcttcccacctctacgaacagcttgtcacaagctggatgtcgggggtagagatccttgaccttgaactgctaaagcagctcccaagtggtgtcg

SEQ ID NO: 14647 - DNA, 635 bp, Zea Mays
gcgtattgcgagattcaatagcctagggaggaagaagcagaactataagaacacagacgcagggtagatcaacgccggagagccgtcgccgccaccgccgcctcgtgcccttcatttgtgatgcctcagctccttcgtgtggggtattttccacccctcagggaccagacgtggttcccgatctggaacgaagaggaaatatcaggatacagtccatacgggggttaactgaatgcacatttgttcgtgggctgggcttctttccagacgagggaggtccacgggctttggtccttgttcccggccgggaagtgcttaaacgaacatggcctgaggggggtgatctctcataaatatagccaaagtagcttggagtacaagtatacaatctcctaaatagggaaagctataaccttatacaaggaagactataatcagtctatactaggctatgtacgactgtactttacatatatgtctaacacatgcctgcagtcgcagcgggagggtcccgacaaaagactggatttgaactcgtcgaagagctatataggcaagcctttggtcatgatgtccgtgaactgatgagaagatgggacatgaagcacgtgcacttgtctaagagcaaccttctc

SEQ ID NO: 14648 - DNA, 441 bp, Zea Mays
accaactagatctgaataaaaggaccgaagcacctctgccttatcactatgactagtcaatagctgctccctgtcttgaattttggctatgaaattttttcttttccgataacgagaccaagagtggaagaactttttattagcatcaccatctttgagccaggcaattcttgatctagtcctagccatcgagcggattaaggaggcaagagccagagagcatttcttcaagcgcccaagcagccatgtctccaaaacattaagaattctgctctcttttgccacttcaagctacagcaatatttctctggcaagctcaagttgcagtttgaagtttccaaactttttgtcactccaactttgcagcccttttgttgtcgccttgaattttagggaaagggtcttgaggggacaagaagactgctgaacagaaccccaggc

SEQ ID NO: 14649 - DNA, 735 bp, Zea Mays
ttgtttggatgcctgactagcttctaagcgaggcttgagcgagccaaaaagagtgttggcgcctacattgccggaaacccttgaggtctgcgtttccacaaagctaggcatgtataagtgtagtggcccacatgttaggatttggctcacctccttgctcctttgtgtctttgtcgagatctgtatccaccatcgacatcttcctcgcgagcaccacaaccacgatcggctcacctcctcttctactgtcgtccaccaacgagcgtcgtagccaccgtcagctacaccaagctccgccgaaaccctcacgaaattcgctggcccctgcatgagcttcgccaggtcccatgcgagatctgccgagcaccacgtgaatgtcgttgaccatcacacaagctccatcgagcaccactatgccccacgtgcgcgcaaccatgaccttgttcctccccggctccaccattgctcgaagacgacgatgcggcctcgtgaggacggaggagtttgaggttcgtctccgcctggccatggctttagcctcaccacattaacatcgggcacaatccctagctccaccctcgtcggccatggatttaagctcgacgctgctatatatgatgcccaccaagtgtttgatagattgtgtgaggtaaatttaccatggcaaagatgcgatgattcaatgcaagccaagttggacaaccaaatacacatttataatgcaggcttcgacaa

SEQ ID NO: 14650 - DNA, 286 bp, Zea Mays
gacgacgtcgcgcgccatgaagacaacaaacgtgagctcgaccgcataggcggaggccgcagcgacgtcgccgaggatgagggaagcagaggcgagcgtgaagatgagggaggatgtagccaacgacatcagtcgcatcgtggccttcattgtggaccatctcgtcgagaagacgagcacgggccacggtcgcgacgcgagtgggggacacgagcaagtgcgagcgtggcctcgtcagtgttggcgggcacatacagtagctttgggcacttccccatcgcgcgac

SEQ ID NO: 14651 - DNA, 705 bp, Zea Mays
cgcgcgggcaggaccaagaggcgggactcggcaattttctgtaccacgcaggggcgatttcggtcggggccggcgcatcgccatcgaaccgcgagactaccgtcgctccatccgggggcaacctgttcgtgtctgggcgctggtatgttcctagctgagtagatcgacgttatcttcacgttaggcgaattcgatccgtgcttcgtcgtggctgtatgcgcggcgttcgtcggggctgtgcgctaatggagttgcgacgccgcgtagtcgtcgaggtgaagaagaaggttcgtggccgttggatcagtggggaggctgcggtgtttgtgcctcgggccgttgatgttaggaggagcggccaggattaacttaaggaaacaccatgccctaatttctatccggaccattggatcacagggggggaatcagtgtcgtcggatgaatagcgggcgatccagattagaatggtcatacccccttcttgtaatgagatctggaccgtcgatcgcagatcggatggttgcaaacacgcgttagcttataaggatgagatctaatccgtgccactgatgttagattggacggcttggatcagcgcgtaccccttcgcgggtacgtttttcaaacgggcccctgtcatttatatatataaacccgcgctccactcacgctgtttgctgtgtctagggaattttcctcgccagc

SEQ ID NO: 14652 - DNA, 427 bp, Zea Mays
gctcggcgagcggcgtagagctcgccggagctatgtgctgggtctggggagttaggtgaggcgcggagggagtacggccaaggcttccctgctcttataggcgcgggcacggtgcacgggcgggcgtggaccagcgcgggcgcgcatggcttggcgcgggtgcgcgggctagcgtgcatcgggcatgtcagccgcggtcgagcatgtggcaccattgcttctgcccgtgttctaacaccgatagggcgcagatcttcacgaatttgggcaagatcgtcgtgtaagctttgttcccccgaccgagcggttttgggtcaagggcagagagttgtcgcctcgtcaatttgccagtgtcacaaggccgagttccaaggtaaatccctgccaagatcatgtcaaacggccgagtcttactcccaaatttttc

SEQ ID NO: 14653 - DNA, 590 bp, Zea Mays
caatgcccttgtcttggcaccctcttttgcttcatgtccttatggccatctggttgctgcagggaggcgatggacctgaagtagtagttgatgtcttggatcgtaagaagatgacttgagaactggaatctcttcaattttggtgtcgtagaattgacacgaacactcggatggttgcctacttttgcattgacctaagtttgctagtcctgaaacgatgctgcctctttttttctgtcgtgtgtaattcacggagggtagcggcagtttagagaccaccgcaggctgctaactatctttgatatgatcgtggtagccgcagctacaacgcttctgacgccctgttaactgaaacgatgtgttcaccgagatgcctttgccgacatgcttggtcccccttcacatgtttttgcttggctaactcgtgttgtttgatcggagcaaagtacttacaaagtaggaagtgtgccaaggtcgtagcatatcttccttctattgctgaggtgatatgacagaactgacctgcaacaagctttgttgtttcataaatacggtgtgtttgaatgcactagatctaatatgtagttggc

SEQ ID NO: 14654 - DNA, 461 bp, Zea Mays
aggatgaggagctagcacttgtggtcagccagttcacgcggttccacaataaccgtatgagccagcggtgtggctggttcaaggacagatgctacaactgtggcgatcccgaccacttcgttgtcagctgccccaagaagggaaaatcggagtctggcccgcgcgaccatcactctggtcggtgcaagggcaagtacaagtccaagggaggattcaacaaggaggcgctcaagaagaagtaccttcagaaggcaaagatcaaggagcgtgccttcctcgcctccctcagcgacctcgaccacgactccaatgatgttgtatcttcatcgagtgacgaggagactgagaggagggtcgaggacaagctgaacaggctatgcttgatcgccgacaccgcaggaggcttctgcaccatggcacttggtgaggacacggttggcatcggcggcgacaaagacatc

SEQ ID NO: 14655 - DNA, 616 bp, Zea Mays
gtggcggctaagcttgccgtactccccccagctcataggtcgatcggataaccttcgccgtcgtcgatctgtcacctttgcgcgccacgtgattaagctttagccgcatcgtgatgaaccatggggtgcatgtccggtgaccgccggagtgattgccacggtgaaagccacctgttccaagcacagagctctttttcccctccagccgccagcacaactttgcccaaattgatcaccaccgctcgagcatcctataaattgaagccttcagcatgttccgctaggtaattgtgcgtccagtaaaccaactatcagctccgatcattccccacaactccccaatttgggattacccccaaatcggtcgaagaacgccgcaagaacacctagccgtggctagcgcgatacaggttagctcgtcccctctgctctctcttttgagtgatctcacatacccatgatgctcgtcaacccatccgattgaactaaaccaccaccaatcgccgggaacgagttcaactgtccgcatggtctacggtcactgcgtccagagtaaaccaagtagcctttggtgaaattgtgttgggggaaatgcgcgggcagggtccgatttggt

SEQ ID NO: 14656 - DNA, 484 bp, Zea Mays
caaagttgcgctgccaagggccgtcagtcgttgtgagagggggaaccaactcactgtggctgaatctcgcgtctgcgggctggtagccagtcggggagctcaagcagggtcgtgtgggtgcctagactatgtgcaagtcgtcggtgggggaaacccagatcgtgcttgggtggaaatagctgaagctttagaggcagaggaggaagaagctctagaggaaggttcagctcccaacctagaatgttgttctgcttattttgcggggaggataaaggacatacaacaaggacatgccaagtcatgatctagaagcaaaaagaaatagctgaagtcgaagcgcggcagaatcaaccgaagcaggtcctgcataccgctttgtgctattctctgtatattccagagtatgtgcacaaccagcagcccacgacatcagttgcttcaacaagtcattctcaagctgcacgggctccgctgccaccaccag

SEQ ID NO: 14657 - DNA, 777 bp, Zea Mays
ccggacagcaagttccaacatccatgggcatctgtagcatctgcacttgcatctatggttgaggtaggggttactgctactgcacctgttgcatagctgctagtgtctggccaatctcttggactgcctgagtttgcatcagaaacatctcctcaatagtcatcgggggcggtggtggcaactgttgatgaggtgcctcatcttggggtccctgctactcttgctgagcacgccttccacctctatgtctgttgtcaggcatttgtagaaagcatacacacatcagatctgaccttgcagtctttcagcataagataagatatatagaagtcttcattacactgaacaaatgagcatcttcactgactctcaacacagccaacacaactactcagataaagaggaaagtggaaataaaaggttgcccaactaatgactaattttattaataagtacaccaagttgcaagggatgcccacactttggtgacaatcattacaaagatccaacttcatcacgagttcatcacgacaagcatcaaagcatctaataagcaaactaaaaccaactaagactgactaagactctaacactgacttaagcattattacagactccaactatatcgacctatggctccaaatctatttgggtcctgtagttaggggtaccataagcataatgaccacggggtggcgagcggtaatggtgctgagtcctgacaggagcagggtaaccatcctcctcatggcagtgctcggcgcgctcatcatgtag

SEQ ID NO: 14658 - DNA, 689 bp, Zea Mays
aacttgatgggctcggaaatacgtttttggcccattaaacctttcccccgccgtggcccaaactagtgaatccgtgcgcgcctaacctctctgcagacgggacccacaggtcagccccctccccccaaattgcgcgcctgccatcaccgtgtggggccctttggtcagactccgggggcgcgctctggtcattctccgggacgctgcaatgtgggcccgtgtttctagctcattccctggccgccatcgtcttcaatccgcgtatggcggaactccttccaagcaagtcggacccagccgctgggggtttctgggatcatcgcgaccttttcgcccacgcctccaacctataaaagctcggcctcacgacctccttaggccatagactcgaaccgagctcgcgcaccttgtccagaaacataaaatgggggaaacatcaccgtgggtgagggaaaatcgggccgccatcgtgggacagccaccttggcgtcgtctggcatccaaaaatcgggctgggggtgtgcgcatcagctcaggggtgttctctggtgagacagtttgtgccgtggggtatggttcaacaacgatttctcgccggacatgggattctgccgcagaaccactccttaccgtggccggtgcgtctgggggcacggactgcgtcatgggtcccctggcctcgatcgcct

SEQ ID NO: 14659 - DNA, 537 bp, Zea Mays
cagtgcggaagttctcctcagtcccaaatgtaaccgggagtgcgatgctcccaaggggatacaccggttgagggcccactccggagaatgagcgagagggtcccagtcgggatcctgggatttgcagctgcttgaacgtagcatgactgatgacgttgagcccagccccaccatcaatcaggacatgatgtagcttcatgttggcgatgaaaggggtggtgatgagtggtagtatgcctgcccctgccatgtttacggggcagtcaaatgccccgaaggagatagtggtgctccaccaccgctgaagtgggctgccttcaggacccttgggatcgtcgaaaggacctcgcggcgcagggacttcacgttcctacgggaggtgagctcccagcttccgccatacatcacgtacaacttcttgtggtggtcgttgtcatcactggagtcggagtctccagtgaggatgtccttgaggacttgctcgggggactgatacccaaggtcccgctctcccgcgaccgcgttaccttcgtcgac

SEQ ID NO: 14660 - DNA, 419 bp, Zea Mays
tgaaaagtctacagaaacgtcgccccgcccatatgtaaagcgctgcacgatcaccttccgcgccgagctgcatccatccccacgatccgccgcagggcgccgcaacgccctcgccgcctccggtggccactgacgtgtcaccccactcccttcttcgtcaccccatctccctttcccgccacttctccgcgccatttcccttgcccactcgcctcctacctactaataatcccctccagccagcaattctcccgcaaaaaaagacaaaaccctaaacccgcggagccggggtggagagcagccattccttcgctcccctccgcaatggcgtcgcgccgagccagcaacggccgctctcccctcgtgcggaaacagagtcagatcaccgcctttttctcctcccctaccccctctccgtc

SEQ ID NO: 14661 - DNA, 361 bp, Zea Mays
gctcatacgaaacttcgcttttgattctgcttcgtcacaagaggaagagcttcgggaaaatcagaaaagtcaacaacaaaaatttcaagaaagtcataatcaaatggccagagttcgctccactgctaggcttgatcgtgagggagatgagaccgaagctactgagactattctgatttccgaagcaatgaagcggtctgggctggtaacatcggaggacgtccctgccgctgaagcagagcaagctgatgttgaggagactgattctgaagatgattatagcagcgcggtgccgagcaaacccagccatctggattttggaaaatccacgatctccgaaggtgacctacctaagatgttg

SEQ ID NO: 14662 - DNA, 430 bp, Zea Mays
cggagccataggactggtcgtagatcgcagccctaaccttaaaagttttcttaaaagaaaagacctcttaaaagaatcgtctcttctttcccctgatattaacaaacccttcttctcttgctaccagatggaaggctcctttgtcattaggacatcctactactcggaagtggaaggattccctcaccttctacggagttgcgcgcttcgcattgggatccgcaagaagccggagtacatctggaaagattaccgcgagagcgaaattgagagatgctctatggcagtccacctgggagaaagcagaaactacccaaatcaccctcccttccaagtcaccgccactgggcaccgctttccagatacttgccaaaatgctgcccaaagagccctccgccagctatgccaaaactacagtagggaagtctcc

SEQ ID NO: 14663 - DNA, 668 bp, Zea Mays
acaccctgaagtcctaaggcggttcgtctgaaccctgctgagggctgaggcttcgaacctctaaacagtatctttccatgcctttttcctcccgaagcgtcaggccgaggtagaagacaactttttttgattcgctgctccttttccgaggggggtcgcctgaggcagatgatgtttcttcctagttcggttgccgaggggagtaggaggcggtatagtcgaggggagagggtgtaccttttgaggtgagtgtggaacaacgctcgtcatgttttttcctcggaggggatatggtcatttaatgcgacgggacgttctgcctgccaactgaccgttagcgacacacgtgctcgcggaattcaaaacggtcatcgtctagccacttttcgaatcatacattggtggctctgtccgtcctataaacctgaccgagagggagggctttggaccgttacctttgtagtttcaatcctttgccttcaaacaccattttcaccttctgcccagagagctctccgtcttctgtttgtttcgatggcggaaaagatcatcgtccttcctcccagtgacccgtggactatgtattccattaccgacgtggatctagaagcgttggttgatgccggcctactctagcatcgaaccaccggcccgcagcccgagtggat

SEQ ID NO: 14664 - DNA, 861 bp, Zea Mays
gctggtgaagttggatcccaggtcggttataatgttatttggtatcacaaacctgaatattatgtcttgtatgaattccactgctttggctgaggtcaaagaggcaatgggcttgtactctatccattttgtgaatttgtcaatggcaaccagcacgtgagtatatcctccctgagctttcttgaaaggtccgatcatgtccagcccctagcatgcaaatggctattttacaggaatggtctgcagctgctgtgctggtaaatgttgttgctttgataagaattggcaagcttcacatctctggactaactcggtagcatcactcttcgctgttggccaatagaaaccagatctgaaagccttcccgaccagagttctgaatgctgcatgtactccgcactgcactacatggatttcatctaacagctgcttcccaataaccgagtgaatgcatttcatgaggactcccgtcgcacctcttctgtatagtgtgccccctatgagggtgtagtgggctgactgccttgcgatgcgttctgctgccgccttgttatccggttcttcttcatttttatgtacctgatgataggctctctctagtcattggggtctgactctggttggctcaaggtgttgcactcttccgtctgatatgagaggatactcggttgtgatatttcttagacgaagatccgaggggagcctgagcccgactggatcccatcttcgacaacgcgtctgctgccgcgttgcagtctctttccacgtgatggaactccagccattcgaatttgtcctgcaatttcctgacgactgcacagtacttgcccatggaattagtcgagcaatcctagtctttgt

SEQ ID NO: 14665 - DNA, 631 bp, Zea Mays
aatgagttaagaattaaagttatttaactataaatccgcaacatgatttttttgttaagctaatagtcgatcaacacatcatacctcatctccttttcctagcatagattcgggtaattccaaaactgacgtagtcgcaagcaatgttgatatcgactttgggagagtagatggctccacggacatggttactacaggggtatagtaggttcctgagaaaaactcacgttggcatgatctcatgcaaaccaataagaaaatataggacaaatcgatagatgatacacgtacctgtgttgcatggtgatcactggcatctaatgaaccaactgtggcttcaccataaacatcgactacagagtcatctccggcggtggcatgagtagaaacccgtgggtcttcctccatgccggatgctaaggctgcctggtatggttgcagcctaatcgtgcgatagcctttactagagatcgatcttttgtagagcgctttcctggtggtggctcgatcgcaagaggcgttcttccgtgcagaaccctagcggcagatgcgaaccaaatgacgcagtagcgcgacgatccgtattgccgaacgagccgagcgagacaagccaagcgacgatccgtattgc

SEQ ID NO: 14666 - DNA, 469 bp, Zea Mays
cgtagtattcttgcgagagctgcccgtaggcggccgaggagaggagagaaaacgcaacaagcaagaaataatggcggccgccggtggtaatagtggatgaagccataaggacgatggagcgcgagaggtacgtaggcagctgcctagcttattggttcctgattgggactgctggtacgggctcacactataccacaacaccaaattagtgtctgacgaccgtcgctataaatagagaattagcatcaaattgttagtcggtatacattgccacagatggtgagtcggcatatgtccatattccaaccgagtgttagtcgttatatttatatgtgaatagtgtcgctttgtcagtcggcaattcatacctatagcatctcaatgtcagtcgcaaaaaaacatgtgtggcgcacaaattagttgctggcccaaataccagcctcgccgccgcagcccaaaaccctatctc

SEQ ID NO: 14667 - DNA, 738 bp, Zea Mays
tctcagccgcacatcaacctctctacggctccggtctcttctcctacctccagctaccaaacacggcggcgtgcccgcactcccgctcccgcggtagcgtcatggatgatgaagtcgcaaggaggcccgggttatccaacttcaacgccggtcgatgctaaatgatgcagatactaaagcgaacacgtgggggaaggtattaccaaagttcatggttgcggagatgctcgaccccgagagacgtcgtgctggagttccttccgccaggccctagcttcctcgtccatccgtcgatacgggaatgaggagggtgccgaccagtatatatagggacatacgagtctaatctagcgtggaactaggccggacaggtagaagattgagacggacttcagaagtttgttgcgaattcgtaggtgcgcacgcgtactagtgcgattctgttgcagccactggatcggagctcacgcttgaagtagatcctggccaaagtgccccacatgtcattgagcttggctgacatcatcgctgaggtcgtggtgacatcatgcgcggcaagaggaataaagaattcagaaaacaaacgtgggtgggtttgtgcggtgcatttgtacagcatgggctgcgtcgcagtttgagcccaataacaggtaagtttttcctatttttttcttttctatttgttttagttttatattttacttttaaatttcggtttcaatttcaaatatgaatttg

SEQ ID NO: 14668 - DNA, 532 bp, Zea Mays
ggtcggttcctgttggctataagatattcagatagtgtatgcctgtccaactgaagtaggcgtccacagagaagaaatacaaattgctattaatttgtttcgttgttttccctgatccgtaatttgattttagatgcagtactcgcgatccaacctatttgggatgcagtactcgcgcaagcgctacttcgtgctcgaggacgccgcgctccgctgcttcaagtctgcgccgtcctccaagggcgaggtaccctattgccaccactgaataactacaggccccctccaaccatgtttcattgtttttccctgatacgtaatttgattttagttgttttttgtgcttcaagtctgcgccgtcctccaagggcgaggtaccctattgccaccactgaataactacagcccccctccaatcttgtttcattgtttttccttgatccataatttgattttagttgttttttgtgctccgtgatttgattttggatagtgaagataaactgatgcataatccagcacttgatccgag

SEQ ID NO: 14669 - DNA, 544 bp, Zea Mays
tgcgtgtaggagtggatgatggcgtggaggtgcgcgatggaggccgtgatgtgctcctcctagggtcgactgcgccgggtccgtgacgcgcccccatacctggagggcagtgacgttggaggggaatcgcagagtcgatgagggtgtggaggtgcacgataccgacaacgaggagcgattgggcgatgttcacagtggggaaatcgcgtgattgagggcagggacgtggaacctgagtcgccttcccctctccatccgcggctgggtcgctggagcgcgggcggggacaccatgcgggtgcatggcggctcggacggcctccgaaacggccggccacaccgtggctatgcggatgcgtggaggggaaggagaggcaagggcatggtgggtcgggcggcctccgagactgccgaccagaccgaggctgtgcggaggggaaggtgagtcggacggcctctccctccgagtcggggtcacaatgctgcacgcacgggtgaactggcggggccatatgacagtgacaacttggagtcggagggagagg

SEQ ID NO: 14670 - DNA, 273 bp, Zea Mays
gactgacgataaacccgagcaactttcctgctggtaccccgaaaacacatttctcgggattaagcttccatctataccgcctcagactgttgaaaaccagttgtaagtcttcgatgaagttttttgagtcctgcgttttgattaccacgtcatccacataggcctccacacgcttgccccagtgatcggctaagcatgtttgaatggctctctggtaagttgctccagcgtttttgaggccaaacggcatggaggtataacagaaagcaccaa

SEQ ID NO: 14671 - DNA, 575 bp, Zea Mays
gggcaacgtcttccagatgcaataaaagatacatgaattaacaacaaccaaacaggagcaatatcctcaaagaaaaggtaaattttaatcttcatgaatagattttagtctcatctctcatcagacatcacagatgattaggcatgagtagaacatcatgttcagcccaccaccaaaaaggctcaccagcaaagtgcaggcctcaaaagagtttaatataattaaataactaatgacaacatagtgtcaacattgaaagatgctctgaccatacaagaaagcaccattgacccattcacgtcacaaggtgccagtacatcccacaccctttatttgcaatgtttttcttgctcgattcattaggtgaatggaatccggtgccctatgcttttgcccatcaacgatccagcagttgtgaacagtgacaaccaggagatgtggtagctgactcatgatgatcacgaattcacgattcagataactgagcttcaggctgaggatcagggctggatctcttccttttcatgtttgatggttcaacgatcattaagcatcaacataaagtggcaactcac

SEQ ID NO: 14672 - DNA, 328 bp, Zea Mays
aaatgggcaattgctctgatatatgtctattaaacccgacaaaaatgaatgcgagattgatgaattagtaggtataggagaacatgatacatgttttggttttcagatcgtccgactaatcgcgattagtcgggctgatcatttctctgtgctcgattagggtgttcgactcgattagtgttactgatcgtccatatcgtccgattagtctgcgatatggaacgattaatcgcctaggagccgatccatcgcgattaatagaggtagtccaacagtctagactggccccaaccatggtttaaaaggcggctaggcggaactaggcgcc

SEQ ID NO: 14673 - DNA, 371 bp, Zea Mays
gaaaacttctggcatgcttcgcaagacctcatgactcgattcgcggtacagattatcgcaggccagtagaatccttgacggattaccttggcagcgagggccctgggccctaagtgggacctgcaagttccgttgtggacttcacgaaggatttgaatgccttcggtttcggtcacgcgttttagcatgggccgactgatcccctttttgtatagctggcccccgactagtacgaagtcccggcttcggtgcttgaggcgtttggcctcattgacgtcacttgggtggtaatatccttgcagaaacagggttattggggcccgccaatcttcagtcatgatgaggttgacaatgtgatggccttcggcgtc

SEQ ID NO: 14674 - DNA, 320 bp, Zea Mays
gagatagtgagccttcagagattttttatcaaagaattatatgccatatcgtatctagcagtaatgtgtgtcgatcttgcttggatgcacttatatacacggtaggagacatgtttggaatgcagaaatttattagaacttgcacaaattttaccgaaattagttcaattttacaaggaaaattcccttataacaaaaaggctcctaataaggttaggatgaattaggatacaaaattaactaatttatatcataatccacttcaccacagatgaattgaggtgaacatgaataaatagatactcttgtcattgcccgtg

SEQ ID NO: 14675 - DNA, 566 bp, Zea Mays
tagtagggtatagtggtcaccctaagttaagtaagcatgagcatgttgcaccatcttaagtcatagccgacttaagccgattgctccgttagtagggtatagtggtcaccctaagttagtaagcgtgagcatgttgcaccgtcttaagtcactgccgacttaagccgattgctccgttagtagggtatagtggtcaccctaagttaagtaagcatgagcatgttgcaccgtcttaagtcactgccgacttaagctgattgctccgttagtagggtatagtggtcaccctaagtcgagtaagtatgcagattgataataaatagttcgagtgcctttgagaatgaagtctttttattgatgatgtattttccgattacagaatacaatgttgccccgatatcctttgaaatctggctaggggtaaaacttcctgagatgctctatattccatgaattccctatttctatgccatccatttgagtaagtcgatatgatcctagccgagtgacttctgctaccataaatggcccttcccatagtggtgataatttgtgctatccttccc

SEQ ID NO: 14676 - DNA, 291 bp, Zea Mays
tccgtggtgccccgaccttccactagctcggtgatgctagccccttctctgcactggcgctcctctctcttcctcactgctcgcgcgcgcccgtgcttcctgttcctggcgccagatccccttccccacgcgtcctcttctccgccaggcatccatggagccgtcggccatctcccctgcgtcgagcgccctctcctactcgagcatcgccgccatggtctcaaccctagcgctcggctgctgccccaggccgagttcctttccatggccgccctcaaccccatggtcgag

SEQ ID NO: 14677 - DNA, 1448 bp, Zea Mays
accaaactaatgtgtccaggaatagataattgcaaaaaaaacatagagagaaataaaaaacaaagaattataaaatggtaggcaaaacacaaaaaatgtctccttgtgggtgcttgaacctgtgagctccatctcatagttagcaggtcaaaccattgagctattcaagtgttttcaatatgtacccagcgctaatatagttaaacgcattagcctccgtgttgccaaacaaattgggcgccaaaaaacattttttgccgtcgtcactaaaacagacgccgctgtgacgcaattccactcatcctctttctcccccactccttttctttctccctcactaatttctccaaccctaatcgccaccgtcgggacacaaccaccgtcgacgacttgccccctcgaccaggtacctcaccgccgctgctgggacacatctgccgtcgacgacctgccccctcgaccaggtacctcaccgccgcccccttacctctcatcacgtcgatgacctgcgtcgtcgccgacttcactcgccgcatcctgctctatctcattgccatccgcatttctctcgccccttccacctaacatgcccatccacatttctctcgccaacccctaaaccctaaccatcgctagatttgggtcatcgcagacgaccttgatggtgaacacaaggaggcacagaagtcagaaaggtccacaagaagaagaaggtaagccacatgcctattacgggtagcacacctttatgcatcggtatcttatggttcactctgcctaattcttagttgctaactattaaccgcatcaatgtttagactctgtttttgtggttttcacactgtattataaattgatttttgtattagtttaattattcattcgttgttgtcagagatattgtaaattgatttatgtaatcattgtgcactgatacagttgtgtttggttccttacattgtgttatatgcagtcacatccatgttttagtagagaacttatctttctagtactggtagaaagagatgagaatatctccactttttttgttcatcagcttgtgtaaatctaaatcgcctaatcaatgtactagctagtactttgaacattatttaagcctgcataaagatttccacaaccaaacaggcgaagtacactgcagaagcctagatacaggctaatgcaagccaccaaagagtcccataatgcctttttcctttacttagaagccaacaattacgtagatcaggggaaaaactacagttatagtgcaaccacaattatgaaattgcagaatcataagaaagcttcattatgactgaatctacacatcttatctatttgctctacacatggcactactacctctttcctcttatcttccctgcaaatagtagtacctcttagcttttagtaaaatcctttacattatctaatacgcacagtat

SEQ ID NO: 14678 - DNA, 731 bp, Zea Mays
ggttgaaagaactacgggcagagaaatacttgttcatttatctggcttgactagtagggaatgacatcaataatatccttcataattattaaagcaataaggtgagtgacccctgccttaccttttaagcggtaaagcgtaaggcaaggcgacaccttaatcatatataaatattggccaatataggaaattagtctcgaacagaagtttgaaagtaccaaatagaagtctacaagttcagcataagcaaacatagtaggctaaaagtccaacataagtaggttccgatactctcacctcttaactaggtctcaatatcctcatcaacaatgggaggaaccgtcttcttcgccttcttccccaccgcatgcgttatcatcttcactcacacccaagtcatcttgtcgatctggctcaaagtcttcatccatgtcatgttgtgcatcttcttcgcctccctcttctgcccccattcttgcatgacaccttattccgatttcctatttctgcccaataaccgtacttccaccctgggtcattggattttgctctcctctttgaatcttgcatagggtcataagcatcaacatcaatgggaacagcagcagcggatgtggatccggcactctccatgacaatggtttgttctgtacaggtgtgagagcaagaaaaaaagcgaaggttcagctcactacttaacagcacagagtgggggacagagcagcatggag

SEQ ID NO: 14679 - DNA, 448 bp, Zea Mays
caaggatattgagccccgacatgtgggctcaggggcaaaatggaaggaagtaactaatgcctgtaacgcatgggcgatctccgagcgccataatgtttgtagtccatacagtattgatatgtcgcggctgcttcctcggtaacgcgcgagtcatgatggacgtagtacacacggcagcatgggcatgctgcctgccaggggaatggacagacacgccgcctgcggaatggactggtcgccgcctacccgcggaatggacagatctcattaaatgcggaggcgacacatcgcctgtcagtggaatggacagggctcaataaataccgaggcggcacatcgcctgccagtggaatggacagacggtgcgccctgtccgcaataaatgcagaggccgcgtagcctagaggccttacgttaggctccgcccgttggcttacgtcacgtgcac

SEQ ID NO: 14680 - DNA, 609 bp, Zea Mays
atgccatgagagctatacgcagtgacaatggcccagaattcaaaaatactcaatttgcaaccttttgtgcttctttgggactcgagcatcagttttcctctctgtatgtgccccagcataatggtattgttgaacacaaaaattggacccttgttgagatggccaggacaatgcttgatgagcataggacttctaggcatttttgggccgaagcgatcaacactgcttgccatgtttccaatcgcatctttcttcgggcttttctaaacaaaacttcttatgagctgcgatttggacgaccacccaaggtcagccatttcagggtatttggctgcagatgctttgtactgaaactgagtaatctggacaagtttgagtcccggtcttctgatggagtttttctgggttatgcattacattctcatgcttgtcgtgttcttaacctagagactaaccgcattatggatacttgtgaggttacattcaatgagactgcaccttgtccatcccatgtctttgagcctgcaggtctagatcagatgggacagaccatctttgtggaggaggagcacgacgacaccgattgggttgctcttgagccaacttcac

SEQ ID NO: 14681 - DNA, 601 bp, Zea Mays
cttcaatctccaactcatgttgcggttgcggttccaagattgggaaccatgcgcagaatccttttgtccccaacgatcccaagaaggattggggacgttcttgttcttcggatccatctcgccaagaatcttgcaactacgaacagctctagatcccacccgaggccactcttcttcaaacaccggcgggcgcaggggagttacgcaccaaccaccatgaaaaccagatcgggtaaagacagggagcgaccaaagacgcgagaggaaagcagtgcagtgatggaaggagtgcgaacccacatagtccggaggaaaccctaacctcgacttgggagactcagagccaggagacgcgacaggaggaagaaaccccaccgaatgggctagggtttgggcaagcggcgcgatcccctgactccaacccgaccaataacccgaggacgcagaaacagccagcgtgcacttaccttgggcctcaaagcgagaagcaggcgccggcccaacgaatgcaccatgggacgcaccttgcacatcctgaacagtgacgcgcggagaagacggagccccggcccagggagctttacgccttttctttttcgcc

SEQ ID NO: 14682 - DNA, 564 bp, Zea Mays
agtcgatttgtagctggatcatagggctacaagtttgctacagatgaattagcaagctcttatacgaaaatcaaagatctgggcactacaaatctgtctgtcacgcgctctgaatcaggttttcaatggtacagtgtccggatcagaacgccagttcagatgactcaccgccggtgaccgtgcgcctggattcgcgcctgccatggtgattcgtgcctagcgcagatggataacggcgaagaaatattgcaccgtggatgaactccggccactattctactccggccgccgtacccgcctgtgtcatggccgcttcggataaattcaccagagttagccacctcgcgaccttgcgccacgtgccctggtgtcttaccacatcgcagtagctcacgttatgcatatctggtgatcgcttgtgagctcgccacggtgaaagccaccaatcgcttgcgccagtgcacccccttctctccgaccaccaccacgacatctcaattttatggaccaccgctcggggagcctataaattgagcatgccttcagttccgcaaggtagtctag

SEQ ID NO: 14683 - DNA, 696 bp, Zea Mays
ggcaggtctaggggcaccacatggcaaggaaagatgatacaccccagggtgcatcattggctccggacctccacggaggaacactggacctctgtacgcacgactcgggtcctcgattacagacccggactcccaagaaggcatgtcgggtccctcggatgggccccaggtccctccgagaaaggtccggaccacagcaaggtcccgggacacggggaaccctggcatgattaggggtccggtgctggcacgtgtccaggccttgccctgcgctccccgctcaggcggagacccgctgctgccgcgtggcttgtggcccgtgacataagccgacgagcggagcctgatgtaaggcctctaaagccgcgcggtctctgcatttattgcagagaggacgcaccgcctgccaccatactaacagacgatgtgccctctcaacatttaatgcgtcttgtccacttcgctagcagacggcgtcagggtcaccctgcagacggcgcgcctgtccagtctgttgtcaaatagtgtgtccgtgccgtgcggcgcactgtgctcaccatcctttatacgagaagcttcccctgcacgccgaggatacgcagatctcggatgtcagggcgcgagaagattgctccagcggcgaacatttgtaactacaagtgctatatctgttatgtccctgggcccatatgtcgg

SEQ ID NO: 14684 - DNA, 635 bp, Zea Mays
tttttagacaaaactttggatagcatactgcatatcatattaatgtttgtgaagagatgtgtggtgttcagatttgagcgctcagagaggtgtcttccatctcatactcgagcatcgcaagatatgggtggggctggcgcgtagaatgggaagtactcgagcatcggaagatccaggcggggctggcgcgtagaatgggaagaatgagatggcggggtggtcctgcacttgcgatgggatgcgggccgatggtggtcctgtgcactggatggcgatgaggggtttgggttgcgattccttccatggtggcgaggcatggattgcgtttgggacgagaaggatatgggcagggcatccgcgatgcatggaaagaacgattgggcaatgggtggtcctacgcgtcaccgacaatgggattcctgcgtgctggattgctgcgaggcgtggatagcggcgaggggatgtgtttccttctgtggcagtgacgggatttttccttccatggctgaggcattaatcggtgaggggattgcggcgataccatgcggatgcaggggtagaggggagagggcgcgcacggggaagaagggagacactagcatgtgggttgtatgcgtcgtgagaaagcagaaccg

SEQ ID NO: 14685 - DNA, 440 bp, Zea Mays
ggacagtcacgtcagccgtccccgacgtggacgagcctacttcgaaggacctcatcgacggagaccgcgtcttcgccctacaggctctaaacaaataccaagctcaaacaaaagcatggtgcgaccacacagtcatcctgagggaattcagcgaaggagacctcgtactcgtccggacagctcggacagagtcccggggcaagctagagccaaagtgggagggccctttcatcgtcaagacgaaggcgtcccccagcgtgtacaggctaacaacacaatctggcgaagacctggaacattcctggaacatagacaaccttcgcaaattttttgtttgactccacagggccaactcgcccttgtaattccccaaacagttttattccggcccgcactcttttcctcccggggggtgaggtttttaatgaggcggagccatg

SEQ ID NO: 14686 - DNA, 699 bp, Zea Mays
taaggcattgcacccaaggaggcatgcttagttctagctaagtctggggccctccaagatgggaaccaagcccctggctcaaccaaatctatgagccccaataggttagtgcccatggttggagagcttaggatattctttagaatagcctcaggtggaggtgccctagggtaggatggcctcagtcaatatggccctagagaatgatgaccctaggcgatatggcctaggtatcacgagcgcccctaatcaatatgaccacatggtgcagggtacataagataaggcttacatccatcatactaaatgtgatggatgatgttgaggtcaagaaagtacaatatcaccacatataaagctacatgtatactcgcatacactatgtggtacgtaccacaataactatagccacgactgaacatgatgcatacccaaaagcattatagatatatgcatctacaccatttactaactacgacatgctcaatggcatggactcatgaacaaggcatgcattgtgtactacttcatgtcaatggcacggactcattacaataggatagatcagctactacaacaagacatgctcgatactatagcatgactaaggcatgcattgtgtactgctccatgtctattacaagatagaagtagtggaaccttttttgtgtaagctccaccatccaacatgcacgcaac

SEQ ID NO: 14687 - DNA, 614 bp, Zea Mays
gttttcatcaagacagcaagggagttatatggtttgaagaccgattggtagttcctaagaatcccgaactcaggaagaaaatattggatgaagctcatctttccaaattttccatgcaccccgggagtaacaagatgtatcatgatctcagatccttgtattggtggaccagaatgaagagggaaattgctaagtatgtatctgaatgcgacacttgccaaagaatcaaggctagtcatttgaaggtagcaggtaccttacaaccccttcccataccatcttggaaatgggaggacctcagcatggattttattgtgggattgcccaacacctcccgacaccacgcttctatttgggtcattatggataggttaaccaagacagctcatttcttgccagtgcataccacccacagggcagaaaagtatgcagaaatctatattgaccaaatagtgcgtttgcatggaataccaaggactatcatgtcagatagaggagcaccgttcgtagcacgtttctgggagcagctgcaagagtcacttggaacccatgtgataagaagctcagcataccaccctcaaacagatggtcagacggaaagagtgaatcaaatt

SEQ ID NO: 14688 - DNA, 722 bp, Zea Mays
gcatcttgtacactctctcaggcggcatcttctgtggtggctaccggaccatcgatcaccggcgccagggatatggcgaggtcatgactccggaagcacgtcaggacgtattcaactaccgcccgacagagcttgctgccctctgcctccaagcaagcaccgaggatctgatccaggcgtcggaggtgatcggcggcagagtccaacaccaggagggcatcggagatcgacactagcagctctgactctgggatggggctcatccctagtggcaccggtgtcgtgcttgcctcgctggcccactcggcaatgcgctggaccccggcgcggtgttctgcctggagatcctcgagggcctttctggtggcctccattgccttggggcccggcgtcgcctgggtcgcattgaactggcgatatgctcctccagcttcctctctttttcctcatcttcgagctcatgcttgaccagcaactcgcctcaccgggtgagcatttcttccctgaaggcgagatctgtctctcgcctggcgaggtccgtctcccgcctgtctaaggacagctccttctccttaaggtattcctcggtgagggtggcgtcgttggccttgccttcgagctcttgctgccatttctgcagcctttccaccgccttcacctgctgggcccgctgggcttccaaagtctggtccagggcgcttagcttggcctggtactccgcc

SEQ ID NO: 14689 - DNA, 322 bp, Zea Mays
ggcgacgtaggcgcaaatctctggtggctgcttcatcataattaccttcttcatcaaacaccgcatcatcgggaagatgtggacgaggaggtggtggtggcggtgcttgttgttgcgtctccaacacagcaagtctgtcgacgatctaggacaatcgtcaatccagcctctcgtaagtcttgccaaggttcatgtcaatgaaggcatcatgcactgacttgtggaccgtctcctgcatttgctcctttaggagcttgttgtttgcctcaagatcttgtcggctaacacattcatcgaagtatgtggggatccttgcttcttc

SEQ ID NO: 14690 - DNA, 356 bp, Zea Mays
attcccctcgagatgaactttcgttattcttattgctgcaaacttcaactgctcctcttaatccacgccgattcgctctgccttgcgctacatccgcgaagctagattgtttagtttggcttgaaatcgatcgcctgtgggaattgggatcggtggattgagttcagctgggatggtacggttatttggcttgctgtttccctggattgaagcatattgggtatttttgggttcgattgtgtttgcggcgcgagacggggattcagaagattggcgttcctcgagtgatccgattgcgagcatgctgtgaagcacttcgtggagggtttcgcctcgctacccaggtgcatggattg

SEQ ID NO: 14691 - DNA, 418 bp, Zea Mays
tccaaaaaataattatacatccaatgacctctgaccaaattttgaaagatgatcttactagggctgctaaaactgcacaacaagtcaaatcgacatcagccgcacctattaaatctgaaatcaagttgcactcttctgttttacttgctacacgtgctgatttggatgatctccatgaagctcatatgccctgttatgcacttgtacgctcgcgcatgcttgttccgcttgatgatataccccctgctgttgttaaccttttgcaggagtatgctgatgtttttcctacggacttaccaccgggtcttcctccgctccgtggcattgaacatcagatcgatctcatccctggcgcttctcttccgaaccacgccccgtactgtacaaatccagatgagacgaaggagatccagcgcca

SEQ ID NO: 14692 - DNA, 503 bp, Zea Mays
ttcacaacctggtcccaacttttttgaatggcaacggagggggagaggatccccacccgagattatattgcatgatggtccaaatcgaccaacatcatccccgagaggggttacaaattgattacaacatatgaggaagagagattaaagggccaacatcatttgtacgagggacgcaaggctagatatcatatattaggacagagcaccagttggcttgagcgcgcaaccctagcttacctttctcccccgcctatgtaggcacaacaaaaataaacatagaatagtaagagacaccatcctgtgtattagagacattacctataacctagatcatagccgattgagaagaatttttcagtctctggaacgcaattcaggaagtccagctaaaccttgagcagcccaactaaaccttgaggatacccgagaagataaaatagtttggacactaaaaggattaggataatacttagctagctcaccctgcgatatccaatttg

SEQ ID NO: 14693 - DNA, 508 bp, Zea Mays
gcgggagtcaccgtcggtgagcttcgggcgagggattggggtgggggaaatagcgttctgagttcacggcgatgtggtgaagctagtaggccaacctaattgctcgctggaccaacagaggggaagggagaagagggggacgacttaccggagaggaagacgacagcggcgcttccgcgaattgggctcgggcgagggaggagagtggtggctgaggccggtgcggggaaggaggtgctcggggtgacctttttataggcgcccgagggaaggggagcggcggagctcggcgggcgccggtgaggtgcatagcaccggcattaatgccgcacagcggcgacgacgagacctcacagcgggggggcggtaccgggcgagtacacggtcaagcggcgaggacgggcggtgccaaattttcctgtgcggcgaggggatgggcgaggggacggcgatggaggggacggcggcgagtcgtacgcgaggaggacgacgaagcggctgaccggtg

SEQ ID NO: 14694 - DNA, 367 bp, Zea Mays
cacctagctgtatttcaaaagctattgggatgacaatgtactctgtaaactgggaaatatatcatcaatagaaaggcttcaagagcgctcaaattattcattgtcgacctgcattcttacttaattcagagtgaccactataccctactaatggagcaatcggcttaagtcggcgatgacttaagacggtgcaacatgctcgcgcgtacttaactcagggtgaccactataccctactaacggagcaatcggcttaagtcggtgatgacttaagacggtgcaacatgctcacgcttacttaactcggggtgaccactataccctactaacggagcaatcggcttaagtcggcgatgacttaagacgg

SEQ ID NO: 14695 - DNA, 528 bp, Zea Mays
tagtgcttctgaaaccttttcagtatgtttgagcttcttggtttttgctttttccacgtgttctttctccttcttgattgttttttctagaactgatctgctctttatcttccgtgtggaggcctcagcagtaccctctagtgatttggaattgtcctcttcagtaaattttggattcttggcattagctttctccaatgattctttctccctcttgctcgtttttccttcaattgctctgctgctactctttcttgtggaggctgcctctctacttgaatcttcaacaggttcagcattggatttctgatcagaaggaaaagttttatcggtttcttctggttcatgaattttgattctgtcagccaaatatggatgaacctggtttgacatccatactttcccacaccacctgccagccaagagtattttcttcgtcctgccttgccttctggaataagtcctcagctttactggtgagtcactgggagagccgtagccaaatgcctcatagataactctattgta

SEQ ID NO: 14696 - DNA, 501 bp, Zea Mays
gagatatggacggacagcgacgcggcaccgggagggagggtgactattaagagcggaggcgcggtcgtcggcggtagggaatgaaggaacagtgcaagtaaagctgcggtgcggacttgagatcgagtgacttcacccggccggcgtccgcgcaccaagcaagctaaacaacaaccacagcaggccgccgcccggccggccatggcggcgtggatgcggtcgctcttctcgccgctcaagaagctctggatccgcatgcattccgcgcacagcaagagtacgtgcccagccagtcctccgtctaccccgccgcctctgtcgttcttgttccagctagcgctcgttttctctttggtggctggttcattccatccatccgtgttctgactgcgtggtgatgagcaggaaggggcatctacatcctgtacgaggacgtcaagtcgtgcccctgcgaggacgtgcacatcctctggtccatcctcgtcgactcgtcccactccc

SEQ ID NO: 14697 - DNA, 416 bp, Zea Mays
ttgcgtcgtggcaacaccaccacgaggtgagaatggtgggggaaatgaatatgcccccaaccatgataaggagtaccagtgctagtgctaggcgtgaatcctcgaccgcaaggaaggactctggcagcaacaagaggaggtcaatgccctcggacgtagactcaatagagtctacaacgacatggagcaacaatgcctcgacggaaaaaggccttgggcgcggaaggtctatgaccaactcgtcaagggagcaatggtgcccaatactttcttaaccccggacagaacatggctaaggcgccatgatgcttcgatacatccccgagccatacgagccagaggcaaggatgttgtaatagaacctctgcaacctgttgagagggctactgtacagtaggcacccaccggcatagata

SEQ ID NO: 14698 - DNA, 543 bp, Zea Mays
gtcagtctggttgggaacattggtggacaccggtggacatggaatgggtggtaccaattgtggttgaccgaaacatgtttgtgtaggaggacccccaggagttgtcataccaaaatatgggttccatggagtacgaaaggtatatgcagatgggtcattaggtccctgggaccaggtaggattggtcatatgggaatttgaaggagttgtaaatgttgaagcctgtgttgggtccaacccttggggctgccacatctgaggatcccacatgggtggggggaaaatttggttacctgtattggggctggcagcaggtggtcgaaaaggtgtgtttgtgttgttgtcagccattctggaatgaaatacataaatacattaagttggacaacacataacaaacttgaactgtatacgtcagacttgaaagcattgcaaatcagcttcatagaatatgaacaaaaggatgaagcattgcaaataagtttaatacaaaaggataaagcatcccacaacaggttcgtacataagtaagataagcttcaa

SEQ ID NO: 14699 - DNA, 322 bp, Zea Mays
caggaatagtctgcaactgttgcgcgggtagacgctacttctttgatagaaattggaacgcctcgcacttttggactaactcggctgcatcattcttcgttgtcggctagtaaaacccggacctaaaagcctttcctaccagagtccttgacgctgcatgtacgctacaatcctcggcatgaatctcatctaacagctattttctagttgccgagtagatgcacttcatgaggacccctcctgcacctcttctatacagcaggccccctataatggtatagtgggctgactgtcttgcaatgcgctccgccgcagctttgtt

SEQ ID NO: 14700 - DNA, 372 bp, Zea Mays
gtgagatagtacatgcacaagagcaaacatgcagcacacaatgcaagaacgaagatcacaacacaccgctctcactgaaagtcagaaatggctcagaacgatgccaagatctcactagaatgtcacaaacgagttgttgcggagtatgggagtgaagtattgctcttgggtgcttatatgatggagtgtgccatgggtccctttttataacttaaggccagtccctagctgttgctccttccttctaaatgtttttgaattcctgatgttctcgggggcaccggactagttcggtgcgccactagaccgagaatagggagtggtctctgggatcctgactggatccttccaaacccgggggcaccagactag

SEQ ID NO: 14701 - DNA, 425 bp, Zea Mays
cctagccgaagctgtgtgcaggcccaggtcccagtcgaggctacctcctgggggccaccgccaaactctttcttaggtatgctagtctgcagcctcgacaaatcgagcctacatcccaggggggccaagtaccaaggaagaatcagttacaccacacacaacatgggcaagtggtacacagataagtgctaataccttacaaaaagcaaaagtattacatccgctttcaagcggagtcctagctccatctctgctctacaggtatgaactacctccacaccagtagggccgcaaggtagctagcttcgagcggctcgccggcagaggcggtcgcctctacactgacggctcaccagcggtgacgactacctcagctccgagcggctcgccagcagaagcgaccacctctacgccaggcagcctcc

SEQ ID NO: 14702 - DNA, 463 bp, Zea Mays
atcgatacagagcgggaggaccggtggtcgccaccagtatttggcgatcgttgagcttttgctgtctcctgttctcctgcgatccgtgtccgccgaagatgacgttgacctctccgtcgacgcgcgggaaggctccaccccctccctcctcctgctgctggggttgtcacggttctcctggtcctccccgcggcgaggaggaggtagaggttggaagggtcggtcgtgcccgacggagtgcttgaagtctctgcagttccgaagggtgtggcgcatgtccttgtggtacgggcactgagcgtcgaggatgtcatccagcgtgcgttcgcctccgcgaggtcctccccgggcgcgagaggcaggtggtccggcggcgtgcacttcctcgcgaggcctcttctccagcgtttgtcgggttgttggttcgtatcgcgtcgtggtgcttctggcgtaggcttcgttc

SEQ ID NO: 14703 - DNA, 407 bp, Zea Mays
ccgccactaggaatggcaccacgactattgtcgtcctcgctagatcccttcaccacctcgcgacgcgcgctgttgatcctccacggccgcacctgggagacctcggctgcggtcaattgctcgactcatcctccgacgccgccatgattctcgcccggcaacctcgccagtcgttgcttgcgcggggataaatacgctctgcgcccgcctcctcccttttttcagccattcaccggggccagacactctgcgcaacgaccgccggtgagattcatgtcctccatgctccttttcctcccttgatcatattccgtcaagccgaactcgtagttacccaaaccgtggctggaatttgtcaccagacttgtgctcccgctactcgccgtgggtgtgcgccggtgttgcgc

SEQ ID NO: 14704 - DNA, 490 bp, Zea Mays
ctcgccagatccttagtgagagacaagttcgcatcatcaatctttctacagaattgtccgaccgaaagctacaaattgaggcgatgggagttcaggttcatgagcttcaggagcaggtaggtgtgcaggccatgactattgcagacttggaagatcagctccatgaccttaaccttgagctggaggaggctaatgatcacattgagatgcaccaccaggaacatgttgagatggaggctgaccttgaagatgctgatatggatgaggaggaggaagacccagaggagattgagggtgtttctgagttaaccaccgagagtggagcaccactaccaccagtcgactgagcacacccctcagcagggagtgttatgtcagttaataattaggatagattagttagcagcgaatgatgggtatgctcctcgaagtagccaaattttggttcttgggtgtaactggctaacctagactagagcattccttgcat

SEQ ID NO: 14705 - DNA, 625 bp, Zea Mays
cgacgatgtccaggtcccagcgctgaagaggccatgtgtgggcgattagcttcgtgaactgcgaagggcttcccgatcgtggagaaaatttctggcaggcttcgcaggaccttgtgacctgatttgcggcgcagatcatggcgggccagtagaaaccttgacagattacctttgcggctagtgccctgggccctacgtgagagccgcaagtcccgctgtggacttcgcgcagaatttggacgccttcggttcttgtgacacatttaagcatgggttgactgacccccttcttgtaaagttgtccttcaattagtgcgaagtcccggcttcgatgtttgaggcgcttggcctcattgatgtcggctggatgatagtacccctgcaggaacaaggttattggtgcccgccagtcttcggtcatgataagattgactatgcagtggctctcgctgtcattggttatttggagcccttctgggctgcggacgactggcgtgccgatgacatggtagaatacgtcggagggcagggcctcgcctcgggtggctgtcttggccaacgcgtcagcctcctcattcttggcacggtccacatgctgtaaggtgaaacctttgaattgcctctc

SEQ ID NO: 14706 - DNA, 313 bp, Zea Mays
gagaacccttgtgggttatatggcataaagtaccatctgcggtctgaatagaggcattttctgtgacaggtgtagaagagactaattgtgtctgatcagatgtcacatgaaaggaggcccctgagtcaagagcccaagacgatggcgaggctgtagctggtgaagtagatgcaatagcaactgaacctctaggtgcagaacctttgccacgaccacgagctgcctgcctgtcgtgtacggaaatcggccaacttctctggaaatttaacaaaacaattttcagaccgatgagtgtgcttcttgcaatgctcac

SEQ ID NO: 14707 - DNA, 325 bp, Zea Mays
gtccgattataattaggtgtgaaaatgtttagcgacactgtataaacttgacatgacaaaactgagagcttaagagtgtgtttggttggatgtatcagaagggatggaagggggcggccacagtttttaagagtcatatagaggcgagataaacaccagagtatttttttgtgtcggtgtcatccccaaaaaaattaggggaccgtgtcgtcccctgcctcatctcactttaacctcaaaccaaacacatcctaaatgctggtgtgagaaggttttcctgtcttatagcgacactgtagacttgacctgatacgtatgacagaaa

SEQ ID NO: 14708 - DNA, 336 bp, Zea Mays
aaaatattaacacaaaattaatgccactggaatggaccaaaaatgttttaatatgaattttctatgaatttattgagtttctaggtttatttatgtactaaaaagtatttactatattatttttactattttcttggttcactggaccgggcgtcaaattccagaaagttcaggggccaagatataaatttttccagacacagctatacccgagcagtactgtgggttagtttagggaaaagtggaggggtgtaatcgcaaaagaagctagtgaaggggtatcgttggatatgggccgcccgatcaggattctacgaccacgattaaatcggtacc

SEQ ID NO: 14709 - DNA, 275 bp, Zea Mays
gcttgattggggaatcgtgtattggtaccgctggccctgcgtccgtcgtatcgggtacgatctggatccactgtgcgagcaccgacgacgcggtagcttttgtagaggagatgcggctgctttgttcggaacccagctgcgcgtttgtgacttctgatacctctccgagttgagcttacgaactgggagcaatcgaattgactggttcagggtttctgcgagggttttgatattgtgctggtttcatatttcgttggttgaaccttagttcggat

SEQ ID NO: 14710 - DNA, 523 bp, Zea Mays
cgcaaccatttctgtaaagcacaggggctctggtgcaaaacttcgtaagacacagagacatcacgtgtggactgcgggttgatatgacaaaaagacaggggttcttaggaaacattactaggccgaaagggtatgagtttgtttcagtcgtccgatcgggcacggacggcccaaattagaacgcgcaacacacgaaccggtatctatttccacccgtgggattagagatctacggtggagattttacgagggctaatccagtatcgtccgtccgatctaaacggacggtgatgaactcctagaccaaagcgtcaagcaccgacccaatcttggtcgttcgttggccaatcaacgatccgaactctatctcctacctttagcagactgggcacgacagcgcccacacccaccgcggcggcgcgttcagtcgctggtggcgccatggccacggtcacggtgagcagcgctcctgtgagtccagcaggcgatttcaagaacggacaagatcgaagcactgctcaca

SEQ ID NO: 14711 - DNA, 506 bp, Zea Mays
ttcggcagaataaagaaaaatgttcaacttcaaaaaacaaggaattcaatcatcagatggccagagtgcgttcaacagctagggttacgcgcgacggagaggaagccaaaggtgctgaaactgccccaatctccaaagtgatgaagcgctcagggctggtagcatcggaggatgcacctgccgctgaaacagaacaggctgatgttgaggagactgagtctgaagatgattacagcgcggtgccaagtaaacccagccacctggatttcgagaaatccaccatctctgaagatgatttgcctaagctgttgaaattgggctatttcagtgaagcgaagaaagagctggtttgttttggtggggaagagactactccgaagccaggaaaggatgaagtggtagtcttcaaaagtttctttaaggctggcttaagatttcctttgaacaagatgattgctgttgtattgaagaagtttgggatctaccttcatcagctaactaccaac

SEQ ID NO: 14712 - DNA, 316 bp, Zea Mays
atctggtttggaaaacctgggcacctcctaagtgttggttttccctttagctgactgcaaacaagagatcctggactgctgacaggcttgctaagagaggtttggatcacccagctagttgtctcttatgtgatcaggaagctaaaactcttgaccatatccttgtctcttgtgttttcacaagagtgttctggtttaacctcctgaaaccctttggatttgggctttcatccttcatgatttggtgggagcaaatctccgagcggtcactcgtttacctggaaaaggcatcaactcccttgttgccttgggggct

SEQ ID NO: 14713 - DNA, 505 bp, Zea Mays
aagccatgattctatattcttcatactcttttgccctttctcttgaatttgtttatagggctcaattagggtttttattggggttgcacattttgccttttttgaaaaacccatttgttttgaacatgatacttttaagtataagcttagtggatcctttattcttaagtcaatttgatgctcatgcttaattttggttcacataagatgatggttcttgggttagcacttgagagaaaccctaggtgacactggggtgtcacaactacctgttggtttctgggcagatttggttgctgaatttatggaagatgcacgtggtttgttgccggaggaaggcggtggtgctggtcgactcagcgagggagttggtgctggtgtatggccggtcatggacgtagttgtgctctgctgccatggtgtagattttcctgcagaaacattagaccttgcactagcacatcgtccctgcacttccctttcagctttgcaagcaagatgaaac

SEQ ID NO: 14714 - DNA, 1225 bp, Zea Mays
gctcggcataaattttcccaagactcatcctacagctgcatggacggcgggttgttttaacacaagtccagggtctcttacacaaagttacaaggccgaaggggtatggggacactacgaccatccgatcggaaatcggccgccaggattagaccgcgattcacacaattgggcacgtcaagctcaccgtgggattcaaatcgaatggttccggttttatggagccctatctaattctgcccctccgattagatctcaacggtcgagacccacccaagggaacgggtacaccctttaatcctgtgcgttgctggtagatcggatggtgcacggtgtctagacgaagggggtatggtcacatcaaatccggaccgcccatctaaatccaacggcccagaggccaccatctttcctctacccttttcctctaatccacaccatccatcgcgagatccacggccacgcacacatcttcttccccccggtctcccacggcagccagggtagtggcgtcgcatcccgccacgacggcggctaccaaccagagaagccccgcgcggcacccagagcacccaaaccctcatggtgaattacgcagcgaaggtcgcggcaattgatacagggcattcttaccaatagtatgccgactgtgagtgagggcaacgacgaggttgactggcgacgagtcccagctgctccggtgagcatttctcacatagcttgcctccattcctcatctcgctgatcccgaatatgattcgcaccccttggcgaatcagctcgacccaccaggattggttgaacggcggcgcacgcaggacgcagttgcgacggctcgatggtgttcctcggccatcccccagcggcaacacacgcacgggacgccgcagcaccatcgtcggccagaaacgtcgcccgggaacacgtctacgccacccacgggggcactgcagagctctccaataatcctcgcactctcttcgctacccccgcagagaacagctgcgacgacatttctccctctcgatctctctctctcggcgggaaacgacaatggtggcggactggatgaggtgagaagaagaggttgcggggcccgatttatgtggccgaagccgaggttccccagcccggagttctcggcaaatccacaaccggcacagaggggagagcgctatagatttcaggaagtcgaagacccgactgtttcggcggctgctacgca

SEQ ID NO: 14715 - DNA, 336 bp, Zea Mays
gagcaattcatcgctagtttcctcaatactgctaaaccattcatcgtttggctcatcaaactcgcctctatatctcaaggtatactttagatacaccaggccaccctgactagacccggcagcagcctccttcggcatctcccactcaatcacgagcggccatactctgtaagcgatgtgttcttgaaccaggtctctggtgccaataaaagtacacacagtgttgaagcttctctggcatgcctctacatcattcccaagagcggtggctggcctcctgatgccgaagtgagaccagataggatgttgaataattcctcttatatcttccctctc

SEQ ID NO: 14716 - DNA, 296 bp, Zea Mays
atttccccctttttaaggaggtttgtcgacagttgaaagtttcgttcttcgaggacacacttacgccttcgatggtgagttgtgtacttgtatgtcaatttatctttcttcttaagacgttggtaaaattactataaacttatatgggaattctaatccttttcaggtgacttggcaaccatatcatgagctagcatttgccaacatccaattgagctccatgtgcgagatagacgaagacctttacttaatgaggtgtcccctcattttcttctttgctattgagtaccacttgc

SEQ ID NO: 14717 - DNA, 369 bp, Zea Mays
gttaaacaaaaaaattgcggggattgtcaatgttccaggagtgctctaagtctttgccggatggcgttactagcctgtacgcactgggggatgccttcgacttgacgatgaatggacccacccattttggctccagcttgccccgtgattctatccgggtggtccggacgagtacgaggtctcctttgttgaactctcttgggacgaccgcgttgtcgcgccaggccttggtctaggcctgatatttgttgagggcatgtagagcgaggatgcggtctccatcgatgagatctttgaatgttggttcgtcgacatcggggaccgctgatgtgcttgttcggggcgacccatgctttatctcttgcggcg

SEQ ID NO: 14718 - DNA, 494 bp, Zea Mays
attttgagtccgatggtgaatctgggagttcgtttccttggacgaaggagtcctcggatgaaggcttggattattttgttgcgttggatgtggctgcggcgaagacttcgtcgtgtatggagggtgccggggatcttcctagtgcgggtggagggcgtaggcggcgaagggtggtggggaaacatagtgtgggtgagttttcacggagttgcaggcgccgttgtatggggatggagagtggccgtctccgtgtaaaccgagttgataaacgagaattgttgtccttgccgactggggcgagcataggcgagggggatcttcggaagttttttgagggtgaggaattgaggataatgttgtttaattatagggagatgggtatcattccgaaggttgagccaatgtaataggcgatgcccttgccgtgtgtatgtaattgtaatttgtatggcgatgtggcctgttggctgtattcgtacgcttgtattggtccg

SEQ ID NO: 14719 - DNA, 1031 bp, Zea Mays
tggccaggttcaaacttgtcgccacaagtatagcacagcccattctgcctcctatactccttcaccaatctctctttagacggctcgggtaaggaagcagaccctctagtgtcggatttggacacaacaccccccaaacggccctgattgaccatcttgaatgacttctgtcgttgtttgtccaatattccttgttggatcctggctaacaatgctgctcgttccaccgaagctggcaaatgagacttaaccggtccttgcagctcttgcttcaaccccttaatgaaatgggccacaaaaaaagtctcatctaaatcatgattatggacaaaagttgcataccgcgcctcatcaaacacctttttgtactcctccacagatccagtctgcctaatctccagtaaggactgcatggcctgtgaatactcctccgacccaaacttcaacagcacagcttcacaaaactcttcccacgagcatggaccatactgaatcataaaaatctgaaaccaccgagacgcattcccctccatgttcaacgatgccgacacaacccacactgattcagggacccgataaagtgtgaaataatcaacacatctgtcaatccagatcctgggttcctctcctgcaaacctgggaaatggcatccgtggtatgggtagatgaccttcctcaatctcctcaatccgacgccctcccatgtcacggttgtgatgcaacggaacacccccatacatgcgattgttttctggtggtgcaggtgacggtgcagcgccgcgaggccgaccgttgagcacggacttcgacgactccatgtcccgcgccatctgctccagacgcagttccaccacctccttccccgtttgttccaactgttgcgcgaaacggactctctcctccatcgccttctgggccacgtcggccgccaagcttgcctgcgccagcaattgttgttgaacctcatccatgcccacgaccttctccgtgagctgatcgagcttcgccatcatcctctcccaccgatctgc

SEQ ID NO: 14720 - DNA, 616 bp, Zea Mays
gaccggtgcaagttcggccatatcgctatgcaccaacactcaaaacagagatcgagaatcagattgcagaaatgctccaaacagggatcatccagcctagcactagtgccttctcatccccggttatattggtcaagaaaaaggacaacacctatcggttttgtgtcgactataggcacttgaatgctatgactgtcaagcccaagttcccagtgcctgtgatcgatgagtttttggacgaactccatggagcagcttggttatctacattggacctgcgagcaggctttcatcaaatccgcatgtcttctggcgaccaacacaaaacagctttccaaacccaccaaggccattatgaattcaaggttatgccctttggcctttctggtgctcctgctacttttcaaggggcaatgaaccaaactctagcacctctgtggcggaaatcagtcctggtgttctttgatgatatcttaatatacaaccctacatggtcacaccatttatctcacctggaatcagtctttcagctgctcagacgcgacaagtggcagattaaactgtcaaagtgttcctttgctaaacaagaaattgcttacctcggacacgtaatttc

SEQ ID NO: 14721 - DNA, 379 bp, Zea Mays
cttgattcgaactcccccagaagcatcagaagacagctggtgggactaaggaggccaaacctcaggtccaggatgggtagaggggcgtgagccctccgccaccaccaccttcggatctgacaccaccgccaccgccaccagcgtcagaccgaccatcgtcaccgtgggggcagcgacaacaataacagtaggagcggcagcagcagcagcaacgacagcgggcgccccgcttccagggtcactggaaggtttagggccccaagtaagtttagacttttccaatgttcttgcgagtgtatcttttatgctgacaggtcttgacccgtcctatgcccgtcagggcctcctcctcttctgcttccaaggacgctcctccccc

SEQ ID NO: 14722 - DNA, 433 bp, Zea Mays
tgaacaaccatgtagcaagcaactccttgagggtgagcatgttgcgtgcgatggcgaagttgggtagcaccatggaattggtgatgatgtcgacagtgttggagaaatgatgttgaggccacagagaaggttgaggacatgctcaaaattctagactggatgaccaacgtcacggagggtgtcggtggtggtctttatgcgctggtagcagttgatggaagtgtcgccctgctgcatggagtggaactcatggcagaggaagatgggctgaggatccttgttggctcgtaagaggttctcgatggtgacctagagatcatgcgtagtctggtcgttgccatccatggtgaggttgaggatggagtcatcgacggagccgaatatccaactacggacacaatagtttgcttgatcccattaagggtcagtggga

SEQ ID NO: 14723 - DNA, 870 bp, Zea Mays
cggcgcgctgctcagggcctctgctctctgtctgcatttctcctccgccatcaccacccctcaccgtcggcgatcaccgtggctgagctttggcgagctctcctctctctctggtgagatctcctctctatgtttcctctctctctctctgttattctctgcagtgtgaagccctcacctctcacaccccctctcaatctcaaattcattcaaaatccttgtgaaatcaatgaatccaagtgtgtctaagtgtcccagtacacttttaagctttccctgcaggtttccatctccctttgagaggtttcaaaccctaaaagtggcatttccccacctaacccaatcctcgcacaccacgtgttcggtgaaatgcataaactagtcaaaatatctcaaattgaccccaactttttctagcacactccaactactaccagtacctctcacaccaaatttcacacctatccgatattccacacacatgtttcacaacctcttcacctttatgatgatctatatcgagccaattgccaaaaatgtttctcctctgccaaacttcaaaccaagcactcacttcactcattttcatacatatatacctatccgtgaagtatcagctcaattcccagtcatttcatgtcccatttcgaatttcaaactctatatggcacaattcacagttcaaacgccgttcacgcaccctttgacctctgtttctccaaaactctcagtttttgtgtcataactctctgtgtatgtatttattcacatttcatatacttatgactatgtgactaatacatgctcacctcttctgtcatttcagtgatttcgcctgcccgcctgtgcttctcctgtcctgcccggttc

SEQ ID NO: 14724 - DNA, 561 bp, Zea Mays
gcatcttgtaaaaaaattcaaagtttgaaaatttggaatttgaaaataaaataggaaaggaaaatagaaaaggaaaagaaacaaaatcttacctgcgcttgggccaacgccttcacagcccgtgtacacaacccacaattcactcacgtacacacgttttcctttttttgtattatttattcctcttgccgcgcatgatgtcagcatgacaccggcgtgacatcaagctagcaagatcacgttcctgcgcaacagaaatttgttacgaactcccttgatcgccgagttgttgggatttgatcccaagactctgattggatccgtctcaccgccatgtggactgggggcttcttccagctctacccgtaacagccacgccgcaacgctcggccatggcgccctggtggccgcgatgtgcccctgatccacccgccgcccaaccgaaatactcacccgtcgccaggaagctcggactccccttccatgtaggtcccacacgactgctgtccctgcaacctcggcgttatcaaaacagaaaccgtggcgagctcctctacagca

SEQ ID NO: 14725 - DNA, 588 bp, Zea Mays
aggagctcacaccaccgcggtcagttcttgcctcgaccgccgttccaaccccgaagaccagctcgacgcagcggaggccttgggggaaatgctcggaagtgccttgagctctaggatcaccggacgctgcctcaatttctcgacgtagtccatcaccgccgcggaatccgccgcgcgccatggcctacctactcttcgccacataaacccttggtaagcacttgaaccagttcggctcatcgttacacatgaattagacccatccgcgctcgggttgtctcatcggggcaccggttcgaccgattctggctgtccaccaccgtgtctcgcgggcggcgccatcgtgctcagcggactggctgggagaaagaaggtggacattggattgtggttacgcagatgatcttagatcagggcataggcagttctgggtcgtttgatcttgatcgggtgattctggggcagggtagaagtactttaaatccgcatcattggatgttgatcgaacgggtaggaatgcgtaccggttcagatcagtgcagatctaatctgggcggtcacatgctgatcggacagtcgacattcaat

SEQ ID NO: 14726 - DNA, 534 bp, Zea Mays
cttctccaccttttgcacacctcccttacactccccctccttgcctagttctgttcggttttacttggttccagcagcattagctacgtgtttgcacccttattcaactttacatttgctgattgattgtgctaatccttgctctaaagtgcagccttcctacagctccacaaatatctacagcgtgcaggttgtgtcctctagcaatcgctctatccaagcttagtggttgcactgctggttgcacgtcacccctgtggatgtggtaagaacgagtaagaccttgataatggtttttagttgagcgccaagttccacaacccattcaactagttgtaggacatattattttgttccttgttctcttgtctttgcacaaactatggcaggaccctcgggggttaaagaggatgagaacaccatgccacagtcccctcgttccaagggcatcatacaacattttgagccacaaatgcacatgcaacttgatggcctcgctgaagacatccacatcaccaacgcgcgccttggccc

SEQ ID NO: 14727 - DNA, 551 bp, Zea Mays
cttgtgagatgataatggctattactgcaccaggttttgttagatggtatgcactggaccaagtttgacaccatcattccttggttcataattagtctttggccattccatgctacaatggttgcatggtgtgattgcaaactgtcagatgtctcttgactctctgttctgaaattcttgtaccaatggagggcggtcgctttttcctggttctcataccaacaggtcaaatttcatataggtgtatcttctggctccacaaacagggtttatctataagtggataaacatgagataaatatcatggtctaaagatgaagcctgcaaagttcatcttatgtccatcatctcgccatgtcatgatctgccccttgtcaagtctggtcattgaattgccagtgctttgggctcttagatttggattttgcctatttagcagtaacattaccttcatcaatgctgccattggccagcaagctcagacctgtaagacccaccagctaactccaaaagaatgataaaaagtttccccaaaaaaatgattattggag

SEQ ID NO: 14728 - DNA, 624 bp, Zea Mays
ctacgggtctacggctccgccgcagcggccgtgctggccggccggccggcccaccgtagcgaaaggcgcgctggaatcgaaggcgtttcgactgattttttcccccctccatgtcttttccatcgcaccagctggtgaattgaatgaggtttccgtttgggcccgggtgtcgtcttgtcagatgtacgtatcctactagtagtactgtagtaggcaaggaaaaggagacgcagatcagtagagagagtagaggtccagctgcgcttcttttcgttttttttgtattcttctggtatttctaagcagcctagaaacggtagtagaattccaatttccaagccgtttttgtaatggagctttggagttgaggtttccatggcggtttctgtcgtcttgtgtgttggtgtttcggatggacgctgtggaggtacggccaaaacacagctctgatgatccagcgcttcgagttttcaatcgggtttggtctgctactttattaccccctctttatcattacagtgccgttgagattggcgttagcggcgggaatcggttcgggtgcgtgccctgtcccgtgcggcaagcctttttccgtctcgggctgcgagggcgaggcttggctct

SEQ ID NO: 14729 - DNA, 592 bp, Zea Mays
gcgtacccgaagtgctagatactcagagataactcgaatgaagggcaactgaactccaggtaagcaggaatgcatgccacgttaaaaggaggattcagatagaggtagatagacatcactacttgcaaagggataaccctctggtcatctatataagggcgaggggtacccctacgaacccatctcacctcgtcacaccccatcaccacctcatagctcattagtactctcatagaaactatgccacaaccagatcaacaggagaactcacactccaccgcccatagctcatttgtaacccttgtaaaccaataatactcaaatactaatcctcgatagtaagcagtgttttacgcattccagcggcccgaacctgtataaattcttgtgtgatccgacgtgcatccacacgtaccatcgagtcgcgatcaacagcgtcatcttgtccaaaagcatcatgtggggaaccccgtggagcgcagtcgggtcataaacaccaacaactggtgcgccaggtaggggtgcgacgttgattcacgacgactacatggctatcatcttcaacaccccgataatcttgaatgcaggggag

SEQ ID NO: 14730 - DNA, 1005 bp, Zea Mays
ccaaaacgccgttgaccccacaaaatgcattgttgcaattttaacccaaagctcccggggtatggtgtacacatcaaaataattctcacttttagccttccacattttaggatgatgtccgtcaaatgagggaaaattaagttggggtaaggttgcggctaaacgtgactgataagacacccaataaggatcttgcgcatgaatcacaggggaatgaaagacatcagacgatgggattttagatgtacctttgaccggaggtggagtcagggtggttaccaccccaagtccatcgctccggtgcagagatgcaaggtgaagatcgtgattccctggactcgcctgttgcagagataaacccagagaggttgatggtaaaaaccccgactccagagccccggtgtcgaacaccttctgagtagtggtgttcgcctctttactcgccatcaattcatccaatttatccgacagagatcccacatcttgacgaagattcaacacctcagtttcgatctgaggtttccagacagaaagatctctcaccactgctgtattggcatccagggattgcttgatagactcgttttgcagttgcaacgcttgcagcagcgccttgagatcccccacgctttgctccatgttttgaagatcacgttgcaggcgagtcttgtattgcggacggagaagatactccggaggatccgccaggattgcgaccagaatccgataccaatttgtaagacccttgacactgcagaataaactctccaccgtcagaacacaccaggaaccaaatctgagataacgagcaccgttcccggtactctcctcctctcacgaagatcaaatttaactggggtttccagagtacagggggaattcgctattacagagatcgagcctagctctctctcaccagatcgccggacgcagacggtattcagacttcagttccaacccaaaaaccctactcttcccctggctggctaaaaaccaggtctactc

SEQ ID NO: 14731 - DNA, 698 bp, Zea Mays
gatagagggtgaagtcgaggcttttgacgaagtcctcgttggtcgtggtgattactgcgcttgtgtaggggcccatggagcagtatcactgcttgagaaggtggctgtgaacatgcgaaggttgtaattcaaccagatttcacagtgtcagctgaagatgtaaaagaaccctctgtcgaagctattagtctagcacgaaaattttattctgaaatttggctcaatggtggggggagatagcagatgaagctatcagacaggatgaagaagaggtcatttcaaattctgaactcttactttttacatctgcgacttactgtctgtgtttattttactcttacatttttcttaggctcatcgggctaaagaagaagctaggaaagctaaagaagctgccaagcttgaacggtgcatcgactagttcgtgccatgcgaattccagtacggttgcctcgtattgtgtggattagctctggttatggttctgcggtcgttcggagatcgagttgaagtgtgcacggtttcggtgtctctcttcgcgttgcttggtcacctccgaccttgatcaggtataaagtcagttaccgctattcttcagcaaatttacgttgttattctgttacttttatatctaaccatcctatttatcaacctactgtcgtgaagatcgggccaccctagtactgaatataactcgg

SEQ ID NO: 14732 - DNA, 473 bp, Zea Mays
tggagacataacagagcacaagctggtccaccagaccaccactgcgtactgcagcaccggttctactaccaccaaccaaacagacctgattttgaagaaagcagtgagcaagtgacagagaatgcatatacaagtccccttcaactgtaccttccggcacagaccaaatgacaggatccagagggtctaccgtcacatggcacagcagatcctccggaaagcttcccgtctgttaacaaactgtacctccgacagcagtccgcccatccggtgcacagctgtgatcgggctgtggaacggcgtattttaacaaagacagacagcccccaaagctaccgataccgccacagagaacaaatcacagggacacgccaaccgagccttctccccactctaaaaatatgatgagcagagcatgcttggagttggaatgcacacccctgtggatccagcttatggacttaccctcgaag

SEQ ID NO: 14733 - DNA, 432 bp, Zea Mays
tgagaagtgagtggagatgagcttttttcggcttagattttggttcgggtggagaggagctttgtgcggctaattctgagttaggaaaactaaatattaatttacaacaattgccaccggttgaaaacaaactttgcatgccattcatgtggcgttctcccatagccagaattgctagggctcggtgtccgaccactatccggtgcggcggtgcctccgatcaggtcatagggcaccagccaccgcgtacatccactcctccattcctcaacggaagtttctagaagaggtgacaacgaacctgctcttatgttgtcgtaaaggtcatcggcacccaactgcctacgacatcgttgttgctgctcctgcatgcacaagagtcgggccgatggcctctacctccgatctgtgccctctcctcttgccacaaag

SEQ ID NO: 14734 - DNA, 590 bp, Zea Mays
ctcggagccctggcgtcctgtggcggttttgtcgaaccctgccgaaggcctaaccttcgaacctctgaacagtatttttccttgcctttttccttcccgaggtggaacacccgaggtagaagatgccttcttctcgttaattgtgataggatgaaaaatgaaagagaggcagagggaggagggcataccttttgaggtataatgcgaaacggcgcatagtgcgtgttttctcggagggagcatggtcatttgatgcgacgggacgtcccgactggtcagctgaccgtttgcggcgcgcatgcgcgcgagattcgaaatgatcgctgactggccgttgcgacccgcaccttggtgactccgcccgtccctataaattcacccaagatgggtgcttcggatccttaccttgccgctttcgccttcttgctttacatgccatcctcctcttccgtgccaagggctcgtcgcctccttttcgtctccctatgttgtttcgatggctgagaagatcaacgtcctccctccccacgacccatggcccatttcctctatcaccgacgaggatttttggaggtgctggtggacaccag

SEQ ID NO: 14735 - DNA, 726 bp, Zea Mays
gtattgggcaaccctacgatgaactccatgcttacatcctcccatttccatgatggtatggaaagtggctgcaaggtgcctaaatccttgctttcgtgacttgacttatggatattaagtccaagtttgcgttcttgaacaattgttacaacaagctcttgaatttaatcagtgaagtgtttccaccaaatcacaagatgctgaaacacgtgtatcagtgcaggaaactcctctctggtctgggtatggactatcacaaaaacgatgtctgtctagataatcacatgcttttctagaaggatcatgagaatgatagtaagtgtctaaagtgtggcaagtccagatatgtagaggttaaaaatgatgatggtgaaaaggtcacatcaatgatagcccaaaagcaacttcgttacatgcctcttgcacctcgtgttaaatgtttgtttcttttgaggaacacggctaggcacaagagatgccacaaagaacatgaaagagaggatactcatgtgatgacacactcatatgacagtgatgtgtggaaggatctagatggcatcgatccagaatttgctagtgaagcgaggaatattagaattgggttggcaacatagagtttcacacctttcaatacgaaagcgacatcatatccttgttggcctgtgcttgcaattccataccaccttccacctcacctttgcatgaaatatcattacaggtttcttt

SEQ ID NO: 14736 - DNA, 416 bp, Zea Mays
gctacaactttgctgcagagcattgatctagttacaatacaaaatcggaaggaaattcgccccaaacatggtctgtcaaactgactgaagaagattctgatggtacagtgaccagaaaaatctattggttcagtgaaccggccgctgtgaccccgcgcgtggattcacgctagtgaggtgattcgtgcacaccggcgcccggataacgttccacggtgaaaagatcttctcccccggatgagcttaaggcactgtttgtccggccactgtgtccgctctaccccgatcgccttgaatcaaccctcgccggagttagacacctcacggtcttgtgccacgtgcctcagcactttaaccacgccgccgtgactcgtactgacctatctagagatcgccggtgaggttgccacggttgc

SEQ ID NO: 14737 - DNA, 936 bp, Zea Mays
agatcttcaaattcactgtagcatatagatgatcaactggatgatttgtattgatcgcatatgttgtacatttatagattacaatggcctttgctcatggccacatgcatgtgagtgaatgagcgcagcgtgggcagcgtgaagaccagacatggtgatgtgcgcggcacgcgctctctctcaggtccttggtgagtgcacgaggaacgaacgtagaacgtgagcaatgtaggagacccagaccggcttagccgttggtccactgacacccccacgtagtctcgacgagcgctgtggtgacagagaagttgtccctgaagtcattgaacaatgcctaaggaagtcctttggtgaacacgtctgcgagttgccgcgagctagaacatgcatgacatggagctcatcaatgacgacattctctcgaacaaaatgaatgtcaagctctatgtgtttggtgcgccggtggtgcactggattccgggccatgtaaatcgagacgcggaatgcgaccgtcacggaggggaccttgtagagcagcttggcaaggaggtggcgaagccaggaacattcagcgatggcattggcgatggctcaatactcggcctcggcgctggacctcgatattgtactctgttgtttagatgaccacgagatgaggaagttgctaaggaagacgcagaagcccaatgtagaacgacgtgtatcaggcttctggcccagtcgacgccaaagtagggagtgatcgtagacgtcgcggcggtgcgcagctggacgccgaagccgatggtgcctttgatgtaccataggatgtgcttgacaattgtttggttcatgtctcgagatgcgtgcatgtgcagatacctattgcacgacgtaggcaatattcgaacgcgatgaacgagcgctggatgtgggcaacgcagtagacccggaccg

SEQ ID NO: 14738 - DNA, 617 bp, Zea Mays
gggcgcactaccgtggggcggtggcatgctccttgtgcggcggttcgccttcttcgcactcgaagaccagcacgccagctgtatgacttgtggaaccgggctcccgtgtcataggatggataccccagtgtgcatagggggagacttctcgtgacgtttcgaggcgagagcgggggagtctgcctttaaagaggggttcatccctcgagtagcagccatgccttgcttctctcccactcacggcgtcctctcgcctccgagcgctctgcgcccctttgccttcaaggtctctgctttgcattgccatagtttgtcatggccttgtaagttcatcccgagcgtgcccagactgagtgagtgctcgacatggtataccgcctgcttggatgggatgcgccggcgttcggcggaaggatttgcgccgacgccatccatcccggtgaacttgccgctggagagttcgtgcctttcgtcctccccaacgggttggtgctaccggtcttgtctttcctctgctggaggtgcgcgaccttgtgggagcggcgctcttccaccggtgcttggcttcaaggatgttcatcagcctcgcggtggtggagagcgagctgagccgtggc

SEQ ID NO: 14739 - DNA, 862 bp, Zea Mays
cctcatcttcggccctgcaacaagcataagctatccttctgatctaaggagtgtgtgttcttgggctatagctcactccataaggggtacaaatgtcttgatcccaattctggccgcatctatatttcaagagacgttgtttttgatgagaatgtttttcccttccagcgtttgtcctatgatcctaacactccattacgtaatcaatattttgttgagctatgatcctatgcgtgttcgtttgcctattgtttctttggatgcaacagatccgacgcaatccttggtgccagtaccatctcccactcaaacggaagagcctcaggattcagcggacaatcatcctgcgccttgtccgtcattagtggacgccaatccatctacctacactccgactgggacggcaccacctggtgtcccagcagatttggtccctgcttctagttcggaggagcatgcaatactggcacctgtgtctcaccctgctgaacacccgtacaacaccaaacttcggcacaatattcgcaagcccaagcaacgcacagatggcactgttacatactctgtggtacggtcctctgatttagctcctactcacattgttgctcttaatgatcctctttggagacggactatggatgatgagtattgtgctctcattaaaaatgctacttggcaccttgttcctcctcgacctagcttgaatgtggtcgattgcaaatgggtcttcaaaataaagcctaaaactgatggctcggttgatcgctataaggttcgactggttgctagaggattcaagcagcaatatggtgtggattatgatgacaccttcagtccagttgtaaagctcactacaattcga

SEQ ID NO: 14740 - DNA, 1259 bp, Zea Mays
gtttgacccacctagagtgcattcactaggcaaaaacttcaaacaagttgtattgatatgaccttttgcaaataaaaccctagaatagggaactcaaccctagtttgggtataatagagcaaacaagacttaaacaaaagaaaacttcaaaacttattagagatgaccataaattgtcaccttgaatatacttatgggatatccaaaccctagaagtatcaaaaactgcaaaaagaaccgtagaaacccctaaacctaaaccctagggggctaagtgcaaaattagtgcacttttggactaaagtgcaaaaatcatgataataaggtgtattaagtcatgaggttcacaattatggagattttcaagttaaaccttgagttttggactaatttgtaaaagagccacacttgaaccctattggctaagtctgaaatcaatgtaattagctcaactttggagctctatatctgccaaattataaggtttttgccctatgttaccacatcaattttgtagatctatcaaaggtgaacaactttgtttaaggggttaaacattgttgttatgaagaatttggagataaatacacccaaagttaggctttcaggctatttgaagtctgaatttggacggccagtgggtttgaacagactttgagctcaattctaagcaggatccagcaagaatttgttctggaatattatagcaaagatgaagatggtatgttggactacaactttgctgcagagccttggatacgagaaaatccagcttcaagttgctctgttagacaactgaagatgaatgccattttacagtgacctgaacaggatcagatcgacaacaatccctcgtcgccgacgatctttacgccgtgattcacgctgtcgccatgattcgtgttcacttgcgaggggataactacggtgagataaagatcttggcatgggatcagcttgagctcggttgcggctaagcccgccgtacccccttgctcatcggtcgatcgggataagagctcgccgccgttggtcgatcactgtcgtgcgccgcgtgtccaggctctttaccacgtcgcgattagtcacgcttggggatccagtgatcgctggaggaagcgccatggtgaaaaccactatacacttgcgccagtgctcctccccttctccgaccgccgcccatcatcgctcaaattcctggccaccgctcttgcctagtataaattaaagccaccgtgagctccgtaggatcattacgt

SEQ ID NO: 14741 - DNA, 457 bp, Zea Mays
cgtaagcaagcaagaaaaaagaaccttactaggatgagggctctccttctgccaatccatattaattggtatcaaagcccactaccatgacatcgccatccatcaccggtcttgacaccgatcctacgaccatctctaataagctcgacctcatcttggcccagatcgtcaccctcaacaagcaccttgacgctcatgaacgacatatcgcaggcgtggaacatgtgctcggcgtcgtgtacggcctactagtatctccgacccgacacccctaccccaacaattgtgacaccaccagcaaaaggccatagatgcaacaacttcggcaatctcatcaccaacttcgccaacactagcatcaccaacacaggcgatcgcccctacaccaacattggaggtcatggtgcctttgtcattgcctctaccaaccacatcactgatccttttcatttaccaa

SEQ ID NO: 14742 - DNA, 731 bp, Zea Mays
cttaatttgccatgtgatgctataatgaaagtgtcgggggcagtaattagggacaccctgattactcccctaacaaacgcacttagaggaataaaggacggaactcccaaaaggtgacaacagagccaccgataataaaaccgagacgtcccccgagggtgttccacctcgagcagggcctcacctcgcccaaggtcgacaccactcgctctacttcgctcaaagcctcctcagcccagtccatctcgcccgagccggcctcaagagaataggacaaaggcactcgaaaacacgcgggggacggtgcatttaatgtgtgtgccaacccgcactgtggcagaagaccatagtagcagacaagacaacaatcacgtccaacacagcggtatgattacgcctacatcacaaagcacgcacaccggccgacgccctctgatgggacgcctaacgtgacaagccgagcagacaagccttctggcgcaacctctccgcctcgctcgaccccgggctcagtccttgggcaagttctccgtctcacccgagctcggcctcggccaccgactgtgccgcgaatcccacagacaaccactccgctcgattgtagcgcatggctcggccagcgcctcgggaagacttctacatcaaccaaacagggactctgatctcaatgagcgttgcaggaaatctcgacatcatcacgcgccaagacgataacgcaccttgtaagaagc

SEQ ID NO: 14743 - DNA, 1268 bp, Zea Mays
gaatcagccatcttgatggtttgtgaatcaattaaaacaccacaggctctaaagctgtcattccacacctttacgaaagaaaagttttcatcctcacacctcattaaaagagttaacatagatagaacttcagcgatctggttatcattacaaggcacatcttcgtatatctcatacactgatcatttgcttatctttccaaatgatacatgctagcttcactatacccttcttattgagtctaacagcttgcatctgctcatcaaacaaagcgtcgcactcgcctcgaacaaatcctttgttgtcatgaagatcatagttgagtaactcaatgttaccataagtgttcctccagtcgtccgcaactacaactctacgttggcagatgtgcttgatgaataactctctattcatacttgtctataacaaagccggtttaaaatgcccttcgtcgcggtgtccatgtcgctctttagatttgtagccattcgatcgattgtcaacggacgtagtcgtttctgtaaatcctccctgccaacgccacctcgctgcttcgtccgccgcagaagctcctccctatgaagcgagtccatggcgctaggatcgccacccgacatggtcacgccgctactcgtgtcccaccctgaggtacgagaactagctaccccttcctgtgtgctctactcttgttgttttatgcacgtcccttgctccccactcctcctgacgccatgggtatcttctagaaagaggacacacaatcaacacgggtagagggaagaaagcattgtggtctccgtcggcgagagcgacgttggtgtgcgcgtcctcctcaacgcgttcgatgcgcgtatgctcttctcccaaagcggccattcctcgtcgcgcttcaactgacctaggtacgaaaagatcatcgaaattcgaatcgtcggtgttgtggttttcgtcacctgctcatcaccgagcaaggacgaccataacactcttcgaatcgtgcattctctgtgctacggttagtttctagccacctgctctgcgcactctgactccattctttctcatcgtcgagcaagaacgaccacaggacaggcgtgttcccatcatcgcctcccccggccacaaattccattaccattgttttacaataaaactatccgttcttacccagatttgtctgtgaacatcaaaacatggaagtcatttcttatttccatatggccaacaaatcttaacgccattacaccatataagtttctaatatatta

SEQ ID NO: 14744 - DNA, 1126 bp, Zea Mays
caagtcctatagccgaattgttgctggtttatagttctacaattttgctacagagcttgagtggagttgccattggaaattgagagtaaatcctgctccaacttgctctgtcaggcatcaaaaactgaatctctgatggtacagtgccctcaacggatcagaacaagcgcaacagaagaatcccaccgccggtgatctccctcgccgtgattcgtgtcgccggcatcaagattcgcgtgcggggtggattgataacatcgcggggtaaggatcctcgccgacggtgagctggaggtcactccggtgactcaccgtggctccccttctgctttgcggctgaaaccgataagctcgccggtaaccgccgcctcccggccgtgcgccgcgtggcctagccgttctacagcaccgccgtgacaccttaaggctgtcccatcgtcgccggggagcctgccacgccgcgggacacgaattcaccgcgcccgccttcttctccatttccggccgccgcgcgtcctccccgaattcactggccaccgcttcccctcgctataaattgagtgtccccgccactccgtaggataattacgcatcagttgcaccaaaccttgcaccggattatccaccagtgactgggaattgctcatttcccccaatcacggtttccgccaccgtagaactcaaccccgccgcggtcagcccaactcaggtcagctcttcccctctgctcccttgtctaagcattcttatgcgcctgtgatgctcaccgacccacccaattgaattggaccgccaccaatcgtcgagaacgcgacgatccagccgccatgttctcggtcaccgtgaccagagagttttagtgcgcgattggtgaaattaagttaggggaaacatcgattaaggtatgaattaggtgttagtcgtcggagagcgccagtaatagccccaatcggccggcgtaagtgctcgccggagctcagccgtgcttgaacgccgtcggggacctcccagtgcgaggaaacagaagttgggggacccctgtgtaaagtgtcagcgactgttttgaatagtgttcggactttctcgggttattcaaaactctgggggacctctgcgcaaacctgcc

SEQ ID NO: 14745 - DNA, 382 bp, Zea Mays
cgagaggagggtgatggcgggcgttggagagagagtaagggagagggagcgaaccatggcaagtagaactcgacgagggtgtcatggtcctggctgacctccttctgaaaatcgacttttgtcagggacatcacctcgtctttggtggtcggcaagacgaccgctgctaaggcggagaggagcaggaagctgagggttttgtgggagatctgaggggacaccatgatgcgacccacaggtgtcaaggcaagctccgcgttagctgggatctcagagcgaaagaaaactatggagattcatgaacaagaaacatgaaacggtgggagttaggcaaagacctggggaggagggctccaactcttgtaggggcctcgatgccgat

SEQ ID NO: 14746 - DNA, 440 bp, Zea Mays
gtttcagcagggaccggatcagaggaatcctcagccaaaatgtccagcatggcacttatttctgcatcactcggattcaaaggcatctcaaaatgaacctgcctctcgtcattggggatttcaccaagcgaaacaaccaaagcctcaacctcttcgggagaaggtcgcactctaaggcccaaaccactatcaccggcagaaggatttgacacaaaattgatgaaagccttggaaggaggcagattccaggctgaatatgcaacagaagcaccgatattcgacaccttgcctctaaaaatcatctcaagtcggcttaccagatccacagcaggaatccttctgttggtaacccgggtcgaatcagtgaggccacgatacagataagctgggtacgctctgtctttcagtggctaaatgttcttaaaaacaaaatcggcgac

SEQ ID NO: 14747 - DNA, 662 bp, Zea Mays
cgcttaatttggccgcgccgtgcgggtggtcggagataaggaagaacgcgggtgcggtgaatccgtgtccaccgtcgtggcgagctcaccggcgacgattggacagccgtagcgagtcacggtgtcgcggtggaaagcaaagccacgcggcgcaaggccgggaggcggtggctcaccggcgagctaatccgctccagccgcaaagcagacggggcagccacggtgagtcaccggagttatccccagggggtggcttttacctggcggccttatcgggtcatcggcgacgcgaatcctacagcggtggcgtgaatcacggcgagcggcaatcaacggcgacgggccaccggcgacgagcaagggataggatcttctttagtttaacatttactgtaccatggcgtcccatttcagttaacttgacagagcaacttggagcatgatttactctcaatttccaatgacaactcctcccaagctctgcagcaaaattgtagagctataaaccagcaataattcgactatagggcttgaactcatttgagcactagatcaaggttgaattcatactcaaagttggctctgttacactgaacatctgaatttcagagtggatccagcctgacagccaaactttaggcttaattatctccaatattttc

SEQ ID NO: 14748 - DNA, 342 bp, Zea Mays
aaaaaaaaaagggagacaacaacgtgctgggggaggcaacgagatgcttcgcttcttccttttaatccggggtctgaaaagtcgcatgcttgtaacacggtctcgttattaatcccctctacgctactgaacagatgacgttaacatggctctccgtgctaatctgcggtgctccgccccaccccggcaaacctaatgtttctagagaggtcccagctggaaggctagagcccctgctcctagtagccggacagtccaactacttgtacaccatacattacctgacggagggcagagcagtaattggtgccgccggggggaagaggaagaagacggcccgtg

SEQ ID NO: 14749 - DNA, 586 bp, Zea Mays
gtcaagagtctgaatgcctttgaaaatgaaaactttattgatgacgaggtctcccgattacagagtacaatgtttcttcgagaatctttaaggccttgctaagggtagaactttctgagatgctctatgttccatgagttctccacttctgtgccatccatttgagtaagccggtatgatcctggccgagtgacctctgatacaatgaatggcccttcccatagtggcgacaacttgtgtcgtccttcccccgttagaatttggcggaggaccaagtctcctactgcaaaggatcggtgtcacatggctttatcatggtagcgcctcaaggtctgctggtatctggccgactgaattactgtgttcaatcgctcttcttacagcacatcaatatcctctagcctggtagcttcttcttcagctatgttttcgaagaccaaccttggtgccccgaacatgaggtcggcgggtagcactgcttctgaaccataaaccatgaagaacggagtatttccatgcagagctcgactaggttgagttctcaagctccaaaccacatatagcagctctctgatctactttcctg

SEQ ID NO: 14750 - DNA, 488 bp, Zea Mays
cacgagatcaccaggaggagggaaaccttgctgctcggtatggcgcgggatcaccaggaggaggaccgtggcggcgtcttgtgtccggcgatttgtgtccggtcacagcccaatgcgatacggcctggtccaaccaaacgcttaacaacgggaataggttatagtgtaaatggattacaggttaaaacgctcattggttataacaacaagcgagtggtctagtggtaacgctactacctgtgcaaggtcaggtcgctggtttgaagctctacgggagcaatttttttgctaaataaatctgagcaacgattactaaaactcatctatgaccatgttatttcatcattaaatcgaccaaacaaggcaaattagcgatgacgatatcaaatctaatctgtgtcaaatttgtttcgtcaaaagtttgtttctatgacgttcctgtcattttcgtcattcatattcaagcctaatctttgtcaattgtaatt

SEQ ID NO: 14751 - DNA, 396 bp, Zea Mays
gtaactgtggatgggctttactgttatgttgtaatgccttacggtctgaaaaatgccttgccgacatttgtacgggcgatgagtaagacctttggtgacctgattagggacaagatagaggtatacgttgatgacatcatggtcaagactaagagagggtcgaccctagtggaagacttaaccctggtctttgacaagctacgggcaacacgcacgaggctgaacccggaaaagtgcgtctttggtgtctccgcagggaagttgctgggattcctggtttcgcaccggggcattgaagcaaatctagagaagatcaaagcaattgagacaatgaggcctccggcccgaatcaaggacgtccagaagcttacggggtcactggccgcccttagccgc

SEQ ID NO: 14752 - DNA, 547 bp, Zea Mays
cacgcgcgaaccattctcatctagctgtcccaaactgatgataaagttcctcaacgcagggatgtagtagactctggtagcagcctgtgctcaccagacgcggcggtgaatacaactgagtcggcacccttgatctctaggtcggaggcgtccccaaacttgatagagcctctgatgctagagtcgatctcggtgaagaactcccgtcggctggtcatgtgatgagtggcgctggtgtcgaggcaccatccttcgatcatgtcgttgttggagccatcgctgaggaaagcgcgtgctttcgactcatcaaggtggaggagtgacgttgcagccggtgccgctggaggtagctcgatgcttgcgtgtgctaggagcagagcttcctcctctgcctccgcctatgcgacgttggcctggctgcgtcatgactgtcgacattccctaggccggtggcaaagcttgccacagttgtgatagccgtcatctcgtgtcagcttattgttgccgacagtgctgccttggcacctccgcgggcaccaccctcagc

SEQ ID NO: 14753 - DNA, 972 bp, Zea Mays
acaagctcaaattaaacactccataagacactactattttctagctcaatactagtgaatatggcagttgaggggagttttgagacttggagttgttgcaagcaatgaatatgactttggtgtagctcttgtatgtcttgaaagctagttagggtgtatttataactctaaccaccccacataggcgttggagagaactcagcgaaatcaacctaacaaatcaattcttagggcaccacttagttgaaagttgagacaaagaaacatatactgttggtcatggccgtgtgctccactgttgcagtcagatcatcgttgcaagagaactcaaaggctacagttggatctgattcgacaccggcaattggaggacgatatgctcccgcttcttgagggatcgcgccaccgaagtacaagatctctcgcatcagcttgctgtcacgaggcacttgcatgtcaagtctggacggtccattctgccgccactgcctctacttcctctaccaccaccgtcgccactgattcctctcccaccgacgccacctctgcttcctctcccaccaacgctgctctccactccaccgccaataagagcacgtagtcgaataaacgcaggaaacaactacgaagcgcgggaacgaatagaccggggaggaaatcttgtcacggaaaattgcgggatgctaggactcaaatacgggacgcgtgaatatttgggagaagataggaaaactgttggatgtggtatttctgatttctatggctaaaacgagttttggggtatgtttatgtcgctttttagacttgctctaagatagataagtctagtggagaaaaccaacgtggcacaagacggtccccacacaaccacctcggcccgacgcttctaacgacctctgtcctcctctagtgacctttgtcctccgttcaaagtactctcacaaacactggcggaagactcttatggcaagg

SEQ ID NO: 14754 - DNA, 658 bp, Zea Mays
tgctattcgaggccactagaacttgccgatcattgagtttctgttgccttttgttttcttgcaccctgtgccctccaaatatgacgttgacctccctgtcgatgcgcgggaaggctccgcctctacctccctcctgctgctgaggctgcctaggctcgttaggctctcctcgaggagggggaggcggtagcggctggaatggttggccatgcctaatagagtttttgaaatctctgcagtttcgcaggggtgtgtcgcatgtccttatagtataggcactgggagtcgaggatctcatccagtgtccttaccccaccgcggggtgtgccgcgggctcgagctgcgggtggcccagaggtgtgtacttcctcccggggcttcttttcctagtgtttgtctggttgttggttgtctttccaaggaaccagaggtgtgggctttgtgcctccaatgaggtcttgagcccgctcatccacggtgatgtaaatgaccgcctccctgaacagttgttcaaagatggcaggtgtttttttggagtatagctcagacgaaaaccgggtaattagatccccgatagaagtcttcgatcacagctgctttggcatcctcggggatgtagttcctcattgtttgaaatcttctgaggaaagagaggagg

SEQ ID NO: 14755 - DNA, 441 bp, Zea Mays
atttccatgatgaaagtcaccgtaccattcatcatcattgtatgaattttcttgacgaaactccctgtgctggggccttcggtcttggtcatcttgggtgaggtgacatatttgctcgacgacttcatcaatcttcctctgaaggtcagcgagccgaagcatcttctctctcttcttttggacctgttgatggatagcttccagatccctgatttctaggtccagttcctcctcctgaggtgttgggctggtagccttcctcttttggctcctagcttcacgtagtgtctcttggttagtgtccagtggctgcaatgcagcccctggcgctgctgtcttcttcggtggcataacgaaggtcgatgcttgccgaaagtggtcgaatgagtttaccggaggtgggcgccaatgttggtccttgttcttggatgatatacatca

SEQ ID NO: 14756 - DNA, 325 bp, Zea Mays
gaagatgccagagattttgagccctccaacagaggcaacagtgccaaaggtgcagaaggcttctgtcgcaactcccaatcggagaaggatggcaaacgtgctggacgttgtgctggaaacgacgaagaccttgagtcctgctctcgcaaaaagtcactccaactgaaaccaagtcataggccgaagctgaaactagacatgcagaagtcaaagttgcgcaaattcacgctgaagccgaagctaggccttcagtgcccaccgaaacagagcctgtcgtacttgaagaagaagcgacagagcaaattgcaagtgaaaagatcaaaaa

SEQ ID NO: 14757 - DNA, 422 bp, Zea Mays
ttgatggcaagccgatcgcgctatggtcagggaaattggggtcgtggtggcgtggacgggtcccagggacgctaataagggcacgagtgtggccgaggggtccgggaagtgggcgttaactggtcaatcctagagaaaacgcagcggtcgttgcatgcgggaaaagaaagatgcacatcagagggggcccaccagtcataggagccaaggagcgtaagcgggtgggtgtccgacagaccggacctacctgtagacgatccgacggacgcgaggattgcgatggcatccgcggtgttcggcttcgcggttgaggacaaagctgatgaagtcggcccacagatcagtggcagagaaaacgagtgcgagcgcggaagacagacaagtgggccccgatttctagcttcctagagtatgtccgcgaa

SEQ ID NO: 14758 - DNA, 481 bp, Zea Mays
gagaagccatcgttagggcacggaggtcaacccaatgcgaaactggacaacgaccaaggcaatggcggtcccacggtgaatgttgaggtccatgacattctgaacgcggctcggaatgtcgagcaggcgctacaggtgagttgctctgcgagcatggatgctctaggtcaccgaatcgaactcctaatgcagctacgccaactcggtcttctgccctacttagaagatgaaaagaaacataagcctcagcgcccccgagagatagaaaggaattgaaaaaagcagagcgatgggcgtactcaccgcacgggcctccatgatggccaatcacgcctcaatacctgcaacacgggcatcacacgttcgtacggtcaaccgagacgcctccagctgaccccgcagcttagccatcgccaacagcggaagggccgaggacctgacctcgcaaaacggtacatgaggggtgggggaagaagcaatg

SEQ ID NO: 14759 - DNA, 926 bp, Zea Mays
gggagatatttgcagcagagtaaagatcttggcaccggattggctcggactcggtcacggttatgttcgtcgtacccacttggtctacggctggccggggtgatcctcactggtgttagccgcttaatgatcatgcgccacgcgtcttggaagcttagcacgtcgtagtgaacctgtgtagcaagcccgtccatcgctagaggccttgccacggtgaaagccacgaatcacttgcgccagtgacatcccctctctccggccgccagtgtgccttcgcaaaattggatgccaccgctgatggaacctataaattaccgccctagtgagcttcgctaggtaatcatgcatccagcgcacccgcccgtgtctcggactgtccaccagagctctaatttagagtttcccccaaatccattctccgcgccgctgtgaatcgccgactctaggtccgttcataccctccttgcccttgttccagcacccttggatgctatagatgcttatcgacccagccaattgaactagaccatgttagatcaccaaaacacattggattgtcctcggtttgcgccatcaccgtgaattgagggatgagtgtcaccaggggtagaaaaaggtgtcaaccgagttagggctttagtcgttgcgcattccggccggtacaagctcgccggagggcacgctcaccgccgatcgacgtcggggacttgggtttgtaaagaaatagaaaaggaggggcctcggtgcaaatgtcagtgacacataggaatagtgcgtaggattctttatgggttatttatatgatcggggtcctctacgcaaagtggacaccgcgggcgcgcgcgcgggcgcgtttcgcctgtcatgggccgacctgggctgaattgaactcgttactgttcattctttctctttttctttttctg

SEQ ID NO: 14760 - DNA, 423 bp, Zea Mays
acctttcttttcgtctaccagatggaaaacccctgggtgattaggatttcctaatgctcagaggagggaggctttcctcaccttcttcgaagctgcgcgctgcgcttggggatccgcaagaagcccgaatatgtctggaaagagtaccgtgaaaatggaatggaaaagtgctctatggcggtctacttgggagaaagccggaactacccaaaccaccctcctttccaaattaccttcatcgggcaccgcttcccagacacatgccagagcgttgctcgaaaagccctcaaacaactgtgccaaaactatagccgagagatctttgagactcccctccgatatttcccacccagcaacaaaaacaccccaacctgaaaaaaaagactccaggctctatcaggaggagatcccatagaagatgat

SEQ ID NO: 14761 - DNA, 2114 bp, Zea Mays
ttgatattatctgcttacaattttgttttctcagagttaattccaagcagtgtagactcccaagcattagggttgccttttcttcttctgcccataggtatggagcatctatttttacaaccttgtgttgcttctagtttattgtctttccatgaattatgtctagctttgaacttgggaaaattgcgggtatttgttgtatataaatgtagcactcatacaacttaatgagcacctaatggtaatagggtgtccacttaaatgaaaactatccacttaacaaggtatatattgtcggattcccttgcaagttaaagtgtataaccaaacttgacatgctgatgcatctttctgcatgttgattatgaacagcttgggtagactacagaaataccaaaaaagattgtcccctagcttctgaattcttcaatcatatagcctctaaaacaacaaagccaggggtagctaaataggatactaatcatgtaaacctgacagcatcaaaacaaggctaactttattagggtctgtcgacagagcagaactacaagaaaccaaaagtttggactctgaaatataagttgtttgttattccccataagaagtcgtaactatggaggtgaatgatttaaggtgaatgatttaatatattcttctaaagcagcagaacccagacccaaacatgtggcaagaaagaatggaaagatatcttacgtaaaatcactgcctttaggaaaaactgccaaccaaaggggtccttcctaaaaaataaacattagaataaaagttgaaggtaaactatacatagaaaatggttttttatttctcattacatgtatctaggtaaagaacatattccaaaatataaagaatggtgtctggggatcatttaaatgttgaacacacattagttgaataattgttgacatacatcatattctatagaactacgacatattgtttccaagtcattatttaacaaatactaaatattatataatggggaattttatggcacaaaaaataagaaataatgctacataacttgaacatacaagcagatatatagtggactaagaaattattccctttttctaaataaaataaatagtatgagataattaactaattaagcaagtgagtataaccattataattacaaaaaagaagtctggaaacatgatgagtatacttcaatggacaaatttgaaagtttagtattgggttaaaagacaacgaaaccacacaagacttgtcatcagtattttcattttgacaaattaaactgtctttctcaaattcaagggttgcagagttctttctatcaccaatagacaatgttggccaagattaatgtctactatgatgtagggtagaaagagattgatgacccgaatatgcaccttatgaggaggaacccacctaatgtctcggatcagcaacaaaacagcaacaacaaggtacatgttctcaacaaaagtcctgtatataggcaacttataagtgaaggcaccactaattggtgggagaaaacattagctgacacccagattaactcagggtaaagcacgagcgagactcatctgatggtctatgtgaatcggagggtctcaacaaataggatgttggaagcggtaaccttcttacaccaagagcggtggtagcggtgcgtggagcgtaggtgggcacggatgcgagtgtgtcatgcggagcgtggttggcgggcgtgtcttgcgggcacaacatgcgtggatcgcagacgagcgaggatggcagacgcgtcatgaggatagcgcaggaaatcgcgacatgcggagagcacgggcgtccacagatgaagcgcggcgaggatggaagggggcgtagatggtggcatgggaggaggatggaagggggacacgaatgacgagggcaccgaggatgggagcaaggggcgacaccgaggacaggaaggatgcgaggaggacgagggcggggtcatgggctcgcctgtgcatgactcccttggcctctaaataatagtagagatagagactaggtatgtgccccatgtgttgccacatgaattaaaaaatagtataaaatatagatatataacgacaaacatcactaca

SEQ ID NO: 14762 - DNA, 917 bp, Zea Mays
ggaaaaaacaaggacgaacttgcgaatgaagggtttcaggatctcattcattaaggactaaaatgtttatggcgcattcatgaggctagaggacatcaccaaaaaatcgaagggcccttgctgagtgcgaaatgttgtcttgtcaatatcggccttatgcgtcctcaataagtgatacacgctgcgaaggtccagtttggcgaaaaactgcgaaccttgcagttcatccaccatcagaattgagtacttagcatcagtctttgcggtcagctccctgtagtcgacacagaacctacaggagccgtcagccttcttgaccaagagaacactgatgtgcactcccttatgatgccttgttgtaacatcacatcgcattgatgttcaatctcgtccttcaatatctagggatatcgatatggtcgtactgctataggggctgaaccgggcagcaacctgatgcggtggccctgtcgtctcggtggtgggagcccctgtggttccacaatgatgtccgcaaaagaggagagtagggcctgcagcagatcagtcgccgtgtctagtgctgcgcattgcgtccctggtgtgcccactccctgccatatgagatcctgaccattgtgccaaatctgcattgcgaggtctctgaagttccacaatattggtcctgagggctgaagccactgcacacctaaaatgatgtcaaatccagcaaggggtaatgtatatgctgtgagaacaaactatgtctgatcaatggagaactgaatgttgtggcaaatgccatcactgatcttgtcaccatttgcgaccttcactgatagacctggtcggctgaccacctgcagctgccacattctcttggttgaaagtgttggttgactcgaaatataccgggcaattaggggtgtgccatgaat

SEQ ID NO: 14763 - DNA, 918 bp, Zea Mays
tggcgggttcatttcgcagatttccaggtactctttagaaagaaagtcagagccgaaggggtattggccattcacagacgttgcattaaaagttgatggttcaaattttataaaacgaagtggtaagttggttctaatctcagccgccagatcgctgatccatgatattgatttaaaacgtccgagatcgaatctgggtcacaagattctgatcgtacggctcgggacggtcctaccgaaggagtatcatgtttctaatctgagccctcaatccagagatcgacggtcgaggcaacactaagcgaaagggtatgtgtgttatgatcccagttgtccacaccggatctgacggtcagaactgttcttctccatgtgtgcggactcccgacggcgccgcctggccaccacggcggagcatcgccggacacccccaaattcgaaccccatacccattacttggatcccaaatgcgctacacgtagaggacaccaaggagaatgcaacagtccctcccttaccttcatccatgccgcacagccacccgacgccaacgcccagcaactccattctggcgagatccgaaatctgcgacaccggtcaccactgtctcccgaactgatgccagcgcacgccggtgagtttccctcgagccaccagccgaggccaagtggcttcacgagcaagtagcggcacacggatttctctccccccagcgcggcaatggaggccaagggagcacaaccacggcactgagctccaattacccccttcctatccgagcacgacgacgcagccagatccatggcggcggctgggcgtggtccaaggaggagagggagcggcgggccctcccttgccgcaacggtgctgcacaattcgtccacggagtcgccatccaagttctcaccccaatttctc

SEQ ID NO: 14764 - DNA, 333 bp, Zea Mays
cttcatcctattcccaggttggtcacggcaaggagggtaaatatcaagggtagatatttcagcttttctgaatcttcaacagataactgatcccccttccttcagtcagccttttctccatattttgattaagaacagggcaatcaccattaacagagcttgttcattagtccaaggtctaccaagtctctatagatttcatagacccaaacctcctaaaatagaagttatggcatccaaaagttgactacaaattctggttaccatttctgtttacctgaataaattttcagttttgttcagttgaccctcccctttcgacagaggcctttt

SEQ ID NO: 14765 - DNA, 466 bp, Zea Mays
cagggctctggttagcctcttgagttttagagagatcctctctagatgaccacaattatgaattggctggttccaggaagttgccaccaactcatgaaagcctggcattttggtctagaaactctcaaaatgaaatctccttctccccttatcttcttcttcttttagctttaaaatcaaagggcaatgatcagaatcttttgaggccttgctaaataaagtagaagctggaaacatctcttcccagctcgaagtacagaagacatggtctaatttaacaatggtgggggcctgtctctggttggaccaagtatatcttcttcctatcaaaggaatttcctccagctccaattcatctatccatcttctgaatcttctcaacagggccctgttgatacaggggttgttcttgtcctcagacctgcaaatctgattaaaatcacctgccaagatccatggtccatca

SEQ ID NO: 14766 - DNA, 384 bp, Zea Mays
ggattcgacagaagagcgctccacccacggcaatgggcgagtttgccacgttctgcccacaccagtgaggaaatccactggatttgcgacccgattggttctgcagcggcgccaatctcactccctagggcactacgaagatcattggccaaccacacaccccaattttgcttcaccggtgaaggacgggtgcggcagcgctcgccaccattcatggcccgcagcgatgatccgaaggttatttcacagggatggtggatcaaggcgagggcgcacacgcaatttggaaaaggaatgcgaggattttatcctcaggcaacaccatcaggcgtaacgacccccgcttcccccggctgcgacgaagtcacgcgcagaccacccacc

SEQ ID NO: 14767 - DNA, 693 bp, Zea Mays
ctgcgagtcattttctgtaaagtacacgggccaatcaataaaaaaccctagacacagagggcacccgcgcaggatggcgggttggttcctggataaccgaggggttgttccgcaagatgcgcacgacgaaaggatacgaggtgatataggccgtccgatctaatgcttgcggctgcgattagattttatcgtgctatgaatcagtgtgtgactggcgtcatcagatcggaatccaatggttatgattttatgaagtctgaatcgcctcaaaccgtccgatcagaaccatacggtcccgattgactcgccacggggaaagcaagattgaatccccaccgcgcattcacgatcccacggctaccaatcctaccgcacttcacctaatctcgaccacccatcaagaaatcgacggcccgcgccatctcttctccgcgctcgcctgggtacggcgactccactgtgctagcgacgaacacctgcgaaccgcggcctagcgctttaaaaccccaaccctgagcccgatagcctcaacacaatgcagaactaatggtgaacacgtggatgggtaatttacctgtagtggcgcagaataattctccagccacggaaccgagctgactgcgacggaggagatagcggagcgaagaattccagactcccttcgaccccaatcgcttcttcccagctccgtaa

SEQ ID NO: 14768 - DNA, 373 bp, Zea Mays
ccattatggacagccaggtcattgggcgatgtagtgcccgaagaagatggctcagcagtagtcagctcctagtggtgacaactgttgagcgtgcataatccaccccctcgttacaatgatggcggcaatgaatcgtagctcagcatttttcgagggcaattcggaagcgcaagtggttcgaccaccaaaaccctaagacatgaagagtggcgccatatcttgctatatgtattaaccaatcttgaagaggtgttgtcatacatggagcaatttcttcatgaattctagcgtcgatcaagggacccaactccataggaatatgatacccttcttacagagggtgcgagaaatggattgcccaatttcatttcct

SEQ ID NO: 14769 - DNA, 845 bp, Zea Mays
ccgggcctcctctacccccattattgctggcgcaatagaatcgcaacaaccacaaggtggatgcgggtttgtcccggccgagcgccccatacgaacttcgccctagccattataaaatctggggccgccatggctgtcgcacatgaaactcaagcgcatcggcgtactaagcttgttgattttggacctggagcttcgccatcgatcaaggaatatgggcgtggcaacatcggccaagaactcggcctatacaggccggaattcgtcgtcggtgcttgcctccaccgcagatccgctatcctccatgggtaagacctctccatggcaacaacaccggtgagtcctccactgttgaagacatcatatcgtagtaagctcgtagcaccatttttagcggtaatcgggggcagaatcccgatttgggctgcttcggcggggacactgccgttctggtgctggtgtcgctgtggctgcgtctggtggagggtgaaacctaggtgaccgtcgatcgacccgccaggatcgggattaggttgtctgggtaccggttcgtctgggtgatcgacaaccgttggatcttgagctgacgtgtgagattaggaacgcttacaccgtcgcgctttattaaactgggaccgtccaatcgacgatccgagggctgagggatggctcgggcgtggtcggatctcgggcgatgatctcgaatccaagggtctgggtcttgtaccggtttaggcacggatggatctaatcgtgactgttggttttaatccgatggcagagaaacattcataccccttagctgtggcaaattagcataagagcccttggaatttaccgaaaag

SEQ ID NO: 14770 - DNA, 391 bp, Zea Mays
tgattttaacactgacctggacggcgggttgatttctctgttttccagggactctttagcaaaattgtcgagacgaaggggtataggacgatcctagccgtccgatcggttgcgcacggcccagatcagatcttttgttttcatgaaccggtatcaattgatgaccgccagatcacgagctaagggctcagattcatctgaccaaccggtaagaaggtccctcaatcctaagcatccatctaacagtcgacgactagatctttatcgcatgaaggggtacgtatgttatgatctcggccgtccattcaagatcgacggcccacaacccgttcgcacccgatcaaaacctggccctccatttcggatcaaaggactcccacctctctttctt

SEQ ID NO: 14771 - DNA, 678 bp, Zea Mays
cagggattggagtcgctcaacgattgttccctacagaaacaatagctgctttggatcatctaaaaaaatcacgctgttatttcttgagggccggtccaataattcaccaggtaatgaaatccttgtatgggacaacctagtactgactgacgaacatgtggcttctaagccgcaccaccctagctatggttttaggggcgaggttagggtagatttcgaggggattttctagaatacgattctccgtcacacagccgtcagtacaaacacgaagccgagcaaagatctagcaaacggaggacatgaaccctagaaccaagaacgcaaccaaaggttgaaaggcagaatggtgccgaaccagaaaaaatccagcgcggtcgcaatagcggagggagcgaggtcggttcaaacttgtagcgctcggcgcgaagaggaagaggcggcagagtgagcgacgacgccgagaagcccccacgtggggccgaagcgagcgtcagagagagtgtcggccaaagcatccaaaggcatagtgagctgagattacaagagagctaagagacggtataaggattttttaggtcgacctgaaaaatttgcgtccacgtggacaacgtatctagccagctttcatcaatctggaccgtctgtgcccacgatagccgcgtgcgtcagccgctc

SEQ ID NO: 14772 - DNA, 639 bp, Zea Mays
ctctttttggagtcttgttgcgcgcaccggcagctgcgacctgcgggtgtgacgtgcgtgtgcgtgtgtcgccacctgcttcctccgttcgaaaaacgtcctctagattccctcccaattctttagggccatggccagctgagatcacgtcggatcggatcggtcggtcaccgtcaaccaaacacgcgcacggaatccgtttgaatggagagaaaaaaaatccaaacgacgctgccattgttgcgttgcgacgctcgtgctggctcggaaacgacaccgtgcttctctttcttgttgattgatggtgattggggaacaggcggaatgtacatgcatggatcgagatgatgacgatccagccgcgctactgtttatgaacgcaaaaacgaaatcaaacggtacgggacgggatgaaatctctccctacttccccgacacacactagcttattgcaagcaggaagaacgacagcagtgagaggtcacggatgggatcggaacaacagggatcagcgaggagatgcatgctgaaaaggaattaatgagagccttccctattagcagcacccgattaatcatcccggtcgggcggtcgatcggttcaccttcaccacctcctctgcaggaagaacaattcgcg

SEQ ID NO: 14773 - DNA, 937 bp, Zea Mays
ctggccaccgagcgcaccggcgatgtcgcggcgctcgccgagcgctgccgctttttcttcagcatctacaaacaccactgcgatgccgaggacgcggtacagatgctggctaccccgtgtggagctctgtttttgtgtttctggccattttcccctgtcgcttcctgttgggcggggggccttgacccgtggtggatttgggtttggatgtgcttgggcgtgggctaattttggcggtatttgggtttggggttgcggaattgctgccttcggttcgggtgtatctggtgggatcgggattgaatcgggcaagcattgttaggatctgaaattggatatgagttcatacggtggtgtagaagctttcaacgaattggcgttggatggtttggtgcgcaggttgagccgtgttcttggttgattagccatgctagtacaaacaattatttgcacttcgtccttccaatggtgacaaaatgagatgtactctgaggaaaacataaggggaaaatccctgtttactttaagctacggtggaaaatttattcatgccaccgtatgttgtcttgcctttctagtttcaatggtaacactaccatccttttgctctgatttgaacatgatgtccgcattagtcatatatctcatatagttttcactatccgtgaagcagcatatggaggttgcaacctttggactttgtgtagatttcaaagaatgaaaatggacttcaattatcaagtctagctgacaagcaaaagtgctctattttcagctttcctaaaatgccgccaaaagtagatgctatgcgatcaaacgcaaaaataccgtttttcgttatgtaactgtccgaccatttcttcatgagtctgtcgtatatggcctattcaaggcttcaatgttgttactctttattttttaacccattacatattgg

SEQ ID NO: 14774 - DNA, 443 bp, Zea Mays
cgggtctgggggagaagcggggaccatggatctctgtgtgaacggtcgagatcatatcaagcatacccctttgcctcatcaaaacggagttgttgatcttggatccgtccgccgggtgcgctcgcgatggtacattaattaggggatgttagattgggacccgagggacatgatcgaatctcgagtaattaaacctcgaccgccaatctctccatctacggtccagaataatgcgtacccttcggcctcggattagtgcaaaagggcccctgactttgtctctatttcacccgcaatccactactatacaaagaccattacatatatgtccacatctttgcagaattaaccttaggctttttggaacctcaacccaccatcctaggttaacaactttacatccgagccctcccatttacactagtaattacacacaagtcccg

SEQ ID NO: 14775 - DNA, 834 bp, Zea Mays
aagtgaatgggttcggttcgttgagcctgtaatgggaacgatgcctaacaaattcaagcatcgtaacatacttgcggcctgagacatcgcctcctcccacgtcagaatattttattccaaggtggtatccacgatcaccgtaagggaaaagaagcgggtactgtaaggccatgtaggatgggtgcaagcacgaaacatgtttgaggccactctctctagcgtgcacgaggacatcgtacttgaactgtgaaggtgagcaatcgcctactattgtagcagcaacctcaccattggccggtaggttatactgtgcatcatgtcgtgtgttgcagcctaacaatcgtaacgtcaccttttggttgcttgcttcatctaaacgttctttagcaaagcgaaatgctgcgaccagactattatgctcatctagcatgttaagcaataaacgggccacctctgggtccagacgatcatggacgtcagcctcattctcaaacatgcccaacctattttgtacctcgtgttcagtgtcatatatgtaaagctgtgcaaactatggtcacaatccatggctgggtagcagcgagccaatgcgatggtgtacgacaccattgattttgaaaacataaggtgttgtaccgttatttatcgatctatcaacgacagcacccagtgaggtaaacgcgaaaagggaattgtatgagcgaatttgcctaaggaaccttttggcacgattatcaccatcgaatcgcagtaggtcacttaagggaggcggcggacatttgtaaggctccaaaacaatcttacctcctctgcaacaaaggttgtacacaagcc

SEQ ID NO: 14776 - DNA, 285 bp, Zea Mays
aaatcgtcacaaatctttatctgtgacgatacctacatatttcgtgacaaaatacgaacgtcatcgatgataagatctctactagtgccacggccctgagatcgaatgcatcacccaggagaatacgatctatggatcagattgcatcatgcgcccaggttgacggaccggatcggatcccagccgaacagatgcaccagacctaatctagccgtccatcctatgatccagggctatcctggtgtcttcaacccccattcccccaaccaagcagcatgcggtggc

SEQ ID NO: 14777 - DNA, 496 bp, Zea Mays
gcccgctgaattattagccatgttccctttgccttgattggagctcccagagttctgctgattgttgaacttattctgcttcggatatggacagtttttataaaatgatcagactttccacagttgaagcagccagtggaagaactagggagagcggggaaacgagcaccaggggcactcggctgatttgtagaagtgggggcagtggtagggcgaatgaaaacaggctgtttgaacgggtaggagggtggacgaggcaaagaacgattctgattaaaaggtcggattaccaacccggttcgcttctcaggtccctgattagacctgtcacctctaaatccttttgattttccctggcctgtgttcttggcttctactgccagcgccatgctgacagctctgctgcaagtaagatccagacaggtggccattttccgttggagccggttgttgagtcccctcatgaagcaattcttcttcttcaggtcagtgttta

SEQ ID NO: 14778 - DNA, 762 bp, Zea Mays
ctgggatcgccttcgtcataccgaagaccatgcggaacctccgtaccggccgccgcgttcatgcgggtggttcgttgccgatcggatttctcggggcatggactccttccttctcctgaggccgagttaccgcaagcacctattcaccataaaagcctcggcatcctccccctcgcagctgtgccaccccgacttctcccacatggcggctgtcggcgtcgccgtgttgcctccagctctggcaagctccctcggccagccccttcccacttgccacttctcacgctcatgaccagcggctcacgctcatggcgtgtcgctctttgacgcggcggtcctgccttagcccccctgttcctcaacatttccgaaggttggaggtaggcgcttgccgctcctcatcgtagacgctgcgggaccttgcagatgaggggagaccggagtgcggtggtggtgctcgtggtcggatgaatggggatcggtcgggctaggacttcaacgccaaatcgatgtctgctatgggccaaacgtctgcgcacgccatctttggatttcttgctgacagtaggggagcgccgctgtttcttccccaacccatggacagacaccttcatcgccttatcgccggtaagtagcccttgtccgtgtttgttgtcatcgccccatcgtgtacccccggtcagatcggagtttcgggctatggatcgtggaaggatgtgttctcggccatggcttctccgtaccagagctggccgccaccgt

SEQ ID NO: 14779 - DNA, 345 bp, Zea Mays
aaggaatggggatacatatttataaccctagggtctgcactacacactacacaaagttgctgtcccctagtctgcaacactagagagtagagatgctatcctgttgtcctttagatgttaaaggaggacaaccaaaagactcctgctgtcctctagatgctaaaggagtagatgttaaaggaggacagtcaaaagactgttgtccttcacaaggctgaaaagagatgctgctgtccctacaacgaagactaagatgctctaaggaatgagatgccatgcaacaaaagattgagatgctgctgtccctgcagtcctccacaagaccatgctgctgtctctgcagtc

SEQ ID NO: 14780 - DNA, 853 bp, Zea Mays
agtagatcccgcatcgccatcagccaagaatagccagggccaccggggagggatccgccgggccggggccgacatcggcgctggtggcggcgacgttgatggcctcgcgtccgtaacatctgatgtcgctgctcctaaatcatgcgagatccgaggacaagccgaccccgacggactgtggcagggacgacgacaccatcacccatgacgacaccctgcgacggggccgtgaaggagtcggacgccaggtcgagttcagcgcgagagaagaggaggggagcgtttgggggaaagggaggagggaagctgctcttgcgggaaggagcgtggaaggagggaggacggcatgaagtaatggaggcatggagcagagacatctccagtaggtcccgcatcgccatcagctaagaacagctgcgaccatgcctgcactgtacgtttgtactgtggcgagaggtgtgtggctggaaatttcgcgtccgtcgaaagtgaggtctcacgtccgcgtgcatcggaccgacggaggacgcgcgtcgcgtaatggatggcgcgaagcccgccaaacacgaccccaccacggcacgcgtcgccgcgcaacacgccgaatccgcgtgaattgcttagaagccagcaaaactgtgtatcttttaactagaagtaattaacttatgtctcttgatggtcgggagttgctgtcatttgttggccctttcaaggtattaacttgaaagctaaaggggctcctggtgcctataagaaaaggtgccaccgctcatccaaggatacacataacaccactagagctatccaccgctacgatgtgttctgctttcccggctctgtgttcttgtgc

SEQ ID NO: 14781 - DNA, 452 bp, Zea Mays
ggtgtcctctggggtgggcaggttctcttggctgtgtcgcttgctattgactgccctatcctcgagggcctcatgagggacgtcgccaacaagggctgctttgcccttcttctaagcgagaatgccgccttcgctgcgtcgtcaatggaggtggtagccttcgaagttgccttcttgggagccatcacgggaatggtttttggagcacgaatggtgggcaccaaatgttagaactcattgacacgtggccgagtgggtccaagcaatgggaaacaggaatattttgatgcttaacaacatgaaggattagggcaactgtgtttttcagcctgtcccatcagggtacagtgcgggggtatttataggtaaccaaggggcagcctcaccctcgtaaatacagttatgcccctggctacctaagttatccccagaatattccccctcaagggtta

SEQ ID NO: 14782 - DNA, 579 bp, Zea Mays
attggtatggatttcattactgggttgcctcgcaccttgaagggttatgattccatatgggtgatcatggacagattgaccaaagtggctcacttcatttcggtcaatactacatataaaggttctcagctggcagagttatagatggctcgagttgtgtgtttacacgggataccgaagaagattgtttctgatcgtggatcccaattcacctcaaggttttggaagatccttcatgagaacatgggtataaagttgaacttcagtttgtcctatcatcctcaaactgatggccaaactgagagaactaaccaagtacttgaggataagttgagagcttgtgcccttaagcatggaggcagttgggacaagagtctaccatatgctgagttttcttataataatagttaccaggccagtctggagatgtaaccatttgaagctttatatggcagaaattgcaggactcctctatattagaatcagactggagaaaggcggttctttgggcctgaggttattcaagaggcagaagaacaagtctgtatggtctaggagaacttaagggtagcacagacc

SEQ ID NO: 14783 - DNA, 319 bp, Zea Mays
acttcgtcgtagtgactcgctctagcacatccggtcatcgccggtgagcacgccacagtaaatgccaccaatcgtttgcgccagtgctcttccccctctccggccgccgcgcgtctccttcaaattcacgagccaccgctcaagggtcctataaattgagcacaccctcggctccgttgggtattcaagcatccaatccacccgctcgtgcctccaattactcaccagatagctccaatttgggatttcccccaaatcggtccgaaacaccgcgcatagtgacctcgtcgtggctagctcatttcaggtctgttcatgc

SEQ ID NO: 14784 - DNA, 725 bp, Zea Mays
tgcttagtaggtgcatgaacttttgttcaggacaacaatctgaaaaggtacagtttgtactctatcatgcattgcctgttcccttgctttagggaacagccctcctaacgggaaaaaaagcatggtcatgcagtgaaaaaaaaaggtaatgaggtggtgaggaggacaaatcaaagaaagcatctctgggtgcattattgctcacaattcacgtaggagacagggtggtgctttcagatgcaatgcagtgcgaactaacccttgatggcagggaagggatggctggtaggaagcaggagctcgctctggtgcctcacaggcaggcactagcattttgtcctactcaccagtcaccacaaggggtcattagtttattgctcccctctgattctgttgttccttgaggcccctacaccatcacaaccctttgcagttctatatttggagggcagcacatctcgtgcctatccctaagttcaactgtggcagatcagaatataggtggatgatgctaatattccatgattccatttcagcagctcaccggtatcccagttgtatatatgtatgtatgtatgtatgtatgcttgaagatatatatgcacaatgcagtgctatgacatgacatatacaaacagaggcatgaatgatgcacaagtaaaatattcataattaagacaactccaatgaatatagaaatccatgcattacagtgagtcaccttg

SEQ ID NO: 14785 - DNA, 952 bp, Zea Mays
agagattagcagagttagaaacaggtaatcattttttatttcacttgttggcttgttgcatccctccttgagagtcgagacttagtttaaatgatatttcacattgttcttccattcagagttaattgaagaatatgccgacaatgcaaaaggtaaacgcaagttggatgaatctatttcccagtcacaaggaaacaagtctagcaggacaataccatcaacatcaaccactggtccactgcatcctaattcctaaataggtgagttactgagttgtttttgtgacaaaatgagtaaatgcatttagatttgagactgctaactcactactaatctgctgtctttttagtcttggacttgagctgtacagctggtgcctggtggcgacgcgtggtgctggtcctgctgcttaactggccgagttgctgttgttgggctgctgcatgctggccgaatggcctatgtcttgaactcttgatgtctgtcattctgtcaagtctaaatgtctagtgtagtgtggcgtgaactgtgggtctgtgcctctgtggcgtggttgcctggtgccttctgtctgtgttctgcgaatctgcctttgtggcctttgtgagtttgtgacctcagttgcttttgagtcatgctatatttgttcatgtcaaattggtgccttattggcttgctaattgctatgtttatgcactgccactgagcagacaacagtagagaatgtgttatatgagtatgtgccttatcccttatgcccttgttgcatattggcttgttatgtttgtgttcacggtttatgagtatgggctgctggttattattcggttagaacccgaaaaccgactcctaagttcgggtaaccgaattttcggttatcagatacccgaactgtatttcggttccgccttcttaaaacccgaatttttaataacccgaaaaaaccgacccg

SEQ ID NO: 14786 - DNA, 396 bp, Zea Mays
gttacccgggttgagtcagccaagcctcggtacagacaagccggatatgctctgtctttcagtggctgaatattcttgaaaacaaagtcagcgaccacagcttctgcagtcagacccctttctttcaacaatccaacttctgctaacaaaatccctgcctcagccacttcctggtccgtgggggattcggtccagctcggagtgcgaacatccggctgtctccctgaccgtggggggagggaattcccatgattctccacgatgaaccattacaggcgccatcccttgatgctgtccttgagtgggatgtcgaggtaatcagtcttccttacacggcgcatctccaagctcgcgcccccaccagctggtgctgccccccggccatcccaggccgac

SEQ ID NO: 14787 - DNA, 639 bp, Zea Mays
cttttcgacagagtactgataaccttcgctccagtttggtctcggaggcatcctaagctttcgtcgtcaataccgccgaagagtaacgctcctggtttgtaaccacatgatatagcataatctctcagctcttcttttttagccttcgataactcttgaccaattatgttttgaaaattgaaattattttcatccgaagtatcttcggtgatctccttcccttttccaggcactgtagccaatgtctcttccgcggctgcagcagcttcttctgcggccatattcaaaagcaatttatcaatattagaaaatgtgccctccagatctgtatcttcggtcgttgcagcttcggtgggggtgggggtggcttcggtagttgcagcaccttcggcagcaggcgttatctttgtcgctgaggccggcggtggtgtttcttcaatggcttcgattacagtaataatcctccgccttttcggcccagtagacttcttcgctgccgaggattccttattcttctgtaaaagctttgtcagatgtggccctagtggacttagcttgataggcaagaattcagtcattaccttttgaatttcatccacgtcggcagtagaaggtgttgaaggagtctcttcctctaat

SEQ ID NO: 14788 - DNA, 378 bp, Zea Mays
gtcataggaaagttcatcattgctagtcgacaatggtatcaggatgtaagtaatgccatcattgcaactgagcacatcacataaaggaactcaaacaaagaaagtgagttaaaaattgtagatagttcatcattgctaatagacaatgttctcagccagcaacttagcacaatacataacaaccattatcccctatgtgaggccctattctgccacatttgttgagcccaattgtccctggtagcagaccaggcagcattgtccatgacaaggtcatggggagcttcctcatgaacttgatttgcaacccatgtttcttccagtggaatatgttcatcattcccatgacgaagaatccagttgtggaggatacaacag

SEQ ID NO: 14789 - DNA, 470 bp, Zea Mays
gccggcgttacagaggtagtaggggggtagtgatattccttctctagctatgtctgctcttgttagcattcaggatttatctataacagattttgatcaggcccttgaggatgtcattcttgaagatatgctgttggaaccgactgttgatggtatgatggatgtttgctctgacgctccagacgtgggattagaggtatcccgggcagtatctcgtgcatcgtcgactttggagggcagtcttcggtgtcaagaagctggtcaggattgtccgactcccatggaggtggatgaggatccttcagcctcagaggtggctgttgcagaaaatccagcccccaagggtgatgctggcggttacctagcccccgagggtgtcaccggtaatgacctggctctggtgggtagcgcgagctgtaacccagccccgagcgtgttgccggtagtgatccagctccgatgggtagtgc

SEQ ID NO: 14790 - DNA, 503 bp, Zea Mays
tcatgaattattcttatagttaaaatcaatttccacatttattttattatttctgcactggctggactacgactataaattccagagagcacagggtctactacataaatagttccaggactcagaacaacatcagcacggactgcgggttgaatactggaaaccagggggtttcatatgtaaaattgcgaggccgaaggggtatggacatcacacaaccgcttgatcagatccggacggtccagattagattcatatcttaagcatcccgcgctgaatcccgatcgcaggattcgagaccaacgactcagatttttaatagccgagaactactcgcgcccactcgattgaaatccaacggtcgacacttaatccaggcgaaaggataccttcatctaatctggggcgctcatctaccatcgaacggcccatgtctatctacttcctcagcccgtcaccaaccagatcaccgttggctaggatccaacgggtccgcgttatcg

SEQ ID NO: 14791 - DNA, 425 bp, Zea Mays
gagaagcatcaagggcatacaagagtgctaaaacaagagctaggaaggcatgattggacctgtgaagggctgatcgcggcgagctcacacacgcggtgttcttgaccgatttgggggaaatctcgaattggggcgctctggtggacgatctgaggcacaggctggtgcattgggtgcttgactacctagcggagccgatggcacaatcaatttataggatccgagggtggtggctcttgaatttagcatggcgtgatggtggccggagagggggactgagtcactacgcggtgactgtggctgttaccgtggcaagaccttaggcaataaaagggctttgtattgtgatcaattacgacgtgttaagatggctgacggtgtggcataaccgcgaggaacgacgacacgacggtgatggtcgcgtg

SEQ ID NO: 14792 - DNA, 443 bp, Zea Mays
cttgggtcactgtgacaaggttggagaccatatattggagtacaactttgtcaaaggaaggtaggtgtgttactgcctagagccaggagtaaaagtggctcaaacatgcgttgtgaggcgacttcgaagggagattcagaatgaacagtggtctaaagaagatcgccggtgcagtgcacccgtcgccggtgaactcgcgctgggatccgagtttcgcctgggagattcgtgctcagtaaggaatggataacactagggaagggtgaaaagatcagtggtggggtgaactcggtcgctaactggttcggccgtcatacccacttgcccgcacggtcgaccaagttgatatcaccggagctcgccatttcactcggctgtgccacgcaaccatgcattctccacgtcgtaaaggtcgtggcaagcagtcagttaccccacccccc

SEQ ID NO: 14793 - DNA, 474 bp, Zea Mays
gcaaaggtctcctcatagtcacgcccatactcttgttgaaaatcacgtgcaacaaggtggtaggaggtggaaccaagtggaggaaatcaacagacttggaaggagaggaagaagaggacaaaccaggagtaaagaaaggacgtgactcatcaaaggtcacatcccgggatactcgaatgcggcgagcgacagggtcccaacaacgatatcacttacgctcagagtcacagccaaggaagacacactgaacggattgtgcagtgagcttggtcctctcacgaagttgaagaaggacaaaggcaatacaaccaaaagcacgaaggtgactatattgtggtggccgaccaaagaggcgcacaagaggagtgacaccatatagagcaactgaaggttgaatgttcacaaggtaaacagttgtaggcacagcttcagcccagaactgaggaggaacagaggatgttagaagtagaatca

SEQ ID NO: 14794 - DNA, 374 bp, Zea Mays
tggacaactacagctagtcgcgacgacgtgcacagttgtcgagcgtggcggtgtcttacagacagaaggtctcatagaacatgctgatggaggcgtcaaaggtggagtccgcgtgggcgtcaaggccctccgacgggttgaactggaagcgcgagtcagtgacgcgcaggcgacaagccccggtggggctacgcctaaggctgagcgctaatatggacaagggtgtggctccagcggtgtccatgctggacagcaagctagttgcggtggcacccgcagctgttggcgtggcagtgtcttacaggcagagggtatcatagaacttgcacgtgaaggcatgaaatgtgaagttggcacgggcatcgaggtcctcc

SEQ ID NO: 14795 - DNA, 630 bp, Zea Mays
gttaggaggaggctgatgcggagcaaagaaatgatgcgccaggtgagatgcaaagtgttcttccccagactgatccgggggaggagcacttccagaaggatcctggggcggagggtgagaggatgattgacccggatccccttggtagggaggcggggcaaactgctcgcgatcatcaaagtatgcttctttttcttcgtcgtctgctgacataaaggcacccccgtaggcctgctggtgccactcattgatctctgggggaggcagatggagaggcacgtcagacgagcgaggggcaaagggcatacccatagtgaaagcttgacgactaagattgtcgtcagtctcccgctgacgccttgccagctcatgcacatcagcagaaatattccggcacatagagcaaaatgccgcaatcccatgggccaaccgggcacccatccctcggccacgacctcgaccacgaccacatggcgtgggagatccgcggccaggggagggacgcgaggcaccggcagcagcagcaggaccagcagaaggaccagcagaggtatgtgcacgggagctggaaggggctttcctcaagcgccctgctggattgttgggatcaatccagaaaggggtataaga

SEQ ID NO: 14796 - DNA, 757 bp, Zea Mays
tgggcagttgtgtggccgtgttaagcatgccattatttctttatttaaagggtgaagtagcgcatagtgaatgggtgtgtgtgtccaagtgctgtgcagactgcagtcctgtgagagagtgctgttgtgagagcagtagtaatgcacaagtgctgtgcgtgtgagctgtgagagagcaagtgctgtgcgtgcgcatagaacacagggaagtgctgtgcttcttgccatgtgagtgttgtgacaagtactgctgagcagggtgtgggtgcttgcttgtgctgtgttcatcttcttctgctattctccttcagtcaagcgcaagagtgttgtgagagtgtgagagctgggccaacacgcacggctcagtgactccagtccactctctgagcagccgtgctctgtctcaactcctggctaatggagtaatggcaacttgtccgcaggtgtggccattgcaagcaactcgctccagaggtaacaactcgctgcccctttcatacacgtcgctgtgccagactgctggttgcccacccaggaggatgcaactcgctccatgtatgcagtacgagaaggcagccgccgttctgagggatcacgacccgccgttggtgctcgccaaagtggacgcgtacgacgagaggaacaaggatatcaaggacaagtaccaggtgcacgcgtaccccaccctcaagatcatagagaacggagggaaggacgtgcgtggctatggtggtccgagggatgccgatggcatcgt

SEQ ID NO: 14797 - DNA, 366 bp, Zea Mays
ctgaatgtggtcattcagtcggctagataccagcaaaccctgaggcggatcagtcggctgaatattagagggacaacttcctcttcctcctcttcatcctcattaagcacacgaccaccaactctggcaccatcacaattttcaatgtcatcctcgaggttggcgctcaccgagccgtcgctgaggactgaggtagtaggatcagcacccagttccaagcctgatgaccaccaaagtcttttctttcttttcttcctctcggcaggtgcagctggatggctcgttcgacgcaatcgtttgcgacgagcacttccaagactatgaactccttcatcctcaccaaagccatgtccagttgcagcactc

SEQ ID NO: 14798 - DNA, 314 bp, Zea Mays
aatatgaattttctaggggttaaacaaattctagcatttattttcacattaaaaatcatttcctaatcacttttactgaattttatatttttctggactgggcacaagataaccagagaagacaggggccacggcgcaaataaacccagacacggagaacagggtccctggatggcgggttaattcctaagtagtccaggggctcttaagaaaatgtgccagggccgaaggggtatccgcccgctagagccatcggatccgcgatggaccgctcagattagatccattattcccttgaacctgttggagtatta

SEQ ID NO: 14799 - DNA, 548 bp, Zea Mays
ggacagtgtctccctacgctctagagttttagtgcagttttacctgttttcagtcaattttgatcaagttcaggggaagtaccaatttgggagtgctagctgctgctgctgcgggttccttggtggcagatgagttgctccaactccaaagtggacaatgaggcgctccaaggacaggaggcatctcatgaagcagctggtgcaccgccgccctgaacttgcagctgtgcacattgcatacttgcacgccgtccgcaacacaggagccactctccgacaatttgtggagctggagtctgcattgtcacagcagcctcccgtagaccttgtggcgccgccctcgcctactccacagcctcctcctcctgaactctcggtgacatcctcattgcaaccctcgccatgccccccgccgcctatcccttttagttcagtaaccgccataagaaagatggagaagagggatgatgagctcccaccaccacctctggttttgagttccatggaggtgattttactgatgatgacgacaccagcagctgctcaac

SEQ ID NO: 14800 - DNA, 740 bp, Zea Mays
gcacatttaatggtgtgcctaaccttaggtgtggtagtaatccaaacagccgccacacatttataggtgtgcctaaccttaggcgtggagataaaccaaacaaagaactaaccttaggcgtcttaggcacgccacagatgtggcagggtgctaacgttaggcgtggcacattacacgtgcaaccaaacacatcctacatcttctgctactgggaccattgtggcgcaacgggttagcagaccgaccaagaaatctacaaaggtgtatgggccggattgggtggatgggctgcagctgtgctcgctttgcgaataagtagaacgagagttgcctggtgaagggcatgtaagaattattcactacaacttcttctccaagttctactgctcgtccgccgccactcttcttcctccttccctctgctactcctaatcgttctctgctactcttaattgttgttctcttctactgctaccttgtatccataccgagttgttaacagtggtatcagattcaacgatccttggccgatcctcgcgttctcgcgctggatccttctggtgttcattcccatttcactcgttttcgccgtcagcaagttctcatgaatccagatactcagatcatcttggacgagatcgctcgccgattcgctgatcatgatgccaaatgggatcggcgcgcgtcggagcaagaatctcgctgggaggcggtgttctctgattttgccaaaaaccaga

SEQ ID NO: 14801 - DNA, 271 bp, Zea Mays
gcttccttcggcatctcccacccactcccgagtggccacaccttgtaggcaatgtgctcttggactaagtccctggtgcctatgtaggtgcataccgtgttataagcagcttggcatgcttgaatgtcgtttccaagggcaagagatggtcttctaatgccgaagtgagaccatatgggacgttggataattcccttgatgtcttctctctcaaccagatcgttctttacatagaaccattcttgcatccaggctcctggccatctcttgc

SEQ ID NO: 14802 - DNA, 934 bp, Zea Mays
agcaaggctcttccctatccagtttgcaaggcaaatccggcgtggggatttctttatccgcatcttaactttcgattaggtcgggactctaggcacctgacttacctaagtgtatgtatgctaatgacgagacacacatgcatgaactagacccacaatgcatggcctgagtttagcatacagatatacaaacagacgccagctaacttatctgtgatgcaagggctgatttcgaatacatgtatataccgacccatgatggctaactgatttacaatgcatcatggcattagatgtggcagttgctagctttgtgcagaagacgctaactagctatcaaaacccacgacgaatatgcatggactggataagcagcatgcaaatttatatttagacataagaatgacacgggcatagcatttggcataggatttggagttcctcctgtgcatctcacggcaggtgcccttgttgatttgaacacaggcgtggagtacagcgaggaatatttccggcatgttgatcttagctctcgttcttgggaacaagactcttccctatccggcttgtatgacaagtccggcgtggggccttgagacatctcacagcgacttcctcgagggagcgaagccacaaatgaggccttgatcatggaggtgatggtggacatagctcttgttcataagaacaatgctcttccctgtctggtttgcaaggcaaatccggcgtggggccttgatcatggagatgttgataaagatttgcttgctgccgagcgccgtggagccacgaagatgaagagaggaaggggatcaagagagcgccatgctgtttttttttctcaccttcacaggaactccgacgtgcaacgacggccttcaccacgaactcctcttctgggctgatgatggtgcggcagagagtcagggtgatg

SEQ ID NO: 14803 - DNA, 528 bp, Zea Mays
gttggcgagcatcgtcgggaggaattgcggggcggtatacggcctgcacactgaggagtcctcgccggtgtgccatccttgccgtgcaatcctcgcatcgccgtcgacgacgcacctgcggtcaccaaactaggtgaggacccccgccaagcctacggttacctatgtgaatacagtacatctagaatcgtagtggtcagtgcagttgtgggtgagcgattgctcgccgtcacgagctgtcaccgcggagccgctccgcagcatgaacaggatccgagcacatccaattcccttaagtgatagctctgtgtgatttgctagaggctccgctacctagatttcgagttgggggtaggaatcggggctctggtccgcgattgggtgttcctccggcgatgctccgccgtgtgggtggtatgcgccaccgtcggatgcgccaggggggaagacaagtcatcggccgcggattcgtgaatggacggttaggattaagtccatcatacccctttggtcaagagtatctgtgtc

SEQ ID NO: 14804 - DNA, 336 bp, Zea Mays
atcactcgcgatcgaaggtctcctaatgccgaaacgtgatcatatggggcgctggattacgtccttcacatcttccctctcactcaaatcatttttaacataaaactattgcttcatccatgagcctaaccactttttctgaaatgttggcacaggacacctcacgtcagaccggtacacgaagttataacatccgaagttgttgtggtactgctccttcccagtggtctttgtttgataagataactgtgaatgttgcaaaaacaatcagcgtccggttccaacccttggcttctcatcgcacaaataaaaatcaaaactttaattaaagcttcg

SEQ ID NO: 14805 - DNA, 408 bp, Zea Mays
gtggggtatagagggaaaatatagggggaaccgctacgggagatgaaaacgtaggggatgaaatgttaaggatgtgatgcaaaaaagtgatatagggggatattttgaggaaaccgttgcggatagcctgaggcctagccactagagcctagggtgtatggtacgtcgcgaaggtgaggaggcatgtggttggatgccattatgcctcagcgactcacccctagttggggtgcggtgttttgggtctgatatggctgaggtacaggagttgggcctgtaggaggcaagccccaagttgtgcgagcgcgagcacaatgaaggtgtcgcttgagagagcggtcgtaatcttctgagttcatgtgacactcctctccttttggagtgagctgatgagtcaccatgttgatg

SEQ ID NO: 14806 - DNA, 395 bp, Zea Mays
cggtgttcttgagtgagttggggaaaatgagaaattggagctctctggtggaggatctgaggtatgggtgggtgcgctagctgcttgaatacataacgaagccgatggtgcacttaatttataggctccaggggcggtggctctcaatttgattacagtgtgctggcgagtggctgtggccgtggctgtgaccgtggcgttcaccggtgcaacggcgcaaggataatactcctaagggggccacgattactaccgcacagtaacaagctacggcgtggcgcaaccggggtaaccggagcgtccacgacgacgctggcggtctggccacgtcgtgacggctataggcacggtgataaacttcaatccgcgatcaaatccattcccccatgagatct

SEQ ID NO: 14807 - DNA, 464 bp, Zea Mays
aaataattactggatgtgtcaaagtttttgagtaattggctttactcagtgcttttgaagaacatgaaagcatgccatattaactaaattagttacattattagtcatggagggtaccagaaaagaaaacaaattgcaatacttgcctagtatcagatggttgctactcggcaaaggctgcttatgagggcttctttgcaggctcaactttatctggcccctacactagggtgtcgaaaacatgggctcctccgaaatgcaggttttttatctggctcgctgctcataagagatgttggacggctgacagacttgctaaaggaggtttggatcatccagccagctaccccctctgttatcaagaagctgaaaccttggatcaccttctggtctcttgtgttttctcaagggtgttttagttccagcttttgcaacctttcggtctgcagaatttaccaccgcag

SEQ ID NO: 14808 - DNA, 512 bp, Zea Mays
tggtgttccctgtgatgtgaacttccctttgtttgagctgcttgaactcccaccatctgatcgatgttaagcctttgccttccactgacttgaagcattacaactactgtctttatttgtattggcctgaaaacgatgcttatgtttttcaagccaatcctcctcagctaatagtaacctccctgctttgtcagtgacatgatccaaattattctcaaacctgtcttcagctgcacgtaaacgtccaactaaatcctccacagtgagtgtctttgtatcacaaaacatttcaatcgaaactgctacttgattaaaacgaggtggaaccactctcagaaattttttgacaactcgagcatcatctacagtttccccaagggattttatattggtaacgagattaatgattctcataccaaaatcttctacactctccccttctttaaactcgatgttttcaaattccttcaggagtttctgaacattgacctcctttactctgtcagctccaa

SEQ ID NO: 14809 - DNA, 470 bp, Zea Mays
gtcagaaccttcatcttcttgccctttggctcagctgtgatggccaaagcggcaacctttccagaaacatcaatctttctttttaccccttgcccttgcagcaggtaacaatagtcagggtatacgaagccaatagcatctaataccttgttcaaccttttcttattctgacccccgaaggctgcggacaaggcattgtcctcggttttggaatacgccccaagtaactcgtcgctagtagcttcaatgcacttctgccaatcatcatttggttcatcaaacttatccccaaacctgaatgtatacttcagccggaccaaaccaccttcgctagagttagtgatggtctccttcggcatttcctagctttccacaagcggccatactctgaatgctatatgttcttgaattaaatctcttgtgccaatgaaggagcaaacagtactgaaggccttctgacacgcttcgac

SEQ ID NO: 14810 - DNA, 592 bp, Zea Mays
ttggatgcttgaatacctaacggagccgagggtgtgctcaatttatagggcccttgagcggtggcccgtgaatttgagctcgcgcggtggtggtcggagagaaggaggtgcactggcgcaagcgattggtggcatttaccgtggcaagctcacccgcgatcatcggatgggctgaggtgactcaatgcggtgtggttaaagcaccgaggcacgtggcgcacggtcgtggtgcgactaactccggcgagcctatccaaagcggtcgtgactcaagcgggtacggcggccggagtagaatagtggccggagtagaatagtggtcggagttcatccactaggtgatatttcttacccccttggcgttatccaactgcgccgagcacgaatcaccacggcgggcgcgaatccgggcacacagtcgccggtagtgagttctctgagctgtggttctgatctattccctgtaccattgaaaacccgattcagagtaactgacaggccgaattgcaatgcctaaatctcaaatttttgtgcaacaacttgcccatacatctgtagcaaacttgtagcccttcatatcagctacaattct

SEQ ID NO: 14811 - DNA, 1018 bp, Zea Mays
gtgcaggcttgtatgagagtgattgaaagttagagatgagcttatcgtaaaagtcagcccagcggtcaatgcagtggtgggggagatggcgaagccattgaagtatatcctgtcctagcatgattgggaaatacactatcataacatcctctgtggcccatgtgtcttaggctgatgttgagtaaacaaccagctagcccctagggttgtgtttggactcgtacttgtcgacattggagaccttaaagttgggaggccactggactggtcgtagtcagggggagaaggcgaacaccctaaacacgacctgagctgttggtcgggctcctagagcaccatcgcaatgttagtcatgtggcggcgatggttgtcacagaccctgaagccgttcgcatgcaagccagcgtgcaaacaagtgtatcgctgagtctgcggttgatacaggctggtccttgaccccccgccacggggagccatggttttggttcgagtcttcacaacgcctcatcttttcttcgtgttgtcgggcacgtgaagagtcgatgtcactccacgtgtcgcatcggtcgttgagacaatgacgtagatctccctccgggtgagctagcgggaggagatggttagccgctcaggtgaggatttgcttgtacccctccccttcaggcgtcagtggcagctcgctcgcaaggcaggccagtgcacccccaacttggctcgaggtctagatagctcggatgaactcgggctacaagttgtgagggttgggtggatggtcttgaggaggccgtgaatggcaccatgccaactcacgaccacgttcctaagccgctcgggaattcctttgtagacagaactcccacccctcgggagtttcatcatcctcggatgccaggtcccgggaaatacgctgagttggatccaattccccaccgatgtggtgttgtcggatattgcgtcgacagtttcggtggcgacgggcttcacgttgcggggactcctccctagcaaggtcggctcg

SEQ ID NO: 14812 - DNA, 412 bp, Zea Mays
attgcctagagggaaggaagagaaggacgctcaagagaagaatgtttctgatgcccaaggtaatactgatggagatgatgccgaagataatgtcggtatctaaagtccaagcaaacctagtcacatcaaatttggcaaatccaccgtgaaacctgatgatttggttttaatgaagaagcttggttatgttggaaggaacgatgatgacttcgtaagattcacaggtgatgagattattccaaagccgaaggatgatgaagtagtagtgttcaagagcttcttaagtgtcgggcttcgattcccgttgtaagagatgattgttgatgtattgaaaagatttgagatatatctacatctgctgacaccaaacgctgtagtcagactaagtgtctacatttgggctctccgaagc

SEQ ID NO: 14813 - DNA, 400 bp, Zea Mays
cacaaggcctgaggtgctagtaactcgtgcattaccaaggcgaagaccattgacccactacgttgtgcatgggtaactcccatcatgacgcgcaaagttcccattacgacatcaggcgaaaagataggcggaggggataggacgacaccatccacctactctactacgcaagacgacgggccagtctacatcacgacctacaccagagccttcacccgcacgctgacaagatggtgcgaagacaagtctagctagaggagcccgcacgacgaccaagggaagacacctgtccccgcgggagaagaccttggtccactagctcttcccgcgcactcaacgctttgttttttagtattcctgggcccacctgtcgaggcccatctcccttgtacgtgttcct

SEQ ID NO: 14814 - DNA, 685 bp, Zea Mays
cgcgattttatagcgaacttctagggaccgttgggtccgcggctaaatgcccacgctttgcctagccagctgggtgtgcccagggcgtcccttctccaaccttccgcccttgcgttgcgttgacattgctctccggggaaaacccgagaaggatgggcagcgttgacgtgggagcttatattttaccagtacacgcaaccgggttcgcgtacgcagaaagaagtacacgcatcttgcatggtaaggttcgatcagattgcagaattcatgcatgcgaacctgaaggttcatatcaaacctgcttgaagctagcccatggacggaagaactagctagtggtgtgccagtagctagtaaaactagaatgcatgccagttctgtaccaccccactgtcactgtgtattactacccttacgctggcgacgacctgctggcctgcactgcaattgcgacagaaggaaatttactgcagtggccgcccgatgcaacgattctgattacactgttgtgtaaattactattttacacggtgtgtttagatagtgtaatttaaaaatgaagtaagatagaaattctgctggagatagtttagagtagcttagacgcggaggcagcagtctgtggtcgagtcgagctttaaggctactctccaatctccatgcattggaccattgccactttgtt

SEQ ID NO: 14815 - DNA, 298 bp, Zea Mays
ctattatcatgcatcgttgatatcgttggtgcaattttgtcttgcgctgctccatcgatcgtaggtctagatctgtcatcgcacattgcccagccatgagcccccctgctgctggccatcgagcccctataggttgcctcctccttgtgggtccttgacggaaggaagcaaacagggcgcggcgtgtgtatagtataggtggtgaatctttttcggggctgttctggcgggctggcccaccgaagcggcatgggggagcaacccggtccacgcgctcttcacgtggcctccacagcgc

SEQ ID NO: 14816 - DNA, 515 bp, Zea Mays
gtgttgactgccctcagatcgaggaacaacggccacgatttaatgaggtgtgatccaaccggaattgtccgatcagatccggcggtccagattgaaatgcgcaaaaaaagttttcggattccaatcaggaccgcacatccccaattcaacggctagtccgtttcttcttcatccatcgactgcacatggcggcggaacatgtcccgcggcggcgccatggtagtaacaggtacccgagagcacaggtgacccagccaccgggcgaggagcagatgaacgcagcgaggaacatggcgaagacgcgaggagggtatactcaccagtaatgagacccgagcgatccgaccacggcgtgccatggaacgacggcgaagctcctcaacagcgtgaggttcccagccgtccactcgtacggtttagtctacgaaagcattcctcacgatcctaagtcgaccccgagcgatagcgcgacatgcggtttatctctctctctctcccttccaactctgcacgcc

SEQ ID NO: 14817 - DNA, 858 bp, Zea Mays
gcctacgtcgtcgatccgacctcgggtatcggcttggaaggtccattgcatccgtgtacacgcagggagaagaagcaagtcgccgggggactgagcgaggtcttcggtacgtgctcggaactctacggcaagatagcgtcgtgaccgggtctgttgcatcgatgaatcgctgactcgttcgaactcgaggtatgaacccttgaactagtggtagggcctctcggcgggcattactgtacgtacacggcaccagcgttgacgtgtccgatttttccttgctgctgggcgccgccgggcacagtatagccgccctcggccaccaaacttaactcgtcggttccctgttgtttggggctgcgctagctcggcgtcctttggcgttctgcggagaactctcttggagtactgccgtgttcgcaccgtggggtgggggtcgacgtcggggggaagaagggtccctggccggccgatccaaattggaaggtgtggtgcgttctctgattgggaggttgaagataagcgttggcggtccgatttggggtaagcgactgagatgtaggggctgccctgaccgttggattcgtagtggagggcttagatgagggtgcggttggcacttgttgtaccaaatctgggcccttcgactttgatccaatggtctccatagctcaccagtttatattagggcagatttaatcgtggccttagatttcagatcaaacgacctagattgctttatattagaacccgccgtcattttgcaaaagaaaccccaccctcctttagattagaacccgccgtccacaatgggggaatcatgagtcttgggaatgtttttctaaataacccctgatcttt

SEQ ID NO: 14818 - DNA, 533 bp, Zea Mays
gtccaatgccgacgtcttgcggcatgacggtgatttcccagccctggcgagcaatcccgcatgcaccaatctcacgtagccaccaggcctttccccgcaatgtccgtcgtgtcacctcggtcacctagggtactccacaaacggatataggaaggagacgttgatttctagtggtgggttgacttctggatcgcctcgcaaccgaggggtccgactacggagggagcgggagatgggatgatcaagggggatgcacgagtcaggcccaagtgtctcggcttttaaccccgagcgtggaagaggtcgacccgattccccaggcagcatagcgcgaggtggttggaaccgctcgtccgcaagatgaggacgatcctgacaagaaggttccacttgtaagcgaccagcactacttccaccggacgactcacgtggaatcggtagctgacgagtgggtcccactctgcagtggcacagggtgcgtgctcacaccatcagccccggccctgggtccacctatcggcacgggagtgtgc

SEQ ID NO: 14819 - DNA, 401 bp, Zea Mays
cgcgaccttgcgccacgtaccctggcatcttaccacgtcacagtagctcgtgttatgcatatcctgtgatcgccggtgagctcgccacgatgaaagccactaatcgcttgcgccagtgcatccccttccctctgatcgccatcgcacaatcacaaattcacgggccaccgctcaagggccctataaattgagcacaccctcgactccgctatgtaattgtgcactcaacacacccacttgtgcctccaattactcaccagagcccccgaatcgctcagttcccccaaatcagttttccgccaccgtgaacaagctctcatcgtggtcagtgcacttcaggtccgatcttgccctctgctctcttgtttcagcactcttacatgccactgatgctcctcgac

SEQ ID NO: 14820 - DNA, 687 bp, Zea Mays
ccgattttgtttttaagaacattcagccactgaaagacagagcgtacccagcttatctgtatcgtggcctcactgattcgacccgggttaccaacacaaggattcctgctgtggatctagtaagccggcttgagatgattcttagaggcaaggtgtcgaatattggtgctcctgttgcatactcagcctggaatctgcctccttccaaggctttcatcagttttatgtcaaatcctcctactggtgatagtggcttgggtcttagagtgcgaccttctcccaaagaggttgaggctttggttgtttcgctcggtgaaatccccgatgacgagaggcaggttcattttgagatgcctttgaaatccgagcgacgcagaaataagtgccatgctggacatgttggctgaggattcctctgatttggtccctgctgaaacactagctgtggcacccatcccagagtctggaaaagctttggacatttagagatctgatagtattcgcccgaagcgccctcgccgaaccaatcatccaacttctcctgctgaggggaagaaaaagaaaaggagacgtctttggcaagtgtcatgcttgaatcaggatgccggcccttctgctcctgctgccggggaagtgcctgtgccaatttttactgaagctgaacccaatgggtgtgacctgactgat

SEQ ID NO: 14821 - DNA, 483 bp, Zea Mays
ttctttttcacaaaaattgtagggtggccacatggtgaggaactgggtcgaataaaaccattttctagcaaatcttgtaattgattcttcaactcggccagttcatttgggggcattctgtataatctttgataaattggagttgtgtcaggctttagttcaatagagaactccacatcacgttctggcggaaagccatgttactcttctaggaatacatccagaaattctcacaccaccgggatattggctaactcttcgactaccacactataagcccttcccgaaacttcttctagagaagacaattggatctttaactgactttctcctaacactgtaattatctgaatagtctgtttctttgtgtcaataatggcttcatgttgagttagccaattcataccccggatcacatctatgtcctggcccttcaacactatcatatttgtggggtaggtatgcctacccaattctactggc

SEQ ID NO: 14822 - DNA, 285 bp, Zea Mays
taaaaaccgggtgtgacattgccgatgcaagtgggtacgacgactaggcagtacagtgccccaagttcatcctcacgcgagatcttttcacccgccacggttatccactttacataggcacgaatcgcgacggtcggcgtgaatcatggcgcggagatcaccgacggcgacaggttcactgaatcagtgatctgattcaggttactgtaccatgggagctccattcagtgcgcctgaccgagcaagttgaggagccccgttctctaatttccatgtaacaacccc

SEQ ID NO: 14823 - DNA, 652 bp, Zea Mays
cagcgcaagtttgggcatgaccccatagcaagattgcagttggttaattgggctataactttgaagcagtgggatgatggggttgtcacatgaaatgaggagaaaagtggctctgattttgctctgacagactgactgcatggtaatcaccatggtacagtgaacgggggggatcaggttcagagaacctcgccgccgacaagccgcgcgcagattcgtgccttcgccgtcttgattcgtgcttggatcggttggataacgcttaggattgagtaaatatcgtcaccgtggatatctttcgaccaatagtttactccggccaccgtaccgagtttgtcacggtcgcttcggatgagcttgccggtgatagctgcttcacggccttgcgccacatacctgggcacattcaccgcatcgtcgtgactcactttggccgtctgatcatcgccggtgagggctgccacggtagatgccacgaattccttgcgccagtgacctcccactcctcggaccgccacgcgtcgtcgtccgattcaatgtccaccactcttgcctactataaattgaggccaccgtgagctccgtagggtagtcaagcaccaagccacccaaaccgtgccctcaatcgatcatcagagagcttcaattttga

SEQ ID NO: 14824 - DNA, 468 bp, Zea Mays
gaggaacctccccagcgtgatgccccgcgacagagaaacagacgccggaatgtgcggcgacatcatgaagccagagaatgggacccagtgcaacccgtatctcgagacgaagcctcaaaaatgggagacactcctgatgaacgagcacaccgagaaagacgcaactcatgtcgtcgtgatcgccgacaaactcaagaaagagagcgggaactagctgaacaagatgctagactccggcgggagaatcctcttctcgctcgaaacctgtaccccgacttccatagttccacacatggtgcaccaaggtcttgagcctgttatttgtttcttgtgtcccttctcctctctcttcatggtgaacctccctagttcacctccgattgcctccatcttggtgatcatggtcatgtaatttccttcctgagcgatctttagtgtatcccaaatttctttggcattgtccaaacc

SEQ ID NO: 14825 - DNA, 536 bp, Zea Mays
tgggcatcacgggcatacgagagcacttaaacaaggtttgaattgggtagagtcgtaccagaacaggctggccacggtgaacttggtttcacggtgttcttcgactgatttgggggaaatcccaaattcgagctctcggttgcaagactggaggcaatactggctgatgtagtgcgtgatgatattgcgaagctaacagcgggctcaatttataggttcagcgagcggtgaccgtgaatttgggcgctgacgcgcggcggccggaggtgaagaagaacactggtgcggtgaatacgtgttcagtgtcgtggcagtaattccggtggtcgacgggaagctagagggagtcacggcgatgcggtggcgaggttgggacacgcggcgcaaggccggaaaacggcgattcaccggcgagcttatcggctcaagccgcagggtagaggggaagtacggggggggtcaccggagtggagtccagctcaccgatggcgaagattccctctccccgcgatgttatccgttagtctccagcgcga

SEQ ID NO: 14826 - DNA, 908 bp, Zea Mays
accatgaacaatatgggtattcttgaggtctctttattgatgatatatttccagtttacatagtacattgtcgtcccgatagcttttgaaatacagctaggggtaaaatttcctgaggtgttctatgttccatgagtttccaatttccgtgccatccatctgagtgagacgatatgatcccagccgagtgacttctgctactatgaatgatccttcccataaaggtgacaacttatgtcgtccctcccccgttagaattcggtggaggacgaggtctcccactgcaaaggatcgacgtcgcatggccttatcgtggtaacgcctcaaagtttgctggtaccgcgctgattgaattactatatttagtcgttcttcttcgagtatatcaatatcctccagcctagtagcctcggcttctgctatgctttcaaagatcaaccttggcgccccaaacttgaggtcagcaggtagtactgcctctgacccatagaccatgaagaaagtagtatttccatgcagagctcgactaggttgggttcttaggctccaaacgacgtaggacaactcccttatccactttcctgcaaacttttcgtttttatcgaagactttcttcctgagtgcctccaatatcatcccgttagctcgttcaacctgcccgttggctcttgggtgtgccaccgaagcatatttgatctgaatgcttttttgctcgcagaaatcgaagaactctgaacttgtgaagttggatcctaggtcagttatgatactatttggtattctgaatctgaatattatgtcttgtatgaattccacggccttagctgaggttaaagaagcaatgggtttgaagtctatccatttggtgaatttgtcaattgctaccagtatatgagtgtatcctcctt

SEQ ID NO: 14827 - DNA, 766 bp, Zea Mays
atgttgtgttctttaatgtgatgagtagattggaaatacgtgggatgcgaggatttaattagtgcacgtaggtgtgtgagtgtcgtggtgtgatatagtagtggtggcgtgagatatttgtttgaggtgtgcgggtatatgccgtaatatggttatactcgcgacgaggaaagatgtatgtattgtgacacgacactttggtcgctattatgtaatcgtgtgaaggatgctcgtgatggttttgtaattaaggagtgatgtagtggcaagcgagaagtaagtctaatattttttttaaaaaaacgattagttgatagcacctatcggcttcgtcatgatttttgttgtatggcggatcgaagccttgtcgtcgtagtctcggggaatttttggaagtgtgctggtgctttactgatggggttgtatatacttgtgatgtattacaatagttgtgtgtcgtgcaagtatccacaaatggtgaaagatggtgtatgttggtaattagaaaatggtcacttcgttagccaatagccaagcttatgccgagatttaaaatatgggcaagttaaattgaaatcatgcttatctaggcgtgtggttaaataataataattttggcttgtgcagtgaggtggtgacatgccgaagtagtcatcgcttcctctatgtttctaagtcgagtcaaaatgcggggtactagtagtacgctaggcaggcggtgttccaaatagataaatcgggtgatgtggtagttgtcaagcgtgat

SEQ ID NO: 14828 - DNA, 577 bp, Zea Mays
gacagtgaccagcattggggcggagagagaagggaaaaactgtttcatcaaagatgacatcccttgaaatgtagactcgtcctgaagaaagatcaagacatttgaaacctttgtgaaaaaataatgtatcctagaaagacacattgacgggagcggaattgaagcttatgagaattataggaacgaaggttaggccaacaagcacaaccaaaaatgtgcaaaaggagtaatttgttttttggtgaaaaagacactccaaaggtgtttcataatttatgattttgctaggagtatggttgatcaaataaacagctgcaaggaaggcgtcatcccagtatttcaggggcatagaagcatgggcaagaagggctagaccaacttcaacaatatgggcgatgttttctctccgccgacccattctgttgatgtgcataaggacaggagatatgatagctaattccaactttagcaaagaaggaatgaaggttttgatattctccaccccaatcggtttgcatggttattattttgcgatcgaaaagacgctcaacgggagtctaaaattcaacaaactttt

SEQ ID NO: 14829 - DNA, 864 bp, Zea Mays
gagaaaatcatttataaaaatgatatagtgttgatggccctctttagaaacaaaaggagcaggactcatgtatcagagtgaacaaggtcaaaagggcgctgagaaatagactcactagaatggtaaggaagttgtatctgctttcttgagtgacaacccagacactgatgcaaagacttatgacctaaaacctaacataaaagaccacaaatgatcaaagtggataattgggagccacaaacatggcataaacaatgatccactgagcaaaagacgatgtcaacgcaaccaaaatggccctagcaagaccggtagacgtagcagaacaaagaagaagccaatcaagctctcagagacactaaggcacgatgacccgagccagtagccttctttggaaacaactcctcatcggtagccttctctggaatcagaagcaatgtcgaagcagtaggacaaggtcgacacgacatatcaccagacaccaggaaggaactcccaaaggcataaaccatgcatgtgcagacgaatgcatggaatccactcactgtaattggtgtcattaaaaagcaccggtaaaattggaacaccaccagccgaagagatcaaagacggggccatagcagcagtcgacaatgggagtgtagagtgcaggcaagagcgcaaaagaaaagcggcacaagctgcagtttttttaccggaacctaacaaaaacggttagaactagatccaacccaaattggatctgaaagggaagcttttggcacgagcggaacacaaaagcacacggatggcaaacacaagcggaactcggcctcacacgggagcacaacagtggttgtccttgcgtgagaccatgacacgtgc

SEQ ID NO: 14830 - DNA, 934 bp, Zea Mays
ctgacgccttcagtaggttgtcctcgacagaaagatcaggcaccaccgtaatagttgtgcttgtctcaacctctctcactccctcgccctggctagccttgcaggtgaaggcgacattgcagccgctgcagaaggcaccacaggtggaggcattgtcgtgaaggaagtcgcagccttcgcagcttcggcttttgatcccccagccacgctagtgcgaagagccttcgtctcgcgatgagggtccactatccgcaacagagccttccttttcttatttgaagactcctggagatctttgtccatcacaaatgttataacaatgccaatattccgcccgtaaggaaaaactttaaaatactaggccaaaaaatatgtaaaatcatcctcaccggaagccatagggatggggtcatccctgcaccactcacccctgtcacttccagcatccacacaaaggcttctcgttgaatgggcgaaggcatgacctcccctagctcaacacatgtcttagccaactcttcagcaaacttgtctgagcccttcccctagtctccacccttttcttcgtcgctcgcagtaccaaagctttccccttagaacacccctcgtctgtcgcaccatgtttcactccgcgtttctttatgcgttcatcgacgtctacatcgtcagcagagccctccacaggatcctgaccatagtggaggccgttcaactcgaacacgcaattcaaccaaacattcgagcctcgaatgtcctagatcctcggcatcaccgtcttcaacgaatacttgccaacattctttaccgcctcagcctccacttccctaacgaacgccacagcgtcctgccccctcaactccacggcaaaggccaggcttagcaccttctggttcttcaaaaacgacataagcagcaacttcaccacgcccacctc

SEQ ID NO: 14831 - DNA, 384 bp, Zea Mays
tgaaaagagatgtggctgcacacgtggctatgtgtgatgtgtgtcaaagagtcaaggccgaacaccaaagactagctggactattgcacccgttaaagatacccgaatggaagtgggaagagattggtatggacatcattgttgggttgcctcgcaccccaaaatgatatgatttcatatgggtgattgtggatagactgaccaaagtggctcacttcattccggtcaagagcacttacaaggaatctcagttggcagaattatatatggctcggattgtgtgtctacatggggtaccaaagaagatcgtttctgatagagggtccagtttacctccagattttggaagagcttccatgagaatatggatacaaagttgagttt

SEQ ID NO: 14832 - DNA, 284 bp, Zea Mays
tggggtggtcgagggtgttggggaggtcgtgacggtcacgcaaatgtgtggatcgcctccggggatggtcggagtaggctggtccatgtgcgcaggcgggggaactcgtcgatggcgagggctccgacctatctagggtggtagtttaattaaactggtcagtgagcttcactaggtgctagggaaggcatgggcacgaggaattgaagaatggctcaccggaaagctcggtctacgcgcggtggcgggaagccgaagtccggcgacgatgatcttgctgtttt

SEQ ID NO: 14833 - DNA, 524 bp, Zea Mays
gcgagtcatgatggcctcgggtgagtcgtggcctaggacgagctgcggccttgggtgagtcgtgacttaggtcactcttgtcgtgtctggtgtgctaggcaactgaagacacacaacggtcggcttggtcgtagaaggaaacatattgctgactgttctgcccagtgcacgcagacagggaaggctgatttgttcccaaatgaagaaataatggctcctaggttccttatggatataaaaggaccgtcctaggcaccatggagcagcacccgtgcaatacaccgaaagcatcacaaaagcatataactaactccgagactccgataacgctttggttcattcgagacagatttgagcatgttttgagctaagactgtcggttttcattcgtgcgctcttttcttcacttgtgtgcgtggtcttgctgcatttgtgctcttgtgtgtgttgctaatccctcccttactcttgttcttgactgtgatcatattgtgtaaggtgtgagagactccaacttgtggaga

SEQ ID NO: 14834 - DNA, 413 bp, Zea Mays
atcacggcgtgcggttgattccacctatcaacgaaaccaggcacgaataggttcactgaggcagtggctaggggggccgttttgcagcgacacggctgagtgcacaaatgctagtcggatccataccagcgattcgtgggagagctagctagatgacatcattgcttatgtcaggatgacttatgttgcggcaagatgaataaataattgaggcaaaactagtgtggctatgcggttgggtttatgtcacgtgggccatgcgggagagtaatttagcccagctgttggcacccaagtgcttatgggtaggcaagctgtgtgcgcgcgcgtctgggccaagcagtggagaagccagcccaggcggggtttagctcttttcttttattttcaaatttcgaatttcaaatcgaatt

SEQ ID NO: 14835 - DNA, 641 bp, Zea Mays
ttaggcgtcacctgttatccttcaatgtcaatcatcaagtactacatatgttctctcagagatatatggttgaggttgtgccgccttgtcaagccataacgtaatcccccatgtgtacttcgacattgcacttacatagttgttccctatgcattatgtctgtgctacacaatcttctatgctatctatctgcacaaggtcttcgtcctattgatccgaacttcaccatcaacttagaacactacctttgagaatgaggccatcatttcccttacacgtgaaggcactgctgcacatccatcgctagctcacattgcttgccttcgagttcaacgtgtccactcatccgcttcttttttgtctagcacaatagtgtcatcatcttgtcaccacctacttcatctacttcgataatagtgtgctacattggcaccttctaccttgttgttttgtgcaccacaatcgaccctcagatgttgatgcatatttgcaccccttcaccttttacattcagtgttagtaacaatgaagcctcctttcatccataatgtgttgttgggtctagcaaacctagctgattccttggttcatgcaacttgactacatcgaccctctagttttcaaggcatttgccttgattg

SEQ ID NO: 14836 - DNA, 339 bp, Zea Mays
attcattcttctgcttaattttaattcatgagagatggtttaaaggggctgccataatgtgagcattttatcttccttttaaaattctagcggacaccagaagttgagtttgttctggtttaacatacataatgtgttcaagctgtcgtttcaaatacatcggtttcagtcccctgcctgcacataatactctcttaaaccgcttcgaacaggtactaccgcaacatcactgcaaacactctagcagtgctagaagccatggctgcacacaatgtgaggactctcatctactccagcacatgtgcgacctatggagagcctgacaagatgcccatcgct

SEQ ID NO: 14837 - DNA, 797 bp, Zea Mays
tggagatatctttaagcaactagaatggatagagcagaaatgcatcaggaactcatgaaatggtgaaccccgaagcagaagggtcgaatatgaaagaagaaacgaagtagtaagagaagagaacctggaggtgcatgttgtgagaaaggggttgtttggaggatgtgatttgcgggagtaaatagctgagcagtggctggagctcaggttcgaggccaggcacggggatgccaaagagttggatgaagaagatggcgatggggttgccgcgcaggcaggaaatgcgaaggtagcggcaaggggtgtggttggcggggtagacgacgtcgcgcttgggggcctcgcagcgggggcgcaacttgacgaatgcatcgggcttgtatcgcagtccggcagtgagctcccactcgaggacggatttgttgtagatgcggatgtgggagaggaggcacggttcctgcaagcagctggggagtgactactcaattcgaattcgatccccaactacaatgggagaagagggagaagaataagctctagaagcatatggaaacgggaacctggagctcaaggaggatccattccttggtgttggtggcggtggcccagtgggagcgcaggtcggcctccagcacgttccccgccttctgtgacggcgactcgcgagaggatgccttcacccggaaacctagcggtaccacgccatctccccagtccgctgacgtatccctctccggcggcagcgccgccgctgcctccatcagctccgattggtctccctcccgtccccggactgc

SEQ ID NO: 14838 - DNA, 380 bp, Zea Mays
tgcgcgtaaagctgatttcctcgccacggaagccgcttcggtgctcgtcgtggccgttggctggacttgttccttgccctggggccaagggtataagttggaggccctcgtgactctcccccttggcctaagtcagcgtccatgcctccaccagatagggagaaacaacagagagggagaaaagggaatccacgccgcccccgccaaatctcatccacatcatcggtcggagtcaagctggtgactagggcgctttgtcgacgctcggggatgacgtaaatcgcatcttgatgggagaattcgggccatggactacggaatttctcgccgaagacttgggttgccgcagatccgctttgcgtcatggtcgggagtgcctg

SEQ ID NO: 14839 - DNA, 283 bp, Zea Mays
tagcctctgcagtcacacccctctctctcaacaatccaacttcagctagcagagcccctgcttcagccacctcctggtctgtgggggactcggtccagctaggagtgcgaacatcctgctgtctcccagaccgtggggggagggaattcccatgattctccccgatgaaccattccagacgccatcccttgatgctatccttgagggggatgtcgaggtaatcagtcttcctttcgtggcgcatctccaagctcgcacccccaccagctgatgctgtcctccg

SEQ ID NO: 14840 - DNA, 348 bp, Zea Mays
gtgtgcttgtcagagctggttgatggtgaggaggcacaaaggagcagggtacttggtaatgtaccaaacaatctgctgttgctgctacacattttttatctttttcctggctagagatcgggtttgtgtctccacatcggctccttcatcttctccaactgtgccgcatggcgtggctagcagtgtgccaggggacacccacatgctatttctgtgcctctttgttggcacgttgatctccgccggttcatcgtcgccaatactggccgggaggttctaccatcgccattgtcatcatcgtcttcgccttgcacgctgtcggtctggccaatcgattgcgtgcgcgac

SEQ ID NO: 14841 - DNA, 650 bp, Zea Mays
aacaaatagtggcgacatgtttattttataacacgactgcaccatgacaagactaataatattgacgataagactcataatagtgacgacaagactcataatagtgacgacagttatacactaaaacatgaacaacaacatagttcggagcaccagactctctgttgtcggacgaccaccaactaactggacttaacattcatctcgaaagcacgacgcagccaaacgttccttccttctttggtcttaagtgttgcaaatacatctctatactttttctccatcaacaaatgagtggcaaagaaatgtaagtcgctgccttccggtgcgccatcttcgatcacttgttgcaactgagcagcaacctcaacacgaacagggtctttctcagctgaggtgatggacttgttagtggtcatggaacgagactcaaaagcctccactaggcgtttcatgtattcttcccccgtatcttttttcttcctaggtttaggagaatcatgctgcaccttacgcttcccagtcgcatttgagcaagggtcaggtgtgctgttttcacccccacctaaagtggcttcgacatgatcatcagatgatgaatttgcatcctcgacgccaggaacaagggttgtttcatttgtgcatacaat

SEQ ID NO: 14842 - DNA, 660 bp, Zea Mays
ggaggagacaatcgcgcccagacacgttacaaccatgggagattgaaccatttggaggctaaagcagtccaggaaacaccaggcatgatagtaggtatgtttccagtcaaatcccacgttgtagaagtgttatttgatactggagcaacgcattcatttattactgcatcatgggtagaagctcataatcttccaataaccaccatgtcaacaccaattcaaatcgatttagcctgtggtaaagttcgagacgatagtgtttgcttgaatgtaagtgtggaaataaggggatagagtttcccactaacctcatagtaatgggtactcagggaatagatgttatcctagggataaattggctatataagtaccaagcagttatcagttgtgattagaggacaattaagttggtgtccccactaggagaagaagtggtgactaagctagtctcgcccgagccaaggaaaggaggttatcaccagatggctattgatagcaaggaggcaaatccactcgagactatcaaggttgtgtcagaatttctggatgtgttcccgaaagatttatcaggtatgtcacctgagcggaaagttgagtttgccatagagcttattcctggcaccacccccatatctaaagagcttacagggtatctagacc

SEQ ID NO: 14843 - DNA, 396 bp, Zea Mays
gaaggacagtgatattttctgccatcgaaacaaacagaaggtgagaggaaggcaaagagctctctgggcaaaaggtgaaaacgacgtttgaaggaaaaggattgaaactgcaaaggtaatggtctgaagctctccctctcggttagctttataggacgaacagaaccaccaaggtacgattcgaaaagcggctagatgacggtcgtttcgaatcccgcaagcacgcatgccgcgaacggtcgatgggaaggtagaacgtcttgtcgcattaaatgactgtgtcccctctgaggaaaaacacgacgagcgtcgttccgcgctccgcctcaaaaggtacaccctctcccctcgactataccgcctcctactcccctcggcaaccaaacttgaaagaag

SEQ ID NO: 14844 - DNA, 695 bp, Zea Mays
gttgtgttagctgatggaggtgagcctgacacggacttagccatagaagtagcccctatgcttgtgccaggtggtgatgagtccctaggtggtagtgatgtttccgggatagcttcagatacggagggttagtgtcggtatgtgttctggtgtcatagcctctgttgtaagcatagttttgtaagatatgcgagttttggtattgtaatgaataatgcaccgtgtaccggttttatgtaatatatttggtggttatggatgtatattcataatatttgtttgcctcagatgcctagtgtactagagattcggatggggctggatcatcgcacagtggtgcggaagctaatcccaatcctccaccgccatcggttccgcctatgctggcagatgctattgctgctctcgtaaatgccactacggataatgccagggtactgcgagagcttgccaacaatcaaaacaatgagggtggagttcatgcccaccagaatcagcaaaggaatgctacatatatggaattcatggagacctgtccaccagtgtttgcaaaggctgaatagactcttgaagccaatgaatggttgcatttgatcgaatagaagtttggcttatctagtgcactgaggtgtagaagtcattatttgcagcacaacagcttcacggggctgctagtacctagtggtcaaattttg

SEQ ID NO: 14845 - DNA, 275 bp, Zea Mays
ctgactttttgagtaattcattctttaacctgtcattttcggcttggacctcagccagtgagccttccatagaatgaataacgaagtctttcttttctaaggcagcttcgtgttctttaactatgatttcaaggtcttgaatgacaaagtcctttttcttcagagcagcctcataatttttgactttgttttctagatctttgatgatagttttgttcttttcctcttcaagatcttgttgcattctcagcactttacttaatagtatactctgc

SEQ ID NO: 14846 - DNA, 648 bp, Zea Mays
aggccctgacttcatcacaaaactgcaatggaagagaggaccaaggtctcacaggatcagtcttggccaaccataaccatctcagtcttggccaaccataaccatctcagtcttggcctagctcctttaaactaaaaatacccagccctccaaactccaccggccgacaaactttcccccaggccaccaaacagtgccccctttagcttcttttcttccccgccaaagaaagcattttctaattttgtcaatagcctttagagcccacgctggcaaatccacagccattgccagataaatcatcattcctgatagcacaaattgaactaggactttgcaaaatcaagattggacaagaaaaaacacccttctctcttcctagcttatccaggtgttttatgatcttcgaagattttgatgaggaccttgaatgatccaggcccataaacagcgaaatcaagattggacaagaaaaaacatgcagagttctctgatccataatccaccaaagtactttggaataggaaaaagtctatataacccctgaggtattcagggcagtctacataacccccagaactataaaaccagatactatacacattaaactttgataaaccaaacaaataacatctggtctggttttgc

SEQ ID NO: 14847 - DNA, 630 bp, Zea Mays
aaattcaacaacaaagtttcaaacttcaggcaattatgttgtttcccagaggagaccgtaaacatcccagtgggggaatactattgccctcggacatctccaacttgactcctgacataaggggggagcaattcacccacatatttgtggggaaacaattgtcctgcaatccctatgcacatcaaccgaagccacgtgtgaagttttagtgcgagcaggtggtggctctagacaacggcgatgtaacgtgatggggggactggtgtgatggtcggcctatggcgacgtaacctaagcatgatctccctccctcgcaccagatctgtgtgactccacctaggcaagcctcactaggggtgaagaagaagaacaagtatgtgtttggttctcagatttcgactcctcctttttgttattcggtaagaagcatttttacaaccactacatgggccaagaatcactatagattaggcctaacacatgccatattattcccctaatcttttgttaagcactcactgatttctgcccgatccatctccttccttttctgcaacatctcccagtgccacagaacacgcttgacccatagcgagggcttctcgaaatttgtcgttcatcacataatag

SEQ ID NO: 14848 - DNA, 589 bp, Zea Mays
agttacaacttccaccaggcagttccatacacccagtgttcaacgtctcgcagctaaaaccagtcgtgggttatagagatcctgtccatgacatattgccaaacttatctcatgacttgcaggttcctgaggaggtgttggactcacgtttaatcaggagaggcgccaagaccgtgaagcaggtattgattcagtggacagactcgccggcatcactggccacctgggaatacaagcaagctatccagcaacgttttccgttggcgccagcttggggacaagctgttttcgaagggggaggagatgtcagcagtaccaaaggcaatgccgatgggcaagaagtaccgaaagaaaagatgaaggctgaagcaggaagaaaaagggaacgcaggcaaaatcccaagtacataggtgagcagtggggaaattaggcccagtaggaccaggaccatcggatgatttctatatatactatgtgctataataagacaggtgaacttggatgaacctaggcggcggcagacactatcacaatacgaaataccactcggcgacggatttgccgcggaggcgcacctgtgtgttcgtc

SEQ ID NO: 14849 - DNA, 403 bp, Zea Mays
gaaaggtccaatcatatccaatccccagcatgtgaacggccaggttacgggtgtggtttgtagttgctgtgccggtagatgctgctgttttgacaagtactagcaggcttcgcacctctgaactaacttggctgcatcactttttgctgttggccagtagaaacccgacctgaagactttcccaactagggtcctggatgctgcgtgcactccacattgcctagcatggacctcatccagaagttgctttctagtagctgagagaatacatttcatgaggactcctgacgcgccccttctgtatagcatttcctcaatgagtgtatagtgagctgactgccttgcaatgcgctcggcggtatttttgtcatctggttcctcttcattccttatatatctgatg

SEQ ID NO: 14850 - DNA, 377 bp, Zea Mays
ttagaatacaacagtatctacaatcgcagaagtaaatgcagtatgaaatttcttcgtggggcatagaggtcgccctaagatgagtaattgcaaacgcgcttatgttggattaagtaagcgcgaatgtgtcgtgccgatttaagtcattaccaacttaaactgaccgctccgttagtagggtatagtggtcaccctgaatcaagtaagcgtgagcatgtcgcaccgccttaagtcattgccgacttaagacgattgctccgttagtagggtatagtggtcaccccgagttaagtaagcgtgagcatgtcgcaccaccttaagtcattgccgacttaagccgattgctccgttagtagggtatagtggtcaccccgagt

SEQ ID NO: 14851 - DNA, 857 bp, Zea Mays
tgcttgtaggactacaaatcgatcttcattttctccatgaaggtgaccgggtggaacctcctctcaaactgcctgatgaaaacatgccaggacaggactcccggtgaagaggagtgagctgcatgcacgcctctccaccaaatttgagcctctcccttcagcatctgtgtgccaaagcgaacacgatcaccatacacaatctcaaagacgtccatattatcctccacataagtcagccaatccgctgcctcgactggagtaccactgccatcaaaggtgtccagcttcatgcccatccactgcatcagagatagaccactaacgggaaggggcgcctcagccccgccacttggagcagcacccgtaggaacagcgcccccgggcactcttccgcctccagcaccctgagcagcacccataggggcaacaggaatggcttgcctcagaatggccaactcctgctgcatggcctgcatcgcggctaacattgccgccggactcatggaatccccactagggacttgcgggctgccacgagccctacgagacggcataactgcagccacaggagtaagtaaataagtaaataagattggcatagcacctcatcaaacaatggcaatccagcactgacaataacataagatatcaataatagagcaggaaacccatcctacatgtgcagtgtgtcaatttattattattccacttgctaggacctacagcctattcctttgataccaactgtaacaccccaatgctcccacacaatgaatgttaccaaaacccttcccacaaaacttaaacaacatatgaaaagaaatagagacagaaagtaatgcaaaaatccggcagca

SEQ ID NO: 14852 - DNA, 857 bp, Zea Mays
ggcgaagacgccgtcgtgggtgccactggtggcacaagagggggcatcgctgtaggtggggcaacccctttcaccctagggcgcgacatcttagcgtcgcgacgcgggtccaccagccgaagcagggccttccgcttctttcgctgggtctcttagtgatccttatccatcactactgacacaacagcactaatatttcttccgtaaggaaagattctcaactcacgagccatacgagacataaaatagtcatcatcggtggcccggggaatagggtccttcctatgccaccgaccccaggtcaccttcaacattcgcgaagatgtttcccggagttcgagcgaagtcataacctccccaggcccagcacatgtccccgtcaattcctcaacaaaaaacatagaggcccagcacaagtcgccgaaggccctgccgcttccctctccgtacctttcacatctattttcctcttccaagttgatgtgatcacagcctttcccttcgaggtgccctcttcaaaccgggtcttcaccagtttccctcggtcgttcctagcatcagcagagtccccctccgggtaaggatcgtaccacaagcaatttagttctaaaactcggttcaaccttatgttgcaacctcatatatcccaactccttatcatctccgtcttaatcacaaacaacaatattaacatcctctgactccacctccctaacaaaggcggctgcatcccgcccttgcagatcaatggcgaaggcagggctctgcaccatctaatcacccaaaaagggcatcggtcaaagcttgacttcgcccagaccccacccgagagccaacgaccaactgctcatccaggc

SEQ ID NO: 14853 - DNA, 549 bp, Zea Mays
gttcgtgggatgaaaagaccacaatatagagcattaagtgtacggaaagaaacacaaacattgagtcgtaactcagagccaagagagggtcaaggatcatttaatatggctactaccatggataatgaaacacggctaaataacattgtaaagcgccccttgaaatctctttctaaggtaaagtttggtataaggatgcatctatggtaattcattgctttccaaattattgggttcatctgcggttaattttatgcagagcagtgattatatgcttggacccaaggaatgtgtacttattgttggttggcggccaaaagttaccgaaatgatacgggagtacgataattaccttggacctggtagtacagtggtatgtaggcacagtgacaaaaataaacaaattgtgctactcacattttaatcatggttcatatggttatacctgtactcccatacaaaagttagggtataattttactaatgaagttagttaaatgtgcaggaaatcttgtcggaaacccctattaaagagaggagcagtatcat

SEQ ID NO: 14854 - DNA, 559 bp, Zea Mays
catggggtttgggcctgtcaccgaacataacacatcaatgttggagatgggacacttcgccaacctgctgcaagacgtgttgcacgcattgggaacctatgtccaacccatgtacgagataaggcgagtgagcgagcctcccttggcttgctactacatcactcgcattcacgtcagggtgatggatgcagaggatagaggatgaggactctatcagctcatgagtctgacaccgctatccacctacgctgcttcgatcagcgatgctgcctgacggactttgtggtctctcagccacacctaccgtcagcagctgcatgacacgaggttcaggcatcttcctctgcgtctgagtggaggaagccagaccagcatcgtttcaggtggagctggtgaggatcgcctcaacaccctagctggtgtagtggccggtcttaaaaccgacctagacagtgccaccctggatctctctagggtgtatttggaattggaggatgcccacgccaggattgcagccctggaagccctacttcaaggacgggatccgcctgaagctcag

SEQ ID NO: 14855 - DNA, 514 bp, Zea Mays
agaacaacatacaccatgccaccaaagaaagcagtggcaactagctccatccttgcaccactcgatcccaatcaggcgaacaaagctctcatcagagaggcaaggaatcagaaaaaggaggccatcatctcgccccctcgtgaggaagagcttgatgaggaaatcagcaaccttgaagccattcaccagcaagtggagaagtgcagggagaagatgctttgcctttcagaactacaaaggaagatcgacgaagcaactgcgcatgaaaatctcaacaacttcagggatcaaggttacgatgggcgagatcatcatgatcttcatcatgaggtgtacaatagccaagatttcctctatgatgaagcctccccattgacactagagctgcaagctacaccatggccaccactgtataggcctcctacactacctatctatgatggcctaacagacccgaagcagttcctcatgagctatgaagccaccatatcatcctatggtggaaactcgacag

SEQ ID NO: 14856 - DNA, 345 bp, Zea Mays
cttgtgtgctggtagaatgtgggtaatttgtttgcataaacccaaggctaggctatgccactcgtttagtgaaccataacccaaatcgttatcagtccttcgaaatccttccaagtttccaagcatggatgaagttgaatttttccgttattactacatgaccaagctcatacctataaatgcttagatagtctctttattggacctaagatgcattcggacttcaaataaagatcttgactctgtgttcttgggaattaacttgtaactcccttagtggtcgtgtttccatcctagatcctgcccttgctcagttgatgcaggttgaggtctttattgtatttg

SEQ ID NO: 14857 - DNA, 727 bp, Zea Mays
aaaaaattggagatcacggccctgctaagcgctgtgtcaagtactctgaatggggcttcccattgtacagtacactgaaaaagatcaccgattcactgcacttcgccgccggtgacttcgcgcccgaattcgcgccggtcgccgcgattcatgctcaacgcaaagtagaaaatcgaggggagtaaaagatcttggcgcctagataagcttggacccggtcactggacggttcaccgtacccacttgctctacagccagccgtgttaatcctcgtcggcgttggccgcttgccgcccgtgcgccacgtgcctaggagctttaacacgtcgcagtgaaccatagtagtgagtccgtccatcgtcggaggctttgccacggtgaaagccacgattacccgcgccagtgcatttcccttctctccggccgccagcgcgccttctcaaaattagacgtcaccgccgtaggactctataaattgatgccctagtgagttccgctatgtaattacgcatccaatgcaccagcccttgcctctgatcatccaccagagcctcctaatttcgtatttcccccaaatctgttttctgcaccaccgtgaacacttcgccgtggccagccctctgcaagtcagttcaagcttctttgattagtgttctagcctccctcaagcctcctgttgctcgtagacccattcgattaagctagaccacaccaaatcgtcatgaac

SEQ ID NO: 14858 - DNA, 467 bp, Zea Mays
cgagccgtgagccgagagcgcggcgatccagaagatccaggtaccccttcttggaccgcccctgcgctgctctttctcggctgtgtccgcgtgtcgcgtcccctgagacgtcaccggcgtggagtgacaatccgatccggttcctcgttttctccgcagaatgtctccccccttagtctgttctgagccctaaaagttgaatacgcgctgtttcccccaatccatccagttgtcggcttgtttgttgcgtggtggagttcgtaccgacataggtggtttggtctagttttccgattttatttgggtgttcaactgagccccatgaccctcgttttatccgcccgccgctttggaatggagtgcactgctaattagatgcgaacacaacctctgaattcttacatgtatttagtatttacgaaccgttttatgtcagtgttcgggctgccgtatgcaatgaatcagtg

SEQ ID NO: 14859 - DNA, 538 bp, Zea Mays
ggcgctctcctccggcgagctctggcggcggtggctgagtgcgagagagggcaaaagtgggcgaaatgtggtaggggagagagagcgggtgcgggcgtggctcaaaagggagctgggggatgtgggcaggcaacgtggccggagttctcagagtgcgtgcgcgcgggtcagcgatggttcgtggagaggacggagctagcggccccacggcgtagaaagatagagtggagcatgggcgagtgaacgtgtaattacactgacaggccgagcccgctgcacagagggagagcggggtgcgcgcaagggagagcggcgccaaaaggtcgggcccgcctagcagagggagagagggggtgggtgcgcgtgcgggtgagctaggcctagctgggccgaatggatgagagagggagctaggctgctttcttttttccttttcttttgaattttctattccttttctttttattttcccttttgaattcaaatcaaatcacaaatttaaatgtaaatatttcaaacatgtgcatcaaccaaaaac

SEQ ID NO: 14860 - DNA, 1221 bp, Zea Mays
gcatgatccagtgctcaaatatgttcaagtcctatagtcgaattgtagctggtatgtagcactacaatattgctgcagagagttggacttgttgccacatgaaattgagagaaataggcgctccaaagtgctctatcaggtgttctgatggggtctcgccatggtacagtagactggaatggatcaggacgccagtgcgactgctcttaccgccggcgaccgatttccgccgcgattcgtgccgccgccggtccaacttgagcttggggtaagtggataacacctggtgcacgttgccgtggataagtccggccggaaaagtaaacccgaccaccgtacagagttgccgcggtggaaacccgataggctcgccgtcgaccgccgcttcccgaccgtgcgccgcgtggcctagccgttttacagcgtcgccatgactccctctacccgtcccatcgtcgccggggagtttgccacgccattagccacgatttcaccgcgacgtcttcttccttatctccggccacctccgctagccgcttaaattaaagcaccaccgcctcggggctctataaattgaccccgccgtgagcttcaccacatcctcacgcattcagccaccgtgaatcgctagcaatcgtgcaccagtgcgcttgaatttcggttttcccccaaatcaagtttccgccacccgaaatcaccctcaccgtcgccagcccaattccggtcagctcccgttccctgcttcctcgtttaagctttctcacatgccttggatgcttgccaagccattgaattgaactacgggctctctggtcatcgggaacacgaccatatagccgctatgcttacggtcaccgtggccggagctccgtagttgatcattcgtgcaattaaattgggggaaacactcttcaggtagtgaatttggtttacgccatagctaggcgccggtcattgccctaatcggccggcgtagatgctcgctggagctcctccgtgcgtgaacgacgtcgagggcgcgtcgggtaaaggaatagataattggaggacttttctgcatttggtcagtgacacaaaagaacagtgagcaaacctgttttgatttagttaatagatcggggtcttctgtgcaaaactcccgcgggcgcgcacgcgtgggcgtatttctgctggttactgggccgcctgggctggattcagcccagtactattctattgttt

SEQ ID NO: 14861 - DNA, 1066 bp, Zea Mays
agaacacaaacacgctcgaagtacaaaatcattgtgggtccttagatagaactagagtcgtctagagacaggaaatatgagtactaaaaccctaagtcaagacaaatggcgggcagagaggttgagcgtaccaaaagtgctagatactcggagatgactcggatgaagggtaactgatctccggataagcacgaaggcatgccgcgttaaaaggaggattcaagtagaattatagtggtcacgacttgtaaagggatagccctctagtcatttatataaggctgaggggcaccccgatgaaaacacatctctcagcccgtcaccacctcatagctcactagctttctcatagcaaccatgccaccactagatcgacaggagaactcactctccactgcccatagttcatctgtaaccagtgtacaccagtgatactcaaatactcagcctcaacaagtagggtattacgcattctagcggctcgaacctgtataaacccctgtgtgatccgacgtgcatccgcacgtaccatcgagtcacaatcaacgacgtcgtccttcccaaatgcatcacatggggaacctcgtggtgcgcagtcggatcataaacaccgacattgctcgagcatgaccacgcccaagccgcctatgatcgcctacatcaagtgtatttggttggtgttagaaatacactctagtgttgtcacttcgccatcgccaaaaatcctacaaccatcctgtaacgatgcaatcattatagaaacccccggaaacatcccatactctataggcaacgggaacaccataatctctttgacttgagacaataaaaaaattatattattaatgaaaaataaatccaacaagaaacgattttgattatgaaaatagaactcgcgcaggacaacaagcacacatggctgtgctagccataggagcctagctcggttgtctagggccctaggctcctagttttggtggcattgagactatcttcggcggttctccataaattccacccctatatcatttgcgtcacgtcacctagatttcaccccttagttttc

SEQ ID NO: 14862 - DNA, 431 bp, Zea Mays
gtagccccacattctccattctaatatggatccaaagtggagtccaaaatttggaaccttcaccgacttgctcaatgatcaatctccataacatctcgacaccccctatgagtgtaggataggtctttttcgaggacctttttgtcatacatcatcattgtgagaggatgtttctgcccgtccccattccttgagttcacaacctctatttccatacccatatcctccttcatcgcatcctatcgaccttccatggatgttcctccttctaataaaaatcctaccaccaatgatcctcctatcaccaaatctcctaccatcgatactcctcttcctacacctttcatttatccataccctcctccatactcatatgggtatccaaatgatgatcctccttatctggtgctccttcccatatggtgctcgtc

SEQ ID NO: 14863 - DNA, 694 bp, Zea Mays
ttcaaggaaacctgagtccttgttagggaaacccttccgcacgcctctcaatcgccgcaggaaatctcgcccgacgggcaccaaggaccaagacaaacccagtccgtgacacgggggcccgagtccacaagtcatacagtttgtgtgccggacttcgggtgcggaaagagtgaaccgccgcacgcgcctgtagtgcgcctcctcggggccgctgcagaagacaaacccagtctatgacacgggggcctgggtccacaagtcatacggtttgtgtgccggacttcgggtgcggaaagagcgaaccgtcgcgcgcgcctgtagtgcgcctccttggggccgctgcagaagacaaaaggtaattgtttaaaccaatgcagcagcaacgaggtgccccgcgcgtggcctggcgaaaccaccaagcgtgggggctcgtgggtcagttagccgtggggacagatatagcagttagcgtgaccgaaggtggattgacggtgggtgcgtcaacagacgcactgaaacgacatgccaatcatcaatcaggccatgttgaggcaaagtacaagccttggccccacctgcaggctcgcaccctcccctaaggtgggcccaggggccactgtcggtacccagaaactagggtaccccagactactgtgtaaagacacagtacccacgcgactatctttagtcgcgt

SEQ ID NO: 14864 - DNA, 621 bp, Zea Mays
tctacctctgacatgttctgccatcagctgtgttctgccactgaaccgtggtacacgtcttcttctaagacatgtgggtcccaccgaccgtacgctgaacccagtcccaccaaccgtacgtcgaacccagtcccgcgcaacaaaataaacagtacttacataggttcataagccacgtttcatctctcagtgagcaacatatgatacacagctgcgcttataagccatgttccgtcactctcaatggccggtgtggcactaatcagacaaatggcatactagcgtgcctgtgtcagcggttcatgcgacctagtgttttacatgtggaccagaggcccattgtgtggcctagcgacgcctagcatgtggcccaacgtgtggcctcttcaacaagagcatatgacctaaccaccgccaccccactgctcgcgcagcctcctccaccgcgctccaactccggcggcctcccctctctctcctccactccaccatcggactccacctcctcccccaccgcaccgtcggagtccacctccccaatggcggcctccactaacccactgccatcctccaactcctcccccaccggctgccttcactgaaccctcctcttcaacgcac

SEQ ID NO: 14865 - DNA, 646 bp, Zea Mays
atatgccatatgaaccaaggccccctgccgcataatgaccagtatatgatccatcgctgttgttgacaaattcttttgccacaaaactcgtagtcgtagttacaggggttgtggtacttgcagatgtcagccgaaatttcaattttgacttggaagactccaccgggttcatgaatgagtcaacaagtcgaacaacaacttcgttttcaattgacagtcttactttggggtcaaactggacaacccttgataaagatgtattgatcgcaactataaaaagggcaggttatggtacaggaagttaaacatcaatctatatatcagatagaagctgcataaatttcaatttgtttgatatttcacttgaatataatccatttggatcatcatactacaatactacatacaatacatgtgtaatagcaccagcgtatcgatattgtaagaattacaattgcattactatacaacagttgattcatgcattacatgaacgtgaaaagattgttaaagaaaaggcacataagaaagctaaccagacctggcaaaactgtcatggcatatggatttccaccatttagcactatgttcccacacagtacccaaatttcatattccccggcgatttgaggagtatatgaaacat

SEQ ID NO: 14866 - DNA, 636 bp, Zea Mays
ggaccaattcagtgacatcagcagaacccaaaaccttgtcatcaggtacgctggcctctaaagcgacgccttgaccaaaggcttgggctgtcaccatgcaaccggagtgtggaggagaagaccctacgtgaacatccatggaagtgcaagagggagaacccgctcggacaccctcgggggctggatcatagcttgcactacccatccgagctggatcatctccgacagcaccctcgggggctgggtagtaacttgcactatccatccgagccggatcatccccggcagcaccctcgggggctgggtaaaggccagcaccgtcattgagggccgagtcctctgcagcagccgcctctaaggctgaaggtccctcggtcacttccacgggagcaggggaatccaaaccagcctcctgaccctcaagactgcgctccaaggtcgatgaggcgcgggacgctgcccgggaggaccccaacccggcgtcgagcacatcaatacaaacatccatcgcgccaccatctgccggttctgatagcagatcttctggaatcatgtcctcgagagtctgatcaaagttcgccatagataattcttgcagaccaatgagggcagacaaggccggagaaggaacaccgc

SEQ ID NO: 14867 - DNA, 723 bp, Zea Mays
ggcttgtctaaccctatgctgctcaggaacaagatgggaattaaaatttgttctaccgtcatctcccagtctaagtaagcttcagcatcataagtacccatgaacggtggaatagagaacttaatcttagcaaatggatcatgatatggttcaggattatgatgacgacatctaccattacctcccataccttgttgattatgtgtgaggagttgtcacagcggtgcataaacatcatcgtcatcgtcgtcgtccataggagagtgagttgcggctagagtgggtggtaggggacgagcctccagtacgtccatgcatgtaacaagttcatcaactcgtcgatcaagctgctcataggatgtcgctgcagagtcctggtattttttaaaagcttcagtcatcgagtgcatcatctccttcaattctagctgagagacacactcatcgtcgttaagcttaggccccttctccttgtccatttggttctttggtcctgtcattgttagcacaaaacagagacaaaaaggcaacaaacaatgtgaaccctacaactatctctcagggtggtggtggaatacaaattatgaagcgtcttaccccgctcttacaaggttcttaccagcactgtaggtggcaaacggtgaccggtgtgactgtccaacgagcgtgggtgtgattgcaaaggagtacctgttctgctcgagagaaagctggagctctggg

SEQ ID NO: 14868 - DNA, 762 bp, Zea Mays
gcagagcgacgctttctgcctggccgggtctaccgcaggcgcgcccgttctgccccaccagaaccggggcaacattcacctgccaccatcacgatggatgcatcgctgggggtagctgtgggttcggagacaactcttgacacaggcatggagaccgctcagcaggctacaactgttttcccagagctaggggagccggccactaccaccgtggcatccttcatcagcaaccacacctgccctgttgcaccaccactgctccaggagctccatcaagcgccaccaaacctgaagacaaagaagaagcaagctgccagggcgacccgcaagagcatgcggctggcggcgatcgcatggccgcgtgggaacatctaggaacgcgcacgccaggtcctgctaaagcgcctgggcttgctgcctaaggaaggccagccgtctgatcaggctactgcaagtgccacgctggagacctgcatcaacctcttcaagggtccactgtcgtccttggtgctgcaagcgttgatggacctctgcagaatcattccaccacaggggcctgcggcgcaggtttaagacatgcggtccggcacgctctgcaggggcctttagtctattgcaatgtctagcacatcttcgttcttttgtcctaaatgcgtcatggtgtatctgcacaaccaatttgttcggtggccgagaatcacggcagcagccaggggccttcaattgctgcgattctgctggaccactcagcttagtcgtcgt

SEQ ID NO: 14869 - DNA, 550 bp, Zea Mays
gcagccagcagtggtagttgtagtagccctgtagctgccatgtcgcgctcccgccgctgcagcgaaagggacaccgaagccgaagcagatctgaatctgaacctgctcttgaatctgacgagagggcgggtgaggaggaagaaccttctccgctctgctcttatctagctgaaaggctgcgcttccgttgctttgaaccttctctgctctgctctgctctgattctcgaagcggatccatggaccatggcgtgttcattcaaggagcatgcaagaaaacaacgacgacggaagaacactagttacatgttcgttcacggaccggaccattcatggtccaggcctccagctcgcggcaacgctcgatcgatcgtctttccttccgagatcgagcgataccaccatacacacgaccaccatattctagtacatatgtaaaagccatgccatattgccatatacaccaccgaaaaacaaaattcaattgctttattgcgacagctggaccactgctgatcctgtgatccacgcccggccgccaccgccacggc

SEQ ID NO: 14870 - DNA, 459 bp, Zea Mays
ggccaaggcccattacagccgacacccccgcagtcacaactctatcctgtacagatgttgagactggaccgaaactatgtgaaaactgtggaaggaagcccttacgtgaagatgtcagtgaactgcgaagtaatcgagatgcggagaacgcgaacatcgccgacaacgacactctcgaacgaagtggagatagatcaccacgtgctttgcgcgctaatgctgcacaagattggagaggtagaccgtgctgacattatcgcagtagacgagggtggcacacgcgaggggtctgtggagctcatgaagaagctgatggcgccagaaagcttcggccatgccattggtcataacgtgagactcggcctcagcgatggagctggagacgacgggctgccgcttctaggatcaggagacgaggttggtgcccaggaacacagcgtagccggaggtggacccacg

SEQ ID NO: 14871 - DNA, 562 bp, Zea Mays
accttcgcacagatgtgggagtcgttgaggtggaatcgccggttcctggagattcggaccgccgattctgccggcggcgcttaccgtgatgagaacaccccctgctacccgaccggcaccgtttgcaggagggccccggaatctccagatcgatcgccgccgtgggcgaaatagggtggccagaggaagggaacggacgaaagggaaagtatgatcgttgtccagaatatgcgaggaagagagagaagtgtggatttgcgcatgctgtagccagacctctaattatgcgataccctatacctacacgcatgctgttgggacaggtacagtagctcctcaatacgtaaaatggggatgcgagaccctttacgaatcctactagagaaagcctaacccagcatgatgccatgcataacccacccgccgctgtctcacgggcaccaaaacaccaccgcaatgcagccatcattgatgccctgcagtctcgcgcgcaccagccgatgttgtccgtgcaacgaaacgtcgtcgcaagcgtggctgtgtgcacgcccaccgaagcgct

SEQ ID NO: 14872 - DNA, 604 bp, Zea Mays
attgactgtcaggtgcactgaatctgacatcgccatggtacagtgcctgagcagatcagaccgccagcgcggcaacttcaccgccgacgaccaatttccgccgcgattcatgccgccgttggtccaatttgtgctcggggtgagtggataacacccggtgtacgtcgtcgtggataactccggccataaacaaatctggccaccgtactgcacacgccgcggtggaagtcgataggcacgacggcaacagccgccttccggccttgtgccacgtacttgggcacctccaccgcatcaccgtgaacccttgtgactctccgtggctcgtcggagtgactgccacgatagatgccacggattcacgcgcgccagtgaactcttactcctccgaccgccgcgcgtcaccgctaaaatttccggccaccgccctcccgtagtataaattgaccccaccgcgagctccgtaaggtagtcaagcgtacagccaccaagaattagcctcgatcgttcaccagggtatgcgaattttgaacttcccccaaatccgcgcaagaacaccgtaggagagacctcgccgtggccagcgcaattcaggtcagttcat

SEQ ID NO: 14873 - DNA, 322 bp, Zea Mays
cctttttcatgttcatcttcggacttgtataatgcacatgactgtgcaacctgggcaaaacatttgcatgtgttaggctcaaatactaaaaatgaaagaaaatgtgatactgcatgatgattaattaccatgtcttgcattgtagtaccactctgtcgtcttaactgaatccttgttaaacaaccacaaaacttgttaacacatttatgaattgtctcccatcggtgcattagagaattaacagtacattgtgattggcatggtttatgttcattgaagtattcgtagatacgagaccaataccttcctactttttgatctt

SEQ ID NO: 14874 - DNA, 1180 bp, Zea Mays
attatatgctttaattctctgcatagattgatgcaaagccacgctaaggaggagaaactgaaaggtagaagatcgattgcaagggggcaagccatcgccgaatttcagtttggttttacccccgaaaagttttttgtaaacggatagtgaggcaaccatgtaatttgtattagagagcaggtgacaatatttagagaaataaatacataatatgttggacatagctagttaaatggttaggatgacatttcactattaaaaccaacaaccagtgccatcttttgcgtagatcaaacaaccacgtcagttttgtttaagcaaactgttaactactatgaatctacctatgaggttcccaactatatagttttgtgaatcggggacatgctcggttggacgaaccatcgtgctaacgttgatgccggaggaattcaccagagcttagctgacagaagagataaagtacaatcccagtcaagcatgcgagtcaactcatcagagaatattttgctgccagtgaggccatcttgagaagcgactggcacactgaggctactggcacctccggtacgacgctgctagtaaaacttatttcaccctcctataggaaagggaagagacaatattctttcgtataagcagacatagagccaacattctttcgcataaagttctgaaccgatggctatgaactattctaaaaattgacttgctaatttgcatatggatatatatttcattatgacgtgaaaacaatttgcaagtatgtatgatatgttgttttactaaacgacttgaccaatctatatttttggtacaaaacgaataaaaattagttatcatagttataattgatattaaacgcaaagaaaatcatacagcgcatcgaggtagcaaactcacgtaaaaagtatcatggttggccggaacacgacccggttttaattttcccctatttttttataaaactctatattatacttgattataaattataaaacgaaaaatgtgtgtgtcatgttggctagacagatgtgagtttaaagcaaacaaccatgattcaaatgacattcacatttacatacttgcacgactgtgcacatgcaagctttgcatggagcgaaggcgtttgcatgcatggttgcatgcaccaatttagttgcatacttgcatgcgtgat

SEQ ID NO: 14875 - DNA, 498 bp, Zea Mays
gaaaactctgtcgcatctgagctcggcctcggccaactatcctagcagtagccaccaactcccttcgaatcccgcaggaggccactctgacaactgttctaatcactccctacatgactgcatgcctaggcgtaggtctgaccatggcctcaggagaaacctctacctctctcgatcatggcctcaacctaaataacatcgacaaaaggatgctcgatgccaccaacccttccacaaagacaacaacaggatgactacaaaattgcagggctggtttcaggtctactatttgccatacgggatgaattaccatgtgcttttcaccatacttatcactatttcaacaactacgactcggacaacacatccacaagatgggctcgggtacgcttccgaaccctcgaccctggcctcggctctctacttggtcaagagacggaacaaaggggccaaacttccctcgatcaaagacaaccacaaggacaaaggccatttcgg

SEQ ID NO: 14876 - DNA, 714 bp, Zea Mays
tgttaatcgagaagcctatggggttttatgataatctgccacggtagtatcacatgcatcgcactcgagccctcgaatcaaacgtcaacagttaggatcagatcgcataagcagcgaaccggtacgtcaccataccctttggatctgaagccaacgtccgagatccaaccacgccagtgcccacgcccagccctcagatggacgacccacgaccacgattgaaaatgccaaaaaaggggggtacccacggttcaatcccagctgcaacccatgagatcaacgattcaggctcaaccccgaagcggtacactcaggttctaatcgggaccgttggttaatgcatcagcggcaactacccatcgtctccacccgagcagtcggacacggcggtgaacgggtctccggcgaaagagccattgccggattcacacatggtgacccagcgccccaaagctcgattcatcgtacgctacgcgaaaagggagtgaaggcaaatccgctaatcgtgaaattactggtgatcgagacgcagttggcgttgcacacggtggctcacagatctgaggcgccaccattgcttcggcgagcaatttagtaggtctgggttgatcatcgtgctttacgaagctccactaaggtctaccgtgctcctgcgaagcgccatgccccattacttgactctaatccttggtttaggcggtggccaccctttcc

SEQ ID NO: 14877 - DNA, 380 bp, Zea Mays
aaaggggtttgtcgcggcagaggtgttgccttagccagccgagccacatttgccataatggtcctaggcccacccgatgcaggcgcaattctacgcggggcgaaagcctgtcaagatcctagcgccttagagttcgtcggcgcagttcttactggagttgggtgaggcaagcctgctaccacatttggcaccgtcggagaagatattttcctggatgggtcagcaaagcagtgcaggactccttcctgatctacaatgcaggagagggatcccatgaagatgatctctctagcattgaaggtgactgggatgttgaagaagatagccaaggagtcatcgtagatcaacgtcgcaccccctacctggcaagccagttgtcg

SEQ ID NO: 14878 - DNA, 814 bp, Zea Mays
ctcgcctgcccggccagcggccactagcgagcccagcagctggagacggccagccatgccccgcgaggccgcgatcctatttccatctaactgcattcgtacgtgcgtgggtaacaggaaggagataaccaatggtgggccccacttgcatgcatcacgcctccataatttcccacatgcatgtatttctttttccacacgatccacaatccctacggtcggcacttgcatgcacaaccctcacacaagcgagatctgcaggcatgcaacacaggtggaaaattgctcccacacctgatcccacctccccttgatactcttgtggctaagacccatgtggtccatcgtatggttagctttcgaccaatcaaatcatgccacgtaatgtaaatccgagaaacactagttattcaatatatacgttgtgttgcgagtccgtctcgacttgtttcattcgtagcgacttcgtaataacctcgactacgtgttagtaatattatttggtcatgttttcgttaattgtgtagttaatcgtttatccgaggtttatttgaatgacattctaattaaaattaaggtatagtttttaaatggtgattttatagatgcaaattaatgtggttagtgccaactaagatgttttcaactaatatttgtttaatgtaaatgtgacgtctgtttagcttttctcgcatgtcgcgttgtttcacacgtggtcacgtgttgattcgcgcaccgttcgcgtgctatctcgtgcgcgtcgtcatgcgttgtccacgggtgtcgcacgtgcgaatcgcgtgcaccaccgcgc

SEQ ID NO: 14879 - DNA, 607 bp, Zea Mays
gacgggggcagcgatattccctcctaagccttgtcggcactcgtcagcctacaagggctttcaatatcaggctttgatcaggcactggaagaggtcatttccgaagatattgtatcagagcctcttaaggctgacattccgaccatatgttcagcggtcccggatggtggtctttcactgcatgattcttctgggcaagaggtatcccgggtggtatctcgtgcatcgtcgaccttagaaggcagtctttgatgcaaaagtgctgatccgagtcaaccagctcctatggatgtggctgaggggccttcagccctagatgtggctgctacaaaaaacccagcccccgagggtggtggagcgggctccctctctgctgcttccatggatgtccatgttgcatcaccgcagtccggtccgaggaggctacagtgacgcatgtttccacgactctcgctggtcaagtcactttagaagccagtgaaccagacaccaggagcctgccgcctgctgatggggttgaaggtaccccgagtcatgctctcgagattattcatgccgatctcccctcatcgagccatgcaccgactcttcctgctttgggtcttcc

SEQ ID NO: 14880 - DNA, 461 bp, Zea Mays
tgtggagagcttgagaaagcctagctaggtctggatggagatgcctccgagggagttcaagtgtgctcgtctctgggggttctcgtccccagggggcttcagtcccttcccttgcaacacatgtgccctccttttataggctaagaggagcacatacaagagagttgggctcgacaggtgggcccatgcatactaaaaatatgaagcactgagcgacgggaagggctgatggaccaaggtctttttccgcagtgggtaggtgtcatcccttggtcgtcgtgcgggctcatcttcactccgtcttgtcaacgtgtggatgaaggctttggcataggttatggcgtagcctagcccgtcgtcttgcataggtgagtaggtggacggtgttgtcccatcccctctgcctgtcttttcgcctggtgtcgtagtgagaacagcgggcgtcatgatgggagttaccc

SEQ ID NO: 14881 - DNA, 477 bp, Zea Mays
cttctttctcttctcagcagcaactcacactgtatgaccacagactctgtgatccccagttgttccacaaaccaaccaatgaatcaaacatgcaattttccggtgtagtcaccattcctggaatgcacaatgtgagtaccaacctcggacaaaaccacctgcagattaccacaggggttagtccagactaccaaaggatcagatcaaacaatgctcttcaccacataagccagatcctgatggaggatgtggatgagagggtcggctcacatgaaggtggggccgcccttcaggatgccgagaaggccttctacgatattcttcagcaggtatacccaccttcactcgactggtcaccgctacataacagcagcgaagcaggaggaccaaatgagggtagcagcaattatcacaaaaggcctcgcagaagcagtttcactaatgacatttccagtcacagcatgttgcagtccttgc

SEQ ID NO: 14882 - DNA, 296 bp, Zea Mays
ttttaatgagccgaaagggtatgctaagcctaatcgtagccgttcacacagatccaacggttgcaagctctcttccccaacccgacggcgtccaggcggtggagcgattctagccacggaggagacatcgccggagttcgtcatcatcgtgcacaaacgtccagaccttgattccctagcgctacacatggcagagacaaaagcaaactcaacggatgtcttcttaccgtgcatggcagcgagtggagccctacccacagcacgacgcgacggacatgttggtcacggtggtgacc

SEQ ID NO: 14883 - DNA, 498 bp, Zea Mays
cgacagaagacgttgctatgaaagaaaccctaaacgaggagcagaggtctgcctatgataagatcctatctgtcgttgacaccaataatggtggagtgttctttgtggatgggcctggtggaactggaaagacctatctgtataaggcactgcttgcgacactacgcagtcaggacaagattgcagttgcaatagctacatctggtgttgcggcttccatattgcctggggggaggactgcccattcgcgcttcaagataccacttactattgatgatggtgctgtatgtagcttcacgaaacaaagtgggacaacaaagttgctacaaaaagcatcgctcattatctgggacgaggcatcaatgactaagagacaagcaattgaggcgctagacaatagcatgcgtgatataatgggacggcttgggctgccctttggtgggaagactgttgtgttcgggggtgatttcagacaagtactccctgttgtacgcaagg

SEQ ID NO: 14884 - DNA, 455 bp, Zea Mays
atcaacggtcatggaccgatctagctaaagcggtattattcttggaatcttgtctgtctaactgggattggacgaccaaggtcatatccccttaccccagcctaagccgcggtggtgcacatgcatcccatggcggtgcgcgccggtgagcaggcgaactgcccaccccggtgcccgattttgaacgaggatgggtcctacgcatggaggcgacctaagtgaatgtagcagaggtctacttaccacgaattacagagatagttcttcccatggtgtggtgcggtacattggtgggtttgacattctggcgagcaatcttggtgactccaaggggcttcactcacgggtaaaatctccgtcaaactccacagatcccggagaagcgcctggatgaatcgttcgaggcgacgttctcgcgggtcatcaacgacgaccgctcttctattttaacaaac

SEQ ID NO: 14885 - DNA, 460 bp, Zea Mays
agtaatggttatgcctagacttccgtcgctagcacggaacacacgcaccctcgacaatctcagaaacatgtcaggagacccacacgagaaaggatatcgacacacaacaaggttttagcaggggtgaaccgttccttttgacccaaacgttatgctcccttctaggagaagctatctgtaatcacctcccccttgatctataaatggggaggttttgccccaagaaggggaggccctcgagtgagaagaacacgagaggacatataatagctagtaaagtcaggatagcctaaagacaaacaacacatagagacttgggatccttccctctctcacccacttgtacccctactaagagcaatcaggtgccagtcgtgcatgcaagcaaccaaagacagaaaatagggacattctacccaaactagtataacccttgtgcccacttagcacaccatttagg

SEQ ID NO: 14886 - DNA, 387 bp, Zea Mays
gaaggctcaaagggggaggaaatggaggcggaggagtcacacttgatcgaggcagcttctaaccgggctgacaggagcctagaggcggtggagcgtttcctcctcaattttggagagacgattttgatcacctgttcgtcgatgacacgagacatcatcccgtgaggccaggtaggtgcctctccctgtccattcttctttgttcgggttcttcttgccatggttaagtttgatcgttggatattcttttcagcgtctctagtctcggtcgttggctcgaagggaggcgctgcaggccacacaacgagaggtggaaatgttgcgggtggaagtggcctgcatagaggagaaggatcacgagctctccaaccttcgagctaaggccga

SEQ ID NO: 14887 - DNA, 574 bp, Zea Mays
cgaatgggtccttcacggcggcgctaagaacagtgacgaggagcttatggcttaactgagtccctcggcgaaattgggtggtttgcgcaagcactcgtgtgtgtgatgcagtgaggaagcagcgctcagactcaatttatagaggggtggctggaggtggacaggattcaaaagatctcccggtgcgctggcgagctcacccgcgcgggcagggccacggcgagcgtccggtgaactccttttagccggactatgccacctcatatttacatgcgccacgttgcggaagctttttactgcgatcgcaagtccgagcagtgcctcagccacggtggcgttcttatcctcggcgaggttcactgaaccacggtgaacagtgcgtctgacagcccgaattcaaatggctatggcaccaagttttatgtagttgctcgcaaacaaatctgtatcaaagttgtaccttgatcaatgttctttcattttggtataatgaccatactgaaaatcctcacggattgatcaggccagggcgctcaggttggcgcaataacactgaacttagaccttaatcagt

SEQ ID NO: 14888 - DNA, 543 bp, Zea Mays
gacaactgcatgcttttttggaaggaacatggcagagagctaaaatgcttaaaatgtgggaagtcgaggtacgtggagcttgtaaatgaagatggggagaaggtggtgacaaaggttgcacataaacaactttggtacatccctctcactcctagagtgaaacatttgtttctctcgaagaagaccgctatgcacatgaggtggcaaaaagattgtacggatagacaagatgggtaaatggtgcacccatcagatggtgatgcatggaaggctcttgacaactatgatctagagtttgccagcgatgcaagaaacgttcgtatcggcttggcaactgatggtttcacgcctttcaatatgaccactgtgtcgtattcatgttggcctgtcattgccataccgtacaaccttccacctactctttgcatgaaatatgagtttaaattcctatgtcttgttatacctaggcctgagcatcctggtgtatgccttaatgtgatgcttcagccattgattgaagagttaaagaagctatggcaagga

SEQ ID NO: 14889 - DNA, 479 bp, Zea Mays
ttgtgctaacagtaatgttaagaaagttaaaggggctaactctgctatcctagtttcatttcttcttctatttcaaggatctagttcacatagaagtattctaatttagcgtctttttagtataaaaggtagcagtatgattactcaacttttgtagccataaacatcctaggactatttgatgcatgccttgtgaatatttgtgccactgttcaagtccatgttgtggtattttttatgctagccccattatgtttaaatagatgatgcatggaaaattggaaatggcagtgagagtgcgcattccattttggttatgtttaattatccctctgaaagtttgttgaatatgatgtatccacttctctctctaagtgcttaactcaagcagcttcaaattattattacatgggtgtttgggatggctccaagttctagctccaatgtggagaaatatttttaatctaaataataaatga

SEQ ID NO: 14890 - DNA, 409 bp, Zea Mays
ggctatagaatattctagatggaaatagcagcggtgtgattggaagaacagacatttggcttgcacgattatcaaatgccactatagaatatttgtaggtcgagataatacagatgtgaccggtaaaacaggcaggcatttaacttgcaagatcatatgatggcttaggaattcatgtgctgcactgctgcatttgttgatggcatagtcgaagctttaagctggacctgctggcctgcctcatgcttgtgtgggcatggctcagcctggtgtctgccctttgagctcatgacgattgtctaatttctattgtttggcaacagaacaagtttggtggcctcccaggccaaggtgtctggttcctgtttcatgctggcccttctggttcggtaacctttgtctttctggc

SEQ ID NO: 14891 - DNA, 396 bp, Zea Mays
ctttgttgaggggtgacttctttgatgctctctatggactcagacaagcacccagtggaagagcgcccctagtgttgcatcctctctagcaaaagatggttgattcggggtacgtgaccatcttccttctacttccatattatcgagactgtgttgtacctcatcttcttccttgtgcagctaagtgatctcaataggtcaaaggaaagactttgagatgtccttttgtcagggcggtatccctactctctcgtcgtagacctcctcggacctctaggagtgtttggccgctatccacacggtgctcgaggttgctgatgatgaggtggtcggtctccatgctcgtctagtggaggtggaccgttgtgtcgcgggtcagtattgccctttattttc

SEQ ID NO: 14892 - DNA, 371 bp, Zea Mays
catgcggctgtggagtcggtggcgcgtgagaaaaactagggcagtggaaggagccagaaggggacctagattcattataccacgtagagtgtgggaaattacttcacaccatttgaggaggtgggggtgaggcaactcgagttagatataactctgcctctaatagagagtactgcatggatagtcagctaagcagcatccttgttatccaaagctctataaatactgttaccctaccctgccatcttttgcaacataaagaatagttctgtatttctgtctagcctagaaactagtactagtttatgctctagttctgtacgtgttagatagatacaacttaataagcatatgatgttggacacttaaaa

SEQ ID NO: 14893 - DNA, 567 bp, Zea Mays
ggcctgcaggtttttggtgctcgaccttcgttcgttggcagatgtcacaccgggccacatactgagctatttctttcttcatccctctccaccagtatctggttttgaggtctaggtacatcttggtagtccctagatggatggagtaggctgagctgtgagcttcttcgagcaggacctctcgtgcttccccttttggtacacacagacgatttttgaaccaaagggctccttgttcatctgtcctgaggtccgggagttgttccttgcgggccctttccacaagtttttctgtctctgggtctaggcgttgagatttgcatatgaggtcttccagcattggtctgacttcgagactgtcgctgtttcccagacatgtatttagttgagctgattctttcttccaatcttctaaaaagttggccccctttattccgaatggtttttgactgagggcgtctgctaccacgttggcctttccggggtgataatgaatttccaggtcataatccttgatcagctccagccatcttcgctgacggaggttgagatctggttgagtgaata

SEQ ID NO: 14894 - DNA, 517 bp, Zea Mays
caggactgcttggcctgggcatatgaatatattcatctttgccatatctcaaaaaagagattattgtgctcaaaatggattttgaaaaggcctttgattcccttgagcatgagttgattcttcaggtaatgtcgcatagaggttttgggcccaggtggatgagttggattagggatattcttcggtctggcacgtcctcggtcctccttaatggcgtaccagggaaaacttttcattgcaagcgcggggttaggcagggagaccccctctcgcctcttctttttgttctcgcggcggatctgctacagagcatcatcaataaagcgcgacaacaagacctgctcaagttgcccctcgccgcgaattgtggtcaagatttcccgatcgttcaatatgcggatgacacattgttgataatggaagcttgccctagacaattatttttttctcagagctgttctgaactcttttgcaacttcgacggggctcaaagtgaactacaacaaatcaagtatgt

SEQ ID NO: 14895 - DNA, 602 bp, Zea Mays
gtcatgctgggggtattttaatgggtatagatctggatgtctttgatataggggccattgatgaaggggatttctatgttaagtttaccttgtgaaataaacaagacgacttcaagtggtcgttggctacagtttatggttcggcgcaagctgataggaaggagatgttcttggcagaattagtccgtcttggtagtcaagaaagcttgccgctggtcataggtggagattttaatattctaaggtgtccaagtgaaaaaataaagataattttgatcaacggtggccttttcttttcaatgcggttatagatggtcttagtttaaaagagctggagatgtttggccgacgattcacctaggcaaacaatttggccaatccgacttatgagaaactcgatagagtgctggttaccacagattgggataaaaatacccattatctatggtcctatcattaaatcaagatatctcggatcatacacctttattactaaatacgggagagtcctgctcgagcaattcccaacatgcttttaagtttgaactaggctggttgcttcgggatgggttctacgatttagtacaggaggtatggtcgaa

SEQ ID NO: 14896 - DNA, 2302 bp, Zea Mays
gttgtttctattcctttctttggcatatctatttatattgatgtcttctccaatcaagaaaaggtagtatgtactgtacctactagcgttttagcttgactaaaggtcaggtccactttcttcacagcatgatatcttcgcgcaagtcatgaacccactggtggatgacttcctgggcggaaagagtggccttctggttgcaatgggtcccacaggctctggaaagactcacaccatctttggttccccaaggaatcctggtatactacccctcacgctgaggagaatcttcaacgcacaaggcgaaagcaaggtttccaggaaaccaacgcggtaaaatatgttgttttacatgcagtccttagttacatttgcaagctatggtatggaaggaaccttatcttgacgtttctttttctatgacaataacaggtcatttttcttctcgatgtttgagatattttctgagggaaaaggggaacgcattcttgacttactgtctgatactgtggagtgtgttcttcagcagtcagtgattaaaggtcttcaagaggtagttcccaaccaaacaccttgaacactcttgataggactgagtatcccttgactgtgatttcagtttgaattgcatttattgttgtcacctcctgagaactccatgggtgggaaggtgatgtgcaagtcttgtgagaaatttgcatttcttgctgttatttggaatcgtgatatcacatgagtgtcctggaagctggaaagtacatgtcgttgaattgcatcgtggaagagactgatatgactgatatatctgtagcagacaataagttgttaacttaaatttgttctgcaggtttccctttcaaatcctgcagatgctgagagcttggtttcacgtggtatgctaaagcgcagcacggctgcaacaaatgctaacagcaactcaaggcatgctcttgcagtcttgctctccttacgaatatgttcccttgttctttcgtaatgaatgtttttggtcagaatatacttgtgtaccttataaatcttttcttaatcataacagacatagtaagtgttttcactagtaagcaccactatttgtttgcttctatctaggcctttcaactaacttttaaattatgtttataaatatgatgttaaagcgaccttcattttgtattgcagtcgatcacagtgcatcattactatacgtgcagacagtgaacatctacttagtagtgctgttctgaccatagcagaccttgctggcgcagaacgggaaaagagaactagaaatcaagtctgtttctccatcagcgttactttgtaatatgaaaaaacaaaggttcgtttctgaaaaatgattaaccgtttgtttgcagggttcaaggctgttagaaagtaacttcatcaacaacacatccatggttttcagtctctgtttgagggtactgccaaatggcttttctcccgaatctcttctttcactggcaaaacactatcattcactcatttgcacctttgaattaatgaagatgtggtagcctgttcactaactctttttcgtattcgtaattgcagtctctgttagaacatcagaaaaaccagaagaaacccttggaaaagcatttcaagaattccatggtgatgtttcttaattcacttaaagtagtagtatctaagactattttataactgaaatttcactgtcagcttctgaatccttttgccatttcgatagttgacaaggtacttaagagactacctagaaggaaggaagaaaatgactttggtatgctacttggacctgaaattatcacttgtaacatagaaagtatattagtaaatttgttatgatcaacactttccaatgacaatagtttcaaaaaatgtaaacaaaaatttgcttgcaaaaagtaagtgtaaaaaatttgaaggccttgcaatatccatagctcaagcaaaaagaagggagttggttggcttttagtgctacatttgttttgtgcaagagatttttagtgctacataacactgttgctaaccctttggtgcacacgttgattcttgtgtgctttaatcttcactttatttatatgctcttatttttcagatcttgaatgtgaagccaggggatgatgattatttggatacatcatttttgcttagacaagcatctccttacatgaaaataaagtactgctactctttttactgctttactgatccgtttccttttctttcgcataattgagtagaataaggcataactagtgggaaagggtggtattaggtatttaggttacct

SEQ ID NO: 14897 - DNA, 493 bp, Zea Mays
gtgaaatttgtctcatggatgttgagaaagagaactttaatacagtctacttgtgtgactatcccattttctcgctttgtcaagcaccaaatagtccaagctctctatattttgccgagggaaatgaattaaaactttttgatgaaaggatgggcaaggtaccaactacatggagtttacatgatcatagaatcaactcgatagattttcgtccagagaacccatatatatttgccacaagctcgacagatcgaacagtttgcatatgggacataagaaggatgaaaaagaagggttctgagagcttaaaagttttggaatacaacaaatccattcagtcagcttatttctcacccagtggaaatatgcttgcaacaaccaggtgctcatttttcctaaccatttatatgtgctattttggctggcaatattatgattcatttttgtccctttgtaaaaaggatcaacctgtttggtttaacaatgaagtgat

SEQ ID NO: 14898 - DNA, 563 bp, Zea Mays
aggcacttgaacgggactggtgattgtgttggtggctgctggggtgtattcttggcgacattgtcggtcatgtgtgtgagaaccggtggccgaccagatggtctgggggccctgccagtctgctggggctgttgagcaccatcaatgacctgagagcgacgttcatatgcccttgctagtcaagaagcctgctgtagattctgtgggttcatcagctcgacatcgattttaatccgctgtggcaatcccgccgtgaagagctgcacttgctggtcaggtgccaacgaagaagtgtggcacaacagtgacgagaagcgctcttggtaatcatccacggttgtccggaaacgaaggcaggccagttcgcctaatgggttggtgcgtagtggcggaccaaagcgctcattgtagagctctttgaattgaggccatgtcaccgttgcacagtcccgttccaccatgaaatactaggtatgtgctgctcccttgaggtgataggaggcgagccacactttgtcctcctcaatcgtgcgttggcctctgaaatactgctcgcagtggtt

SEQ ID NO: 14899 - DNA, 375 bp, Zea Mays
ctggcgtaaacctttataagtctggaaacttgcaccaatatggtcattcattttaatgccaacatgaccacctgttgtgacttaattaatccaggaacaccacttttcggaaaaacctttcatacgtaatgtttgttgtacaaaaggccatttgatcttatcataagctttctcaaagtaaatcttcaaaatcaccccacaatccttttttctacgcagctcgtgaatagtctcatgtagaaccactaccccttccatgatattcctgcctggtataaaagttgtctgggaagggcctattaccttacttgctacccccgatactcgatttgtaagtactttggtaaagatcttaaaactaacatttagtaaaga

SEQ ID NO: 14900 - DNA, 792 bp, Zea Mays
aataacgttaatcgaagtctatcattacagagatactctccacaaagccgcccatgtacgcagctggaacaacacaagtgtacgaatacggccaacaagccacatcaccattacaattacatacacacggcgagggcatcacctattacacacacacggcgagggcatcgcctgttacatcggctcaaccttcggaatgatacccatctccctgtaattaaacaacaatatcctcaattcctcaccctcaaaaagctcccgaagatccccctcgcctatgcccgccccaatcggcgaggacaacaattctcgtttaccaaccccgtttacccgaagtcggccacgctccatccccatgcgacgacgcctgccgcttcgtgaaaattcacccacactctgttttcccatcacccttcaccgcctacacccagtactcgcaccaggaagatcctcggcaccctccgcacgcggcgaagtctctgccgcagccacatccaacacaacaaaataatctaagccttcatccgaggactcctccgtccaaggaaacgaactcccagactcaccgtcggactcaaaacattcagacatagagccaggcacattatcatcggcgggaactacaattgaagtctctgccgcaaaatcagtattgtcagtagtggttgcttgcgcaggcccaaacgtcggaacctgcgcagcaaccgaggttcagtatcacaaagacaaaagttgacatgcaatccctaacccctattcctacacctgcgaaggctcggccgtcgctgcggg

SEQ ID NO: 14901 - DNA, 624 bp, Zea Mays
ctcaagacggtatattgtgaggcgcagggtctcaagaacagaatgttggaagtgctgtcgctccagctcatggctaacgtggggcgaggtgcataaggcttgcacgacggcggttgggaacgcatgcgagcgaggatggcaggcacgataaggttggtgcatgcgtcgaatgcgggctgccgatggtggagggcacgataaggctgttgggtgagcgtaaaatgcgtagacaacaggcagacgaggatggcggtcacgacatgcacgaatgcggttggagcagacgcggcaagaacagagcacgacatggatttcgggaggccatggttggagtgcctgtgggcgaggatggcggctgttgttggagcgcccgcggttacgggtgggtttatggcgagcagaggggttgcgagatatgtggagcgctcgagtcggttgcaagctccacggtaatggaggcatggtggaggcggtgtggggagggaggtcgcacggaggcgataggcggagcagcgaagtggggagggaggtcatggggagatccggatgagcgtaggtgtggcggaggcggcgtggagagggagggcacaaggaggcggcgtggggagggaggttggggacggc

SEQ ID NO: 14902 - DNA, 697 bp, Zea Mays
actttggtatgtcaccacctcaccttacacgcaaaacattcttaattggactgaccaatttgaacgactgttcttccaattattattattaatccacacacttagataagcataatttcaactcaaattgcccatattttaaatctcggcataagcttggctattggctaacgtcgtgactattttctacttaccaacatacaccaactttcaccatttttggatacccgtacgatacgcagttattctaatacatcacaagtacattcaaccccatcagtaaagcaccagcacatttccgaaaattccccgagactacgacgacaaggcatcgatccgccatacaacaaaaatcatgacgaagccgataggtgctatcaactaatcgtttaaaaatattagacttacttctcgctttgtcactacaacaccctttagtcacatgaccatcggaagcatccttcacacggttatacgacagcaatctaacgttgtgttacacaagacatacatcttccttcgttgcgagtataaccatattacggcatatacccgcacacctcaatccattatcttacgccaccactattataatacaccacggcgcacacacacatacgtgtactaattcaattctcacataacttgtattttcaaacttactcatcacataaatttccatcgatgcatttctcac

SEQ ID NO: 14903 - DNA, 629 bp, Zea Mays
ccgatgattatgcgcccagggatccggacctcgaggttagcggcaccgcggctacagagcagtatcggtgagaaattcccattcgcccatgacgtcctgagctctgattcgacttcaattaccatccccacatgctgacgaatcgatcaagacacatccgaggaccccgggcgacccccagctgtgaggcatcggtggcggccatctcctgcttctctctgcgctccctgatctccctctcggttcgtcaatggtgttttgctggttttgccgtttggagaatccaggcgctagcggccacatatatgggcgtgagctgcggtgtcccatccagaatagtccgcgcgacctcgttggagtctgcccgagctacccggcggcggcgcggcgaatttgttgaagtctgatgccgaagacgggggcaagtctgacacgtgggttccatagtccgaggcggagatcgtgttcggtgaaggggtcagaccctacccggaatcatcggcgacgaattcgcaacagaaacccgttgttggctatggtgcttgcgcgcccgatttgaagaacatcacggggaggaagtatctaccaagtggggcccacatcgcacccctgtcgtccgtgctctgtgg

SEQ ID NO: 14904 - DNA, 472 bp, Zea Mays
tgtttgcagttcttagatggggttgagttaacacttgtactggggaacatatatttgttcgcaaccctatgcttggtgaaaagtagatgtaatgcaagtggaatttataagagccgaaagagctcatgtagtagtgtaattagagaatgttgtagtgcaagctcttagttacttgaataacagacctttacacaaaagatactcgaaactatttcactatctgtcatatacaatcttgtttagggtcaagagtttatttagttgtactttttcatacgccatctgtttaatgggatgaatattctatctaatgaggtctctcttttgctctcatgtctggtggatggcgtcatggcttgcctcctacgtgttaccttggttgtatggcgatcggtagtttaagaatatatgttggttgtcctgctctgtagttgttgcttgttgcctctgcctttttcctatagtattggtc

SEQ ID NO: 14905 - DNA, 661 bp, Zea Mays
aagggatttgtttaagctgcagctaactcatttgtgttgcactgttacgccctttccacttgataactccatgactgtcttagcgagcgggcaaaaagaaatgaatttgatcaatcatattgaatcatggaatggatcacctaacacctgctgcaccatgttcgcatgggtccagtcatactcgagagaaatggtgaaatgaaatcattggacggctaagaacagcgcgccgatcggtggtgtgtatacatgagaacaagataaggtttccaaattacgttcgtcaatgataataacaagttgaagttctttcagtgcaagaaaggctttctcaatgatgaaaactgcgtctgtaaacccctctatcaatcgcatcagcgcaccagctcacggaaagaagctcaagaacatggtgcctccttttttttctctaaaacttctgaaagttcctttaatccatgttttagctcttatcgcgtggtagaactagcgttgcagacgacaaataccacctttcatccatgacataaggcaaaggttagtccgcgcatagtttaatttgcaggggacgataacacttgtattagatgatgcaagttgcttgtcttacattttgaggtaggggaagaacacttttggtgagacaggaactggtctagag

SEQ ID NO: 14906 - DNA, 636 bp, Zea Mays
tttatgaaggcagacctcaccagactagtttgcaggcagatgctatcctactacaaaggaagagttcattctcatgctacctcatgggttagagatgttcaggtgcccctccatctactcgagcgatgtcggttatcatacttgaagggcaagaagcagtcaatgctgcttctgtgatgccgaggacggagcttgaatggggatgattgttgtgggtcgacacaggtcttgacctcgccttcaaaaggaaaccgatgtgcacaagggtgctcccacagccgacgaccacctttgacattgtgaagttgatgaaggcatagcccttactgacttgtttgctgggctccacccgtacgaggggtcataatctaacccactgctggcacaactgttggtggcgactgagcacaccatagggctgggttgcacgaccaacggtgaccactccgtacgctagagagccacggcgtaggtaagcacagtggactgcgcgagccttggtgtggcccttgggatcctatcgatggatttcaggaaggacgccatgttgacgaaggcatagcccttgttgtcatggattcctgaaatccagtggcaggtagaagaattcatcctcgaggccgaggcgactgaaag

SEQ ID NO: 14907 - DNA, 572 bp, Zea Mays
ctcatcgtatagagacaaatgtattaatctttattacataacaagactgtcttacaaaataactgtgggaaacgacgcctagatctcatcgaactcttcataatagtcctccagcggtacctcccaaaagcactgcgtgggctaccccgtagtgcacaatcatgacaaaacactgataactggcacactaggtaggggtgcgacgtcgattcacgacagcttcatggccgtcatctgcaacaccacgatcatcttcaacgtcagggaggttttccactttagattcttctccttcatcgctgaccgaaggggagtcctacatcgtgtcacagtcgtaggaatgggagcccccagaagccacgctattgactcgactgagaatgggttctctccgagttcaaagatggtcctcatcgcagcgtgggtagggtagacttgaccacgacatgggtcaaaatgacaagaaccaaggctcggggaccccaaccagctcgcgtgccatggcgccctacatctacgccagctagagccagagctgcgccagcgccttagcaccgaccgactgatgcagc

SEQ ID NO: 14908 - DNA, 798 bp, Zea Mays
ccataccaactatgggcatggtgggtttgttttgcttaggcaggacacaacgagatgtaacgtgggtctccttgcgacagatgtcacaccataatgcgttaaagcaatttctagcatgatgcccttcaactccacatttctgacagaaagcaggacgaacaagatcgacatctttcttcagaggtaaaggagaaacgatagggttacctgtttgagttccttcgccgggggaaggggacaacagaccctcttgctgctcagcttttccgagtgtaggcttcaatttccaactgaggtttcttggcctgttccaagattgaggcccctgcggattttctttaggaccccatcgatcccattgggggttctgaggattcttgctcttcggatccatcgcagaatctttcaaagggcttcgaaaaccaccggatcctagacgaggccactcctcttcaaccaccggcgggcgaaaggaagaaacacaccaccctctgctaaaactagaccgcgacgagaccgggagcgaccagagatgtgagaggaaggcggcgcaatggggaaacgagtgcgatccgatgaaatccaaaggaaaccctaacctggatgtagggttttcaggcggagaggacgatgggggggacgactcgcgcatggggatgtgagaccgaacagggagcggcgacacccccgggctccacccaatccaagtcaattgtggatcacaggccaggtcagcaacgcgagacggggcactgtagccctgggccaggagaagccgcgaaggatcggcccagcatc

SEQ ID NO: 14909 - DNA, 465 bp, Zea Mays
ctagtctattatctatttgaattagtttaagtctgctatgagctgttaatgtttatttgtgaattgtgattatgagatctttcttatatttgtgttgctgttgtttggtgaaaggctgaaggaaagaagatgagaagaagataagtttcttttcttttagtcttcttgttgatttgttcatctcttttacagtttaatctattgtttgttgatttgtgatgctgctgctgtttggtgaagggctgaaggtaagaagctgggaacgtgcagaaaggctgcaaaaacatgtctattaatccaggtaagtacccataatttctaggtaaaactgtttttctgtgcaaatatatattatattgtaatattcctacaaacgcttaagcacgattaatctatgcttaagctttataggcgctaagcagtggcctaacgcccgcctaacgcctagcgcttaatataaccttg

SEQ ID NO: 14910 - DNA, 274 bp, Zea Mays
ctcgcctttcattgttatgctacatgagaacatttgggttcacaccatttataagccaccatatcctctggatgcgctaatctctataacaatgcaatcaatatgttttgctacgacaaccacatcccccagacaaaaaacttgagtgctctatcgaacatgacctactcaacctgtcccaatgataacagtaacaccttttccatgccattcattcttaaggtcgttccaataatttaccatgcaagccaaagccccaagtgtgccatagaag

SEQ ID NO: 14911 - DNA, 491 bp, Zea Mays
aaccgggcgtgtagacaagacaaatgtttgtgtgtaaaccgagacggtgacgaagcagcagtaaagcaaaagagaaagcgtaaagaaggtggtagcatgcgccagactaaaaaaaaggaaaaggggacagcggctactctctgcgtgtgtccgctctcagctcagctcctgtctgtctctctatagcattagcaatagcatccatggatgatcgatcgatccatccatccatcctagcagactgtcaggcagtgtccctctcgttctcgtccatcttcttcctttcctccattccatgaaggagaagaagacatatatatcatagaatgatagtatgacggaggcttgacagcagcagcagccgcacatcacatggatccttctgtttccgtttgccgcctccacccgggcgtcgccgtcaccggcttctgccccgcctgcctccgtgaccgcctctccggcctccaccctccctccgccgctgacctacg

SEQ ID NO: 14912 - DNA, 1599 bp, Zea Mays
gtggtcggccagcggcggcgatccctgcggcgcggcgtggcagggcgtcgcctgctctggcgccggcgtcaccgaaatgtaagatcccgtgaacgcccacatcaaaggaaccttcttcgtgttagagatatagtttatatccatctatagaaaggtggtttaggggactagatattctctcctggtcttgtggagctgcacctcctttttctcctatgtttgttacagagtccttatcatataatcctctattatcatgtaatcctcttctataaatatgagaaggtgtgacctatgaaggtcaaggcgccatacattaacatggtaacagagccataaattttccagcaaaatctaacttcatcctctacctcctcctcctctccttccaccactactaccacgcttccttccatggcgtcttcctttgtgccaattcctattcatcatgctgttacaatacgactcacgaagtctaacttcctcctctggcgagctcaattactgccctttctccgcagcgccaaattgatgggctatctcgatggttctctttcccctccagctcagcagattgcatctacatctgacaatggcatcaccatggtctccaatccagattatgatcgctggttcgaccaggatcagcaggttcttagcggcctgctgtcatccatgtctgaagaggttctgcgggatgtgatctcagcctccacatcaaaggaggcctgggatatcttgcagagaatgttcttctctgctactcgtgctcgcatggtgcaaattcgagttgaactggctacatccaagaaaagagatctatctgcggctgatttttttcgtcgaatcaaggggctggccaatgaacttgctgctgcaggtgctgctttacgtgatgatgagataatagcatatcttctggccggccttggctcagactatgattcttttgtcacatcgatgaccaccagatctgaaaccattactttggataatgtttttgcccacctcatggcgtttgaggcccgccaacttcagcatcaggccgagctacaacttcatactggttcatctgccaactatgccggacgtagcggaacaccaatgaatcgtggtcgtggccgtggccgtggccgtggtcgtggtcgtggccgtggtcggttcccgcctcctcgtgttgatacttctcctcgttattcaggggataatcgaggatcggctactcgaccaacttgtcagatttgtggcaaagagggtcacactgcagttcactgctggtatcgtcatgatgattcctacgatgaagtaccgccgtcggctgcattagctgcttcatcctcctacaacgtcgatcccgattggtacactgacacgggtgctactgatcatatcaccagcgatctagatcgccttgctgttcgggaacgttatcacggcaacgaccaagtccgagtaggcaatggcacaggtttgcacatcttacataccggtcattcttcaattactactgctgctcgtcctcttgctttgcgccatattttacatgttcctgaaatttctaaaaatctcctttcagttcataaattttctaaagataat

SEQ ID NO: 14913 - DNA, 556 bp, Zea Mays
cccagccggaggcatgggctgacccagcccgaagaaaaccagggggagctgttggccattctcgggggccgggggaatggggtcctcatcttgagcttgcccgccaagcatggtttgctaaataatttcacattgaacagtccaagagtcaccagcaaagccctcagcctccgaaaaaacaatgaattgggggacttcttcaagtgaagtgacacgaacacgaagcaaagttctagagacattattccgatcctcctcccagagaatcagccttccaaacgacccaatggcggcctgcaagtgctcagaagaacgataatccagcggaaaccccagaagcataagccaacactcgtggttgaaaaaaagggcccgatgattccaggcgtcattatgacggatcgcggtgaaagtagcatctaaatattgctgggggccaagcagaaccaaattgtcacgctccaaaacactacgaaactgcactatcacctgccccaagtgagagcgctgaatggctctaacaccgaccctacgatgctcaacaaggtactctctg

SEQ ID NO: 14914 - DNA, 413 bp, Zea Mays
gtgttgcttaatgttcttccatcaaatgaatgtgttgcttgctgtcatgctgtaagaaatgaaacatcaataattctgatgctaggagcaagcaacatgatttctaaaaatttttattgccaagaacagcaagcagcaactagttcattttcaacagcaagcagttcactttcaagcacaccaaaaattgttttctggtcagcaagaagcagcaaccagttcagtttgaacaataaattgttcaacaactgtttcagtttcaacatgttttgtcttactcgctgaaagaacaacaaccaagcaaccatttcagtgacttatatgagttgacagacttattatttaccttcactcaatatttatgtaacccaatacaaaattattgaagtgtcatatatgcttttcaatgtcca

SEQ ID NO: 14915 - DNA, 473 bp, Zea Mays
gtggacacctgaactcaacgcaaagaccacgaactgccgtcagagaagacgctagtaaaccgcccgccgccccaactcacgaatcggcaccgccacccaacggggctggtagagtactactagtagtatccattcatacgcgcgtggccggtaggcgctgtaaccactttcttcttctcttccagaaggcccagccctccaccctccgggcaccagtgcgtgcgccgtcgacttcctctcaccttctcgctcctcgagaacgactccatagcgcaccacaccagcgcggcgacagacagcccgcgaggagaaaaggtagaagaggaggggcagggagagccatacatactcaccggttggattcggtccaatccaatccagccggccgcggcgtgaccagccgatccagagggcgccgaatcgatctgcgggggcggcgcggcgatgcggagggctaccgctggggatcccgg

SEQ ID NO: 14916 - DNA, 683 bp, Zea Mays
cctagatgaaccatagggttcaaagtgttggtcctcggcaagcgatcgaagttggaagcgacgagctacggcggcggaagagcgcggtcggcgcggctgcttctcatgtaaacgcaagaatagaaagagtttttgtttctgggcaaccgcacaacagcccagtttctgcttttctattataaatacggagtcacacaagcttgaagcccacacccccgacacacgacttgccccacgatcaccatcaatttctgttgaccatgggcatgcgcggcgcgacgccacgtcggggcaactaacagagcgggtaggggcctcaggcacaacaccgggcacacctacatctacgccacacttacaattggttcaactagattaatacagactaaataaacttgacacggactaacattcacccccttaatcttgttgaacacaaaccactcccagcttggatctcagctccacaaacttgatcttacccaaaggctttgtcagtatgtcggctagctgattatctgttccaacatgatccacatccacaacacctttttgaatacaatctcgaatataatggtagcgagtgtcaatgtgtttgctcatgtcgtgataaactgggtttttgctcaactctatggctgatttgttgtcaatcaacagactgaatttctttacttcctcct

SEQ ID NO: 14917 - DNA, 324 bp, Zea Mays
cgacggtgaaggataatgataatgttattttgcctatgggaagggtggcccttccattgaaaccgtacagtgggtttttggcctgctacaacttgttggtgttgatcaccatgttatcaaaggcatacatgaagatgatatctacccgacttccattgtcgactagaaccttgtgcatatcctgttttgctatattgcagttgatgaccatgatgtctatatgtgggtaacttcaaaggttcatgtcccttgtgtcgaaggttagcgaggcatgcggccatcttgtttgcatgatgagtctgattgaagttcgtggtacctgga

SEQ ID NO: 14918 - DNA, 563 bp, Zea Mays
cgagaagatggcgtgaggccatgtggcgcaatgcgcgcgttgcagcctggttttaggagatgcagagtacagtggggtggttaaacggtcagagcagtatgatgtgacacagtcattcttaccgaacatatcgtcgttcgccgttcacttaccggctgattggctcgatgtgcgtgcgtagagatggcaatgggtgaagacccgccgattttttgttacccagactcagcccgttaaactaaaaactctctgcttgaatacatgtacccatgggcggatacaattccacacccatacccggacacatcagttattctatacccgacaggtacccatacccatctagagtggtggagttatgcctgtctgcccaacttagtttagggcgaatggtgagtgtcgagcggcaacatttggccttccatcttccaggtgcgggcgtgccgttgcctaagtgcggcttggtcgcttcgattgtacaataacaaagagtcgcatactcgcgtcgcacaagcttggagccttggacatgctttactattttggttgttgtctccatagtg

SEQ ID NO: 14919 - DNA, 469 bp, Zea Mays
ggaaaggtcggggtgccgctgcatccggtcgccggcgagaggccatcacggctgcttttgcgcgggcgctcgttcaccagggaggaagaagacgactccctggccgtccatctgggtttggacgctagggattcggttgtgggaaaacgattgagttaatgcaccagagccgtccgatccgatcatgcggctaggattagtttcaaacacctttactgcagaatagaatcggtgcgtagatctagcgattgacggctctgaccgtgtctgtggtcgcgattgttgggaaccgttgatccgcgatctgatgactctcgaggcataccgcttcgtcgcacttacaaatagatctgagccacccatgtgagatcggacgatcgaagcgcccacggaatcataacactcaccgatttaatcgtggccgtctactcgcgatctggcggccagaaaccaggaataccccttcgcg

SEQ ID NO: 14920 - DNA, 659 bp, Zea Mays
tatgtgacctcgacgtattcattaggcactgctataggtctggagcgattcggttgggtgtctggcctgcggggtcaacgaaatcgtgcgccgatgtgctgcaccgtcgcggctttgcagtgcgccgtcggtcggagtgctaggggtaggtgatgggttatcggtcgtgggatctagtttggatgatgtagattagatcaacaaatacctcttcatccaatagaatcgcgaccatagatctacaatccgatgggtgcgaacgcgtctggctactttaaatcggggccttagacattgatccaatggctcagatgaggtggtagcatgccccttcacgcgttagatcgtgtccaccgattgcctgatcgacaatcctctgcgcgtaccaattcattaaagaccagatctaatcctaagcactgaacccagatccaacggtcagaacagatccataccccttcgttgcatgcactttctaaaagaaaccatagagtattagagtatgaacccgcggtccaactcaggtgtgactctgagtctggaaatttttataacattgtccctgggtttcgctgtgttttgcgctctgtctagggaaccaggaaatcagtaaaaataatataagaaatactttttagtacataaacaaatccagaaac

SEQ ID NO: 14921 - DNA, 581 bp, Zea Mays
gctaaacaggcgcttggacatgagtagaaacgatcctccacgtgttcgacctcagctgagcgcgctctgaccgtgtcgcgcacaccacgagctctggtcggctcgatcgcatgctcaaccctgcacccgtgctcaagcccttgcatataagaagccccagcccttggccttgccctcccgcacaccccatacccttttatcggtgattggacgccggtaattgccagaacaccgagtgcatcgtcgtccgcaaacttgccgacgcgtcgaccacctcagaccgaatgatacctcgccggagaagcatgaacacctcgccggatttgtcctgtccgctggttcccttagtccaggtaatccaaccatccattcatcaattccttacacgcacacactccttgccacttagtgaacctccttgtgcgctctgattgagctctactgtcatggtatggtcagtgcagacatctccgacgagctccaccgcatggatccgtggccagaccagctccgggcaccagagaagccgactcgtacctcgacgtgacttccaaaggctccccatcctcgcccgacccttc

SEQ ID NO: 14922 - DNA, 501 bp, Zea Mays
ggtatctttttcacttttctttataatttcatgggccatctttcggccaccattttcctagatatcgataaaaaactttccgccaattaggcttgcctcagccgaagggtcttttatatcttcaatagaaaacgcagcttcgttttgggccagaaccttcacatgctcgcatcctgccttctcctctaagatagccgcaattcccctggcacctgagaaggcgcagacatctccatggccactcaaaacttcctcaaaggcttcggctttgcccttgatccattcgattggaccttcgggatcgcctactacgaagttttcctcatttgagtatgcgccaatattggcgaagctggtttttatcttttctacacatgccatatatttttcatagcatctctcttttgaagaacgaagctccacaactgttttctcccagtgatttttccagtattcactggcgtctcggtcagcttcggcaaccgcacattttaatttttc

SEQ ID NO: 14923 - DNA, 745 bp, Zea Mays
ggcgccaatagcagagaaacccaggggctaactcgcaatttctcccaagactcagtctaacccttaagtggacggtggcttattttgaggaaaactgaggggttcgtttagaaaatatccgggcgaaagggtatctagggtttctgaccgttggatcatcaatctgcgccccagattagatcggcgcggccgtgaaacggtacgcgacgagaaccgttggatgcaaatacgacggggaggattttattattctggatttgattctatccgtccgatctagatcaacggatcaggccgaatgctacggaagggtatgcgatcatctaatctcagcccctgaattctagatctctggcccacggttcttcttctctccgccaaatccacgcgacggctgagcactgctcacccacggcggagcatcaccggcggacgcacaatccgacgcccggacgcccctaacctgaaattggccggtgctaaacctagacggggtgatggcgagcacggaagggagattcttacccgcgattgaaggagtagcgagctcgtccacggttcggggcgggtctgcgacatgaacagagcgctgttgagggattcccgacgctctggtgacccacatcgtttgggaggacaacacataggttcccggtgcccagaccatcatcccccacatgtcgtcgaggtcggggcggtggtccaatcggcgttcaaccgcggcggacccaagactggaccggcg

SEQ ID NO: 14924 - DNA, 355 bp, Zea Mays
cgagaatgttcgtgcaaagagtggcagcacacggggcaaaccatgtatccatgccctgtgcttgataacagctcaggaatttagggatgtcaggatggaggattttgtcgacaagtactactcggtagctatgttcaccacaacgtactcaagggtggtccagccaatcggtgacaaatcgttttggccagaagttcctttttcaaaagaagtgggtgctccaattgggaaacgtgttgtgggtcgacagaggaaaaataggatcaaaggatgccttgagggaggcagtggtaaaaagaaaactaacaatgagaatgggaagaaaagcattcggggaaagttcaagtgtccaaac

SEQ ID NO: 14925 - DNA, 423 bp, Zea Mays
cacgaagccaattgcatcaaacactctgttcaatcttttcttgccccgacccccaaaggctgcggacaaggcatcatcttcggccttcaaatatgtcccaagcagctcgtcgctggtagcttcaatgcatttcaaccagtcatcatttggttcgtcaaacttctctctgaatctgaaggtatatttcaatcgaaccaggccaccttcactcggttcagtagtagtttcctttggcatttcccagctatccacaagtggccacaccctataggctatgtgctcttggactatatctcttgtgccaatgaaggcacaaacattgctaaaggccttctggcatgcttcgatgtcaccttcaatagccaccttcagccttcggaggccgaagtgagaccagatggggtgctggataatttccttgat

SEQ ID NO: 14926 - DNA, 410 bp, Zea Mays
cgaaaggattcgtcgaccccgctgcacctaactctgtctgcctgttgcagaagtccctgtatgggcttaagcaggcaccgcgagcctggaatcaacgcttctccagcttcatccgaagtattggcttcaccacctccaaaacggatgcctccctgttcatctacaagactggagacgccatggcctatctcctcctctacgtcgacgacatcatcatcaccgcatcatcaccggctcttctccagcacgtcacctcccgcctatcgtcggagtttgccatgacggacctcggggacctccaccatttcctcggcatctcggtgacacgggacaacagtggactgttcctctctcagcggcagtacgtcgttgatctcctctagcgcgctggcatgtctgaatgccacccg

SEQ ID NO: 14927 - DNA, 616 bp, Zea Mays
cggggcattgccggtgctgttcggctgcctcaccggttgcgccgtagcagagagggaattggagagcccagcgcccccaccatcacctcgcctggtggaatcgccatcgagtccacctagacaccaccggcaacaaagacaattggaaggccgagcggaattccacgttgtcctcgcccgccgccgtataattccgccgtagccgggcactgcatcaatcaggcaccgattcatggtatggatcacacccatctcgatcgccttcctcccaacgtcgtatagggtcgttcggattgagtcttggtggcgaatttgggctaacggcgtcggtgcggctgcaaatcggagcttcgccatgggcaggggcctgtgcttgatggcggatgcaactggttgggcaattaggttcaaggagctatcgactgggtgagggcttagctaatcggagaatggtgctcgggttggtgggatgcacaaccccggcggtcttgccgccgcgtggtgggctgcgccgccgtggtcagcactgggggagaagaaaggctccggttcgttggatcaagcaccagcgggcaggatcagagcagcgaatagcgttttagttcatttaatctgg

SEQ ID NO: 14928 - DNA, 510 bp, Zea Mays
gcaagttctatgtttcagtatttactccagacgtcctaaatattttctgttttactttgcaaaagtgcacatattggcctactagttggtcagataaggtagattaaaccgttatgtggtatttattgtcacttatggcgggaaaagattgaaatgataactacagtggatgaaatagattcctcactgtgttttgagaaacccattaagcctacagtaggctcaccttaggatgaccttaagatggcgcagtacaacatctataaggtcaactgaaaaagatccaagtgtaatgtacttgatcataataagagtctcatccaggatcctattgagggtgctattccagaatatgagacatttcatgatcagtaaaacacttgtctaaatggacaagtgctatatagatcaactcgtgacatagtttgtctagaaggaggaaaggttgataagtcaaataagtgattctatcaatcttcccaaactaagaatcctcaaacagaacaagac

SEQ ID NO: 14929 - DNA, 761 bp, Zea Mays
ccgagcttgagcaggagcgtgaggacttcaaggaggacatccggaaggtgtctgaccgagaggaggaggtgacccgaaaggagagaagcttggttaagaagaaagaacacttagaccaaaaggaggaggccgtcacaacgctccatgataagctaaaagcttataatgcagtgctggagaaacaacgagacaaggaggctgcggctgaggcgaagctgcagaagctgcagcaggagcttgccgacaaggccagtgacattgctcgcgctgagggaaacctcaaggcgagggaagtttccctggtgaaacgaacaactgacctcacttggcaggaggaggacctcgccttcagggaggagatgtgggcaaggcggaacaagctgctggatgagcttgagctcgaggcacaagagaaagggaagcttctggaggggaaagtgcgaacactggagcagcaggttcgccagttctaggcagcgcaggcgacgcagacggccccgggctcccaggcggtggaggtgatgaggaagacacttgatgacctccgggcagagcaacgcgccggagctcagtgcatcaccgcctgggctggcgaggcaagaacagcgctagtgccattggggatgagtcccatcccggcattggtgcggccggcgtccatctacgacgcgctcccggtactggattccgctgatgaccgcctccgacgtctggatcagattcttggcgcccgcttggaggccgagggcagcagactctgc

SEQ ID NO: 14930 - DNA, 487 bp, Zea Mays
ggagaacccagtcctcaaggatggtgccagcggttgcccagcccccgaaggtgttgccggtaatgatccagctcgggtgggtagcgcgagctgcgacctagcccccgagggtgttgccggtagtgatccggctccgatgggcagtgcgggctgcaacccagcccccgagggtgtccaagcgggctccccttctcatacctccatggatgtccacgttgggtcttctcctccacgttctgatggcatggtaacagcgcatgcttcaaatgaggaagtcgccttagaggtcgttcaccggatgctagagttctgatgcctgctggtggtgctgagttgatccctggtgatgttcttcaaattgcccggttgatattccttcatcgagccaccacctagcttctcgtgacttgggatttctgtcattcttctctaatcttcaggtaattcggcttttctggttctggcaattctcctggcaagttatcgt

SEQ ID NO: 14931 - DNA, 608 bp, Zea Mays
gggttctgcataaattccaggactaaacggtaatggtcttataatggcacgggatggcgggttgaataagaaaaactacaggggctctttagagaaataaccgcggcgaaggggtacgcaccaatctacgtcgtccgatccacattagacggcccagattagatcatcataatatccgaatcggtatccaaaggtagccatcggatcgagatccgatgcccagcgttttaaataaccctcggcccattttgaccattcaacacccgatcaccggcccagattacacgaacgaggggatgcgcttctggttaaatcgtgaccgccctacgagcaaccaacggttcatagacgtcttctttcgcccgaccagaaaacacgacggccagggatccatggcggcgctcatgccggcgagtcccaaatcgaagtcccccagagttatttcttatgcggtttagggcatcgcgaggagcagagggaggcaaagctaggggtgggattataccggagtagtaggtcgcgaaggcacccgcccacggcaggatgcggtccagagctgaccgccgagctccggtgagcaattggccacgccgtgcttgacgcccggc

SEQ ID NO: 14932 - DNA, 771 bp, Zea Mays
cggcctcgcgaccccctcacgtgctcactcgctccctcgctggaaaccctaaacctaatcccctcctctcctggctcctacctcctgcttcgtggcggactggcggtggcggctggcgaaatctcgcacctcctgtcaacgactactggtgacggcttgtttggacatctatactcatcttctcatctcttcgctcatcctctccccttcctcacatcctgaaccctaatcgggtaatccccatcctgggctcctggcatcctcatagtagtggtgttcctcctcgtccttgcggtggtgctctcaaggcgactaaggtgctcctcgtccttcgaaccctaatctccattctccaccccctatcttatgtattagatcttgatttcctaggtatcgcttgtgtcggtgccgtgtagccgtcgagggacctcagtcgccggtgaggagccagccgtctacgacacatcagcatggacgatgaccttcatctggccgctgtggaggaggagcaccggctagaagatcataacgaagcagaggatgcccgagccctgtttggcggtagtgctgccatcaacatcgacaatgatgatgatgtccctggtgccgccaccggtggtcagacgggcacaggctccacgagcccgacatcgaccggcacaagcattgctgccaccagttctagtaagtgtcctcccagatctaaagtttggcacgactttgatgaactgactcacctcatcaatggtaagagggtaaggtagggtgcca

SEQ ID NO: 14933 - DNA, 435 bp, Zea Mays
cgcccatggaagacagcactggagaaaacggcgcccttaacaggggaaacggcgtccatgggcgtcgtcgttgactcgtcgctgagtcttctgcccaagaaatcctccagcacaacgtcaagccaggaccccgagataaagcaagctaccatcgtcgtcgtcgctaccctgacaacccacacaaacccatccagaggggcatcgacgtgtcggctgccacagcagccgcaaagttgtgtcgactgctaccacctctggctggacccacgaagttgggcatcaccttgccatgtgtgccacactgctacgtgtcagagttgaagctaacatacaccatcatccccagcaaacgcggccaccgaagccacccacaagtgggcaaggggtcgtcatcacacaaggaccatgccgtcgtcaccaggaggctcgaccatc

SEQ ID NO: 14934 - DNA, 1150 bp, Zea Mays
gtgaattcttgttcatctgactggtgccgtacatgataatccatggcatcgccgttaatgcactgaatgaatttgattttccgatcataagcctaaaacatacctcctatgaacgaaggtatcagaatataaaatattttaataattcgatttgtagaacaaacagagtcacataccatgttgttgatctgttgatgccaaagccatgcaggtcactgatggcgaatagattgtcagggccttttcccatggttctcacaaagatcacaaccctgactaacctgtaagagcctgaaagcaactagtatttctgttgattactttataagttcccttcctgaattatgtctggaaaattaatctgcaggagcattgaaggcaatgagttctatgggccaatccctcctgaaattgggtatttaattagaatggaaaagctgtgagtgtattttcttaagattcacacacaaagaatacatgagtattgatcgatgcagtttctgatgactaacattttcatcctgtaactcagaatattatcaaccaatgagttcactggaccccttccagctgctctttcgctattcagtaatttaactgatttgtaagactactccatctatattcttttcccacttcgcttcatttttgaagagtcttttggtaatttttaactattgatactggtaacaggaggatttctagcaccaatttttccggaaggatacctgatttttggggaaacttgaaaaggcttgacaaattgtgagacggtgaatttatgacaaaacacatctcatgaccacagaaatcacatgcttataccttctttatgtaatgtaaaatgtgtaactcttcttggtgcaggcaaatagaaggatctttcttagaagggccaattccctcgagcctatctgaattgaaaaacctttctgatctgtatgtcagcaaaaatgtttgaaactattgttctcatgatttgacatatataatgatattcactcaccggacataagcccttacagctccaccataaaaaagatatgattaatttccactaattcctagtgtttccgtgtgaaacaggaggattagtgacctgagaggtagtggttcatctttccctgatttaagtggaatgacatacatg

SEQ ID NO: 14935 - DNA, 530 bp, Zea Mays
tctatttcttattttctttaattctggactaggcgcaccaatacagagaaggtcgaggtttattctacaaaatctaccagacacaggcttcccacgcactggacgacgggttatttataataaagggtagggtttcttttgcaaagttgaatggccaaaggggtatgatgacatgtggaccgttggatcagcggtcaagggcccggattagatcggcggaatactgaaccggaagggtacggtgatcgtaggatcctgattctacggttcagatttaaaataccccgcgatcgcctcggacccgcacgatcgcgatccaacgcctagaatcgcccaggccgaatcgttccgtggatccaatctcgaccgtatactctaggatctaaggctaatacgctaacacccacgtgttctcatcacatccgaccaatgatgatccaatggttagaacaccgcctccctcctcacgatggacgctgggcaacggagcgcctagcgcagcggtgtcctcgccggagtaccgcgcgccg

SEQ ID NO: 14936 - DNA, 511 bp, Zea Mays
acaactcgtcatggtagtctgtctcttctcattcacagatttgctgccttcagtattcccagaatccatagatatgacatcagtatcagaattttctatttcagatgaaggaattgtatctgcatctatattcaataacatatctacaaagccagatcttcgcctatcctccgtaaccagcacccttgatgtagatgacaattcacctgttttatgaaaacgtgcaatttggagctcaaaaccccatttataatgctcaagtcatcacagaagaaaaccataaccaatagttccaaccttcttgccatcttaaaataagtgatgagtatggctcagtaagcagttgacgtagtggaaggtcagcaaaaaattgatatagagcaaaagctgcaactcgactttgtgcttcctgttaataatttagtttaatattggtactttggataagaagagaagataatattctagtgtgatttgttatgaactgatatctcagtgtatcatgtacgta

SEQ ID NO: 14937 - DNA, 669 bp, Zea Mays
caatcatagtagaacaactttgcttaagggtgtgagcatagttgttaagaaaaatctagagataatcatgctcaaaatctggttgtcaggctgttatggtctgaattttcagactaacagtggactgacatcaacttcaagctcaattctgtgcatgatccagtggaaatctacctagggttgccatagcaaagttgtagctggtttatagcactacactattgctgcagagatttggacctgttgccatagaaatctgagagaaaatcgaccctaaactttggctgtcaggtgctctgatgggagctcgccatggtacagtggctaaactggatcagaccgccagcgcggctgtcctcaccgccgacggatccctccgccgcgattcgtgtcgccggcgtttggattcgtgcacagggctcggggataacgctctgggtagaaagatcttcaccgccgtgcgctggacgtcactccggtgactcaccgtggctgccccttctgctttgcggctggagcagattagctcgccggtgaaccaccgcctcctggccttgcgccgcatggcttttctttccaccgcgacgccgtgactcgctacggctgtccaatcgtcgccggtgagctcgccacgacggtggacacgaattcaccgcacccgcgttctcc

SEQ ID NO: 14938 - DNA, 1103 bp, Zea Mays
gttacataaagaaattggagataattaaacccaaagttgggctgtcaggctgtttgcagtctgaaatccagactaacagtgatactgagccaactttgaactagaaatcaaccctgatctaataagaatttggccatggttgctataacaagatttttgttggatcctcagaaaacaactttgttacagaccaatcaactggttgccagtgaaaatcgggtggaaattgggtttcaaatcgctcggtcaggcactctaatgatggctcccatggtacagtatctgatgaagatcagatcgaccgtccccctcgccgtcaacgaccctcgcgccatgattcccgccggtgaggtgattcgtgctcaccagtgtttggataacgctcggggtcacgtaaatatcgccgccgttgataggtccggccagtaaacaactccggccaccgtacaggttgccacggtcgctttggataagctcgccggtgactgtcgccttccgtccatgtgccacgtgccctagccctccatcgcgtcgtcgtgacccgctgtaaccttctgcccatcgccggggagatggccacagtaaccggacactaatcgcgcgctagtaactcctggtccctcctgccgccgcgcgtcgtcgcccaaattcacggccaccgctcgcgggctctataaattgaccgcgcccttatctccaccatgcattcaagcagctaacgcacccacccgcacctcaaatcctccaatagggagcttgaatttctaacttcccccaaaatcggtttgaacacaccgcaagaacacttcaccgcggcccgctcgattcaggtcagcccataccctctgctcccttgtttaattgttctcatgtgcctgtgatgctcgtcgacccacccaatggatctggactgccaccaatcgccgggaacacgttgttctttggatcatctgcgcggtcaccgtggccagggacatttgtgtagccattcatgcaattgacttaggggaaacgctggttagggcatgaattcggtttcggccgaagttgggcgctagtatttgccctgtttggccggtccaggagctcaccggagctctgcc

SEQ ID NO: 14939 - DNA, 641 bp, Zea Mays
gggaagctaggtgctgcttcagctcttggaaggcttgttccgcctctttggtctaggcaaatgggccggatttctgcaggagcttgaagaagggcagtgccctctcagccaacctcgaaatgaagcggctaagggcagccagtaatcccgcaagcttctggacgtccttaatacaggcgggaggcctcattacctcaatagccttgattttctccgcgttagcttcaatgccccggtatgaaaccaggaaccccagcaacttccctgcggagacaccgaagatgcatttctccgggtttaacttggtgcgggctgcccacagcttgctgaaaaccagggtcaggtcttccactatagtcgacccttctctagtcttgaccacgatgtcatcgacgtagatctccaccttgtcccgaatcaggtccccgaaggtcttactcatcgcccgaacaaatgttggcaaggcgtttttcagaccgtagggcattacaacataacaatacggtccgtccaccgtcacaaaaagcggtatgcttcctatcctccctagacatccggatttgatggaaaccagagtaggcatccaagaaggacaaaaggtcgcaccccgaggtagagtccatgatctgatctatacgtgg

SEQ ID NO: 14940 - DNA, 676 bp, Zea Mays
gtgtactccgcactgtccggcgtggatttcatccaatagctgcttcccagtagttgaggaaatgcacttcatgaggactccagtcgcaacccttctgtacagtgcgccccttatgagggtgtagtgggccgactgtcttgcgatgcgctctaccgcagccttatcatccggctcttcttcattctttatgtacctgacgataggctccctctagtcattggggtccgattctggttggttcaaggtgttgcattcttctgtctgatctgagagaatactcgggtgtgatacttcttggacgaagatcccggatgggacctgggcccgactggatcccagctttgacaacgcgtctgctgctgcgttgcggtctctttccacgtggtggaattccaacccttcaaatttgtcttctaattttcgaacggttgcacagtacttgcccatagaatcaaccgagcaatcctagtctttatttatctggcttataaccactagtgaatctccgtataccatcaacttcttaatgctcagtgacacgacgatattcaacccgtggatcagtgcttcatattctgctgcattatttgatgctggaaataataactggagtgcatacttgagttgttcacctccaggagcaatgaagaggatccctgcacctgctccctgcagc

SEQ ID NO: 14941 - DNA, 429 bp, Zea Mays
cacatctagactcgtgggatggttcccgggctggggtgaaggatttcgccggtaatgggccggtgatggaatcacgagtgggctaaccgaacagctcttccaacgtgggtcaggaatctatccatactgggatgttccacgtggatcgggccacaatcccggccgatcccggcccaaacgaacaagcccttagagggcgtttaggagttaggactgccccactcaatgttttcgacttttggtgctccgctccactgttacctaagcttgctcagcctcgctaatgctgatacagctgccgtccaattatacttcactacgagtaggcacacttctctcgtcatcagctcccgcacccccaccaggccaccatgtttgccatatgccgccctgcaggatgaactaaccactttgacaattattcttttg

SEQ ID NO: 14942 - DNA, 1041 bp, Zea Mays
tctatttcaaataaacctagggtcccttaagcaaaacgtctcagcgaaggggtatcgcgagatcctagccgtcagattaggaacggacgccccagattaaatctgaccaacccgaaccggtatgcatcccgagtgctcggatccataaccaacggctcagattttaaacactcgccaggtaatcgcgaccgtctaacccgagaccaacggcccagattggccccggccgaaggggtatccttcaactaatcgtgatcgcccattttgaatcggacggtgcagcactgttcttccctcacgcaacctggcgacggcggcgaccgcacgacggtatcctcgccggcgtaagccaatacgactctccggtgccctaacaagtccctaattcgccccaaaacgaagcggagattactatgaacacgtgagtcggtactttagtgggatcgatgtgaagacgacgcacgcccacgccctgatgcggatcagcggcggcgcaaaagtccgtcgagctcttgcgcaaggcgcccaggggtctaaccctaccggcactagttctacgcattccggagaacgagtcggacaagatggccgaggtcttaccgacgccgctgacgagtcgaggtaggtccacggtacaacgcgagttcggcgaagggccccactccggcgaggaatcgatggcgatcccgacccaaacaccacccgtagaggacccgcacagtttccccgggatcaagcgcaacttcacggctagcaacaggttccgattctgggcgtggttggatttcctactgcggcggcgcggtggagttctctgcgtgttctccgattgggagtgaggaggaagcaagcggggacaccggtgtctttatccagctgaagaggatatggcaggtgcacggcaggtggtggttgagcgcaacggccatgccgatttctccggccaccagctcccagcgcatacggcggagatggttacggacgcacccagctcggttcgtctgttaccggtgaagaagggatgacaggtgggtcccgtac

SEQ ID NO: 14943 - DNA, 365 bp, Zea Mays
caagttccttgagctttgctccaggtctgggatagccatccaacaagacgacgcacaaggcttagggggagaattgttggagataagtcttgtgatctgttggaaggacaacaacaatccttggtctttgctgcagtatggacagcagcagttagcacctgctttagaggtggagaacatcggtcctttggtctttgctgcagtgtggagtgtggacaacagttagcatctgcttttggtgtaggaggacagcaacatcagttagcatctgctttagaggtgtaggaggacatcagtccttggtctttgctgcagtatggacatcagcagttagcatctactttagaggtgtaggaggacaatag

SEQ ID NO: 14944 - DNA, 744 bp, Zea Mays
gctaggcgtagttaatgcgaccggttatttataatgggtcattcttgggccgagctcatgatacactcgagtggtttgcctctaacacgccaggctccctgtaaggttccaccacgcccgaccctaggcttggtgccgtggggttcgtctgagggcaggtgcctccagagtagatgttatccatcttctctagctgaccaacgggccccaatgaccagaggctttcccttagtgtgctccctgatggatggtccctagggactaggaatcatatccccgacagtagccctcaagcccccgagaggagtgtgtctcccttcgtgagctgacaacaggttaggcggcccttcatccttccgccttccaagtgatcatggtgtttattcctcctcgggactagggttgtttttatggtgattggtcgtctctcgaggtggattcaggcgcttccccgcccctttataaatctcgagcggttgttcgcatgctggtcaccctcggcctccctttcgcttcagcctcttccttgagcacacctccgaccgagttggtggtcagaactcaggtcatgggaatgtagcgctctttgggccacgagcctaggtaggcttcttccattaggttcccttgactcccttctcacgattgacatcgttttccctcctcctttcatcgcactgcggtcaccaccgaccaaggggttgcgtcatcacccgtcagctcactatggctgggctcctcgtc

SEQ ID NO: 14945 - DNA, 695 bp, Zea Mays
gtactactctggatccgctgcaattattggttcccaccagatttattgtcgaattgaatttcgtatcaaactatgcttccaagcaagagatagtaaaaaaaatagaggctgcacgcggtttcagccgcgggcgggggtcaaaaaggtcgcgcgttgccaattcaattcaaaccaaatccaatccaagcaggtcctcagcgtggtcatagtaggttcacattacgatgtctcgcagcattttattattgtttttatgctcatcgagaaaatcaatttggtattttcttttcgccaccggcagtgaccagtgggtagcatgccaccgttgccgcgtggacgcgccgccccgtctggaaagttgttgctttcgtttccaacttgtcttgtgctagctgctgatggaatgaaaatagtatatctgcgtgtgcttgcttacccgtgtttgctgctacatgctttgctaacgggagctggcagtgcaccttagtaggtgggtacctttacggtacctgcagggaagcaaagcagatgtgcatgctccagattctcaaggaatgaaatgacatgaatgaatgttacccctaaaagctttgctatgctatgctttccgtgtgcttccatccaaacgaggatgctgatgccctggcaaagtagtgcaccacaccaccaccatgatgttgctttagggactgctt

SEQ ID NO: 14946 - DNA, 661 bp, Zea Mays
ggcgactacagggagcacaatgagcggaaggagcgtgagcggagcaagcagcggcgacgagggagactggggctagcagggaagacgacaagcgagggagcgaggagggcgaccagagcgtggaggggaggcgacgggcgaggagtgcgacacaaagggagtgagggaaggaacggggagtgctgtaacagtaaccctagcgagatctgagtgcggcacgtgggagggagtggagggcacgtgttacagaagcgagccaggctcggttgagaagtccaccccgagcgtatgaattgagccaagttgggtgggtgcttttgcatctactaggcgaggcccaagtactaatgcatgcaaccaaacatgttgcttcttgcacttatgaaacctggctcgggctgtatacaaggaaccaatcgcgtccctagggaacatcaccctcgagttgttgcttggacttcacaagctagtaggcaagagaataaacagtggcatcgcttacccgagagcattagcatgctcgcactcctgcgcaacaacaacaacaacaacgtacattgcggtggtgatggcagcaacaaggacagggtgggcaacaacaatgtcatcatggggaaagcgacctgtagagccaaggcaccatcagatagaagaagagtgg

SEQ ID NO: 14947 - DNA, 395 bp, Zea Mays
tattattgtaagagaactcccatatggtaagctcttatcccaactaccaccatgtttaagggcacaagctctcaacatatcctccagcaattggttggttctctcggtctgcccatcagtttgaggatggtaggcagaactgaaattcaactgtgtgtccaagcactcatgcaacttcttccaaaaccaagaagtaaactatgatcctcggtctgacacgatcttcttaggcaccccatgtagacaaactatcagagtcatatacaattctgctagcttggctaaaaatgtaattagtcttcacaggtatgaaatgagccactttcgtcaatctgtccacaatcactcaaatagagtcataccctgcaggagtgcggggtagtccaacaatgaaa

SEQ ID NO: 14948 - DNA, 453 bp, Zea Mays
gagcaaagaggtggtgcgccaggtcagaggcaaagtgttcctccccagattgggccgggggaggagcactgccagagggaacctggggcggagggtaagaggacgattggctcggatccccgtgatacggaggcgggacaaactgctcacgatcatcaaaataagcttcttcttcttcgtcgacatcgactactgtcgtaaaaggcaccccgtatgcctgctggtaccactcgttgacctctggaggaggaggatggagaggtacatcaggagagcagggggcgaagggagtacccaaagaggaagcttgacgacgtaggttgttgtcagtctcccgctgacgtcgagccacctcatggacatccgcagcaatgtttcggcacattgaaaaaaatgccgcaaacccgtgggccaagcgggcacccatccctcggccacgacctcgaccacgac

SEQ ID NO: 14949 - DNA, 799 bp, Zea Mays
atcaaatcaaaactggaaaccggagaaaaagattaaatggagtgagaaaacagagagacaaatcaaaactgcaaactggagaaaaaagattaaatggagtcaagaaaaaaagagaggcaatgtacaataaaagaaaaatgtaagagaaaatttaaaaagaaatccgtttggatcggggagattgaacccgacgtgaatcgaacacgcaaccttctgatctggagtcagacgcgctaccattgcgccacggatcctacgttgcttgtatcgacttttgatattatataaccaatactacaggactaaactattcccactaccaagaaatatcttatcttttgtcgctaattcatctttacgctttcagactgtaggagttggattctcctatccaatcagaaagcagtggcatcgcaagtagcaacggtggagctagagagggccccggtatatccacatcacctcccactccaaccgacagcccgggaccatgcatgcgtccatgcctattggattctacctcctactgtggtagcttttaagaccagcaagggtacgtgaagcacggacgagttcagagagtttgcgcgcagttgagctcccatcgcgcgtgagcgagcagcagagcagcgcgacgacagggcagctgggcaggcagagctgagctcatgcgggagcggccggctgaactcaaaactcttcatccctgacactgtgcgtggaatcacgaaacgcagagctagcgagcgagagcggagtaaatggcagcttcattcaaagccgccgcaggctccccacc

SEQ ID NO: 14950 - DNA, 389 bp, Zea Mays
gtcatgggctactggctcatgtggtggctgccgggtcaacacaagccacctgttcgacgatttacctggccgacgaccgcaacttcgctgacatctccgttggcgcgctctgggaggagacgatggaacaagcgacaacgactctacatcctagttttcctaagaagaaattggtgctcctctcctcatccactgatggtaaacttggaggtatgaaggcctatcatctctggttcgacccctccgtgttggtcatgctgctcaccaggtacctcgctgagcggatgacgctctactacgacgccaacaccgatgactaccacaacgtgccccgcgtcgagactagggtatccgacttcgggtccacctccaccctccgctacctgcca

SEQ ID NO: 14951 - DNA, 371 bp, Zea Mays
cgcgagaacttatccacgaccaccaatatgctgtcggcgttagcagagcgtggcaatccttcgatgaagtccatcgatattacctgccaagcttggtctggcacaggcaagggctgtaggaggccagggtatttggacctgtcgggcttagactgctgacagatcgaacaagctgccacataatctttaacatgttgtttcatatgaggccaagcaaacaactgatggagccggcggtaagtaactggaaacccagagtgtccccccacagggctatcatggaatgcagatatgaccttgcgctgcagaggtaagttagctcccaaccaaaggcgacccttgtacctgataacccccttctggagtttgta

SEQ ID NO: 14952 - DNA, 451 bp, Zea Mays
cacgggttcaccataggctatgtacacgcttggatttggactaaacaagaataggagagtgggtcaacagagagggtgtccgtgacggcgttctatgggacgactaggtgttccggagtgtgggctttggtaaacttcattggccggctccgagagcaataggaagttaaagacaagccagaacaagagccaaatgggcaagtactgacccgaggagggctggccacggaggggtccttcacggtggcggaagagaccgatcccagggaaatccgatgatctccgatgatggtggacagaacatggtggctagtgagccgttagcttcataactaagggacgaagagtagtgctcggttgatttggatgacggaggtgagagcgtagtgaatttataggcccagtgatctacaacgacgaccatggtgataaccttcaccggatgttgctg

SEQ ID NO: 14953 - DNA, 574 bp, Zea Mays
cggcgaggtcgctggagacgaggcagatgcggtcactaggtagtttggggtcgtcggggaggcctaaaacgggtcaagagggtctggcaaactcacttgctgactatcggccgcaagaatgggaccagacacgggagaatgacgaagggcaggtgctccgagcgggtcggacaactccggcgaagaatttcggccggggagaggaggtctatggcgcgctaagacctgggctagctacggcaaggtaaggggaacactacgggctaacacaggggcacgtgaccaggctaaatcagctggtcaccgcgcgggcgcggcaaaccagcatgaccatcaccgacgaagcaaaattggccatgaacagggcgaaattgtgagaaattgagcgtgggaacaaacatctcacctcgggacggaactcggggtgacttggcatggcgtggggaggctccagttggccggacatcgaaggatcgcggcggcggcaaacttcgacctacgcagggaagtggctaagcgtggaccgggcagtagagttgaggaaaggggaaaccactatgggttcctggtgtgt

SEQ ID NO: 14954 - DNA, 640 bp, Zea Mays
acgacgctaagggagaatgcccacgggttgtggtagtgatcgctggttcagttgccgacactaaagacaccgcccgggagatcgaacaagatgtcgtagcgacgacaaccgcgcgcttccagcgtgaccctgctgatgtcgagtagctcatacctgtagaaatgaggctagggctccgcttgaaggcggatgtaataacttttgtttttgtaagatacttttgagaactatcaataaacaactcttatcttgtatggtaattattcttgctgtgtgcggctttaccaacttgtcccctgctacctggcccccctaggatgtaggctcgacgtgtcgagactggataccagcatatctaagaaagagttggtgacctagcctccaggaggtagcctctcctggtacctggccctgtacacagcttcggctaagaagcgttagtagcacacccataagacccatcgtctggtatcagccgtcctttgattcacgcaacaggacctgcaggatttagcctgggaagccaagtcgtgtgtccgagccccctgaatcacagctccaggtactaggacacccatcacagagtggtggagcgtgcaggcttagggtacggaaccaggctaagcggctacacggctcc

SEQ ID NO: 14955 - DNA, 933 bp, Zea Mays
aaagattgaatgacttaccaacgactcaaccatcggcctcggcaagctgcgcgcggggcagcttggcctcgacctcggtggccttttgcaccacatacctgagggagaggcgtaggaggtgtggagctcggtcacgatagcctgacggtcaatgacacaacccctggattgaaagcaaccgcactgtcgcggtaagaaaagatggagcaaagttaggcctgagaaggtagtcgggaaacccgaatggagaagcttaccttggctcacggccaacagagcgcaacatcctgatgacccaagatcccacccatgacatggtcgaaggcgtgctcaggggagaggccaaagagaaaggcaagtcaagcatgaccaacaagcgaacaaccacccgaggtttataaagaggcgaccaatagccataaaaataatgccgggttttggggaggaataaggcgtcacgatcgctcggaaaacgaaaatacaaggcaccatctgacccaccatcagccccccgagggagatctctcccctcaggggctactatcgggaaaatgatcctcggtccatgggacccaccggtcagagagcacgataagaaagagcccctggtcactatgggccgttggtaagttagaggaggtggatacgtcaaccccaaaagaactcacccatagtggaaccccatggcacagagtccggtgtcgagcgtggcggaacctaaaaggggaagctaggcatgtcggagggaaatcactcgagtggatcccacacccgacccgagactgacccgacgtaaatacccgggctcattaaccttgcctggcaccaagccacaccacaggcgtcggtcctcttcccactcaaccaaggaatccctctggccgcataacactcatgacctatgagcccctcggactgtggcacatttatggt

SEQ ID NO: 14956 - DNA, 434 bp, Zea Mays
gatgagagcggcatggaggttcatcagaccagcggctgggacccccaccgcagatccggatctccgatgcgccggctggaggcccctagtctgccggcatggctcccagcgcccccgccgcggccccccaccccttagacaagggcaagggggttgctggcagttcctccgcaccaggtggcaccgcgccgacgggtcattcatctcagacccccccagaagcgtcagaggactgctggtggggccgaggaggccggctcccaagcccagggcacgcagaggcgcgtaagtcctccaccaccaccaccatcgggtccgccgccaccacaaccaccaccaccatcgggtccgccgccaccaccaccacccgggggtgatctcccccaggggcaccagcagcaacaacaacaacagcagcagcaacagcagcagca

SEQ ID NO: 14957 - DNA, 577 bp, Zea Mays
gaggtcagccttttatctcatctgaaaacactgtaagtattactctaaaattcaaacttcctctctttttttagttctcctgcattttgtaaatttaaacttttctaatttccattcactatcttttcaatacgtgcataaaatcatggtgctttgctagcaagttttcgagcacaattttgattccttatttcattgttttgagcagaattttgttcttgattccttttctttgaggcaacatttattcttgattcttaagctattcaactaaatgatgtgtttcttgaagggattttatgtggaacaacttaactggtagcatcccaaaggaaataggcaacatcactacgctcaaacttatgtaagttttctttttctattatttttcttacctcattaaattattcagcatgtctcaacctcataatgcacacaacaacatcagttcaacattaccagttctaatttatgaacatttctccacaatatctgtgttaaataacattgatatagttattttcatgccttttgcagacttttgaatggcaatcaactctctggtattttaccttat

SEQ ID NO: 14958 - DNA, 425 bp, Zea Mays
cggtcaggaggtgggcctccgcttccttgggtggctacaagaggagctggaggtgctcccgatgattgtgacgggcctcatgtccttcgcctccctcgtcacctgcgaaggggccgtgaatgccttgtcccgcgagggatgtgaacacttcaaggtctttgaccggtcggatgaaggcttcgagcgtggaatcttccaggtcaaggactaggtgttgaagcggtcggttggtgcgcttttcgataggatgtggggccctcacggccgtgagactgtccgagagaggttcgaccgggcaatggatcaggtaaaggtgcatatgtgtgattatatgtgtgggtatgtgtgtgtatttgtgtggttgttgaatgaatgtgttattgttgtagatggcgcatgatgaagaggtcgaggacctcggtgat

SEQ ID NO: 14959 - DNA, 536 bp, Zea Mays
gtttcctgtacgagactacaattcgttcgcgttcggcgccgcctcgcgctattgcctggtcgccgccggcagggccgggccagagaaatttgaggccctgtgccaaatctaaagcagtgtaatgtatgtttttattaaaaatcagtaataacaatctgcaagttacagtaatatatattgcaatagaatatctaaagaaacatttctattttatttgaataacatcgctcttttggtgggttttcaagaaaatattgtacaatatgcttatattcaatctaattcaaagcttcactctgctattgtggctaaataatacgtcttttttattatagtagaacacaaatatgaatttagtagctttaatttagagaactttgttcacgcggacagatatgttaagattctatgaagatttattctttagtgcagcgctcggtagttttgtttcagcgtagaggtatggtagagagaaaaatatgtgctacatattaacatgtatagaagatcataaaactaaaatatatacatttgtt

SEQ ID NO: 14960 - DNA, 780 bp, Zea Mays
tttggagggggcgcgtccgagacctgtagctgcacagccggcgggatggccctggtactttgcattgtatattgtgagatagagagctgaggctgggtaaggagcacgagcaggcatccgagcccatcctggacgagacgtttttcgagtcgtagttgtttaaaacagcactcggcatggcagaagagtgtggtgatctggtcctagcatcatctgagatggcaaaaagtagattgggcatatgtcttgttgttcctgtagccatcttgtcttcaacggggttggcgggagagcaggtggcatcgtgtgtttttctgttggtgcagttggctgaggtcgggctcgggcgagacggagatttctctcaaggccgaggctgggttggaacactgatatgcagtcacgattggaatggttgaaacaacagttggagtggggaaatagcgcccgatattcacgccctgaccgtcgttgtgggtagtaaagagtagactaggccggggccgtgtcaccctttgttgactttggtgcccacgtcggggtagatggtcgtacagactgtattaaatgtacacattctagggtctgagaagtcggccgaggtcgggctcgtgctgggaccttgcctgagatgcgtttctcacccgagggtgtcctcgggtgagtcgcgaacccacgcaggcgtgctgttcgccgaggttgggctcgggcaaagcatagttgagcggccgacacgtgatgcctcgggtgaatcgtgattcaggtcccacatggccttgg

SEQ ID NO: 14961 - DNA, 782 bp, Zea Mays
ggaatttgccctaaacattgactgtcagactgactgaagagggatctgattgtacagtaactgaaacagatcgcagattcacccccctcgctgccggtgatcttgcgcccagatccacgccggcgtcgcgattcacgcccgaccgaactcagataaacgctcctcggtaagaaatgtcgcgctggagatcaactccggccactgttctcaccgccgtcgtgtcccgccgtggtcaatcgcgttggcatcaccggagttcgctgttatccggccaggctacgtgcctcaacgctttactacgttgcgatgagtcaccataaaacgccccgtggtcctggctcgtcgccggtggagctgccacggtgaaagccactaatcccgagcgccagtaaccttcttcctctccggccgccagtgcatcttcgcgaaattggacgccaccgctgtgggagcctataaattgccgaccccgcctgctccgctaagtatttgtgcaaccagtagagcaacccgtgcatcgaatcaaccactagaactccccaatttgggatttctcccaaatcaacccagaacaccgagcggtgtgacctcgccgtggtcagctcgtctcaggtccgctcataccctctgccctttcgttttagtgttcttgtgtgctcctgatactcctcgaccaactcgattgaactaagctaccttagatcgccgggaacgcattagaatgtccgttgatcatacggtcaccatggacagagtgagttagaggtccaatagtgaaatta

SEQ ID NO: 14962 - DNA, 446 bp, Zea Mays
gcgcgttgcccgtagcttgtcaaagaccagggttaagtcttccactagggtcaaccctctcttagtcttgaccacgatgtcatcgatgtacacctccaccttgtccctaatcaggtcctcaaaagtcttactcatcgcccgcacaaatgttggcaaggcgtttttcagaccgtaaggcatcacgacatagcaataaagcccatccactgttacaaaagcggtatgcttcctatcttccctagacatctagatttggtggaaaccagagtaagcatctaagaaggacaagaggtcgcacccggaggtagagtccatgatttgatctatacgtggaagtggatatggatccttgggacagaccttattaaggctggtgtagtcgatgcacattcgaagcttcccgttcacctttgggacgatgactaggttggccagccacactgggt

SEQ ID NO: 14963 - DNA, 565 bp, Zea Mays
gctcgagttcccttgccggtgagtgattcacccctgtgtcctcgccgtgttcatctctatcttagcgtgcttctcgttcggtgcttgggtcgccgggggtcgccgttgtgcagggtctgccatggccgccgccgcggtgagcgtgcgcgcttcgcggcttgctctctggcatggggagagaaatagctgtgggccattgatgcttgagggaacggtcaggatagggtgcatcacgtgcgttgatcagcgaaggagtggtcgggattaggttatcaggggcgatgcgtcaggatgcatcacaaccgtagatcagtggaggaacggatgagactggactatgggtattcatcgtctggaccgttggatggggatctaacgtaccacagcgcgtaccggctcgggtcgtggataatttaatcttagccctccatctgtgatcgcacggctcagaatagacgatacctcttcggccgatctttatgcagaaaagcccctcagttttcagtgaaccaacccgcagtccatgcgccagtagtctgagtctcgggtaactttgtagtttagc

SEQ ID NO: 14964 - DNA, 383 bp, Zea Mays
ggcagtggcagggcggataaagacaggttgtttaaaggggtaggagggtggacgtggtgaagaacggttttgattaaaagatcggatcaccaacctttgtctcttctcaggcccttggttggacctgtcacctccataaccctttgacttgcttgggcctgcacacttggcttcaactgccagcgctgtgctgacagccctgctgtaggagaggtcgaggaaggtggacattttccgttgtagccggtcattaaggcccctcataaaacaatttctgttcttcagatcagtgttgacctgatcaatggcatattgggacaaatggttgaacttgttgagatattgtgtaacagtatctccaccttgtttaagcttcatgaatt

SEQ ID NO: 14965 - DNA, 425 bp, Zea Mays
gggaaacacaccccagagactaacttacagatacaaagaccacatgacccgaccacaacccaaggaattatatagctcgatctatgcccaggccttgaagcctttttgcacccgccaggcaccaaaggctgtgctcatccattatggtgttcatgatcgagttaatcgaaggagggacagcgtcaaagacacacaagttcctatgcttctagatacaccaagctcctaaaatgattagggagtttattccctttttatcctcctttcggactcttcccaaagaggacacttgactggatgaggtaaatcccttgtagcaagcctgcctggtgtccagcatatgttgcggacagccaaccacatgaacattttgcatttatttggtgcccaagtcctccagatccttttccatggttcaaagatta

SEQ ID NO: 14966 - DNA, 1159 bp, Zea Mays
gtttgactaaaacacataaaacgaaactgaaaaaatacaggagagcagtcccaaatagagccttacaaaattagtgtggcaaaatatccaacatatatcattcaagaaacgataatagagatgcctctttttttacaaaagtgacataattcacaaccatctctatcatgttctctatcgggacccactaacataattgcctctgaaaatatgttttcaaagatggctgggatttccaagccttttgaaaatatgcacccaaccactgaggttcaagtccttgacttgaagtcgagtgtgtatataccagcatgctgatatggcttgtcactcaaatttagctcatatcgtaatttagtatgtgtagtgaattaatacatagaggttgtacttgtaggaggacacaatccgatggacctgaattagcaccggtaaagaaccgatcaaatttttttatttagttccaactatagttgaaattgtcacagtttatctacatgtcttttagttctggcacttttgtcaatgttgttctaatgcactatgtgataatggagggacatctgattttttaagttcagaagctcggtgccaaaagcagacaccttcatttgttttcttgttcttcggtagtagttttgttctttggatttttgtcggctgtctgagctttgacgtgaggtttgcaaaccctttactttgtctgcaaaatgttaaggaaacaagcatgttaagaatccttctgattacaaatttaagctattttgcaaaatgttaaagcaacaagcatatttagaatccttctgatttcaaatttaagctattctgcaaaatgttaaggcaacaagcatatttagaatccttctgattacaaatttaagctattctgaatcaaatgacagcaaacgcagatctgctatgagaataaggaataaactaaaactggagctgtgatatcgacaacaataaaattgtttagtgttttaacaaacaatttatatataactaagagaaagggacatttgtatttgcggcagatttagctgtaagtctgtaacccatcccatcttcagggaaaatcagtctttcgttcttgtttctatatttttttttagaaatgtgattggatttgaaaaaagtcagaactaaaaatgttttt

SEQ ID NO: 14967 - DNA, 675 bp, Zea Mays
gtcccgaaggcagccccacatcaaaagtggcggagcaccactatctccttcggggcatccgactgccccaaaaacatggcaggtgccgacatactaccactcatcaccgcccctgtcatcgccaacatgaggctacataatgtcctgattgatggtggagtcgggctcaacgtcatcagccatgctgcgttgaagcagctgcagatcccaggatcccgactgggaccctctcgcccattctccggagtgggccctcaaccggtgtatccccttgggaccatcgcactcctggttacattcgggaccgaggagaacttccgcactgagaacgtccagttcgacattacggaggttaacctctctttcaatgccatcattggcaggctggccctgtaccggttcatggccattgcccattacgggtacttggtcctcaagatgtcgtcccctggtggggtcctcaccgtgcggggcgaccgccccgctgcgcttgcagctgtcgagaagttgcacgccctggcggcagaagccgctcgcccggatgacggggggagggacccctcgacttcctgtaccaagacgcctgccaaggtgcctaaggtgcaaccaactggagcagacggcgtccccgtcaagaccatccggctcagcgaggattcctcccaaaccactcgc

SEQ ID NO: 14968 - DNA, 1166 bp, Zea Mays
atggcaaggtcaaccaagggagtttacctcatgcaccatcctttcagagtcaagctgggcattaagggaggaattcaaagaacgtgcactgtccaaaaaagcagaggtctgggccaagtcagcttgattttgagaatacttctcctcaaggtcagagcatcgttgggccatatccgacaacgcagctgaaaggggatgcatgactaagaacaagttgatcaataaaaacaactagggaagctataagatcactaaccagcgttcgatgccttcaagtcatcgatctgtttctggagcagcaatgggttccactgcattagagacagagcttgttcgggaacagtggcaccgcaggatcttagctgggtagatattccatcaacaaaagcctgtgatcatagacagatgagcagaagaaagataattcactaatatgaacaacgtagagaaagaggccgactcgcctgaagattggagaggaacagtggtagacccagggcaggaggagttgagtcatggctcgacgagggaaggtcagcaggaacgatttgaagagcactatccggggtgaccttagccccaccagtagacagcaggctccttgcatctagttcaccaacctctaaggcaacttgtccagttaaaactgtggaagcctgtaccaccgtcgccccatcggaccgaggtggggacaacccaacgtggacgtccatggaggcgtgggaaagagagcccacctgaacaccctcgggggctaggttgtagcttgcactacccacaagagctggatcaccaccagcaacaccctcgggggctgggtaaccgccggcaccatcgtcgagggttgggtcttctgcagtagccacctctaaggctaagggcccctcagccacctccatgggagtcgggtgattcagaccagcgtctcgacatggaagactgccctccaaagtcgacgatgcgcgagacaccgctcgagttacctcctgcccaacggaatcaagcaaggaaagcccatcgtctgggacctctgaacagacggccgggatatcatctgcaggtggctctgatagtatgtctttggggacgacttcctccagtacttgatcaaagtctgatattgaaagcccctgaagactgacaagagcccatagagctggagaagg

SEQ ID NO: 14969 - DNA, 671 bp, Zea Mays
gtcaccactcacagtacgacgatcaagactccctccagtataaactgtcgttccttcgcctataaataatgatgcccttactgtggaacctcacagtccagcctccatctcattgtcgccccacatccgaacaatgtgtgccttactcttcaaaccagagaacaagccatcaccgtcgatttgagccgtgagcatgccatggtctttgacctcttcctccctctctcgaagtcattcttaaactatagaagttatgatcttagcatcgattaagacaactttcctcatggccataacttgcctattaaaaatatgcaagggaaacctcatttaaacaattgtcatataataagcataaccaagtttctagaagcttctacaatattcatgataaaccttaatcataagcaagacaactttctaggaacaactatggataaccatgatgtacatagccttatagaactccctacactaatcatgataagtcatgaagcctagatatttttagacctccctagaactatggtgatgtgtcatggtgaggtgtcccccatgtaaggtggaggtgacacatgcatggtgaggcgtcactcatccatggctcgtaggtgcctatataaggatgtgcccctcttgccatgacataccatcccacccccatccacaca

SEQ ID NO: 14970 - DNA, 348 bp, Zea Mays
tggtcccataactttgtgaccatttctgtcttcaggctcaatttcagttacttgatacaagtctgacagagcaactttgggaaacaatttctttgattttcgcataacaactagaatgactgtctgtatcaaagttgtaaaccattaaaccatattaatctttgttatagcactcctaggtagattcccactggagcttagtcgaaatggctctcaaacttggaccaaagtcactgtcaacttaaagttcagactgtatcagtctgacagtccaactttggacataaatatctcagaattcttcatggtaccaaggcatgagttctatattaaagttgtgctccttcc

SEQ ID NO: 14971 - DNA, 440 bp, Zea Mays
cataaattcatctgaatgccaaactgcaccaagttatcactgcatccaaaattcagcgcagcccagaccctactgaatggcaagcatacccagaacaatactaggggcgagataaggcctaccaacattccaaaatcagaaaacacaaaccatttatatacatatataagatagaaagcatacggatccccgcgctcccggccgaagagggcggcgtggcagagtttccttcgagcgccgtggccccaccaaacaggatcagccgcggtccgatgtacccgggcgcgccctcctccccgacagccggcaccgcggtaagagtgtgcccgcaccggcaccctggcccgtcctccttcttctcgatcaccgcgttcacggccgtgtacccaggtgctggcctcggacccacagcgccgaccggcgccggattcggggccgcc

SEQ ID NO: 14972 - DNA, 315 bp, Zea Mays
cgtgctgcgcagaatgcaaaactgcagagtgcagacaagggggaaggaggggagcagggatgaccttcggatgacgagctcatcttgtgccttgtagatgagcagggggcagggacgaccttgagaggggcagccgccggcgatggtggacggtggagactggagagacctggaggctagagcagcagccgccggcagaggacataaacttgagaggggcgcaggcacagggaggatttagggtttaggggcgccaacagatgtatgcggctactgggccaaaaaaacggtgaagcccaatagcacagccacatt

SEQ ID NO: 14973 - DNA, 757 bp, Zea Mays
ggagggaggccagatctagattcacttgtcgttgatggagcagagtttagaagagattgatccaacttctgtgccacatgcttcaaatacccatcacaaattttcatgtgtcttgacaaatgagatgttgttgatccttgtatgtaagaatatagcttcttacaatagttgcattttgcctttgatatcatcttccccttctcagatggatctgacacattcaccttagtaaagacatcccaaactttagatttccccttttgcccagttcaacagtcttcaccttcttgcgccttcttttgacccccctttttacttttgctatcatcaaattcatcaattgtgacattgtccgcatcaccaatttttccacctagcactgtcagttcatcttcagacatgtcatccctcttgtcaaatgaattactttctgaatcagtccccttcccttctacagctgactccatcacttacaaatctgcaggctacaatcagtaaaaataaatccctcatgagtcatgatgcttgagtttgaattttgactgataagcagaatatcaagatgtagtataagcatttacaaacagtgtaacactgcctatggatgaaaacctgtaccgtgcataatagagaaaaccttttttcacatctaccaggcatattttgcaattttgctgtctctttctaccaggcataacagagcaaacctgtagcctgtaggctgtagctgtagtctccagacctgttcctgacttcc

SEQ ID NO: 14974 - DNA, 383 bp, Zea Mays
gcgagcattgcatggatgggagagcggtacacgtagacgatagatgatggcgcaggcgcgcggaccatcatgacagggcaggcacgcaagtatgtacatgcatgcaaatacttggctttgaagctcatgaaacccggcccccactctccgctcgatgatgcatggtctgaaccttactacagcagacgttagagattgttgtacgttggtgctgaaacctagctagaacctgaagggttccatgaccatgatggttgctaatcagcgtcaggcttgatctgatcgtcggttcgtcacggcccctagcgtagcttgtagttgatgtttccgaagatgcatgcctcgcttcatcacccacccctagcgatgcttttccagagcac

SEQ ID NO: 14975 - DNA, 623 bp, Zea Mays
gtccgggttcccatggtacagtgatctgaataagatcagatcaacagctcaaccctcgccgccgatgggctgcacgcgattcgtgccgtcgtcgcagcgattcgtgcttggaacatgtggatagcgcttggggttgagtaagggtcctcgccgtggataactccggccagtaaacaaatccggccaccgtacagcacacgccacggtagaatcggatgacctcaccggtgaccaccgccttctggccttgtgccacgtgcctgagtacctccaccgcatcgccgtgaaccattgtgactctccgttgatcgccggaatgactgccacagtagatgccatgaattcattgcgccagtgaaactccccctcctccgaccgccgcacgtcatcgttccaattcccggccacctctctcgcttagtataaattgagctcgccgtgagctccgcaaggtcatcacacacccagccacccattatcaccctcaatcgttcactgaggaactccaatttctaacttcccccaaatcggttcgaatacaccgcaagaacacctcaccgcggccagcttgttccaggtttgttcaagctcctcaatcatttgtcctagcatccttaagttct

SEQ ID NO: 14976 - DNA, 848 bp, Zea Mays
gcgagctagagcccctggctgtagcggccatccattcccatctccatcactctgcaatcagggattcagacgcgataggtctgtgagatcacgacaaggcttctgtgggcatccgagggcaaggcgaagccgaattcctcatcggaaatcaagatttggggctgtgccgccatctcccgtgggcgtgcgccctcgcagcagccaggccggtgagtaaccttccacgatcctcgcagtgattcaggactgcttttgcacaaatttggttggggggaaacatgcatggtggcgccaaatcgggtgtctccggtgagctcaccgtctctgtggccgctccgccaccgcctgggcgcatcggggaggaagaatcgggtccaccgttggatcgcatagggttggtccagattagatgttggaatgatgcgccaggagtcgtatgttttggatcggatggtgggggatgcagttgaataccgatttgttatattatatccagatcattgattgaccgatggacggatcagatctgatcgtagtatggtgtcccgtgggtcgtaggatagtaatccaaaggcatatataacttaccgtatcatctggtgcacgatttaatctcgcccggtggtttgggatccaacggctcatctccactgataccccttcgcgctatcacttttgttaaagagccctcgggttttaatgaaaacaacccgccatccacgcggggttagttctgagtcttcagataaattaccccaagccccctgcactctctaaaaatagtgcgcccagtccagaacgtgtttaaaatgtataaatgaattagtaaatgtatttttaatacaaaa

SEQ ID NO: 14977 - DNA, 506 bp, Zea Mays
atcttctgcttcttgcgtcgctggtagttcctcttcgtggaggtctggcaggcgtcctagttgtgctgctccacggaggcccatccgaggcatctccgctggcgcatcttgccggactcactcgccttattccaggcgcgtgcgcccgccctcaagcggccgaccttgtcagtcttcacccggtcgattcccaggtgcaaagcatgattcatcttgacctatgtaactcattttcccccaacattcggatacattttttctcccatgtagactgcgcgaattcattggtcatggagtggcctttagatctggatcggtatttcgtgaaagagtgttataaactcaaggagtgtggctgttgtccagaagcatcaccgttggttttttatggtgatcttaaacaacaaatgtcctcagtgacgggtctagatttggaaaaaaggacttggaaaaaaggtttaaaaagttacgaagattgtggggaaagtacactatgactatgcagg

SEQ ID NO: 14978 - DNA, 521 bp, Zea Mays
atgatttccatccccttgtccaatcgtgctgttgcacccttttttggctgtggtagtggtggtgattgctgctgaggccgatttcgctgcggcattgctgtggtatgcgacgaaatggtaggctagttgttgggagattcgggcagctggggccaatctatggtggagttactgcgaattctcggggaggctaggtgcaatagggttgtaggggagtgtttgtgtctctaactctatgggcgcgaaatgttggtaattagtggcaaatgcctgtgttgcgttgaggatttagtgagagattgtggccccatattgataaagctgtgagtttctgtgtgaagttatggattctgggtggggctaatttgcagttgcattttgtgaaagtgcatccattttattacatttgggatgaacaatttgaaggatgcctgttgcgtggggagaacatgtcaaatttttctggttttttgttaataaatgttgtttcctactgtatgatttgcttaatgcttctgaat

SEQ ID NO: 14979 - DNA, 437 bp, Zea Mays
atgaatggtccttcccatagtgacgacaatttgtgtcgtccctcccccgctagaattcggcggaggacaagatctcccactgcaaaggatcgatgccgtgtggacttatcatggtagcgccttagagtctgttggtatctggctgactgaatcactatattcaaccgttcttcttctagtatatcaacatcctccagcctagtagctttagcttcagatatgttttcgaagatcaatcttggtgccccaaacttgagatcagcaggtagcactgcctccgaaccataaaccatgaagaagggagtgtttccatgcaaagctcggctgggttgagttcttaggctccagaccacatatggaaactctctgatccactttcctgcgaacttttcattcttgtcgaagactttctttctgagtgcttccagtatcattct

SEQ ID NO: 14980 - DNA, 536 bp, Zea Mays
gaaggaaatgtgccacttttgttaatcggtccacaacgacctagattgaatcatgatgtcgagaggtgttgggcagacccataatgaaatccatgctgatgtcatcccatttccatgatggtatcgataagggttgcaaggcaccagctaatttgaagtggcttgcctttatcctctgacatgtgtcacattccgatacatattgagctatttccctcttcattctggtccaccaatataggggcttcagatcatggtacatcttggtgcttcccgggtgcatggagaatttggagagatgagcctcatctaagattttcttcttgaggtctctatttttaggaaccaccaatctatcttcaaaccacaatatccccttgctgtctggcgaaaacacttatactttttcgctttctgatgaagattctccttgattatttgcactccttgtcactgagttgggccataataatctggtctgacaaggttggctcgacggagatgtgagacaaggtaccagaaggaattacttcgat

SEQ ID NO: 14981 - DNA, 551 bp, Zea Mays
cataactccaaatcgtgggctgctctacaatcactcggcctatgaaagcaggagactggcctcggggacattcttccagtagaaccatttcatgtgccaccccttgttggactttgatgctggggcactattatactccaaagcctgatgcccccgaagatgaacactatcacgaccgattggtaccaccgagaaggcgttcgagcgctccttcctcctctggagggtcacgatgaagagatgccattataactcgaagtggggcccaatccccaaaaatccctcatagagggtcacgagcgtggctctgtgatggattccattaggagtcaagtgctgaagcttgatgtcgtagtagtggtggagcccatggaagaagtaatgaggaggcgaagtgaggccacgctcatggaaggggagaaaagagaaaatgtggccttccaggggcctaaggacatcttcatcactggggccagccattccatcgcctctatcctctcatagatgaggtcatgtgatgctagggatgtgaagcaagaattggtgacatt

SEQ ID NO: 14982 - DNA, 500 bp, Zea Mays
cccaatttggctcccgtataattgtctttagtgggataaagtgagctacttttgttaatccgttaacgattacccaaattgagttgtaaccatctagagtgaggggtaaaccgataataaaatccattacgatttcttcccacttccattttgttacctgcagcggtggaagcaatccaacaggtctttgatgttcggcattcaccttctgacagatatcgcaataggccacatgtgcgaccacgtctttcttcataccgtaccaccaatacttcttctttagatcttggtacatcttggtactatcagggtgaatagaatagattgagtcatgggcttcctttagtatattttgtcagagactatctattttaggaacacatatcctatttttgaaccatatcgtgacctgatcatcctccgtgaaatcttcacctcttccctctaccattaggtctgaaatttcttagatcttggcatctccaatctgaccctttcgg

SEQ ID NO: 14983 - DNA, 767 bp, Zea Mays
gcgatctaccgcatcaccgtgactcacccttgctccccgttgatcgccggagcaattgccacggcgctggacacccagccactgcgccagtactcttcttcctcctgcgaccaccgcgcgtccccactggaattcccagccaccgccaatgatccctataaattaagcccaccgcgagctccgtatggtagtcaagtaacccgtacaccaactcgcgtctcgaatcatctcccagagagcttcaatttgggacttcccccaaatccaccaagaacaccgtgcggtgtgtgctcaccgtggccagcactgttcaggtccgttcataccatcttcttccccgtttacgtactctcatgtgtctacgatgctcgccgacccatgcaatttagttaggaaccctctgatcgccgggaacacgactgtccgtccgcaacactctcggtcacagtggccagagcaaaccatttggccatagatgaaattgtgttgggggaaatggtcagggtaggtcatatttcgtgtccgccgctcggggccgccagtcttggctccctccggccagtacagatgctcgtcggagctcggccgcgttcaccgtcgacggggaccctatcctgcgaagaaatagaacttggaggacccccgtgtaaactgtcagtgacacagagaaacagtgaaagaacccgtttccagttagcaaaacccccgaggccctttctgtaaagacgccagcgctgccgcggacgcgcgcgagctttccctctagg

SEQ ID NO: 14984 - DNA, 596 bp, Zea Mays
ccgcgcttgcaggtgtcgagaagttgcacgccttggcggtagaaaccgctcgcccggatgacggggggagggacccctcgacttcctgtaccaaggcacctaccaaggtgcctaaggtgtagccgtctggagcagacggcggtcccatcaagaccatccaggtcggtgtggattcctcccagaccacccgcatcgcaggtaatctggaggagaaataggaaatcacgctcgtcgccttcctccaggcaaatgctgacgtattcgcatgggaaccatcgcagatgcctaggatccccagggaggtgatcgagcaccatctgaagatccaccctgacgccaaaccggtgagtcagaagcctcggagacagtccattgagcgacaggatttcatccatgaggaggtccagaagctgctgcacgctggcttcatcgaagaggtccatcacccagtatggctggccaatccagtcatcgttcccaaggctaacaggaagcttcagatgtgcatcgactacaccaacctcaataaggcctgtcccaaggacccatatccacttccacgaatagatcaaatcgtggattctacctccgggtgc

SEQ ID NO: 14985 - DNA, 466 bp, Zea Mays
gcgcattttcttcttccaaggtcaaaggaataatttctgaagcatatgcctcgataggagttgatggcccagcttcagcagtatctagtgtcatatcagcttcgctagatttctttgggatttcaccctttctatcaggagttgaagcaggggtttgtacttttgaagattccataatagcttctagtacgctggccattctcctcctttttggagttactgcaggaattttggacaccttcggcagatctggctcttgtggtgggctcagggttttcggttgctctgccgacttccttaattctggatcttcggttgttttctccttagcttcggcagaacgcttcggcacttcggctgtctcggttttctcctgttccgctattaccatcggttttggcacttcggccgattctcccttggcttcaacaagagtggggtagtctggctcaaccgcagaagaagg

SEQ ID NO: 14986 - DNA, 389 bp, Zea Mays
cttcggatgaggacttggattattttgcagcattggatgtggctgcgatggaggcatctccgcgtgtgatggatgctgaagttcttcccggtccgagtgctgggcgtaggcggcgaagggcggtggcgaagcgtagagtgagtgaggtggagggtggtcatcttcgtgtggacagggctggcaagcgggaattgttgtcctcgccggttggggcaagtgtgggtgaggaggagttgcgaagtctttttgagggtgaggagctgaggataatgatgtttaactatagggagatgggtatcatcccgaaggttgaaccaatgtaaggtgtgatgccctcgctgtatgtatgtaactataatttgtatgatgaggttgtgtgccttcgctga

SEQ ID NO: 14987 - DNA, 375 bp, Zea Mays
agtggaggccggatcttgggcggcgtgtgcgggtgctgtggcggacggccgtgccgtctcgtcggcaggagccgcgtcgactctaggccagcagctttgggcacgccggcgcggatgccccaaggcctacaggttcgagcacgtccgagcgcgcgtgggaaggaacggtcgaaggcggcgtataggacgcacaggatgactctacatgtagcggacgactgtagcattcgctaagataacgaatctgataccgaactttgttggacgcatagagaagacaagaaatcgctatatttagcggacagaaccgtttacccgctcttgctgggacaaccttatgatgattgatgagcccaaactttgccttgtgatctc

SEQ ID NO: 14988 - DNA, 535 bp, Zea Mays
tttattggtaaatttgtggtggtttactttgatgatatcttgatttacagaaagtcattagaggcacatatggatcacttacgtgctgtttttagcactttgcgagctgcgcgtttatttgctaacctcgagaagtgcaccttttgcaccgaacgagtttcgtttcttggctatgttgtgactccacagggcattgaggtgcatgaggccaatgtgtatgccatttagagttggccaacaccttcgatggttacacatgtgcagagttttcttggacttgcaggcttttatcgtcgttttgtcaaggattttcagcaccatcgctgcccctttacatgagctgaccaagaagggcatttcgttccattgggggcagccacaagaggattcctttgcacttttgaaagagaagcttactcacgcaccgctactccaacttcctgattttggtaagacttttgagcttgaatgtgatgcaagtggagttggtattggtgctgttttgttgcaaggaggtaaacccgttgcttacttt

SEQ ID NO: 14989 - DNA, 454 bp, Zea Mays
tagcgccgggcatgccgcgtactgcgtacgttactctagtagtaaccggtgaatggtgatggatggcagccacctgctgtcctctcgtttcaggtaatcatcaggtgctcctgtaatcacctaccacctcaagtaggatggaactgtttcgaacctactcttctgcaagtaattttttttgtgtgcgtgttctgtggttcagatgatgagtttggtgggcgcaatatttatacggattcgagtctaacgtctctacatacaatatacggcggctcgtgctactgacatctttgttgctcaataatcgtaatataggtcacaagtgggcgagagagaggagctcccaagtctcttatgcgtcggttgacctacaaattacgggactagagttctaagctaagtcttagacgtctcgccttggctccaccctccgggtcttcaggtctcatcgagc

SEQ ID NO: 14990 - DNA, 723 bp, Zea Mays
cgaggatggtgggtttatttgagaaaagtacaggggctctttagcaatattgacccgcgaaggggtatggatgttttctagccgttggatcttactccgaggaccacgattagatctactcaaaaactgaatcacgacgcactgcgggccgttggattagagatctagggttcggattaaaccacggagcggtacgcgaaattacccgtcagatctaaatccaagggtcgggatcttattaacctagatctaatctgcgtcgttgggctcaggatgaacatcccagatttattacgcaccagatctgatcccaatccttcatccacgatccaacgaccgaacttcgtcctcctcacccagtaaggtaaattaatcgcgcccgctcgatccctgatcgacggaggatacgccccacgccatcgacggaacacccagcgcgagaaacagagctcgcccggcggcgtactcgccggcgagcagcagtgccgaaccccgcgcgccccaaaaatcaacgcaggcagtgctacacgaagaaccgacgaaggtaagtaaggtagatgaagtctcaccgctgaccaagacgcagaagcatccaccctcggtacgctgcgaaggaaggcaaatcccggtcgtcgatggggagttccgcttgccccgagcgccaaattgtgtcgcagaagcttttggtgaccaccggcgaaccttctggccagtgatccgcgc

SEQ ID NO: 14991 - DNA, 651 bp, Zea Mays
caccccagcccccgcgagtggtaaacggctgcgtcgccggcaatccgccatactcccagcgccacatcggtgaggcatcacccgcattaggccagctcacggagccacacgctcaccacatgaactggcgaggcccgtgatgttgcgtcttcagatctccggcggtaagggcactaatggtgattctaggagtggaccgatgatgcccaccattatagtcgcgagggagggtggataagagggcggcggaatcggatctcgcccaggtttctcgcggcgaccggtatacgtattcttatacggctgcgatgtgactgggagggtccagttgccagtaactgtgggagctccacggatgacttcatccctgacgccccaacaacatcagcacgacggaaataataaaaaaaataccgagccgcacgggctggctccgcgtgagtgaggtgggccgcgcgatgagttttggcccacacaggtgaagctttccccttttttcttatttatttttgtcttctttcaattaaaattcaaatctgctttggttttaaacctaaattaaaatgcaaaattcaaagagccagtatgaagtgcaacaattttatatgaattactttatttacctacttaggctaatatttccaatatgca

SEQ ID NO: 14992 - DNA, 583 bp, Zea Mays
caaggggaggcctgaagctatggtgcaagagggcttcgttcatcaaggtaatttaatcattggaaggtagctggtgcgaaggctggtatgtgggggtgacgagggtttacgttgagcgtgggggcctactgccggtggcaggggtcctcggcctgcatttctgcgatttgctgctccaactctctggctttctgctcttcttctaggaccatctcccttactttggcttgcatgttggtgcgatgtcgcttggccgcgagtatctcctgtttttgtaggtgattgtttttaatgtgaagtgcttgtaactttagctgatcttcagctgagatgcccaggacctcgctgtcctcgatgatatcatcaacctccggggggtgaaacctagctgggggttccaagggaggccctcaaaactacatgtgagaacgatgccttcgagggtgagtgggttctctgttctagggcgcttgctgttgactgctctgtcgttgttttcgggtgcatcttggggaacaacgagggctgccttgcctttcctctcggcgagttgccgcgtcatctagagaggtggtgaacttgg

SEQ ID NO: 14993 - DNA, 533 bp, Zea Mays
aaaagatcgcgagggggggttgaattggggctatgcgctgtcgtgcccacttgtcggcaacgtggccgagcgatcgtcaccttggtggctgtcggcttcctcggttgtgttacgccagggaccaattcaccacgtcgttgtgaccttgtcagatagcgagttaccctccatgagccattgcactaatgcgcgccacgaatcttaaaccagtgaaaaatctcgccaccgaggagttcagtcccatctcaaattcgcgaatcaggtggtcggtccctttaaattgagtgccctccccgctccacccttctattgtgaacccaacccaccctcagcccactcctctcgtgtacgctagctcccagtcactggaattccccgagcacggtcaccggcaccgacgagttgagccccgccgtggccatcccttcttaggttcattcatatcactttggtccccgttttagtacatctctggtctctagaaactcatggtcttgaccaattgaacgctaacacagtatagtctgggaaca

SEQ ID NO: 14994 - DNA, 533 bp, Zea Mays
ccggcggcggacagactttgtgtggaacgtggctgtgcaggcggctgaggcgagagagaggagtcgcaaggtcaacggagaagtggagaggggcacaaagggcaccaatttatgccccgcggaccctggcacggaatggagggaagtcgcccacgcccgcgaggatcacggcggcaaatccgagcaacccatggaatccacagttctgttgagctcgtatcgggagtaaaaatgagcgtgcactgaggcccacctacagacccacggtcgcgccaagagcaagggggtgagaggaagttggtcggtggggtttgttgaggcaagtccggttagaagcgagagaatcgctcggcttgttgagattccagtccaccgcggtcgctgcttcagttgggggagaagaagacccgccctgacctgcgggaccccacccaggaaaatggcaccgggtgcgcgtccgcggaagggggatgggccacgcagtgggaatgggctgaatctgaggttacgccggcccaagtagcgatttaacc

SEQ ID NO: 14995 - DNA, 825 bp, Zea Mays
gccgaagcggaacaacgcctggcaacaccgtgatcttgggtaagaaatgtcttcctgtctccgtgattcacgctagatatttagatgctaactgtcagacgggttatctctggtggggcatggccggcgcgccagtgctctagttcttgtcacgttgggggaagaactaccggcaccgggcagccaggaagggagagaaaaggaagtaggagggtgcagggaggaagaaacgtagggaaccgtcagatctagggcatgcgatggtgatgagaggatgtcggtgtgtgctgggagtcgtggatccggtattgggcgacccagattagaagtagaaaagctattcgggcacgttagttctgggtcgtcgatcggggatcgaaaggctaagattaactcgcgatgtgggtggttttggtgcgcggattccggatctaacggccagggttgcgcgcggggttgacgtgtgccaaagctaatatgtgctcttagattttaatcgaacggtccacaggaaccgataccccttcgccgcatcattttgcagatgaaaccctcattttttaggaaaccaacctgcagtccaagcgactggggatctgtgtctggtggactttagcaagttaaacctcagactttctagtatttgacgctcagtccacaaaccagagaaataatattggaaattgatttttaatacaaacataatcccaaaattcatttaattcatgaaaaatcatattaaatcctttttgctccattccagttcccataattttgtattaatatttcctactacttggtaacactgttttaacatgaaatctg

SEQ ID NO: 14996 - DNA, 463 bp, Zea Mays
ccagcatgagtttgcaatgacagacatgggtcagcttcaccatttcttgggcatctctgtcacatgctcaacgcatggcctgtttctttctcaacggcagtacactcaggatattttggagtgcgccgggatgagtgcgtgcaaaccttgtagcacgcctgttgatctccactccaaactatctgcagatggacctcctattggtgatgctactcagtaccacagtctggcaggagctcttcagtacctaacctttacacgtcctgaaattgcttttgtagttcagcagatttgcctctatatgcatgatcccagggagcctcaccttgctgctcttaagtgcattctgagatatcttcaaggcaccacggactttggtttgactatgcgtcgttctcccccatcggagctggttgtctacacggatgccgactgggctggatgtcccgacactcgacggtcg

SEQ ID NO: 14997 - DNA, 671 bp, Zea Mays
cgaatggcgtccaggtcttcccatgtcgccagcgcgtcaaaatgtcatggaggtcgaccgtagaggacttcaaatggagagcgaccaagagccgagtgaaaggacgtgttgtaccagaattctgcaagagacaaccacaggttccacttgtgcggacaggcatggacgaaacagcgtaaataggtctccaaacactgattgacgcgctaagtctggccgtccgactgaggatggtaggctgaccccatacgcagctgtgtaccagccagcttgaacaattcctgccacagagagctggtgaaaatgcgatcacggtcggaaatgatagcttctggcatgccgtgtagcttgtaaacagatgacataaacagctgagccactttgaaagctgtgtagggatgcaagagtggaataaaatgggcatagcgagaaaacttatccacgaccactaagatgctattagcatgagcagaacgcggcagaccttcgatgaagtccatcgacactacctgccaagcttgttctggcacggggagtggctggagcagtccaggatacttggatctatcgggcttggactgttggcaaatggagcaagctgccacataatctttcacctgttgtttcatgtaaggccatgcaaacagttgatgaatccggcggtaggtaac

SEQ ID NO: 14998 - DNA, 424 bp, Zea Mays
ggcaagaacattgcaaagatgaaagggcccggagaaggttcctgttgccacaatgatagatggaggtggaaataagagagtatactagcatctagagtggtgtggtaggaggcactagaatcagcaacccagtcggtgacagcaggagcagtgagggtcatcgtgaggtagctagcaagggactgttgatcccaccccttgggccacggggtccaggacggagtggagtggtttggcagtggacaaagtgatggttgaggagctagcggtgcaggggtagggtggacgaagggataccttgaactagttatcgccaagtgagctggctagggcggaggaagtcacggaggagggacacccggggactggctaggccacatggtgatgcagccggtccacgagttgtagatggaggaccaaggag

SEQ ID NO: 14999 - DNA, 715 bp, Zea Mays
cgccgtcggtgacctttgcgcaaggattcgcgctgatcgcggtgattcgtgctggactcaggcaggatagtgccgggagggtgaaaggatcagaagaggagcggattgggtcgcggggtgaagtttatcaaccgcgtctgtagctgtgcgacgtggctggaccgccggtgtcatcgtggagactctggcgacctcggttatgccacgtcgtggcttgttactgtgcgatagtaaccgtggcacacttaggattgcaatctttgaaccgttgcaccggtgaatgccacgactaagccaccagtgctctcccctctctccggccgccagcgcgcgattccaaattcacgagccaccgcccttgggtcctataaattgagcgtgccatcagctccgctaggtagtcacgcatccagcgcacccactcgtacctcagattgtccacctgagagctctaatttgggatttcccccaaatctgtcaagaacaccgcgtgtgtgagctcgtcgtggccagctctccacaggtccgatcatgccttcctcgctctcgtttcaacatccctgtgtgctgtagatgcttagcagcctggccaattgaactagatcacgctagatcaccgggaacacttcagattgtccttggtttgcgctgtcaccgtgggcagggagatcaagagctagaaccttgcaattgatcgaggggaaatgatcgtcag

SEQ ID NO: 15000 - DNA, 597 bp, Zea Mays
gtgtctcgatatagcagaaggcgaggaggccaacacccgtgaagcctaccgaaccctaaagatggattatgataagaagttgaagaagctcgcccccacaaagaaaatccaaaagaagaccaagaaccaaggaggccaagctgagcggagggagaaggctcccccagcactagcttccgccaggatagagaatttgtccgtcgtcgaggatatgtccctagctagccttgatgaccttctcaaggaatttagggacactttagaaaaagagttcagtagtacctctgagaacgctcgcgtgtagtacgacttgtagtagctgtatgcttgtaatgtattggtgtaatgaataaaataacttggttgaaaacaattggcatgtgcatactagtaactctcccttctcccaggcagatggcttcggataaaaccacgcctaccacctctgggattggaactaggtttcccctgagagctgaaagagaagccgatagagaggaaagtgagacccacctccccgcacctctagaactaccctaagatttagcccaagttctagccaaccaaacccgactcatcgaggtcctcactcgaagt

SEQ ID NO: 15001 - DNA, 618 bp, Zea Mays
ttggacactataaattgagtgtgccattagctccgttaggttgtcatgaagccagagcacccgccctcgcctccgatcgtccaccatagcgctttaattcaggttttcccccaaatcgggttcttcgcgccgccgtggatagctcttccatggccagcgtcgcctgaggtagttccagcccaattaccatttgttctagcttccttagggtgtagtgatgctccccatacttagaaattgaacgctatcgtacctagtcgccgggaacagctggatcttcccttggttcttgccgtcatcgtgagcagaggggattctgggtcggactagctcaattaggggatgaactaggttcgcttgggatgagggatgctagtgcaactcttgatttagtcagtcatcgctgtttgggacgagttctcgcgaagagatggccgacggcaagcacgccgttgccagggttcggtttggagaagaaatagaagtgcgaggggtgttgtgtaaatgtcagagagacagtgaaatagtgctaagggttctttaccggttattcaaatccccgagggtctctatgcaaattgtccaacgcaggcgcgcgcacgagcgtgtttccctgtt

SEQ ID NO: 15002 - DNA, 429 bp, Zea Mays
agaacattgaagctagtgtccttatcaggagaagaagtgttagtggagttggtcttgtcaggaccaaggaaagggagttgtcaccaagtcaccgcctgtattgaggagattaaaccatcagaagctatcaatgtagtatcagaattcccaggtgtgtttcccgaggagttaccaggtatgccacctgaaaggaaggttgaatttgccatagagcttatactaggcaccacccctatttccaagagagcctatcgagtgtccggaccggaattggtggaactcaagaagcagattgatgagttgttggagaaaggttatatcagactgagtacctcaccttgggcagcctcagtgttgtttgtggagaagaaggatggcacaaagatgatgtgcattgattacagatccttgaatgaagttactatcaag

SEQ ID NO: 15003 - DNA, 643 bp, Zea Mays
gatcagtcttcagaactgcagtatcaagataattacaaagatcctgaccaccagacttcaacaagaaatccacaatctgatccacttggaccaaacaggatttattcgtgggcgctcaatcactgaaaacttcatctatgcaatggaactgactcagtgctgccacaagaggagaactccaactatgatcattaagctggattttgcaaaagcctttgatactgtgaattgggatgggctacttacagtgctgaaagctagagggttcaaccaaacatggcaacaatggattctacaactgctatgcacttctaagaacgccgttctgctaaatggtgtgcctggcccgtggttcacctgcaagcgaggactaagacaaggagatcccctctcgccgtacctttttctcctggttgctgacgttctgcagagcttgatccaatgcaactcctctatccaccatccgcttgtgggtgatagcccctgcccagtcttacagtatgcggatgatacccttattctcctgcgtgccaacattgcagacatcacagctctaaaatcagttcttgatgctttctcagaggctacagggctaaagatcaacttccataaaagtactgcagtgcccataaacgtggacaac

SEQ ID NO: 15004 - DNA, 596 bp, Zea Mays
caacggtctgctgacgggtcgagacgtcccatcgcattaaatgaccgtgccccctccaagagaaaacgcgacgagcgccgttttgcattacacctcaaaaggtactccctcctccctctgcctctctttccttatttcatcccctcgcaggcagcgggaagaaggcgtctcctacctcgggtgtctcatctagggaagaaagaaggcaaggcgaattactgttcagaggttcgaaggttaggccctcggcagggttcggtaagaccacctcaggacgtcagggccttgagcccatcattgatcaggggtttgaaggttggctcctcggaagggcttcataaccgccccaaatcacagagtcagggatgactgtgagtattcccgtacatggccatagctcgggttgtgacctgaggtaccataagacatatctgagacccctgggagcgattcatgatggtatcccatcgtagggaggcatcgagccctcggaccccaacaaacgggtttaggaccacgcgaaacacctgcaggtactttatggggcatgtctctagaccactagccgacccctatcgaaaggagctcggaccccc

SEQ ID NO: 15005 - DNA, 863 bp, Zea Mays
ccgagtatttcccctaagttaattgcacagttggtgagctatcaagctctgtccacgtgaaccgagggggtggcggacagatgagtgcgttcccggtgatccctggcggtccagttcaattagaggggtcgaggggcatcaccagcatgcaaagatgctagaacaggggcggggagggtatgaacagacctgtggagggctggccacggcgagcttggttctatggtggcagaaacttgatttgggggaaacaagaaattcgggcacactggtgatcgattgctagcaattcttggtggctgggtagttaatgaccttgcggaactggtggagggctcagtttatagggagagcgagcggtggtgatcaattcggtcgagccgtgctggctgccggagatgaagaagaaccttggcgcagtgaattcgtgtccaccgtcgtggcaacctccccggcgacgatgggacagctctagggagtcacggcgacgcggtggaaaggcagagccacgcggcacacggccgagaggcggcggtcaccggtgaagttatcggattccgctgcggtgaacctggtacggtggccggagttgtttaatggccggagtttatccacggcgaggatatctacgcgaccccaagtgctatccggttaccagtgagtgctaatcttaacggtggcgacgatcccggcgcgaagtcatcggcggtgaagggagcaattgatctgatctgtccaggcactgtaccatggcgatgcttattcagtgtgtctgacagccaagatttagggccagattcctcccaattttctatggaaacatccccaagtctctgcatcaaagttgtagtgctacataccag

SEQ ID NO: 15006 - DNA, 672 bp, Zea Mays
ggagccaacgactttattaggtttcttcacgaaattgagcgggttgcgtaagcactcaggtgtgtaaggtagtaaagaagtagcgctcgggctcaatttataggcaggttgccagaatcggacggaattcaaaagatctccatgtgcgctagtgagcttgcgcgcgggtaaggccacgacgagcgcccaggtgaaatgcttcggtcgaacgacgccacctcatggttacatgcgccacgtcgcggaagatttttaccaaataacgcaagtttgagcattgaacacggcagcggtggcgttcttatccccggtgaggtacactgaacccagatcgctatcttgcctgctagcccaaattcggatgagcactgcgccctaattcatgtagttacttgcaaatcggttcgcatcaaagtggtgcattaatcaatgttttttcactttggtataacgaccataccgaaaatccccatggattaagcacacgacgatgcccaagttggctcaataacactgaaccctagcttcagtatgaccaaatgcagtaattgcatttctttccccatcagaccgactgacagcgccacttcaaggcaccattacttctgttttcacatagcaacaacccaaccttactttagcaaagttatgctcctatataccaccttcaac

SEQ ID NO: 15007 - DNA, 729 bp, Zea Mays
ggaagataaaagctccctagggtctcgcccacactgtcgtattcccaccgccgtcctgcaatcgccgtgagctgagagggagattcacgccgctgccgtgggattcacaccagcgcctccgcttgggtgccaatcgcccgctcgcaagcttcgccgagtcgtggggaaggtttccgaaggccaacgctaaggatttgtcgtcgggacccagggaattcatcaccggagttgcgcccgaccgcggagccgctcctcgccgtggttctccctgcactgcgaccctcgttgtcggtaagtgcattcctcagatctgcaagcatctagtgtccacgtagcaccatctaggtcagagttcatgggctggggcgggtaaaacgcgaggtccgaccatggcgccgccgtggaatgttacccgccgccgtgttcagtcaccgggttggggaggaaggttgtgcgtcgtcgatcatgtggacgatgaccccgattagaagatgggtatcccagattacttcccttgatgaggatgttgtgcccccaaatggtattcctcaccccatgcatggccatacagtgagtgggaactagaacatcccccatcattaggtgcactagaataagaaggcgccctatcgggcgctctaccagatcagtgagtaaattgttgatgagtaaccacgctaataactatgttatagatccacagaatagtcattagtgagttgatgtgaa

SEQ ID NO: 15008 - DNA, 451 bp, Zea Mays
gcggaaaactgatttggggagaaaagaaaattggagctctctggtggctaatcggaggcagtagtagatgctttggcttcgtgatgccttaacggagctagaggtgtgctcaatttatagtatctcaaagcggtggctctcaatttggtcatggcgtgctggcggtcggaggtagggaagagtactggcgcaatagctgcgtgtccttcaccgaggcaggttcactggtgatgagtccgcaatgtaaagcagcctactgcaatgtggtgaagtctcaacacacgtggcatacgatcggcaggcagccaacgtcggtgagcttatctgcgccggccgcaaggcaagggggtacgacggccagccaccagggttatcccctagcgaagatcttttacctaggagcgttatccggtcaccggtgagaacgaatcgcaatggcggcatggatctg

SEQ ID NO: 15009 - DNA, 624 bp, Zea Mays
acctcccagggaaatgtttgaccattttaagccactgacttccatatatttgatgagctcgaatcaattttagatcctcctgttctgaccaatcctgtttctttattgctgggtcaagactgcgtgtccatctatatggaaggcccatcagcacaaagtgaagaaaaggcatgcagttctaatgaacatttgaatgcagtctgcataatggacattctcactagtaaatattccaaaccataaaggcttctaattaacaacaatgattaacaaatgaatagtgtcagcattatttgagtcgactcatacgactggaggacaccaaaccatgcaaagagtctttgcatccgacacaaaaataaggttcaaaacaaagagtgtagcagcttaattgcttcttgcctattgtgggatcccaaaggatgcgagcaatataatgctaccactggtgaagactctgcagcatcacgactcacgaggtgtgtgacatgacatttgtgtgccagaggttcagatcaaccactggagaaggcctaagtgttgaaggggctgtttttggaaacaaatagcttattccttttttacattcacaatgggggcatattttttaaggatgtgggtgtt

SEQ ID NO: 15010 - DNA, 378 bp, Zea Mays
caaggcccagcgtcgtgcgacagctgtcgtggcaatgcctccgcacgcagcactggcttctgcggatgttggcatgccttcgcctggcaaggctagccgtgatgcgagagcgaagggtactgggaagggcgcaaccagcggcgacatgctcgatatctccgtcaatgactacttgattgaaggcgtcaacgagttcgacgcccacactaggcaggggggcggtggtaagtgtcttgttcgtttgggagatctttattcacgactttttcgtttttatagactgggtttttgctgtaaggtagcggtctagccaggtggtcgtgacctaggcgaagtctacagttgaagtgtcgtctgacccttgggcgcggttctgcg

SEQ ID NO: 15011 - DNA, 1229 bp, Zea Mays
ctcggcctaggcaatagtgtgtcacactatcaccacacccccacattgtcgtccggctagtgtacatgtgagccctgctggtcagctacacatgtcacatgcgcacataggaaccagccactgccatgtgggcccatccatcagaagcttctcctccctcgcatcgtaacaaactcgttcgtagtgtcacgccaagactcgaccaatgacctatcgccctaggctccgtacttggtgtatatatgcatacatcgtgacattctgtggccatagattgagagagcaagaaccttgggtcgccgagccgtgcacctggatagagggtgaggtagccgctgagaaagagaacattagtcgtcatcatcattgtacgtctataccgccgaccgagccctgatcgatagctccaagcattcaccaaagaggggtcacaagaatgccaatgctaatgcctcaccctaaatcctaatccacagaaggatccatctcctaggtgtcggagtgaccggaagagtgacatcctaatggtggtactggatctgcccccttttctacaggacagcggtgggaggcgacgtcagtaaggaccagatccatctccactactgcagggagaaggtatgaactcctattcccctctgcggtcgtgttttatgtgcactgatccaagatggattagttccctgttatcttctaaagtaatctcggagttctaagtatacacagttagatccctaatttctatcagatatatgttgctctgtttatctttatacactttcctccttgatagcctcttttcgggcaaaccatgtgaagcaacttggcttttattcagtcttgtagcatcaacttttgatgttcacactttttggtcatgcagtttctctttctacctggttgattacccgcaccattccatcctgaatcatcgcgtgcgttgacttttctgtacacgaggaacgattactgcatgagtggatgcaaaataagtcgttttgaggccatccacctgcatctgtatatacgccagatatggtcgtacctggccggccaggctcgcgtgggactggctgtgcgggcgcagtaaaccaatcaggcactttgtgttcggggtcacttggctaatgtagctaaaaactgcagattttacggcaaacttcatgaggtgtcagtgcttaactgcttaagttagagtgctacctttagagtgcaatggagtgtcatct

SEQ ID NO: 15012 - DNA, 609 bp, Zea Mays
ctgccacatgggcccatctgcatagatgattcaacaacctcgcggaggacttgctgccgcaacggatttcaccgagccgggcggacgccaacgttgaactcgacgcattcggttggggaaaatcttgatgctcctatggagccggacgtccagggaagtccgacctgggcatgttataaaccacgcgcctggttcccctctccttttctataggcccaacactagccgtcgttgccgtgcgaatcgagaagtagcagagaagattgccgccctccgccgtggatagaactcctgctcacgtatcacgtggtatgtgcccgctcatcctgtgcgccataatctcctctgcgcgtagctcgcttcccgtgggccttggggctccggggcgccgacttcgagatctccggcaaggtcaccgccgcctatggggtctgcgccgccacggaatgaccgtagggatgaagaagagcctgtagccgtcgatctgcgattgggcgcgcatgattagatctggggggaactgaatcctaactgttggatccagctggaacggccgggattagatcccaggtactggttcggccagaagtaatccaagccgttggattg

SEQ ID NO: 15013 - DNA, 272 bp, Zea Mays
tagttgactctaccatggcgatgttcgttcaactagcctgacagagcgatttgaggagctcctttctctaatttttatatgacaatatgcttatccgactacatcaaagttattgtccatcatgccagcttcaattttgttataaggttcgtgctcatacctccactcgatcaagcacaattcagctctaaagttgatctaatgccacagtcagtctaaccttcaggccaacatccgattgacagcccaacttccaggccattttactccaa

SEQ ID NO: 15014 - DNA, 683 bp, Zea Mays
cttgaatgtctttgatatgatttggcaagaaattattcatgccttgtgctttcctctcaagggatgtctgcatgccccttcatcatgaaactgattgaggtggtcacccaattcagatatgaaaagggcaccagacatctttcctatacccctgtctggattgaccccaataattcagtaggccggttgaggaaggctcctgcaagctctcgtgagcaaactacagctggtccctctcgtccttctcctggtcatggctctcccacaccacgtggttgtggtcatggtcgaggtcatggtcgcggcatgggagcaaggttggctcatggtatagcagcctttttctccatgtgcaggaatatttctactgatgttcacgagctagccaggcggcagcgggagacaaatgacaatctccatcgccagtctatctccatgggaatcccttttgctccccgctcgcctgacgtgcctctccatgcacctcctccagaaataaatgaatggcatcaacaaacttatggagttcaattcatgtcggctaaagatgaagatgttgaagaagaagagttctttgatgacagggatcagtttgtcccgcctccccaccagggcgatctgggtccctcttcatcttatcctccccccaggatccttcaggcagcactcctccccctgctaac

SEQ ID NO: 15015 - DNA, 396 bp, Zea Mays
gtcggccatctaagaaaatgagaaagaaaaacaaaaacaaaacaaacaaagaacgcaagcatcctacccaacacggaccggcacttggcccagcagccccagctgtttccacgatgcgttcccctcccacctcaactcacttacgtgtgggccctcccagccctgcttgtcttccagccccttgcccgcatgcacgaatcggatgacgacgacgacgccatgagaaagctgaagcgccgaccgccacttcgtgtctgctgctctgctcttcgactcccggctcctgcgccgtagagaagtcgaccgtccgtcaccctccccactcgcgcgtatttctctctcgtctttcccattgttgctcgccatcaatggcaggtgtcggccatcgcctgctcg

SEQ ID NO: 15016 - DNA, 279 bp, Zea Mays
tttagttactagcacccgtcgataatggtggcttattcctccctagtccggcagtatctaggagcgcacaagctgcatgggcaccatcatcgtcatgtaactccgctaccatcgtgcgtggtccacatgtggtagatggaaacaaagagagaactaccgaaagagggttgccagttcaccgacaagtggtcgctgaactagagtcacaagttatcggtgtcaaagcatccgcgaagcttctccgcacttatggagaaagtaattaacacaacataatta

SEQ ID NO: 15017 - DNA, 414 bp, Zea Mays
gcaagagtgggacgaataaatacgggctggttgaatggatatgaaggtgggcaaggcaaagaacaatttggattgaaaggtcggattaccaaccttgttctcttttcaggtccctgatttgatctttcacccgcatatccctttgattttctgtgtcccgcatttttagcttcaacagccagcactgtactgacagccctgctgtatgtgaggtccatacatgttgccattttacgttggagcctgtcatttagtcccctcataaagcaattcttctttttcaagtcggtatccacctggtcaatggcgtactgggataggtggttcaatttattcagatactgcatcatcgtatctccccttgcttcagccggatgaactctttcagtttcatttgtagcactccctccgaaa

SEQ ID NO: 15018 - DNA, 603 bp, Zea Mays
tcctgcgtcggcgttgcccaagcgacagaaattgcgtgttgtattcgtatgacttagatttattgtgagcaccgtgatgatgtaaaaatagtctattattgttataacagatcaatcttataagctcctttaatgtaatattgtgagcatcgtgatgatgtcaattgcattatttgatgaatcattttcggctatgcttttgaatgaattcgataagtctcgctgtaatataaccatccgatgcatgcctctgaattttagtaatttcagatctgttggtttctagcaggagacagaacgagcaatgaagtgaaaaatcaaaatatgggaatttaggaaaagaagatggagaggctaccgacgaagttgcaacaagaaggagccaacgaatcttgatcatccaagactacaggaagaactagagaaaaccctaataagttccttagctacaattggttaggtctggatcagcgaatgtaattttgatgtatacacctttactgtgattctcggtaatttataagtgttcaaattttgtctgtcaccataaatatctgaaagaggatatttatttctaccaatgatattaattagtcaaaatac

SEQ ID NO: 15019 - DNA, 612 bp, Zea Mays
cgggtgcaaaaacaggaaagtgtaggggcttctgcgcaagaaataatagactcaggctacagtcatagtggactgcgggttgatctttataaagtccaggggctcttatgcataaaggctcggtgaaggggtacgctaggatccaagccgtccgatcaaacgctaacgaatcagattagaatcccaaccccacaagtcgttacacgcccgcagccaatgaatcacgatccctgatccatcccgaggcgggacaccaggctctgatctcagccgtagcttcacagatccacgctccggatctaatgcggcgaagggttatcttagcgttgaatcccagccaaccgtcacgcatctaacgaccgagggcttgtcttcttcacccaaacaccagggcggcaaagtaaagaaggtgcggcggcgcatttaagggcgcggtggcaccgtgggcatggttttcgatccggtgggccgaggccctaatccaaacaccgagacctaaaaaatgaagatggggaggagtcgattgcgatagcgctgtcttacctgtgaataatcaatgccctggtagacggtggttcgggcggcggtcaggacatcccgacaagaaattcc

SEQ ID NO: 15020 - DNA, 800 bp, Zea Mays
cactactggcatagaagcttgaagcatggccactagatgccagactcatcacattccaacatgcagaaccaatgttgcgcgataccggtgaggtggaacgaggtgagccagactttatccgacttgagtgtgcgctggccacggaagaagtgcttgcatcggttgagccaaccaagggggtcctacttgccatcaaaggtcaggaaggaaagcttatggaagtgagagtggatagctatgggtgcggtggggtggagttcggcaattggcatgatgggtgtggtgcagtgtgattccgcaatggttgggatcgaggaaggtgtggaagggaatgaggtggattggtggggtgtagtaggggtggtgcggctcaagtaggaggggcgaggctggtggtaggagatggcatcgagggtggcggcaggatggtagtagatgggatcagaggtggaggcgtggtggcggtcaagggaagtgtgggcgcggcttgcgttatggtggaggtcgtcataccccaacacccatagggaaagccagctatgtagacagcggaagaggcgacgaactatcgggcttccagggcagcgagccacgcagactattggacgcttatggcactcatccgcgttgaaagcgacacgagttgcttcacgatcatgcactagaagtccatgtcggtgtgttgggggtcgggcatggtgggggaggtggtggagtcgatggtggtcgccgtgacgggagacggtggcagaggagaccactgggttgttgtcgtcgtgtcctggcatcgctgataccag

SEQ ID NO: 15021 - DNA, 594 bp, Zea Mays
ttgcattttaatttagacatcacctgagcactactacttttcatccgcgaccataaacatacgcatttagactacaacatcccaaacggatgcgagaacactagtttctagtttaaccccatgattattcccttaatcattttaactacttaatcggcatcgaccgacttaaccttcatctcgacggtccgagcaccataattctcgaacgtctacctagacatctagcatcacatacagagcctactacttcacattgcaattcatacagaaccacaaggtgacaataataacacacagacaatcgacctttctctacgaccttcagttaggtcaccaaccgacgacatgatgactacgaaggcatgtcaccatttcatcacacccattcatcgcctatatgtgcactaattcttttcttgcgacaaatgcactcaaaatcaatccacactacacaaaatacacttatctcttatttatgcgcagacttaacacctttcgggataaagagtcactagagaatctactaattatcttgcaaccacttgaagtactggaaacacctacatataacaattacttaacgcaattgaa

SEQ ID NO: 15022 - DNA, 362 bp, Zea Mays
attgaggtggatagcagcaaggttgaagccattcaggactgggctacaccaacgacggtcacccaaatttggagttttcttggacttgtacgattttaccgtcgttttgtgcgtgattttagctccatcgctgcccctttgcacgaactcacaaagaaaggtgtgtcttttgcttgggaccccccacatgaagaggcgttcaacaatttgaaagataagttaacccatgctccactcttacaattgcccgactttcagaaagtgtttgaacatgaatgtgatgctagtggtattgggttaggtgctgttttgttacaagaaggaaaactggttgcttatttcagtaaaatattaaacggtgc

SEQ ID NO: 15023 - DNA, 698 bp, Zea Mays
gaaatatcctagctggataaccgtgatctcaatcccaaaaatcttgtccagttcgatcgggacctataaattgaggatgccctctgctccgcttcatagttacgcatccaacccatccccagctagcccctatcatgcaccactgcgtcacaattttgcatttcccccaattcacttctctgtgcccctgtgtgtcatcacgtcgtggatcgccaattctaggtcagttcttgttctctttgttcatgtttcaacacctctattcactggtgatgctcgtcggttcaacccattaagctagacaatgctcaattgtctggaatacctcgatttgtccatgaagttcgccgtcatcgcgggtgggagaacctagggctggattggtgcaattaaggcagggcttagattggtatggggtcgggggcgctagtccgacacttagtttggtcagtcgacgccgttcatggccggtcttagcaaagagatggtcgacggcgagcgcgtcattgccaaggttcggtttggagaagaaacagaagtcggagggtctctgtgcaaatgtcagagagacagtgaatagtggctaggggttcttcaccggttatttgaatgaccgagggccttttcgcaaagttgacagcacggtcgcgggcacgtccgaattctgtgtagacttgggccgattgggctggtttcgg

SEQ ID NO: 15024 - DNA, 514 bp, Zea Mays
ggtattagttaggctcttgttcagttagggtgtagttcttacatttttcaccaaagcatcgtaattttggctataattgtaactgatagagcacatagcaatgcttgaatagaaaagcacatctgacccagttagtgttccaggccaatgaactccatacagattagatcagtcttatttcttgccaatggttcaactcattccattaatgtcattctgttcttgttagcaacaaacatatgtaaacttttcgatttatctttttcctagaccctactcatgtgggagcctctagcactgtctgccctggattatatgtgataatatttcatttggcattttctcatgcactagcaagtgtatcatcatatctgcacatttcatgcaaaacgtcttgtaatagtacatgctctatcttttacccacttctctttacactgaattatcaggcacatacaataatgttttgccaaagatcaattcctttctctatgatatacacatgtttgctggg

SEQ ID NO: 15025 - DNA, 440 bp, Zea Mays
gttgcacaagattggtggagaggtagaccgcgctgacgctgtcgtagtaaacgagggtggagcgattgagggggctgtggagctcctgcagaagctggcggacctaggaggtctcggccacgccgttggccacaacgcgatactcggccttagtgttggagcgggagatgatgagctaccacttcgaggcccaggagacgaggttggagcctaggaacatgacgtagccagatgtggaccgacacgtgtcggggcagccaacccagtcagtgtcggtgtagaccacgagcttcgaagtcggtgagggttgaaggaaaggcagtagtcgatggatccatggagctagcgaagaatccgcttgatagcagtgaggtggggctctcgtggggtgtgcatgtgaaggcactcctgttgaacgacataggtgatgtcgggtcggg

SEQ ID NO: 15026 - DNA, 432 bp, Zea Mays
ctcgtataagggatgatgagcacagtgctccgtacgacacgagcgcactgtttgataatagactggacagatgcgccgtctgtaggatggccctagcgccgcctgccagcggagtggacaggacacattaaatgctgagggggcacatcacctgtcagcaaggtgggcaagcgacacgtcctctccacaataattgaagagaccgtgcggctttagaggccttacgtcaggctccgcccgctggctcatatcacggaccacaagccacgcagcagcagcgggtctccgcccgagtggggagcgcaagcgcataggataaggcctggacacgttacttgcggaatcgacgaggaagcatccatggtaaggtgtcaggatggctgcgtcgaacaaagcaatgccaggtaactaattacagagcacatatatatc

SEQ ID NO: 15027 - DNA, 410 bp, Zea Mays
gcatggaggaaattacatgctcgtggaaccactgcacgaaggacgggccaccgtgtaaccctttcaagcgtaggtcatccaactacttttgagtaagttgtttgttgggtttatatatgctatcaaagatttggaaataaggatgaagttccggcatattggcatataagaaaagcaaggtcttgttacgctctatcgttcctagaagatgtgatgtgtaagctccgacacctttgctgtcccacttaaaagcacttagatcagtgattggagcttgctcggcaacatggtaccgtgtcgtttgcgcattcacgttgtttgtgtatgaaaactacttgcttgagaataatgtgatctctctggctgtgaacgcctctgcaatacaccccacaacccttgccttattctgc

SEQ ID NO: 15028 - DNA, 810 bp, Zea Mays
caaaatactccggacccgactatgccaacttcgcagccgactacggagttgacaggcacccagttcgaggaaatacatgaaatgcaacaacaaatgcgtcgtgcatttgagggctgccctgatgatttggacgttactgcgcccatggagacgaactcatactcaaactctaaaaagcaggtattatatacaatctcaccattgttacattatatgttaatttcccactttgcatccaaatcttagacaaaaccataatcatgtcaacaggattaccattttaatgttggcaacaaactgttgagggacataaacatcccacctcaacatataccagactgcaacattatgagctcatatacgtcttcacacttaccgatgtttgatgccacaccgcaaaaacatgtatgtgtttcatatttgttttatccttttgtaatctcaattttccattaaatgtaattcacacctgactaaggttttaaacatactatcattgatttttagggcagggaggtgacattgatgcatctcatgacactcaaacttacacgggcaccctttttgatcagacacctaatggtcatgtaagtactctaattatacatttatgaccacataacttcacgtaactcgatcataaactagtatactctctacatgcattgtttttcaggttgcatctggagaggaaacacacaccttgcacactacacatgtgtactcactgccacagttcacagagatggactatgctcggttgctccatgattttttgtgctccccaaccattgacccaaacaagtttta

SEQ ID NO: 15029 - DNA, 1717 bp, Zea Mays
ttcctaccagctttggtgcgggtgggagccaccatcggtggaggggtggccgtggtggcagtagcgagaaggatgacgctccctagccgtcactctacaacttgtggattggccacatctctatgtggactagccatgggtggtttgtcgctatgcccactgcagctgcaacagctggtcctccttgctttacccacgttcggtagctctgggtgtcctcttggatcatctcctatggcttttccggcactgtaccagcctccacttatgttggaaaccctaaccctaaacaagctagactgttgtatatatataatggagataaatatgggctgggccaaagcccattacaacaacaaacacaattaatctaacacccccctcgcaatcgaaactgtagctgtggtaaatgttgagactggagcaaaactttgagaacaatgaggaggtaagacccttggtgaagatgacgacaacctacgagcttgccgggacgtgataaacatgggcgtctttgacagcaacacacggatgaagtggaggtcaatctcaacatgcttcgtgcgttgatgttggataggtttgacggggaggtagatagcgctggcgttgtcacattataccgggtgcttgtgggaggctgttgtgaagctcctagagaagctgtcgcaaccaactcgccttaaccaccccattagcgacaactcgatactcagcctcagcactggagcaggagaccatcggctaacacttggaggaccaagagattggcccaagaaacatcgcatagtcagaggttgaccgatggatgtctgggcacctgaccgagtcagtgtcggtgtaaacgatcactcgatcaattcatgggtggagtagcgtcgtaggttgaggctgtagtcgataatgcctcaaagacaccgaaggattcgcttgaccgcactcaagtgcggttcacagggatcatgcatataaaggcaaacatgcggaacaacatatgtgatgttaggtctagtgaaggtgagatacttaatagcatcggcgaggctctggtaagtggtagggtcacatacaagattgccatcaccatagagcttgaattgtatgtcgatcggggtcgtacagagcttgcagtccagcatgctagctcactcgaggatgtccatggtgtacaaaccgttgctggatgaaggggtcctcagagtgatgctcaacgacaatccccagaaagtgtgaagggacccaaatcctttatggcgactcatgctgaagagtggtgatgatccggtgcagtagagccaaggaagaggcagtgaacacgatgtcatcaacatagaggagcagccgagcacgtacacagtgtcactaccacgccggtagatgaacataaatgtgtctgacttggcctcaacaaaaccaagagagagtaggtatgcaacgaagcgggtgtaccaggcgcgaggagcttgcttctgaccatagctggacttgtcgagcttgcataccatatcggggtgagcaggatcaacaaagccagcaggttgactgcagtaaactgtctcagtgtgagtcccatgaataaaggcattcttgatatccagttgatgaactggcccaaagcgagagagtgccaaagtgaggacaatacgaacgatagtagacttcacgacgggactggacatctcatcgcagtcatcaacaagacactgcgtgaagccct

SEQ ID NO: 15030 - DNA, 678 bp, Zea Mays
ttggctggtatttgtgtacaaataaaagcatactgtatcctgtatatagtcacctcttctttgcactgaaaattataaatgggaatggaagtgttttatctattataattggtggacatcattttcattcatatcagttagtcttagccaataccttaaagtttttttcttgttttatgggtcccgtagggtcttcttctgaaatagagctgagaagagtcaactatttcagcagcaaggaattgccacaagtattggaaaggtaacctccacaacaaagccatagttcgtgagatacgacaaattccacagagagtaaagaagataatagagctcttacctcatcaagaggtacaatttcatcatctgaacctgctcatcttctgatttcatttgttgtaagtctattgatattcaactgttataatgaaacttagcttgcacgtaaatttcttgcactttccatttccatattcaggataatgaggaagaagcttcgctttttgtcatactgtatttgcttctggccagtgttatttttctaccattatttcagaaaatcgctggaggtgagatacatattctaatattgcttgtgcatggcatgattcagcaacatctgtagctttttgaattattttggtcactcgagaaagtttgcatcaacttttactgttt

SEQ ID NO: 15031 - DNA, 511 bp, Zea Mays
gtcgggtgaggcagacgcggagctcccaactgagacggcataggagtagtcagtgtaggagttggcgcagccagatactaaggaaaaccctgcatcgccacgaactgagaagtcccaggcacatagaactgctgcggagggagtggaactacaaactgctgctcagcgcttgacatcatgttgacagtgccctgagaagaggaggaagtcattggcttccatatgagcttctcattgggattcctcctacacaccacatccttgtgatcctaactgcagatagaacacctgccactccactgacacttagcacggcgatgcgcatcaccacaacagaaacacactagccccagcccgggcttaggaacagcccaatacctctgagtacttcctcccgaagcacccgattcagaggatttgccatggaagaggtggtggcgctggtgctgagacttgcccctcttgtgggatggacctccagagttgcccctcctcgcgtcctggccacgag

SEQ ID NO: 15032 - DNA, 532 bp, Zea Mays
tgagcctcctgagcatcgacgtgatttactcgtgcccttccttgatactgggtcttgttctgttggctgatggaggagggcaccttgggagcggatgctgaggtattcttggggccattcaccgagttggagtaggcaggtcctgatggcttcagctagggacaattgttcttgaagtgactgggatctccgcagtgccaacatgcattcgacgggggttgcttgcttgcaactgagggggcatgaaaggagctttgactctactgactgaatcgtgacggggtgggtccagctggtctactgaagcttggtcccttgggtggaaatccaaaggatcgagttttctggtgtcggtcttgctgctgagctcagaggacttggaatttcctcttgagatgacctttttcttcttctttcgccctttctacttgcatggctttgttggagaggtacgagaaactgaggaagtcttggctggctaggatggtcttgagttggtttgagcccttttaggaagcgggccatcttcttg

SEQ ID NO: 15033 - DNA, 293 bp, Zea Mays
gtgttgtttgtagagactgccactgacttcgtccgcgttgtgcaactatgtgttggaccatcgtgatccagatcatattcttcctgctgccttatctcactctcgtgccgatgatcgtgtgaagcattgatgttgctccacatgtctcgccgactgttgatgacgtggtgcatgttcgaacccggatgagtggggggaagaagatggttcaccgcctgggtaaggacctatcgatagccttccgcgtacggggtacatggcagaccgttggcgatttgagctggaactccgtc

SEQ ID NO: 15034 - DNA, 338 bp, Zea Mays
cttttggaagactggaaggagctgcatctgactggtgggatgcttacgctgcggcacatgcaaatgcagacaccattactggcaggatttttagtagaccttccgtgctcatcacattccctcaggaataatgaagctgaagaaaaaagaatttttgtcgcttacccagggaaacaagtctgttagcaagtatcatgaccgctttacttagctttcacgttatgcaccagaggaagtagacactgacgaaaagcgccaatagtgtttcttagaagggttgattggacctctgaattatcagctgcagagccacaacttcccaaactttcagaccctgc

SEQ ID NO: 15035 - DNA, 453 bp, Zea Mays
gagatcttgaagcccgagtgagtcgacttcaagcagcgctgcaacacaggaccgatgcttggatcgcagacggagatagaatcaatgaactaagaagggacatccgtcacctgcaggatcagcttgctgatcgagacttagcacttgactgggcagtacagtctcgtttgctagcatgcgctaaggaagcaaaggctcaggcccgaattaaagaacttagcttaactgtcgacaacctgcaggtctactgcaatatgttgcacgaggaagtccatgtactatactcacaattacaccctagcgtgcctgcacaccctgctaaggcagaagccggaccctctcacgttgcgggacgcgcgctgggtggggagttagacctttttgaaccccctccttctttgaggttggttgacgtctggactcccacacctaatgatgaggccgccaaaagta

SEQ ID NO: 15036 - DNA, 1143 bp, Zea Mays
aaaggagaacaactttgcttaagagtgtaagtatagttattgagaagaaagtggagaaaatttcacccaaagatgggctgtcaggctgttgaagtctgaatttcagactgacagtgtagttacagagactttgggcatgaattcaagcttgattcaataggaatttggctactgctgctatggcaaaattatagctggttagtagctctacaactttggtgcagagggatgataaagttgtcaagcgaaatctagagaaaatttgccctgaagttgctctgtcaggttaactgaagtggaatgccatggtacagtaactgaagaagaatctcaggttcatcccctcgtcgtcgacgaccctcgcgccacaattcccgccggtgaggtgattcgtgctcaccagtgcttggataacgcttggggtcacataaatatcaccgtcgttgataaatccggccagtaaacaactccggccaccgtacaggttgccacggttgctttggataagctcgccgatgactgctgccttgtgccacgtgccctggcacctccgtcgtgtcgctgtgacccgctgtaaccttctgtccatcaccggggagatggccacggtaaccgggacaccaatccactgcgcccagtagctacttgtttccccggccgccgcgcgtcatcgcttgaattcccggccaccgctcactaggcctataaattgagcaccccctcggctctgccatgtattcaagcagctaacgcacccacccgcacctcaatcctccaccagagagctctaattttggattctccccaaatcacgtccgaactccgctcggtttagcctcaccgcggccagctcgattcaggtcagctcataccctctgctccctcatttgagtgttctcatgtacccgtgatgctcatagacccgcccaattggactagaagcccactgaccgtggggaacgcgttcatctgtccgcaatgtccacggtcactgcggccagagcaaaccaaatagccattgatgaaattaagttagggaaaatgcggtttatgccgctcgggagcaccagttcttacgtgatccggctagtccaagctcgctggcgctcgggtctccgctgtgcgtcgtcgaggacctggcgc

SEQ ID NO: 15037 - DNA, 583 bp, Zea Mays
caatacaaccatccaattacactaattatattctcattcatgatatcatgagtctagatttagatcataaccctagctgccaccagcttccgcaactatgcgcccctagggagagattgaactctgtcgggggcaacaccacggtttcagcacccaatcccactatcatactaccattgtcatcgtcaagcaacaccagatcgtgatggatatcgcgtaggtggtgttgtccgttagttggacatcctccgtgtcgaccttctcgtcgtcaggtcgtgatggtgtcgcacctcacccactggcactgtcgcacgcttggccattccatgacccctccatgtctagcctcgcctcatccaccgacgttgtcttgtgacgggctgccctgaggaacccacccacgcgtgtttgctggagggccgagtagtgacctaatgtggctaggagtggttaggctctcatgcccatgtggctcacagcagctaacgacaagatcgaggctagaggtcgattgacagaccaggcccacccgctggccactgaagtggtcgcccacagttagcctactagatctgttggtcgc

SEQ ID NO: 15038 - DNA, 808 bp, Zea Mays
gttctgatgaatcaagcatgaaaagtgttctgatgaatcaagccactaactatgaatctaaataactgtttggtaacatttacagagatgacacaaagtagaaagaatggaattgggattggccatgggagggaaaaaaccttggggcagtgtctgctgcgtcttcaaaacccgggagttcttgcttttgctcctcttgacacactgagtgaccatgacgccaatgccaccaccatcagtagcttcttcccctccctgtggatggacatcaattgaaaatagtggctcgccggattgctcctgccccgccttcggtcgcctctgcttcttcctcactgtcgccccctcagccatcatcttggcttccatccgcaagttttggcccgcatcaggagtcggcggcgatggaaccaccagtgcggcgtccccgtgcttccttttcttacgctgcttttcctcctaccacacgggctcctccattaatggagatgccggtggcgccacctgattcttcctctcgcgctccttaaccagcctcactgccaccgctgccatcaccgccgaggctagggtttcgggagcgactggtaccggcgactcggacttagattccgggtttcccagaggtcgggggtgggcagccgagaggataaggtaggaggggaattttggtcatcttgggcgggagatgggaaagtgaatgcagccaacagaaaggggtacggttcgttttttggaaaaaacataaagtgacgccgccaaatcatcacataaagccacatctaagcgtcataaaagtaaaaccgtc

SEQ ID NO: 15039 - DNA, 530 bp, Zea Mays
gatgccgcaagggagcaaaggttgggaggtgctcgtgaggctgccattgaatcgagcttagaagccccgtcgcgtcctgaggatagtatttgggctcggtggaggaccatggcgccgacaatgtctcgtcgggggtagcggctatctccggtccgcaagaactcggtgacggaattccctgcttcactgctgaaggtaacatgccttccctgaagtttgcggtcgcctgcgctctgtgtatcatcatttgggaggggagttagggcaatggatccctgggtcacttcgcgccggctatggcgccgctggggtggacgttgtgtgccactgctgctctggtcgggggaagaagaagagggcgaggccgtcgatctagaatttaacggcactggttagggctgggagttcgaagggcgctacaccgttgatcgactgctctgcggttaagattagatcttcaggaaacgattcggtcggtcgatttatcaaaagagcccctctgttatttggtattcaacccgccgtccctc

SEQ ID NO: 15040 - DNA, 397 bp, Zea Mays
tggtcgttcatgagctaaagctaaacctattcttctggcccaaatattttatgatctttgaaggtaaatcctaaaggaaaccatgaataatgatgaatgtaatgcaatcagaaattataagttaccttaaacagtaaaaataggcaaatatggcctatgcaatcaaagaataatatactagctttacctcacatacttcacatgaaggaaccaatgctcgaaagaatcaaaattatttactcgacatagcatagttcggggaaaacgatctaaatcaagaattcatgtgttagttgacgcctacaatcgagggggaggggtatcttactgcaacatgaagcctggaacagcgaggaccagaacgctggaatcagtgaggaggctgcttccacttatc

SEQ ID NO: 15041 - DNA, 733 bp, Zea Mays
agagaattcgtcgccggtgatgggcttcgccatggtcccgccgttctgcgtggtcagggccacttctgtctcaattcgtggtatggactctaccctggtattctctaggtctcgtacaacgtttttcacttttcgcttgtgtaaacggacgcctagtggctgggattgaccagagccggccatggctccgccgttcccttgccctgcgtcgccgcgtggggagaagacgttctggccatggctgatttgtgggattagtggcaccagcgaattagccctcgcaccctcttcacgtagtacccagccaggcttgagttagtgcgcctgggcctcggaccgccgcacgccggtaagctcgccgccatggatgcgtgctttgccgccgcgtccgacctcgggaaaaaaaggaagcaccaacgccgtagatttttcatagtgtgaccaagattagacccatggaaaggagtgtgcctctgccgttggttttctgatgaacggtggtgattaggtctagctataccttttcgggtttcaatccgtgtcgtccgcatctgatcgaacggatgtgttgggattgggtattcatagaattcagaccctaggatttagatctgacggctgcagtcgcgtaccggttcgggaaaggctagatctaatctcgcgcgtccacacctaatcggacggttcggattagacgataccccttcggcttgcacatttcgctaaagagacc

SEQ ID NO: 15042 - DNA, 308 bp, Zea Mays
cgccgctcggctgggtggagaagataggctttagccgttgattcatgaacgcgcggtccagattagcctgggaagaactcttcgcgtgctttagatcgggaccgtgcattgtcgatccatcgaattccaggatgatctgcttaccgtcgtcgatctggggatcgacggtctgggtgtaaacgcggcgaccgtcgtatcgagttaatcggagccctagatattaaatcggacggccagtaactggccataccccttcgccctggtcatattgctaaagagtccctctgctttcaggaaatcaacccgcc

SEQ ID NO: 15043 - DNA, 682 bp, Zea Mays
gtgtacgacaaagtccccaccgagcaagtctgcgagctagggctaatgaccaagtccccgccgagcaagcctgcgaggcgaaccaccaagtaaccaccgagcaagcctgcgagacgaggcatacgaccaagatcacgccaagcggacccgcaagcccgcgagatgaggcatacgaccaagatcacgccaagtggacccgcaaggaaggaacctagggcgacgctgttgggccacgacagccgtgacatgacacatcatcctcaaactatgtctgagacctgtgtacagtaccaagggagaccacgacaacagagtttccacagtaacgacctacacactagaaaggacaggacaacacacctaatgcatactcacacatgctacagggtgatgcaagggcattgatagaagatgaagctgtactgaacacgaacctcaaccttactatgagcacgttctgtgagacccatcaggtacgacaatgtaggcgttgagcaagctatagggactcatacgccggctggacaagacagaacaccataccaagagtgcaacaacacacgacccgtcagaaggagcatgccatatgcaagcatgccccgagactgaccaatagacccgccacgcactaccgtgcaaggcattagctacagaactcgctctccctccctctctctctctc

SEQ ID NO: 15044 - DNA, 464 bp, Zea Mays
cagttttacacttctacttccatggttgtgatataaattcttttgttgggttgcaataccagagtaatagggtgtcgtcaaacctaaccctctggtatctccctaaacttctccggatcacatgttggtgatgcacgtatgcatcctcagcccatcgcaacttttaccatggtacaatgtcgaacaagtacattttctgcttcacatttactgccccaagaccttttttattcattcgttgctatattagagttaaaagtagcatgtaacgatgaaccagaccgatgaaaaccaccagaaggttgcagttcatgacaagcctgtgcatctgttgcttgacattggctcatggttttgttcagattttttaaatatagtattagatcctcgcacaccaagcgattgccccctgagtgcttatcagtatgccatttcgcccgaacaaagatgcctgcctacacatg

SEQ ID NO: 15045 - DNA, 713 bp, Zea Mays
agcttggcgacagtcacggcggcaggagttgcgctgttctgggtgcgttctttcattaggggtctcccccatttttgaagcttcatctcaagagacgggctgagtcgggtcccattcttcgggctcatggtgttgtcgcatgttttggtgcctgtttctccatcatcgtgcgtcgcgatggggaagctcttcccccagcatggtgggttcgtcgtcagagatgggcgatgactccagtctcccctgaatgaagaggacgtctaggaagaaaggagtaggtgcagcggtgtgcttcttcccgttctcctttgagggtagaggaatcggggtggtcgtccgctgccctagtgcggaacgttcacctcctttttgctgggtgatccgtgcccactccttagtgggcaaggtggacaacagagttcgtcgagttggggaggacatggttgaccagccttctaccctctaggggatcctgagccttgcctcgtggtgcttttgggtaggactgtgtcgcagattgtgactcgatggttcatgctttggcacgagaaagaaacgagcgaatttcagcaggttcgggccactttgaggagtgtaataccctacttcatggggtggctttctgtaaaaggatggggttacaggttgtgaccgctaaacttatgggatgctgatgagatgataatggaggcgggtcccccttggccttattt

SEQ ID NO: 15046 - DNA, 620 bp, Zea Mays
agttacactggtggttgaacactcacaactctgacaccctgagtagagaatccagagggactggatgaagaggtgagaatgtcggaccgaaggagtgcaactaaggtcctggctgaatggctggcacccctgaaatctgaagaggtggggcaaagctgactatactggaggcacaggaacaccggtgtgcagaagaatatgagtcataaatgtccgatgctctgccctatctgtcaagagctgctgctaaagggtgtcctggtgatcctgaatagtctaaaaaatagatagcatccgctcggacaacaactgcttgataactgcctgacgagcctgcttagctaccaagtgagcatgttgttgggtcaatgactgaataatagctgccagggcaagatcagtcgctggaggtgtagctagaggaacagcactggaaccacctgcctcgtgatcatgtgagccaggtgccacagaaggtggtgggggtggaatctcaaggtcctcatcatctgaatccgaagaggtatcagcaaccaagggttccataccctaatcctcaaactatcgtatcgcctcatcctcaacctgacgctcgaaggccaaagaatccaaaggtgtag

SEQ ID NO: 15047 - DNA, 369 bp, Zea Mays
gcactacctcgtggatgggcctcttcaccgctcgaccatcggtgagtaataccccatcatctccgccatctctttccccacgtgtagcaccgctagggggtcgcttagcgcacaaatccgctagccgtctcactccggcgatgtcctccgccgcggagtgacgcgcgccgccgcggttctctgtccacggaggggaaaagaattccggccgtcgatttcctagtcctcggcgcctgggattttgcagcaacgtcagacagcgcgacctccgccatactcccgctcttccgtggtcgggcatcacctcacctcggctggtcacaagtgagttcccatcgtgttcgtcttcctttcccccacatcatgccc

SEQ ID NO: 15048 - DNA, 638 bp, Zea Mays
gcacacaagaatgttgaaacaagataacaaggggcatgaacagacctagaggtcgctgaccacggtgaggtcaatccgggcggtgctcttgagtgagttgggggaaatgcaaaattggagctctctggtggaggatctgaggtacgggtgggtgcgctagctgcttgaatacataatgaagccgatggtgcacttaatttataggctccgggggaggtggctctcaatttgattacggcgtgttggcggccggagatagggaagaatacgggtggctgtgaccatggcgttcaccggtgcaacagcgcaaggataatactcctaaggggccacgattactaccgcacaataacaagctacggcgtggcacaactggggtcaccgaagcttccacggcgacgctggcggtccagccacgtcgcgacggctacaggcacggtgataacttcaattcgcgatcaaatccattcccccgtgagatcttttaccttcccatggatatcttctgcgtaccaagcacgaatcatagcgaccagcgcaaatccggacgcgcggatcgccggcggcgagctcactgagctggcaatctgatcgggacactgtaccatcgtgaagtgcattcagtcggtctgacaaag

SEQ ID NO: 15049 - DNA, 666 bp, Zea Mays
gaaattgtcctaagctgtgtcaagtatcgagtaacgtgctcgatagagctagctccttctgatcaattaaatttggtgaactcagggagtcgatacttagttggtagagaaatcaaatcatactcactaggatatggcttggtgtagctaattgccctttgcctctaaatcatggcaaactgatcccttagaataatgttgatctgatttgcggtagcatcccctagggccgagctctcatgactcggcctgtgatgtatttgtccaatcacacctgtttctcagcgtctactctagaaactcttgctgcaccaaactgcactaggtgtgttgtgctaacatgatctgggacatacatacatcaatactcgtgtggaatgtggttaggcaacctgttgtagaactggcattcatcagaaccatcacccgtcttataaacaacatatgccggcgaaccaggcggatgcgtctctagggcagtgactgaatatggcagtggcagcctagtctggaatagatttcccctttgtgacttcctaaagtcgggcctgttggagagtactgatgcttcatgatctcatgaacgacgtggatggccacacgctcgaacacattcatcaagctctcagagtggcgatgcaacaaatgcgccaccatatagttgac

SEQ ID NO: 15050 - DNA, 346 bp, Zea Mays
gacaaaacatgaaatatctgaaatcgaacggtcaagggtatgaagaaatgttgacaaacttcgtgaagctaaagaaaaatgctacaatgtggcgatagaatgagccaagagttttaagaatagctttgctaaagttggtgtgttttcctcataacaaaattttatttatggtggccccgatggagttatccagtggattaatggtgaagtccaagcctttgaagagatccttagtgacagagggaatttttgtgcctttgccggtgcccgcggggtcgtatcagtcctggagaaagtcgggtgcgaacatgcgaaggttgtagctcagccaggattctcgctttca

SEQ ID NO: 15051 - DNA, 851 bp, Zea Mays
aagaatcccgagacccagcgcacaacaacattggatcgcgggttagttactgaataagtaagggtctctttagtaagataacctggccgaaggggtatgagcggttgagagccacaggatcgcaccgacggtcaggattagaacttatactactgcgaaccggtacacagtgcgggccgttagatttaaattctctggtcaggattttaatatatcacgatcgagcaccacccgccgatccaacgatctacggctgagatgagctgggcccaaccggtacacaacatctaatcctaaccgtcaatgcaaagatctacggttcaacccttctcgtccccagtcagccccagggcggcggcgcccaagcttcccccaccggcgatctagccagagcaacttcaattcggcgccatgacgcgccatacccgaaatcgcgcagtgcgaaacagtgtatagattaaggcgaaacatagggagtagtccttaccggcgatagtggcacaggactctcaacccacggggataggcgatctgcggtgatgattcagctccgacgagaaattgtgttgatcgcacgagctcctgagcgctaccatacgcacgcgtatactccacggttcttggagaaggttattagccaatcgccgagcgctgattactggcagagacgagctatggcggtggcggctccaagtcctctcaagatccctctgttcatatcacagatagcaaggggagccagcatttatagtcccaggggcacgcatggtggtgtcgtggatggattaggtggttgcaacaatcatccgaggtcttggggaaggatttgttaagatcccatggatctcgcg

SEQ ID NO: 15052 - DNA, 670 bp, Zea Mays
aaactgtctcttcaggttaatcagcatcatcatctgtattctacacttgagtcccttccaatgcttgaaaacaagtactggtcagcaggaggataattaatgtacgacgtgtttgatgctggcctgcgccaggggaaggatgcacggtgatgccgtccagtgttcggtgacgtggtcggttctagggtcaagaccgacgagagcgcgcattcatcatgccatcacaatcccagggttgtgcaagctacgtgatgcagaccgggcactcaaggtgctagggacgaagagaggatggaggcagggttggagccgtgcgagctaacgtacaattctgtggtggatgtgcttgtgaaggtggggcaaatgggtgaggcaactagactcattcaagctgattgatggggtgacacaagaacagatcaaggtgtggctgggttctaacaaaagtatttaacagaaggtggtcagtgccttacatgatcgggcacttggatgtcaaatctatcggtgtgtcaaatctactttcagctggcctggaagggaagaacagatcaaagcatatgtgcagtcctgctaccatactgtattgggcaaatctccatttgaagtgctagatgttgcagcaagtcaaaatgcactcgcagcatgctcaaactccgatgaaacacca

SEQ ID NO: 15053 - DNA, 473 bp, Zea Mays
gacctcttccttcatgcatttgttaggagagagattgtagggcatcataaaaactggctagcatgagtaagaagtggaattattggagtaaggagtgaatccgtctatcgacaaaccaagacgaacactcctagggtctcttgcaaattctgtatcaaaacagttgagagccttccaggcctcgccatctgagggatgcaccatgacatccggatcttgaccctgacgttccccttccttatgccacctcatttgctttgctgtctcttgatttagaaagagacgcttaagtcgtggagtgataggcatgtactggagttgcttgatcggcactgtcggtaccctaaatcaggggtaccctctcctacagcatgaagacaccgcacccatgcgacgtctcctagccacgcggaggaccgcgcctgaccccaccggatgggcaggccaaagggcgccacgtggcaaggaaagac

SEQ ID NO: 15054 - DNA, 807 bp, Zea Mays
gcgacggtccaccgtcgactgccgtgcactcgcgcactgcgcacagacgctgcaagcctgcgatggccattgctgaccgccgttgaagtgatggaggacgagcaccacaagcaggaagtccacaaccaagtgcgtccatcacctgcaagtcgcggatcaagggttaaaataatggggaagaagccattaccatcagctatgcaaggtaatcgtgggcggggccaagttcgtcgaggttctggctctcaatcgacaactcaaattcctgttgtggtagctacatgtacatctatagaaaaggtgtgttatgtgttcactagctaatgttgtatttggactgatcattggttgagaaataatgaattggttaatgtgcagcatgtgagaaatgaagaagaggaagagattttgatcgatatgaatgatgaattatatgatgatgcagaggaggaggagggggaggaatcggagggcaatcatgtgtcaaaggctcagaaggcaaatcgaggcagaaaaagattgaagggttgtagtcagccgtctccttccaaagataaggcaaagagaggaaagcgtgctggttgctggaagtattttaaggagatccatgttcagtccaagaaggagtttggggttttggtgacaaaagccaagtgcaaattctgttataaaagctatgcataccatccaggggggcaacttcacagctaaaccgtcatttacagaagtgcacacagttccagaacaaattggctaaggcaaaatctcaacttcctcaaggtactctcacatttactgcaactgatg

SEQ ID NO: 15055 - DNA, 381 bp, Zea Mays
ggcgactgaatcaagttttagccatggtacagtgctctgttgaagatcagaccgccagcgtcaaaaatctcaccgccgacgacctcttcgtcgggattcgtgccgcgggcgtgtggagttcgctcaccatgaaaagatctagtcacggatgtgtatgaactactgtggcctcgctgttccctgcccctcgcaccggcgacgtggccgtatggccgtcatcggagttgccgtgcttcaccatggttgtgccacgctccgagcttttcaccacgtcgtcactagccgcaccagctcaccggtaactgccgtagctcctcaaccggtgatcaccggaggaagcgccacggtgaagaccacctatcccttgctccagtatccctg

SEQ ID NO: 15056 - DNA, 437 bp, Zea Mays
tggggatcgcggcgccgcgggagtcctgtgtccagaggtgggggaaggatctggggtcgtcgatgcgtttatgctcggccaagatcagatcgggataggattgtcgtgcaccgtcggatccacggttgaccgctaggatttaaagctgcgtatcgttttgctcgggcagtctgagaccgtagatgtgagatcctgcggtagaaagcgattctgggttgcattaaacgcctaccgttagatcgggatcggagggggcctggtgacgtaccgattcataaggctcggttctaatcgtggccgttcatgcatgatctggcggccagattcagaccataccccttcgccatacacatttcatagaaaagaccccctgttactttagaataaacccgccatcctcattcactattcactgagtcttggtaagcttgcgccag

SEQ ID NO: 15057 - DNA, 493 bp, Zea Mays
cctccattgttccctatagttgaccctgctctgttccatactcctgtgagtatcaaaattctagttagatgttggtaatgcatctggtgtaacacatgcaatctcttctctgtgcagggacaatctggggcggcatccaacaaccctcatggatcgcccagcccatcgtcgcaccagtccagtcgcccacctcgatgagatattatctttcttagtgttgttcatactttgtgagataacccgatctgaacttgttagatgttggtagtgctttgtgagatacttgagacttatgttcttgagtgttggatacttatgtttgtgtccgaacatgttggtaatgctgtgagaacttgattgatttatggtgtttgtgagatatgtgatgtatatgtgatatctgtgatgattatgtgatatctatgatgtatatgtgatatattttgtttgtttggatggaatagcaaaaacaaattaaaaaggtgtatactga

SEQ ID NO: 15058 - DNA, 963 bp, Zea Mays
cagactcacagctttgaaagcatacagaagggccaagggattgtgtttcaagtgtggagatagatgggggcataaccgtaaatgctctactagtgttcccttgcacctagtggaggaaatgttgtcaattcagctgaagaagaggatggcaatgaagagacagaggattaaactgacaaaacaaccgaggaagcagtgttggctatctcagctgctgcagtgagtggaggaggagagggtaacagagccatctgactatgggcttcaattcactgtcaacaggtcctaatacttgttgattccggtagctcagccagcttcatgggaagtcatctaatgggggtcatgtctgattcacagaaattgaaacagcccctgcaagtaaaagtagctgatggcggttgcatgtggagcaattatctggtgtctaattgccaatggctgtgtgtgggggtatcaacttttgtactgatttcaaggtgttacctctgagtgggtatgacttcatacttggtatggattggcaggagaagtactgtcctatgtctgttcattgggcagaaaagtggatgaaatttgaataccaagggaaaacaattcacctgcaaggaatagttcctcagttgcagacatgccaccatctgtcttcttcccaactgaaaggcttagtcaggaacgaagctatggagcaaatcttagaactaagagaagtaactgaaaatgaacagctggacatacccaggcccgtgtctcagttgattgagagataccaggatttgtttcagaaaccccaaggcctacctcccaaaaggaaagtggatcataccattcctctcatgcctggagctcaaccatttaggctgaggccatacaggtatacaccacaacaaaaagatgaaatagagaaacaagtccatgagatgttggatactggagtgatacagcacagctctagcccctttg

SEQ ID NO: 15059 - DNA, 593 bp, Zea Mays
ttcggttgtaagtcgctatctttcgacaatttctatgcccttggtcttggtatgctcgtaccattggaatctggcctactcttatttttatatgtgcttacctttatatcccaatatatgtttaagacatttcagttaacgtgcccttgaccacccttgtttcttaatgatccatgagcggtcattctactttgcatatccttggtgatcccgtagtctccttgtaactccactcggtaatgaatctttacttcaacccttctgttggaaccttacctatctgacccttgattgttctctccactttgtcgtttcgccagtcttgccttaactatatacttttgttatgcttttaattattatcatatgcacccttgacacctctatatcctacattgatgtttgtctcatacctgccctttaaaatcgcccctcttccgtctcatacaaaaaataatcttggtcgtatcctcttctttggctcgcgagtttgtaacctcatcctttgttatgttttgtttcttattgcctttatccttctcttctctcaatcttaccttggcgattatgctatgttcgctatctgaaacctc

SEQ ID NO: 15060 - DNA, 448 bp, Zea Mays
ctggttttggatgagcatctctctcaccaactctttgccaagaaaaagggagggggagggggagatgtcgaaggaagcagggtgctgtcaagtgcatggtgacaggagagtatatagtacacagacgtatatactagctcgtagacgtcaggcggtttacctttgcgtgtgcaggcaggtgcaaggttcagtttaactagtccggcaatgaaccagtgtgatgtttgtaatgatgagatcatcaagatgaaaagccatgcaggcatcgttcggttgtccacttactgttggtgttaggtatagggaagttttttcatgcacgacgacagcaacaactcgacgacgagcaatcgtccctgccgtgccggcgacgtgggagggacgagtttatccggagccgataccaatcagcagtgcagatgtcagacgtgtgtgtggtccggccgag

SEQ ID NO: 15061 - DNA, 616 bp, Zea Mays
cgcgtggccctcgccgcgataccctaggatccgtaagcctctgcagctgcgcctgctcttataatggaggtttagcttccttcggtcgctcccgatgcgctccataatgccaaggaaaagccaccactatctgtcttgccgtgggggcaaagtcgtgcgccgttgtcgcatcctcgccactctacgcctaataatcacgggtggagctcaatcgcagccggggaatcctatgcagtggtgtctcggtgcatcgtgtgcggtgaatcgtcataattttgtgccggctcccagccggagttggagatccgctgctcaccgtggccagggctttctgcggcgcactgtggggtacgtatacgttcatcgcattcaccttgcttagggcatcgtgtagggcttctcggatcagagctttgtgcacgaggttgagctttggggtgtcttggccatggcgccgccgcgctaggtgaccgcgccgctggtgggttggtcgggcgtgggcagtgaagggagttcctccgtccgatcttgcatgggcggtctagattagatggggatcgttgagtgatttggaccattgatctggccatggtcggctaagattaaaccaaccgta

SEQ ID NO: 15062 - DNA, 292 bp, Zea Mays
gcgaggagtgctgctcgcggcgcggtagcggttgttctgtctccgtctcctccagcaagaaggactacgatggaggtctaggtgccctctctagctaggggagcaagtgtggtcgtgatcccctggttgggagaaacggtagtcggtgttggtgtgatgtctaggcgggaggagcaccaaatcttaattaaatccaagggacatgaactcaagactcctgaaccagatcatcgtgccaagctacaaagggtgttcaggattgaccatctagatccttaatgggaatgtgatg

SEQ ID NO: 15063 - DNA, 1093 bp, Zea Mays
ctttcgcagagcaaagtccacgacgaggaatcagccctcgccgcactccggcgagcctattccggccagatgacgccacgactggagctctcaagcgacaggaacacaattagatccaccccgaccatttcccctccatcaatttcactaatggtgcactataatgtcctggccacggtggcagagcggatggacaagagggtggacatgttccgatcagacaatggcagagatggccaaattgaggctaggtaaaggcttacgggttcactagggtccatggacatgcttcggtttgggcagaacaagacccgaagaacgggtcgacggtggggggtgtcacagcggtgtttgacagcgcacaggtgtgttccggtgatgggcttcaatcaaattctaattgctcagtacagagatcaataggagactatacacgagctagaacagagagtaattgagaaattacccacccgaagagtgctatccacggtggagtcccttgcggcggagcaagaatagaggaaagagctcgtggcttctccggtgtcaagtgtttagtcgcaaaggcgcgggatgtggagaagaagctaagcctgagcgcaatttatatgccaacggctggcgttggatgaggaccacggtctttagacggtgcaggtgagctcgccgcgcggcagaacccggtgatggcacgacgaccgccgtttaaccggagtccgccaccacagagagttactgccacgtgaccaaggatatttaccgtggcctccagtccatcccgaccgccggggcgtccttatcgccggcgaggtccaagtccttatccaccgcgcgatattttctgaagacggtgaacagtgcactggattcagtaaaaagcttgactgactgaccaagttggagcatgattttctcccaaattcctgtggtaacacgagttaatctttgcagcaaacttgtagagcattatacccactacaaacttgctatggcaaccacaggtagattttcactggatcatgctcagaatttagcttgaagtcgatgttagttcactgctagtctgaaaattcagaccataacagcctgacag

SEQ ID NO: 15064 - DNA, 355 bp, Zea Mays
tcataagttgcgcaagcaagactgtccttctcactgaccgccaaggaaaagcaatttcttgtcaggcctaaccgcccgccaacgatccaatgatgtttaatctagcagcagaaaatatatccgtaatagaagaattcagggatgtatttccagaagagctgcctggaatgccgcctgaaagaggagtggagttctgtatagatctcattcctggcactgcacccatcgcaaagagaccataccgcatggcccccacagagttagcagagaattaaaactccagatcacagagctgcagcaaaaagggtacatccgtcccatctcgtctccctggggagcacccgtccttttcgtc

SEQ ID NO: 15065 - DNA, 496 bp, Zea Mays
gctccgatgaggtgtacagggaggtcggggaggttacggcggtcacgtcgaggtatgggtcggcgttgaaggtggttggagtcggctagtccacgtgcgcaggcgggggagttcgtcggtggtgagtattctggcctgctcacggcgagacagtttaattggttggcttgggaggcctgaccgagtgacacagaggcgatacacgcgaggaattggaaaatggcgcagagatttactcggtccacgtttgccggtgagcggaagaagtctggcaaggtgattcaggtcctccggtgaggctctgctgggtctaagggcttggggattttcacgggtctctggcgaagctagccgagccgaaaccatggactggggatggctagggtgggctggctacggtggccgaaggtcgggtggcttggcgggtggtggcgctcgctctgtgcggcgatctccggtgacctccggcttggacaagagtgaaggtctgcgaggg

SEQ ID NO: 15066 - DNA, 456 bp, Zea Mays
cggagattcagcccagtgctagtgacccacatcagctacaacagaatgcatcatcaccaagccatgtccggacatacatgcagcataccgaatgggcgacgggaggtcaccatcaacacaactttacgcccccacgaacggtatgaggcgtattaccactatcatgtagggtcagtcgacctcagtcgtgggaggacctcagcaccaaggtctctacagtgacctgtatatcgggaaaggcgggacagtgcgccataccgagtgtatgccaacacacgctggctggtgacgtagggctcatgatgacaggcgaagccatgccatgtacgaccgcaccatgagactgacccgcgggacccgccacgcactactacgaagacatctgcaatggactcgctacagggaccagtgtgacggatgacgccataccgggagtatggctacacatggccctac

SEQ ID NO: 15067 - DNA, 648 bp, Zea Mays
ggcagcgtcagggaagccaccacaccaccagttgtgtgcatgcttcatgagccacctgaccctacctcgctgctacttgctatctaccccacatggagagatatcccaacaaactctacatgagtggactaccaggtcttccactccagcaaccgccacagctttagaacaaactatcttggaggggtggagtagtgttatggcaagtggagtcacacaagggcccacacaacactgtggagtgtgaacattgtcagatcagagagtccaattatgagcaatatgttgaatgtgttctctagctcgatcaagatcaccaagtctaggcatatcctgactaattgcgccccgatcaaagtacaaccctatccatggttgttgccttcggtcatagacgctatatcaatcaaggcaagggtcagcacggaagccaatgcttcttgctccggtaaccctagacaccaaaattcctaagaggatctgatctcctttatcgtttgagtggccgaaaacgcccaactctccatgacgtcggtagaccctaatggttctaccctaccggccaccaacatgccaccccaagtccctgatccacaaggaggaggagaaacaagtctaggcgatggcgctccacacacggactcgacg

SEQ ID NO: 15068 - DNA, 792 bp, Zea Mays
tggttttaaaaataaccttttgtcttctgcagtggccccaaggaggcgcgctatcgcgtgcggcggttcacaccccgctctttccgcacccgaaatccagaacacaaactgtatgacttgtggagccgggcccccatgtcacaaactgggctgcctgggtcctaggtgcccgtcgaacgggatttcttgcggtgtttcaggggtgcgcgggagagtttccctggaaaaggattcaccccgcgtgcaacagttaccttttcgcgttctctcccaatcggctgtgcccctttgccttcgtgctcctctgttccacgcccgcgccgctgcacatgccatggctttgctcggtcatcctgatcgcttttaggccgaggaagagctcaatctggtgagtggcctgcttgggtggagcgcgccagggcttgccggaaggatccgtgccgacgctgtcccccttggtgatctcgccaccggggagtttgtgttgttcacctcatacatttcttgcgggttggcgatgccgatttcgcccttcttcctgctactgctggaggaatttaggcttcaggttcaacacctcacgccccactccatcctccaggcagcgatcttcgcccacctctgcgagatgtttgtaggtgtggccccctacacttccctcttccgctattttttcgtgctggccaggtccgggaaggctagggaccacatcggtgcctactactttcagacgaggccagatccggccatagtctacatccccacctttggtggtgcgaggtgggaaaactg

SEQ ID NO: 15069 - DNA, 851 bp, Zea Mays
attcaaaactgcattccaaacccatatcggacagtttgagttctgtgtgatgccctttggtctcgctagcgctccaggtacatttcaagaggctatgaattcgaccttagcaccatatttgcgcaagttcatcctcatcttctttgatgacatcttagtctatagcaagactctggatgggcatatcactcacctcagagtagtccaggatacagttgccacatcatcatggaaaatcaagttatctaagtgtgagtttggtcaacaacaaatactacttgggccatgtcattagtgagctagtagtgggcattgacctagacaaaattactgatatcgagtcctagcctactcctgttaatgtgaaagagctccacagttttctcggccttgatggttactatcgaaaatttgtacgccattttagtatcctctcacagcccttaactcagctcctaaagaaacactccctctttgtctggacagtagaacacgaagctgctttcactgctctgaaacaagctctttgtcaatctcctatgctcgctcttccagattttgccaagcccttcctttctcattgaaactgatgcttttggttctagagtgggtgctgtcttaatgcaacaaggccatcccttggcatatgtcagcaaagctttgggcctccgtagtcaagggttctctgcctacgagaaagagtaccttgcggttctaatggcagtccatcactggcgctaatatcttattcattctgagttcatcatctatacagataaaaaaagcttgctccaactcttcgaactacagttgcacactcactggcaacaaaaggtttttgctaagctttt

SEQ ID NO: 15070 - DNA, 683 bp, Zea Mays
gttggtagtcgagcgagcagaggaagggcatgcgtatccagtacatcatcctgtctatttcatcagtgaagttctggggccctcaaagaagaaatgtcctcaagttcaaaaactattgtatgcagtacttctaactgcacgcaagctccgtcactactttgacgaccacaaagtcatagtagtcaccggatttccaataggggatattctccacaacaaagaagccatcagaaggattgccaaatgggcctgcgaggtgggagctcacgacatcgagtttcggcctcgcaccgcaataaagactcaagcactagttgacttcgtatcagagtggaccgagcaacaagtaccagataacccggagactgcagaagtatggcggatgtatttcgatggctcgctgaagctacagggggcaggcacagggatcctcttcattgcacttggaggtgaacaacttaaatatgctctccagttgttattctcggcatccaataatgcagcagaatatgaggctttgatccacggactgaacatttccatatcattgggcattaagagattgatggtatacagagattcactggtggtcataagttagataaataaagaatgagattgctcgaatgactctatgggcaagtactgcacagccgtccaaaagctggatgacaaatttaaag

SEQ ID NO: 15071 - DNA, 511 bp, Zea Mays
gacgcgacacgaaccagcaacccgacaaacgctgggagaagaggcctcgtgaagaggtccacgccgccggaccgcccgcccctcgtgcccgaggaggacctcgcggaggcgaacgcacgctggacgacatcctcgacgcccagtgcccgtaccacaaggacatgcgccacaccctacgaaactgcagagacttcaagcattctgtggggaatggccggcccttccaacctctacctcctcccccgctgcgaggaggaccatgagaaccgcgacaaccccagtagcagaaggaaggaggaggaggagctttcccgcgcgttgatagagaagtcaacgtcatcttcggcggacacgggtcgtaggaaagcaagagacaacaaaagctcaacgatcgttagatactggtggcggctaccggtccacccgctccgtaccgatggtccaaacacccgatcaccttcactcgggcagatcagtggctcaacttcgaccaccccggcaagtacccgct

SEQ ID NO: 15072 - DNA, 446 bp, Zea Mays
cgacgacgacgacgaagaagaagaagacgaagaagagaacatcaacgaagaagccaacgatgaacagcaggaccactacgtggggttatggcctgtcactgaacattatacctcaatgctcgagacggggcacttccctaaccttctgcaggatgttctgcatgcgttggtaacctacgtctgacccctgtatgagacaaggcgagtgtacaagcctcctcaggcttgctactacatcactcgtattcatgtcagggtgatggatgcaggtgatagagggtttaggactctgtcagctcatgagtctctgacgctgctatccacctacactacttcggtcagcgatgttgctaggagaactctgtggtccctcagccacacctaccggcagcagctgcacaacatgaagtacatgcatcttcctctgtgtattcgtggagaaagcc

SEQ ID NO: 15073 - DNA, 1047 bp, Zea Mays
caaacttgtagacctaacaaaggagaacaactttgcttaagagtgtaagcatagttgttaagaagaaattggagataatcaagcccaaagttggagtgtcagactagttaaagtctgaaatcagactaacagtgaaatgtcatgaacttcaagctcaatttcaagcaagatccattaactttttgtgggagcacaatatagcaaagttatagttggtttatagcactacaatattactgcagagatctggatgtgttgccacagaaatttggaagaaatctggccctaaactatggctgtcaggcttactgatgaagcactcgccatggtacagtgtcgtgtatggatcagaccaccagcgcagtataccttgccgccgatggtctctacgccgtgatttacgctgccgtcatgattcgtgctcactggtgggtggataaccacggcaaagaaaagatctcgcgacggggattggataggatcgcgagtgggaatttatcgccgtgattatagccgctgcgacgtggccggactaccggagtcgtcgtggaagcaccggtgaccttggttgtgccacgaccgaagcttgttactgcgtgttagcaagcgtggcacccttaggagtattctccttgcgccgttacaccggcgactgccacggttacagccaccgtgttcttctctgtctccggccgcccgtactgcccgatgaaatcacgcgccaccgcctaagccctctataaattgatggctgaacctgctgcgctaggtcattgcaaagccatagcagccactcccgtccccgattagccaccccagccggagaatcgttgtttgcccccaaatcgatccgccgcaccgcaagaaccgagctcgtcgtggccagcaccgttcaggtcagttcatgccgccttctccctcgtttgagtgctctcatatacccatgatgcccattgacccactcaattgcactgggtagccttagatcaccgggaacgcactcatctgtctgcaacaccctcggtcatcgtggccagagtaaaccat

SEQ ID NO: 15074 - DNA, 751 bp, Zea Mays
aacattcagagtatggccgcttgtagaaagctgggaaatgccgaaggagaccatcaccaagtctagcgaaggtgaactggtccggctgaagtatacattcaggtatggggataagttcgatgaaccaaacgatgactggctgaaatgcattgaagctacaagtgttgaactgcttggaccatattccaaggcagaggataatgcactatccgcagccttcggaggtcggggaaagaagagattaaacatagtttttgatgccattggcttcgtttaccccgactaccgctacccgctacggggacaagggaaaaagaggaaagctactacttcggccaccccagatgaacctatgccgaagggaaaaaagttgaaggtcctaactcaccggtcgcgtttcatcgaaccggccgcgatacctgaatttggcgaagggacctcctcggctgccaaaacaaaaggaactattcctcccgagaagaggactgaagaaccggctataatgtcgaaggtacctacagtgaaggtagttgaaacgaaggttgataaggctaaaaagccagaaactgaagaaataacgaagatgtcagaggttttgagccctccagtaaaggcaacagtaccgaaagtacaaacgggttctattgtaactcctaaaaggagaaggatggtaaatgtattagatgtgttggaaacaaccgactccataagtcccgctcccacggggaaggttgccgaagctgacaaaatg

SEQ ID NO: 15075 - DNA, 440 bp, Zea Mays
acccgacatacattgggagaagaggcctcgtgaggaggtccacgccgccggaccacccgtcgctcgtgctcgaggggcaccccgtggaggcgagcaaacactggacgacatcctcaacgcccagtgcccgtaccataaggacatgcgccacaccttgcggaactgctaggacttcaagcactccgtcgggaatggccgaccgttccagcctctaccacctcccccaccacgaggagggcctggagagcccaggcagcctcagcaaccagaagggggagggggtggagcactcccacacgttgacagggaggtcaacatcatcttcggaggacatgagtcgcaggagaatagaaggcagcaaaagctcaacgaccggtaggtcctggtggcaaccactagtgccccagctccctatcggtggtcagagcacacaatcacct

SEQ ID NO: 15076 - DNA, 366 bp, Zea Mays
ggccatcctcctcctcttgggagttgcggcaggagcctttggcaccttcggcaattctgcctctaacggtgtcatcactattttttccaattctggctctctggtcgcatcatctttggtttcggctggcccgactgtaggcaccttcggtaccacaatcgacccttcagcgctctgggcggtgggagtagcatgttttgcttcgggagtagaagaggtcccttcaccaaattcaggcactacgaccgtttcaatatatcgaggccggtgggttaaaacctttattttctttcccttcggcacagcggtggtggccgaagcggcaattttcctcttttttccttttctcaaggggtagcagtagtc

SEQ ID NO: 15077 - DNA, 380 bp, Zea Mays
tttgctttatttaccgtctctcgtctctctcctgtaaccaaagcgccttcttcccggactctccccagcatctcgctccatgacaaatcccaccgcgggtagatcacagcacgccatgccgcttcacgcgcgcgtgcgcgcagctagttagctagcgaacaaacccagcagaaacagacgccgccgccgacaacaagcgatctagaagagcacaggaaggagcaaggtgttgctgaggaaggcgacaatggccgcggagcaggttcagctgtgcatctccgccgacagcggcggcggcgaaagcaagcgtgacgccatgccggtggcggtggccgtgtccctgtgcctcctccacgacgcgttaggcgtcgcgctgttcc

SEQ ID NO: 15078 - DNA, 350 bp, Zea Mays
ggcggatcttgccgagggtggcaatgaaaccgaggatgcagctcctcccccgggcgatgcctgattctgccagagcgatttattttggacatgtgtgtgtctttcgcggccgctgaggcctgaacactttattgttgtgaaaataaagctgcgtctcctttcctcctttttcccgtatccgggcttgtttgttagtagcaggattgcttacccaagtaagagttatttttcgcggtaggcgacgagcaaggtatccgtgtcccggaggtgtaggaattcctcgacttggtcggccttgccacttacatgcactcttattcgtttctcggggttttgttacagacatggcc

SEQ ID NO: 15079 - DNA, 693 bp, Zea Mays
caaaaagcccggcctatattcccagcactagcggcgaccgtgctagaatctgccctagccgccagcgacccacagtaggccacagtggacctccagcgcttcgtggtgcagcaactcacattgctctcctcccgatgtcatcctggagctgcagcttctcggcacgtcctcggttgggacgtcctcatccgttcaaccagccagctaccctacggcttaccaggttatggcggcattccagcaacagcaaccaccaccatgtccaccaccgcacccgcaaccacgcaaaccccacagctgccatcccacaccaacagaatcacgccaccagcccaactcctaccaattcacctaatccccttccctcactccccatcccagctgccattcaccgatgactcgactacaccacaacatgatcccactgccttccacaaactcgcttttccccttatttgacggcaaggaggaaccgctgagctggctcaatcgctgtgagcactatttcctaggccgacgcacactagaaggggacaagatgtggcttgcctccttccacatgaccagtgtcgcttaacactggtactatatgctccagtgtgacgagcacgggctccaatggccacgtttcaaggagttgtgctatcaacgtttcggcccgcctgctcgctataatccaatggacgagctcac

SEQ ID NO: 15080 - DNA, 741 bp, Zea Mays
gaagagagttgccgctgcagggtccctctgagcaggaaaccaggactccacggatacgtgtctgaaccgacgtacccggctgcagtggcacgctgaagatcaagcagtcgaggatcagcagctaggggtcgcacctcagtctcgtcacgctccctaaagcaaggtggaggaatgggcgaagcgaaaatgggagcgagagggggaacagtggaagctggagtggtggagggggtgggtatggcagaagttgtggatggctctggagcgacgggagctggtgaagtgagaggtggagtagaagttgtggcggagggagcagaggagcgaggctaagatgcgaggcgacgaactctgtaagcaatctggtcggaggaaatctgcaactgtcctccccgctctacctgctctgctgctggtgccgctacaagtgctgcacgggcagctctgtccatacaccgcttcttctggccttcttgctgctcaaggtacattgtcttccccttgacctgcctgaaggggcgaggagggtcctcgttgtctcctccctctggcgctgagacattcttcgtccgcaccatcctgacctgagtgctgcatgagtgagtgaaaaattaagcacgagtagatagcagctgataagattaggaatgaaaggatggctacctggaaacctcacgagaaagagagaatccaggcaggacaggagacgagcatgcaggcaggagagatcactgaaatgac

SEQ ID NO: 15081 - DNA, 552 bp, Zea Mays
gccaggatcagttcatctcaccatcggcgaccacacgctcggatttgtgcctgacgctacgattcgtgctcaacgaagtactgattgttgcttggggtagtaaatatcaccgtgtggatgaacttgagccactgttcactccgaccgccgtacccgcctgagtcacggccgcttcgaataaactcgccggagttagccacctcgcgaccttgcgccatgtgctttggtgctttaaccacgtcgcagtgagtcaccttagcccacccgttcatcgcctgtgagcttgccatggggaacaccacgaattgcttgggctagtaacctcttccctctcaggccgccaccgcgccaactccaaatcgtgagccatcgtccccgaatcctataaattgagcataccctcggctccgctatgtaattatgcacccaacacacccacttgtgcctccaattactcaccaaagagccccaatttgaaactctccccaattcggtccagagcaccccgctgcgtgagctcgctgaggctagcgtactgcaggtccgttcatg

SEQ ID NO: 15082 - DNA, 636 bp, Zea Mays
ctctgtctctggcgatctcaacccctcgccggcgaccacccctcaccggcgtcctctgctctccggcgacctcgaccagtgctcctctcatcccctcgctcggtgagcagcctccttatccctctgtctactctcttctctctgattcaacccagtgaagcctccccttttccaccttttgcgcaaaattcaaatctctgtgaattcctgtgaaaccaagttgtggtatgtgtgtctctgtgtgtcttgagcattcctgcaggttcttagctccttcgggagggttttcacacctcaaatagccatttccctaaaaccctaaatcctcgcacaccacgtgttcggtgaaatgcccaaaccagccaaaaatgccccgattgaacccaaactttttaggcaccttcacaacatctccagtaacatattcgccaaatttcacacccatccgatattccaggcttcaatttcacccaattccccgttttgagcgatcgattccgagccgagtgcccaaatctcattttcttcgcctaaattcaaaccaagcacacacttcactcatattcacctatataaacctattcgtgaagtatcggctcaattccatgtcatttcgtgcctcaattcgaattccaa

SEQ ID NO: 15083 - DNA, 581 bp, Zea Mays
catactcttgcttcctctccatcaaagaatgggaactccaatttgggcaaccagttcttcctcccttgcatgtccatcgctgaatcatttctagcatccatacccaaactgctactcccatcctccacggctgtaggaattctaggaggtacccgagtatttcttagctggatcggaggaggcccaatcaatccatcaccagttgccttcatccctccaattgcgcttgatactgtggtcgccaatcgattttggtcctgagaaacttgagccagcgacttcatagacaggtccatcttcgtctgcaggtattgaatcaacttctctccctccatttgtctcttctccatctctgtcagttttgttgacagcgcgttgaatccatccatcttcttagatagttccatcagtgtcgcggatgaggcatcccaagcttgctggaacttctcggccagacgcttctcaacgtcgtccatcgccgagacgagttgtcgcgcctgcgaggtttgacgactgggcgccgtggcttcgaatcaacttgacgacccacagaatccttcgtccccgagccggaacgagga

SEQ ID NO: 15084 - DNA, 1684 bp, Zea Mays
gtttacagttgacagcaatccaaggtggtgctgcacatatcttcttgatgcatctgatcctttatttgtagaaattgggaagatgtttatagaagagcaaatcagaggtaggatctgttattttgtgcaagttgatgtctaacttcatgtgcaagatattttaatgtcagacccgtaatcttgtgccattccctaccataagagtgatggctagccattcttttaaaacaaatgatggctagcttttactttattagttaatctgttttgtaagagtactttttacactttttcataagaagacaacaaaccttgatgcatcggagttttcttgtacttttgtgcagaatatggtaggacaagtcacatctacaactggtatgattattaaccatccttctcactggaagttcccaatcaattattttttctcatttataaacattttttacctgtctagcgatacttttgatgagaacactcctccattaagtgacccgaattatatatcttcgttgggtgctgcaacgttcaggggtatgcagagcggtgacaacgatgctatttggttgatgcaagtatgttctctgtgtgttagtattttgcttattattggatttttctgtaaaagcagttattagagatatgaatatagatcatggatgtcttggttgttgcactttacattttcacttctggaactactttcagatgtgtgattcttttctccagttgagagaaatgccgtgctctattgtcacgttcttggatatatggatatgcaaggttctgtaacatttattactctgcagggttggctgtttacctatgatcctttctgggaacctccacaaatgaaggtgaaactttattgtatggtttgataagatatgtatgctagtaattttattggccctttttatttgggcttcttgtttcttcaaaaaacattgttggagtagtaaggattgaaattcatgtgactttcattttttttccatttaactgtttgtcctaaatgtcatgtatttaaaaatggagggagtttgttggatatgatatgactgcaattcatgttccagtggtgtgagttgatcacattcatttagtcagggtaagcattgtgttttccaataacatattaggatttttgaaataacaccaaggaggtacagcaatttgcagtggtgtcatctgttatttttatttggttcatacagtaaaaactaaaaaaaaaacatgcctgtagtgactaatttatgttgatagcaataatttcagattattcttggagaaaaaggtgatgttacattgccaaatgattgacaaccactgtatttctaataatctaataattatttatgcactcagtttcttcaccttttctgctgaaaacttgaataagccttgtcagcttaacgtggctactgtctaatacatcagttgtctgttttgagcatgcaccttcgttattgttagtgttgttgtgtttggggattcagctttaacgtaaccaattttttacttatctgattgaactcaattcctgttatttttaggcactactgcattctgttcctgttggcaaaatgattgttcttgatctttacgccgaagttaaaccagtgtggataaattctgatcagttatatggtgttccctacatctggaaagttctcttttc

SEQ ID NO: 15085 - DNA, 363 bp, Zea Mays
cgcaggtgtagatatatgatcgagcagcaacccccggggcggaagggatcaggcatttagtgcgggaactagcagataaaaagatagagattcccatcgcaggcataacgcatcacactcgtgcacactctgactctgcactggcgcgaagaatccacatgccactgggcctaagctggggcacggcatatacccacccagcctatgaacccaaccgcctgcttgcttgcatcgcagtcccaccctctctctctccccttctttgacttcaccgattccatcgtcaccactcgccatggccaccgatggcggccgcgaatatccaccccggcccctccgcagtcgtccccgactccactcctt

SEQ ID NO: 15086 - DNA, 921 bp, Zea Mays
gttgctatatgaatctgagagaaaatgaggcccaaactctgtttgtcagaccgacttatgaacatatcccatggtatagtactggaaatatcaccggagtggataactctcgccgtcgacgaccaccgtgcacggattcgcgtattgggtcgccgtgattcgtgctgaccgagtggataacacttgggatcaagtaagggtccccgccgtggataaactccagccgataaagaattctagccaccgtaccgtgttcactgcggtggaaaccgataagaacaccggtgactcccgtcgcacggccttgcgccacgtatctgaacacctctgtcgcgtcgccgtgactctttacagccgtcaaatcgtcgccggtgagctcgccacgactgaggacacgaacccactgcgccatgatccttccctgtttccggccgccaactctgcccggccaaattgagcgccaccgtcgaagccctttataaattgatggccggggcagctgcgctatgtcatcttgaagccatagcacccgctcccacccttaatcattcacccgagcccgtgaatttcgaacttcccccaaattcgatccctgccaccgtgaagatcagttcgccgcggccagctcgattcaggttagctcgagtccctctgctgcttgttctagcatccttaggtaccccgcaaaccccttgacccctttaattaaactataccgccacggatcaccgggaacacactcatctgtctgccacaccctcggttcacgtggacagagcttgatagctcaccaaccgtgcaattagcctagggaaaatgctcggagtaggtcggatttggtgtccgccgctcgggaacgccagtcattgccccgttaggccagtctgctagctcgccggagctccaccgcgctcaccgtcg

SEQ ID NO: 15087 - DNA, 717 bp, Zea Mays
gggagaggtcatgtggagggtcgggtgaggtctgtgggcttctggcggtcacgtcgaggggcggatcaccggcggtgatggtcgaagtagggctggccgcatgcgcaggcggtcaggctcgtcggcgacgcgtgctccggcctgcccacggcggtagagttcaatcaaactgcacgggaagcttcactggaggtcaatggtgctgtaggcgcaaggaatcgaagagtggctcaccgtgcagctcggtctacgtgcgatggcggtctgacgaagtccagtgacgtcaatccggcacctccggcgatgtggtgcttggtccgagggctcgcggagcttcactgagctccggggaggctaaccgagggattggatggggtggaggagggctggagtggccggtccacggtggtcggggcctaggcggccgctggcacgccgtgtgcagagcgaactctagtgaacttgtgcttgggcggggctgagagcgagtgggggtgtacgatcaaggccttagtcggctttataggtgcggggccgagagccggggcgtgctctggcattgccagggcacgtcgaacacatggccgtttctttctgtccgagttatagctcttgctgagcagccaaacgtgtgaatctcgccataagacttttgtaagatctcttctctgcacctagggctacctagttcatgtgagttccaagggaagatcgggt

SEQ ID NO: 15088 - DNA, 525 bp, Zea Mays
accgtggctagctccctccagccaattccaagccgcgccagtcactcggttagctttgctagtagcccgtgaagctttccaagtcctcggacccggcaaaacttcaccggagacccaggatcgtccttgccggacttcggtgaccgcaaccgctcatagaccgagcaatccggtgagccattctaaaattcctcgtgcacatatctttattgacctctggtgaagctccctgacccgttcaatcggactatggcaccgtgagcagaccagatttctcgccgctgacgagctcccgggcctgtgcacacggaccgacctactccgaccaccacagccgacgatccgcacctcgacgtgatcgccagagacccccgaacctcacccaacccctcaccggagcaacctcaccgccggtaagcccctccgcccttttcttccgtcacggtcactgttccattaggggaaggatcgcgggttcgatttcgcaaaaccctagggggttttctgcagagtcatagactcaga

SEQ ID NO: 15089 - DNA, 529 bp, Zea Mays
gccgccagtgtctccgggttgtggatccgcaccgcgtggctgagcggcggcaggagccccccggtgaagagttggacacgctgggacttgtccagccttcccgctcgtgagagcagctcctggaaccggttggagtagtcctcaacggatccggtgcggcggcactcggcgagttcgaacaacggcgccgaccgaagagcagggccgaaccgtagttggagcaactccttgaagcgaccccatggaggcatcccttcgtcgtcctggagttggatgaaccaatgttgtgcgatgccctcgagattatacgaggccatccaaaccctttcttcccccatggtacgttgctggcgaaagtatgattcgcaccggttgacgaagaggagaggatctgacttgccatcgtaccgtgggaagtccaatttctggaacttcggtggacgatcaaggtcgcggtgagcgtcggtgcggccgccgctggacgacgatgtgtcggacttctccttcagcccggctatgtcggcctgca

SEQ ID NO: 15090 - DNA, 298 bp, Zea Mays
ataaatcctaacagtcaccgctacaaacatgctcggtacgcatcggcgaggatccctggagccatcacgaatccccgaacagaagcgtatgtggagattgatggcagcggtgttcttcctcctccctatgatcactcttctttgggttggtgaagcttgcgctcgatgctaaacgtggttaggtggccagagagaggtcgcgggcgtgtcctttatatccatgcgagggggaggttctaggatgcacgaatctcggtcgggtacgcgtgcatgacagagttcgttgaggagattcaca

SEQ ID NO: 15091 - DNA, 663 bp, Zea Mays
gttcagccccctcgccgccgacgagccgcgcgcggattcgagctatcgtgctatcgccgccgtgattcgcagtcagattagctggatagcaccgggggtcagtaaatatcacaccgtggatatgctcctgccactaaattactccgaccaccgtacctgagctagtcacggttgcttcggatgagttcaccggagatagccgcttcacggccttgcgccacatgccttggcacatccaccgcatcgtcgtgactcgtattagccgtccgttcatcgccggggagcttgccacggtaataggccacgaatcaccgcgccagtgacttcctatttctccggtcgccgcgcgtcttcatccaattccccgaccaccgctcatgactgctgtaaattaagcccgccgtgagctccgtagggtaattacccatccatagcacccacgcttgccttcaattgtccaccaacaaccgcgagttgctctttgcccccagtctatgtttccgcccccgttgaaacacctcgctgtggccagcttgctccaagttagttcaagctctctggtcgtttgttctagtctccttaagacctcctaatgctgtttgacccctctgattgaactagaccgccctggatcatcgagaacgcccatgttcatccattgtc

SEQ ID NO: 15092 - DNA, 378 bp, Zea Mays
gaccaagtctctgttgagcaactcagcgaggaggagtggcggaccaactccctaccgagtaaccctacgaggcggagcaaccgaccaaccctctgtcgagcaaccctgcgaggcggaggtcttggtccagtactatagacccacatcaactacgacaagatgtgtaatcaccaaaccacgtccggactgtggtcgtggcatatcaaaggggcgtcggaaggtcactgtcaacacgactgcacgccaccacgtacggtctcaagcgtatccccactgccttgtggggccagtcaaccccggtcacgaggaactaagcaccggagtctctatagtgacccgcatacctgtgaaggacatgacaatacgctataccatgtg

SEQ ID NO: 15093 - DNA, 610 bp, Zea Mays
ctgacacctacaccaggcacatggccattagtggctaggagggctaaggcccacagccaggccacaggccatatgcggccaggatagattagataagggttagctaataaaaaggagagattatctctggttagttggatagggattagaagagatctcatagctcttatccttagatcacataagtatcagctgggacataaatgatgagtggtggctggagacctcccttgaacagctggacctgctactcttctgcgaggggaccggcacgtgggaggagcgcatggaaccggtcctgatattcggtgaccgtgcccgtgtgccggcattccgccaattcggccagcggggcggatcggagcggcggcccatagcgcaggtgtagcagttccttgaaacggcgccaggacggagttccctcgttcgcctggacttggatgaactacatctgcgcgccctcctccaaattgtagctcgccatccacacctcctcctccataatccgttgttgataaaagtacgactcacaacgacttatgaagaggaggggtcagacttgccgtcgtaacgggggaagtccatcttctggaaccgaggcggccggtcg

SEQ ID NO: 15094 - DNA, 372 bp, Zea Mays
agctcatactcacggtgatgggataacgcgcactgaccacgggaaggggaagatccgatgggttcactgatctccggtgatgaattcctctcccacaggcgactcaacgcacaattgcttgacaaagcccatatacacggccgctgacgaacttccacgagtaccctctcggccatcgggcggctgcgggtgctaggattacgcgcagaggttccgccgagcccccaatggtgccctggctagatggtggtttttatcacgtctaaggatttgcgcgaggaggtagcagggggtggaacgagtcacagaagttcctatttatctcccgaagtctaggtctgggacaagggggaggtcacccacgaacccgtc

SEQ ID NO: 15095 - DNA, 580 bp, Zea Mays
cacattcattcattactacatcataggtagaagctaataatctccccataaccacatgacaacaccaattcaaattgattcagccgatggaaaagtccgaactgatagaatatgcttgaatgtaaatgtggaaataagggggatagggtttcccgctaacctaatagtgatgggtactcagggaatagatgttatcctagggataaattggctagataagtaccaggcagttatcaactgtgataagaggatgatgaagttggtgtctccactaagagaggaagtggtgactgagctagtcccactcgagctaaggaaaggtggttgtcaccagatgactattgatagcaaagagacagatccactcgaggctatcaaggttgtgtcagaatttccggatgtgttccctaaagatttaccaggtatgccacctgagcggaaaattgagtttgccatagagcttattcctagcaccgcccctatttctaaaagagcctacagggtatctggactagaaccggtggaactcaagaagcagatagatgagctgtcagagaaaggttacatcagaccaagtacc

SEQ ID NO: 15096 - DNA, 735 bp, Zea Mays
tcaggacaccaactcagagatctcgccgtcggtgatccgccgttgcaattcgtgctcgcctaaaagattcgtgccacgagaagtatggataacgtcaggtgtggtgagaatatccagcgcggggtgaatccgatcactggccggactagtcgctatgtcccaccgtggttagtcgcgctgacatcaccggagtcacagttatccggccaggctacgtgcctcaacgttttaccacgtcgcagtgagtcaccataagccactctctgctactggttcgtcaccggtgaggccgccacggtgaaggccacgaatcaccgcactagtgactcattccttctccgaccgccaccgcgcccaacccaaattccctggccaccgctcaagcctgctataaattgagtgcacccgcggctccgtaggataattacgcatccattgccccagtccttgccccggattatccaccagagcctcccaatttctctcttcccccaatttggttctccgcgccgccgtgtgtcggctcaccgtggtcagtgaactccaggtccgttcgtgctccctgccctcttgtttcagcacccatacctgccccggatactcctcgaccaactcaattgatctaagctgccttagatcgccaggaacacgttggtttggccgttgatcattcggtcaccgtgggcagagcaggttagagcgccgttagtgaaattagttgaggggaaactcttg

SEQ ID NO: 15097 - DNA, 1003 bp, Zea Mays
ataccctactaacagagcaatcggcttaagtcggcaatgacttaagacggtgcaacatgctcgcgctcactcagcatagggtgaccactataccctactaatagagcaatcgacttaagtcggcaatgacttaagacgatgcaacatgctcgcgctcactcagcatagggtgaccactataccctactaacaaagcaatcggcttaagtcggcaatgacttaagacggtgcaacatgctcgcgcttactcggcatagggtgaccactataccctactaacagagcaatcggcttaagtcggcaatgacttaagacggtgcaacatgctcgcgcttactcagcttagggtgaccactataccctactaacggagcaatcggcttaagtcggcagtgacttaaaacagtgcaacatgctcacgcttactcgacttagggtgaccactataccctactaacggagcaatcggcttaagtcagcaatgacttaagacggtgcaacatgcttacgcttactcgacttagggtgaccactataccctactaacggagcaatcggcttaagtcggcaataacttaagacggtgcaacatgttcaagcttactcaacttagtgtaacatgctcgcaaggcgatctctatgccttaccagccgatcaactagcgtaaattagaaaaagattccaaaaccagcgcactacacttacttctacaatcattcatgacaactgttgaattctaacgacagaaacaaaacgttatagtttttggcgccaagaacacattctaacatcctaccgaatattcaagcgcgctggtcacacatacatatagttcacaaatgcattcaatgtcttctaaacacagcaaaacatctctacttggcaatgtctttcgcaggagcaatcaaggatgaagagcgactcgaagcatcaggtgtagccttgacgtccgcaacaatgtcatcaggaacaactacaccaggccttctcatcaagattcgc

SEQ ID NO: 15098 - DNA, 1183 bp, Zea Mays
gcgattataactctggggtcaagattagatccagattatactgaagcggtatggaatgtgggccatttgattagtgatcaacggcccggattttaaatccatcagactcgctcttatccctcggatcgtagatctatggctagggccttatcagacgaaggggtatctctcgatcagatcgatgccttccgacgagtatccaacgaccagaaccccccttctccatcctcaggtcggagtagggcaacgacggcgagctctgcggtggagttcttcaccgacgaactacggaccatgtccctagcgctctaaaatcgaagcagatggatcctacgcagggcggaggtgagcgcaaaactagtgaaggatccttacatgctaggttggtgagggtggtgctaccagcaatgacgcctacggcggtggttctcctggccaaccgacgaggaatactccgcgccttgaagacccccaaccccgtctggttcggattaacgcttatagaacgaagggtgagagtcgtgcagagttctcaccgagatcgaaggagtggaagatcctgcccacggtgagacacggtccgaccgccgcccgtgagctccagtgaggaattggcggcgctcaggtgctcccccatacctccaactgccaccagagggtttgcgacgggttggtgatgctccatagtcatcatctccgcctcggttggtcccgccagcaacaatccccagtggcggggtggatcttctaatttcccgtgagatttccccatggcggctggattccgggcgcacagcggaggggaggagaggtctctggaggcagacgcatggatgcgcacaaggaggaaggaacggctgtcgctatatatctagggaatacccggtcgccggctccgatcttcgcgcgcgccagctgcgggatgcgttcggccaggttagggatggtgctgacgaggccggcccacccgtcagtgaggaggtgaggcgagcgtgcgtgagagaccgcccggtgggtcagtgtgctggtgaacaaacagatgtgagtgcgcgtgaaactgagagtctgaccggtagggcccactgtcattaaaagggccggccaggcgcgcgcgatgggctggtttgagggcgagctgggccgagaagcgctggattcggcccatcaggtagttttctttttt

SEQ ID NO: 15099 - DNA, 417 bp, Zea Mays
cgccctgggaagaacgggggtaggtgatggcccctggaccgttagatcgggcgtgttcggtcaggattagaagcaggcgcagtgggctcgggtaccgttgatctgataacgtacggtcctgattggatgcgtcgttcccgttcacagcttttcgatctggtccgtccatctctgagcgagcgcttgagattcatcgcgggcttcataaaattcgggcggttagtttaggatcgtgtggcccagatctgagcgggagttcataaagcgcgaatctaatcctagccgtagatgtgggatcgtgcggctttggtcgaaacataccccttcggccagaccaattcacataagagcccctggaaattttagttatcaacccgcagtcctcgggcgctgttctctgagtctggagatttttac

SEQ ID NO: 15100 - DNA, 445 bp, Zea Mays
ctaaagttggactgctgaaggagaggggtctgactactgaggctgtggttgctgattttgtctttaagaacattcagccgttgaaggatagggcatacccggcttatctgtaccgaggtctagctgcagatttggtgaaccgacttgaaatgattcttagaggcaaggtatcaaatgttggtgccccagtggcatactcggcctggaacctgcctcctaccaaagccttcactcattttgtgtcgaatccacctgttactgatggcggtttgggccttagagtgcgaccctctgccgaagaagttagcgctttggttgcctcgctcggggaaattcctgatgatgagcggtaggtccactttgaggtgcctttggatcctagtgacgcagagataagtgctatgcttgatttgctggctgaggactcttctgatgctgctcctgc

SEQ ID NO: 15101 - DNA, 421 bp, Zea Mays
cccgttggacatgtatagcgcacaaccgcttctcccacgttcctctcactaacattccggacccatgtgtcagctctatctaatcccgacgtttaccccgatgattactctatgctttgcaaacccctggtcgtcgcttcgcacaattactccgttcaagtatcgtcgtcttactcgcgcgcctactctgtcgttcatagtgtgatgtgcacatgtgagaaacccctatattctccctctcttttgcaccctctgtgttccgtgtctgcgtctacccccccccccttcgtgcacagcagtcgtgcattggcaaacctgccttgcgcccgttcgatccgtcctcgtgcgctcgatgtgcctttgtcgcgccatctgggcaccgcacatcccttgctcactggccacacgcgcttatcgccgc

SEQ ID NO: 15102 - DNA, 732 bp, Zea Mays
gcaaaactggaaccactgccatgtgaacgaggtggcataggaggaggtttttggcggtggtggaatcccgaggtcctcatcaacagagtctgaagaagtattagcaaccattccctagtcctcaagctagcggatcaccttgtcctcatctcgacgctcaggggccaaaggatccaatgagcactagcgggaaccaaatgtcagcctggtggagtcaagagctgcctggaactgaggaggtcggatcagctgcgcgaagatgttacagaggtagtgcgcgtagggcagctgacaccgagcacggagaccatcaaacattgtgtcctcaatctcgcagatcaagaaatcgaccatgtcgaacactgagtgagataccagagcacttaggagccattactaaatatgagtgatagcctctctgtatcccatcagtggtatcacgatgcacctcatcaactcatatagaaacttcgccgctgaggtgaagtctgctggagaacgactcgagccatttgtgaagggtggcctgaagagtgctgcgacatgagcggtaccaggagcaactccatcatgagggcgacgaggagggtatgaggtaccataacaaagaccgtgtagcctcatcgatgacttagggaatccaaaaagctcctagatctaagaagtatgcaaagtgacgtcctcacgctcgaagcggaacctcatccattgatggtcggggtcaatccaaac

SEQ ID NO: 15103 - DNA, 524 bp, Zea Mays
tgcgtggcgaggttctgcatgtcgtcatggagctacatcaccccttggcgtgtgtagacacacatcccagtatggtgtacctgttacgttccttcgggtatgtgggtcactgtagagactccagtgttgaggcccttatggtcgaggctgattggtcccatgagtcagtgagggtatatccatgggcacatgcgggggtgttccgtcgcgtcagccagagccctttgggtattgtgcgtatggttcagacgtggcttggtgatgttacattttattgtggacgtcaaggtctggccacatgggcatgtgttcccttcttgtgaattagcttggcgggtacttggttgttcacccaaccttgaagatttaattagcgagaacttggtcgtctgccccgcctcgcagacttgctcggtgaggacatagtcgttcgcccctcctcgtagacttgctctgcggggacttggtcatccctccacctcgcagactggctcggcgaggacttggtcgttcgccccgcctcg

SEQ ID NO: 15104 - DNA, 662 bp, Zea Mays
gaatgcgcgggttagagctgctaatagtgagtttactgaatttgcttctgtttggtggatagaacatggtaagaagaatcctaataacatgccacaaacttgggatgcattgaaatgggtcatgcgggctagatttgttgcttcttattatgcacgcgatatgttaaacaagttgcaacaattgaaacagggtactaaaagtgtagaagaatattatcaggaattacaaatgggtatgttgcgttgtaacatagaggagggtgaggaatctgctatggctagatttttgggcgggttaaatagggaaattaggacatccttgcttataaagattatgctaacgtaacccgattgtttcatattgcttgcaaagctgaaagggaagtgcagggacgacatgctagtgcaaggtctaatgtttctgcaggaaaatctacaccatggcagcagcgcacgactacgtccatgaccggccgtacaccagcaccaactcccttgcagagtcgaccagcaccaccaccttcctccggtgacaaaccacgtgcatcttccacaaattcagcaaccaaatctgccaagaaaccagcaggtagtgcctcttcagtagcctccacgggtagaacaagagatgttctatgttatcgatgcaagggctatggact

SEQ ID NO: 15105 - DNA, 421 bp, Zea Mays
agcaacgaagggggtacggttctttaatctggtccgccaactcccatccaacgacccgcgagcacccgggctgcgcggcgatgccgccatgaccggcaaactcaaactatccttgtcagtgaccaatacccaagccaaaataactacgcagtgtggagggtatgaagaacacgagtaagctcattacctatagttgtgcagtgagttgacccagccgcggcatgcggccgtgttgcgtctgcacccgacgtcagcgagaaattaccgaagcgacgaggacccgcggtcccgcgcgctctgagtctccttccttccgtgtcacctattcgactgagcgtctttgaccacaccacagtctctcaatcggtgatggaggcaaaggacggcatcggctgctcttgctcccctctctctatgcgct

SEQ ID NO: 15106 - DNA, 438 bp, Zea Mays
cacatcttccctttttccaccttgagactatataggatcactaaagaaacagttagtctcaaaagacacaagttatgtgtgctccccctaacgttgtgcatcaagtatttgaatgacttgcaccttgcacattctagcatcctcagaactagagggaatcacaacataccttggtctaggcataatatatcaattgaaatcacaaaaaaagataccaattgaatagatgacataatacaacttatgcttgatggaaacaatgcatgactcaagatatataacattttaaaagcaaactaggcacactacacacatgatgatcattacaacacatatatcaatttaaaaggcaggatcatacatataaagcacaatgtctaagcacaccatgattaagaattattttcttaggtgcaccaaatgaaaggaaacaacata

SEQ ID NO: 15107 - DNA, 525 bp, Zea Mays
cgggtagctaccgaatctaaccgtggcatctctgggcgaagaaatccatcggcgcgcttctaatcgctcgctggagttgtgaaaccggggcgcgtccgccaagcgccgtggccagcgtcgtccgcgctgcaattgccggtaatactaccacccgtgaattcgacttaatctgcgcattgggtcaacactgttagaacatagggattaccaccgtggggtcaggcgcggtgttcatcggcgtttgcgccgatgtgcgagcgcggcgccgtcgttagaaaccacaggggaagacgatacccgagcaccgtccgatctccaacgagcggctcggattggagaatcggacaccgtttcagtcgctggatcatcgccgtcaatgtgaaatcgggcggtcggatggcgtttgggcgttcattgaatcgaaacctttagatcgtgatccgagggctctcgtcgatggccgtgtgattgttggatagatctaatcatcacccttcgattctaatccaacagcccaaaactcat

SEQ ID NO: 15108 - DNA, 1068 bp, Zea Mays
ctcctgcaactgccataataggtgtgttagggggcagtcccttgtaatgccgccatggacggcagcggtgggttcccatacagctgggtcaccacattagcgaacgcatagagcacttgccctcggtcctcacacatggaggatgaaccgaggagcgcatctgtgcagcctgcaagcacctagacatagggtggggtggtgcacccttccccctctatcattatgacactggggatctccacaagccgaaggtcacacataccctggatgacagcgtcgatgggcgaggaggagttggtgaggtggagttcgtcggtggtggtggcaaggaagtcgagagagctgaaggtgatgcggctccccaacacgaaagtatcgccacaagagaaatcaaatgactgagccacttagagtgaaaacatcgcttggcacgctaacagtccccctacctggcgtgccaactatcgtggtttcgaaaaccgagggcacatagaatttgtgttcgacaggggaggctagcgcggacacactctaaatggtgaatcgagtgacttgagggggtttatagtggttcaggcaggtacccaatggtcaatgtagtgctgatcttagtattgctcttcgtggcatgttacaaagtgtgcaagttagagtgagagagcgagggagaggagaactgctaccaaatgctcctagctctcttgcctgccttgtttgctgctcagtcgcccccttttatagttaagaggggtggtctttacagagagatgtgttgtttggagaagagtgggatctttatctacggaagctcctataacatggttcctttgacaacgtcttctgacacgcgtgtaatcatacgacaggtatggcaggtcgctctgccatgtcccgttcgtgggctattgtaaagactatggtgttgaggctctctatggtgaaacttagctgatcccatgtcgtagagttggggacgttaagggggtacatggtggcacctcttcctattgatgggactcttcgtcactcccctggcatgtcgtggcgtcagtcaagacggtacttggt

SEQ ID NO: 15109 - DNA, 376 bp, Zea Mays
aggtcatttcgacagagtatattattaagcaaggttctgaagatgcaacaagatctggaggaagagaaaaacaaagctgtcattcaagacttggctgaaaaagttgagaatcacgaagccaatctgaaaaagaaagacttcgcaattcaagatcttgaactcatggtcaaagagcacgaaggtgtattagaaaagaaggattttgttattcagaccatggaaggctctttggctgaagcccaacttgaaaatgacaaattaaagaatgaactgctccttcagtcagaaaaattcgagcaagaaaagaaatatttcgaagcaagcctgaaggctgaagtggataaatacgcaaatttacagaaatcctttacagaac

SEQ ID NO: 15110 - DNA, 619 bp, Zea Mays
ggcgttgcttcttcgcctagctccaactggtgacaaagcgtatgcatcctgcgcttgtaatgataagcgtatcgggtcggcaaggtagagcttgccagtggcgatggagaggaaatcgagggtgacgaacatgatgtggcttcctagtgcgaaggtcttgccgctggtgagagttaaaatctaagccattagagtggaagatgtcacttggcacgctaacggtcccctacctagtgcgccaactgtcgtggtttcagggacaaggaatttgtgttcgggaggggctactagcacagactcactccgaatggtgaatcactgggattcgagcacaaggttgagacagagagttatactagttcatgcttgcgcccttgtccagtgtagtgttgatcgtaatattgcttgaggactgtgttacaactggtgcgtgtgtttgaagaaggaaggagtcataccctttttataactcaagggtaggaccttacagcggagacttatttcctactaataagagtggtaaaggcgtgatccatcacccccggtggacgtagtgcctctgacgtcgtctgtaggtcatgtgtaggcgtactcccagcatggcgtactgccatgtccg

SEQ ID NO: 15111 - DNA, 494 bp, Zea Mays
ggaaggtatacttgagatagaccaagccaccttgactagagccagcggcaacttccttcggcatttcccatccacttgcaagaggccatactctgtaagcaatgtgctcttgaaccaagtctcttgtgccaatataggtgtgcactgtgttgaaagccacctggcacacttgcacatcattcccaagtgcaagatggcctcctaatgctgaagcgagaccatatagggcgttgaataatccctttcacatcctccctttgactcaggtcattctccacgtaaaaccactcctgcatccaagagcctggccatcttttctgaaatgtggacacagggtaacttgcctcagattgaggcacgaagttgtaacaaccaaaattgttgtgatactgttcctttctggtcgccttcgtctgataagacaactcatgaatattgcaaaagcatcttgcatctggatccggtccttggctcctcatggcctagataaaaac

SEQ ID NO: 15112 - DNA, 460 bp, Zea Mays
gcggaggctatcgatgttccaggaatgttccaagtcttcgctgtttggcgttgcgagcctgtatgcgctgggggaggccttcgtcttgacaatgaaagggccctcccacctgggctccagcttgcccctggactctgtccgagctgttcggacgagtacgaggtccccttcgctgaattcccgcaggatgactgcgcggtcgcgccatgcttttgtctaggcttggtatttatttagagcctgtagagtgaagacgcggtctccgttgataagaccctttgaagtgggttcgtccacgttggggacagctgacgcaactgttcgcgggggacccatgctttatttcttgtggggtcatggcctccgatccatatagaaggcggaaaggggtgaacccagtcgccctgcactcagtcgtgtttagcgcccagaccgcttcaggtaacaagtcggcccacct

SEQ ID NO: 15113 - DNA, 512 bp, Zea Mays
agctcaggtgatgacagaggaaaccactctcaagggcattagcagagctctcagacttcagggacgcaacaaagctcttacaggccaccgctctaagaggtagaagaggcagaagcttcggaggaaggttcagctcctagcccaagagattgttctatttattatgtggggaagacaaaggacatacaacaaggacgtgccgagtcacgatccagaagcagaaagagatagctaaagccgaagcaagacagaatcatgctaagcaggtcctgcatactacttagctattccccatacattcccgagtatgtgggcaaccaacagcccacaacatcagttgctttggcaagccactctcaagctgcatgggtcctgctaccaccaccaccacctatgacaccagccttgacccacaatcaacagctagaagggcaccgccaaacacagcaacaacgtgacgcgcgtgaagaatccgaagctcgcacaatcaatagcaatgtgcccgagtcgag

SEQ ID NO: 15114 - DNA, 598 bp, Zea Mays
aaaaggtgctctaggtcctttggtctacttcataaaaaggggaaaaactcgtctgatctagtgccatcctgacggcacagcctcttagagcaactccaagagcttctttatatcctttctttttttccgaacacgcagcgtatcattatgttaagaaaaaaataggtatagaaccattacaaacaacactaaaaagatccaagaccaatacccactagggatccaagaagaagaaaacatctaaactgaccaaaaccagccctaacccccaacaatctgaacctagccttcctcaggaaatatcacgtgcccgagccaaacccctgatcaaggaaacactcagtgagactccataaaaaacacactggttgcgtaggttccaaaagaccaagcacccaagatgatcaatgaattgaggccctgcctgacctccccttcaaccctggaatttgaatcagaccgccaatcatcaaaggaagcgactgtaggatgtgaagaaaagctatgcaaccgcaccccctttcttatcaataggaataagtttatcaagcgtgctcggaagaataataggaagggcatcaacactggaattgttttg

SEQ ID NO: 15115 - DNA, 547 bp, Zea Mays
aaaataattttgttcaccaagtatcatctggtaatcaaaacgtgttcaaaaaaacaataaaaataaaaaaacaagttggttatgttagttgtagggaaatgtatatttaatgagtagaggatatgtagggtaatatttagggggaacggttgcgggacgagtaaatataggggagggaatcttgctgacgtggctgcatagtaagatttagggggaaaaatttagggggaacggctgcggatagcctaagctagctatatgtacgcttctactaattgctttgcttttgcatgattcagcttatcagctacaccaaaaagcaaaccctttcatttattaatcctcctgtcttgacttgggaaacctgcactacaatacaagtgcatgcatgcgtcggcatccctccacctgtttatcacaaagtaaagctggcactagcataaccgtacgtataggtcattgatttagtggtacgtgctaaacagatcgaccgtgacaagattaattgtaggggaacgacgacttgactacgcctaattaaaacttg

SEQ ID NO: 15116 - DNA, 502 bp, Zea Mays
cttggaagcaactcactatttgtaatgaatttatccgttacacaagcacactccttttccgaaacagacagtgcaacctcctgcatgaggtcatgaatcttcaaaaatgtagtagaattgtatccgatcatagtttgctcctcatattggaaaaaggaccttgagaccaactcattgacaatccttttacctatggtttcagcaggttcattttcttgatccgagataaaaccattggccatccatagttggataagtttgtccacatcaatatgataatcctttggatatagagcacaaaaggcaaaacattgcttcatgtcaattggcaagtcattataactaagcttgagtataggcaaaattccagtctcatcattacatatggtgcttcgttgtaacacatcctcccattctccatcagtggtcttgttacgcagtacagaccctattgcttttgctgccaatggagaccccgcacatctctcagtgatcagaccag

SEQ ID NO: 15117 - DNA, 499 bp, Zea Mays
ctgagtgcaacgcactatgcgagcagatagagtgaaagtttgtgtgtgatcgatgaacaacaattgaagctcattgtgagtagcaggtatccggaagaacgtcgtctacgacgcagaatgttggtggagaaaaataatcaacctattgggagcacataggtggagccgtgaagttagtaattgtgcggtgtcatgtcccgcaaccgcgctctgccttcttgccttgtcccacaccgtcttgatggatacgtgaaccagtaccatgctgacacgcgcgtgagcagcaatgggagcaccgtgtcacccatctatccggcgggctgtccgtgataatgagcaccagaaagcctaaatactgcttgcgcacatattctttctttccgttttttggggcagtggagccaaagtgaaagtgaagtcagtactccatgtctctattgtctgcatcaccacccagttcatccacacaaggtcgatgctagtgtcggcaatggcaaac

SEQ ID NO: 15118 - DNA, 851 bp, Zea Mays
gcttctctagtcccaccacccaccctcacaggccggctcactactaggcccagttagccactccaccggacacccacgcgccatgtccaaattttaaccagacaagaagtatagtagtagattgcagaaagcaaatattgggttgagagttcactggtttataaagcttgcaaaatgaagaacaattgggttgatttccggactttgtgtgggatatgaggaagttgatgctactgtttgccacagctaatagtgtgggcttcgtgtagccaagacaaggaaggttctacaccagtgttctgctgctagcctcagaatcctacgtatcgttaaatctgctgtaccagtaactgatgagagttaggcccataatcaatccattccctctgttgagcatgagatacaatacaagctagagagcctgagatagctagcagccacaaaactttctgaccgacaagtttcacggcattaatttggatagatccggtttcttatgttctcctcttccacatagttttttacaaggtaccttcatccgatgctctttctatacttcattctaatggtaaaggattatatgccaagttttttttagagggttcctcaatccaatgctctttcagtggatactagtagatctcgttgctggtgttatcccttttcagtgtaatattcaagtttcaatgccagtgggtgaagaaaggcgactgctttatggcagtgggcgattgaagaagaggactggtttaggccatgtttttttccattctaaattatataatttagattacgctgtaagggttcactttaagatcacaaataatctaaaataagctacccaattctag

SEQ ID NO: 15119 - DNA, 536 bp, Zea Mays
agcgactaagatgtgcttcatctagaatttgctggcggatctcatcattcttaggcacaactatgcggttgttaaaccatacaataccttgatcatctcttctaaagcagttggctttaccgacctctattttctcatgaatgtgtttcatacccacatcacttctttgtgcgtcaattattctttgcaggaggactgactcaagctttaagtgatttgaagttccatgttgaatcattcccaggttcaacttctccatttcttggcataacataatgtcagaagtcttcatcatcagacaatggcaggaagccttgcgacttaacacatctgccactacattagccttgcctcagtgatagtgaatctctagttcataatctttagtcagctcaagccatctcctttgcctcatattcaactctgactaggtaaaaatgtatttcaagcttttatgatctatataaatgtgacagatattcccctgtagataatgacgccatattttcaaggcatgaaccacagcagctaattcc

SEQ ID NO: 15120 - DNA, 418 bp, Zea Mays
tgtccccaaggcgaatgggaagcttcggatgtgcatcgactacaccaacctgaataaggcctatcccaaggacccgtatccactgccacgaatagaccaaatcgtggattctacctccgggcgcgacctattgtcattcttagacgcctactctggtttccatcaaatccagatgtctagggaagataggaaacataccgcttttgtaacagtggacgagctttactgctacgttgttatgccatacggactgaaaaacgccttgcctacatttgtgcgggcgatgagtaagactttcggggacctggttagggacaaggtggaagtctacgtcgatgacatcgtggtcaagactaagagagggacaaccctagtggaagacttaaccctggtcttcgacaagctgcgggcaacccgc

SEQ ID NO: 15121 - DNA, 552 bp, Zea Mays
tgcagccggactagcacaacaagtgcgaaaaatcgaagtctttcgcaaagactatccgtgcaaaagtcgcctaagggtgcagccggactagcacaacgagtgcgaaaaatcgaagtcttttgcgaagactatcagtgcgaaagtcgcctaagggtgcagccggactagcacaacaagtgcgaaaaatcgaagtctttcgcaaagactatccatgcaaaagttgcctaagggtgcagccggactagcacaacgagtgcgaaaaatcgaagtctttcgggaagactatccgtgcaaaagtcgcctaagggtgcagccggactagcacaacaagtgcgaaaaatcgaagtctttcgcgaagactatccgtacaaaagtcacccaagaccgcagccggaccaagcttaacaagtgcgaaaaagactacaccaaactgtccgcgcaaagaccgactacacgcgcaccagaccaacataacaaaatacaccagaccaagtacgtaacgccttcgtgagcatagccgaatgtgcgaaggcacacaacctcatcatacaa

SEQ ID NO: 15122 - DNA, 511 bp, Zea Mays
aaaaaaggttattgacttccaaagaatttttcaagaaaatttaaaatcaaatggccagaatacgctccactactagggttgagcgtgatggagacgaggccgaagccgttgaaactgttccgatttctgaagcaatgagacgctctgggctgattccatcagaggacacacctgctgccgaagcaacgcaagctgatgttgaagaagctggttccgaagatgagtacagctgcgggatgccaagcgaacctagtcatttggactttggaaagtccaccatctctaaagctgatcttccaaaaatggtgaagctgggctactttagtgaagcaaaaaaggagctggttcgtttcagcggagaggaaactattctgaagccggaaaagaatgaggttgtggtgttcaaaagcttctttaaagctggcctaagattccccctgaatgggatgattgctattgtactgaagaagtttgggatttaccttcatcaactgacccccaatgctattgt

SEQ ID NO: 15123 - DNA, 388 bp, Zea Mays
atttgtttgcttttctgctgcctatcaaatcctgatatttgtgtgtttgcaaacttacttggttgtttaattcattgctattgattgtcaggtattgtgcttgtataattacattttcatctggtttctattgcatttgtagcagattagttgtagtcattgtcctgcaagcatatagtccttgggaagtatatgtccagtcgagttttgcgttggctatgcgtgatgtgatttaggtttcctttccttgggactgatcagagcacatgtgctgtggccataaatctgtttcgatagtgtagttgtcaaacttttgtatgtacttatggaccaggggacctgctttgcagcagagatttgttctgtgttttttctgccagtagtcacc

SEQ ID NO: 15124 - DNA, 445 bp, Zea Mays
gttcgatgtttgacaatactaggatgcaaattttggcaatccagtatccggaccataaattgtaagtaacaactggtgttaatcggattgacctctccacattcacattacatgccccaagtgtggtaacatgctgcataactgttgagatcattagcattttagatgttgaattccttgcttgcaaggagtgtcatgaatactgagactgttctcgcacatgctgaatcgtatcacattcctattccactgtctatttcaacccttgtatttttgtttcctggcagtgttgttgtcatagtaatagtgtaaatatctcttgctttgtgtatcagtgtaaatatctcccgctaacaaatcctgaatgcaacacacatttaggccaaaattcttaaactgcttcagaccaaaaatcagccctggggagaaataatcggaggatttg

SEQ ID NO: 15125 - DNA, 420 bp, Zea Mays
ggtgcaattaatttggtgaatttagtggatgttatggatgcgggggtgatttggttgagtggattttgcaaaatttaaagtggtagattatatagtggtatagatgatgatgtgttacatttgggtgcaattaatttggtgaatttagtggatgttatggatgtgggggtgatttggttgagtgggttttgcaaaatttaaagtggtagattatatagaggtatagatgatggcgtgttacatttaggtgcaattaatttggtgaatttagtggatgttatggatgtggggtgatttggctgagtgggttttgcaaaatttaaagtggtagattatatagtggtatggatgatggtgtgttacatttgggtgcaattaatttggtgaatttagtggatgttatggatgtgggggtgattt

SEQ ID NO: 15126 - DNA, 655 bp, Zea Mays
gtcaaggaaggcgaggatggaggagagcaatacccacagccgggactggaactcgacctcccctgctatctatggtattccggtggcggcccaattcgctgcccagtaccctacgcatcctcaccggtgatggcatgcgcaaaagggggtgcggcgaacgggtcacagcggtcagggtcccgattatatggctcgaggggtagcaacaaccaccccggaatccatgggttccattgggaatttccggtcatggagaaaggagttcggcgagcaggcgcacctgccaagttggtcccaccatcagggaagacgacgcacggcgcagactgacgaagtgggtccatttggccggtgaaaccgcgcgcgcaagtttagccagttagctaggatcaacgcggcggcatccttcagtcaacgcgcacccgaaatccacggggaagaagaagaccggatggcgattgggtcccacgtcgcagtgactaaaacaaaagaaaagtgggaagaggctagcttgggccgtgaaagggaattcggtagtgggccggttcaggtgaatttgacccaagacactgattcccccttttttattctttttttttattttcccatttcagctttaaattccaatcttcaatttttttattctaggttttac

SEQ ID NO: 15127 - DNA, 325 bp, Zea Mays
ctcacttcaagagtttggtcacttggtttgaaaacaagagaagggcaagccttggtggcaagcctaagccttttgtggcatcctcatcaatgtggacttaggcaagccttagtggcaagctgaaccacatgataaatccatgtcttgtgtgcttcacttacattcttataagttcatattattgatttaggatttatggtcgatctactagctcactagtgatatacttgatttatctctcgatctatgatctatatacctacagaaaggctacaagtttagctcttctaagttctgctaggtgcatttcgaatttagtttgaat

SEQ ID NO: 15128 - DNA, 812 bp, Zea Mays
agctggtgagggaatttttctgtaatgcacgccgcctacttcggccttatggtgaaatccatgttagtcacaagagaggaaagtggtacgaaaagtggggtcttaagcatctagcagctgagttttctcttgtgttggtcgagaaagttagtttccaaaaggcagactatcccggttatcaccagaagaaaggagctggtccaaattgtgacaaacctttcccgctaggtacctgttccacattcaagttcagaattggaagctcgaagaaacagaatgggagaagggctggaccaatctcatccattggaggcgacacaaggccatgtcgtcctctttcacttgttcagccatggtccgggctacagtttgttccacgagattacatagttcctgtgcccatgactgcgccatctcatgtagttgatcaaaggcagccaggtatgccactaaacttcgttggcatctattctcatcaagggagcactgcccgttcactgctcagcactccagggtcatcgctgacgaatgctttgggcgctccaggccgcattccttcaccaatgggcagaatctcgagcaactgtttgttcgctcgtctggggcaaactctgtatgaaaacagaatcattgctgaatcgctaggaaacactgactacttcgcatgcgaataccaaaggagtctgctgagggagtacaggatgcagagtcaactagtccctgaggcaaccagcttgagctattctgccttcttggaagctcgccaatgggagtctgttcagagacaggagcggctccgcaggaggatcgca

SEQ ID NO: 15129 - DNA, 387 bp, Zea Mays
ttggccacaaggaacatacccatcattaccggctctccttccggtgtagtggccacttgcgtgtaataaattcgcctagtcttcttcacatttttgcccgctgaattatttgccatgttccctttgccttgatttgagctccccgggttctgctgattgttggacttattctgcctcggatatgggcagtctttgataaaatgaccagacttcccacagttgaagcagtcagttgaggaactagggagggcagggaaacgagcaccaggagcactcggctgatttgtagaagtgggggcagtggcagggcgaatgaaaacagactgtttgaatgggtaggagggtggacgaggcgaagaacgattctgattgaaagatcggattacc

SEQ ID NO: 15130 - DNA, 501 bp, Zea Mays
aaactacggcggagcttcaccggcgaaccatgcgccccatgctctagtgctcggtttctcaatcttttaggtgctaaacgatgtgcgaggtgaaaccaatcgacgaggcagggtctaaccgagggtggcggcgcagagaacccccaacacgaccgactacggatccgcggcggcgctaaggttcccgcgagcgattcacgtagctagggcgagcatctacctatgattctcggtgttgtgtaacaaggggtaacgagcgggaggtaggacagtttcttactggcaacggcgcggcacagagctccaattgcggaacaatggcgttagtggcggaatcgcacggcggcggatgagatccacacggaattccgcccagtcctcactgcaacgaacgctcccgcaccgcgcacaacctccacccacgcaaattgaaccgcgaccgagagttccgtggcccgaatcgaagtctcctcgccggtcgacggtggcggcagaatcgtc

SEQ ID NO: 15131 - DNA, 641 bp, Zea Mays
tcatcttcatcaaatatgcagacaatagcttgtgcatgatcacaacccttggcatcaacctcaggaaggacctctgccgacacttcatcacgaaccggagcagaaggacctgcatcctggtccatgcatgacagtcgctgaagccgtttcttcttcttttcctcaacaggtgcagtcgggcggctaactcggcgtggacgcttcgggcgagcaccttcaggcttatgagtctccaccgcttcaccaagttcttgtccagatgtgatagccattggctcggcatgggttgagtcagatgtttccccagccaacaaactaagcacaacatctatctctgcatcgtatgctagctgacatctcaaaatgagtctgcctctcatcatctggaagactccaaagtggggcagtcagagcctcaatgtcctcgggagaaggtcgcactctaagacccaggctaccatcgcgagcaggagggttggacacaaactcagaaaatggcctgattggtggcaggttccaagcagaataagccacaggagcaccagcgttggaaactctgcccctcaagatcatatccattcggctgatcagaacttcagtggggattctcttgtttgtaacccgagtagaatcgttgatgc

SEQ ID NO: 15132 - DNA, 353 bp, Zea Mays
ggaaaaataggaactcgcgctcgtcgccttcctccaggcaaatgccgacgtgttcgcatgggagccgtcgcagatgcctaggatccccagggaggtgatcgagcaccatctaaagatccatcctgacgccaaaccagtgagtcagaagcctcagagatagtccgttgagcggcaggacttcatccgaaaggaggtccggaagctactggacgccgccttcatcgaagaagttcatcacccagtgtggctggccaatctagtcatcgttccaaaggcaaacgagaagcttcggatgtgcattgactacaccagccttaataaagcttgtcccaaggacccgtatccacttccac

SEQ ID NO: 15133 - DNA, 656 bp, Zea Mays
acaaaagtttgggctaatccgatgcactgagacacagaagcccctatttgccgcccaatagttgagaggcccttccagcacctggtgggcaaacttttccgccattcaacctgtgggacatcaggtcatgtgggaagagttcaaattggcatttagggaacattatgttctggaaggagtgctacagatgaagctggaagaattcatacgctgtgatgcaatatctcaaaaaatttaatcacctctcccaatatgtcatcgattaggtggacatagacttgaaaaagaaaaattgcttcatgaggggattaaatgatagactccagcgcaaaatggctacatgtctggaccttacctatagcagggctgtcagcacaacaatgtcagttgaagccaaaaatgcgggacaaggaaagtcaaaaagatatgcgtgtgaaggatcaactccggggcctgaaaagagaacaaggatggtaattcgacctttcaatccaaaccgttcttctcctcgcccacccacatatcccttcagacaacctgtgttcattcgtcccactcctgcccccgcccagaacaatcatcctagtgcccctggtgctcatttcgctacccttcccagttcctcgagtggctgctttaattgtggcaactctggg

SEQ ID NO: 15134 - DNA, 713 bp, Zea Mays
gaggaatcaaacttggaggaaccatcatggttaaggtctcgcttgtcgattcaaaacatagattccacaaataaaaatagcacttatggatctcctaactaatggaaaatagagcacaaaaacaccaaaatgaaagggagagatgactggttggtacaacccttcctccttatttatggagggtactttcacattaccaatatacacctagatgcatagagcttaccactcagccgagggcaaaataaatcaactttctcatgatctaatggcagtgctcccttcaagaagttgcttcgtattgatgcaaccttcacgatagctctatgtgtcggccctaattttcttcgaaactgcattgccggatttcaaggccaaacacgtcaaaccttggttgtgtggttttgaggatcaacgactaaacctccgcaggtagcatactttatacgtgtcctccacatccttgtacaagacacgtgtgtcgtcggtccccaaacacgttagcaacatgatttactctatcatgtcctcgcacttactaatgtcactcggcttatctggtcccttaatcaaatacatcacttgttcttcatcgctcttggttcatcggtatgaacttgcatgcccttcaccttcgtcatcaactattgtctctagacttcgcacctgcgtatcataagccaagagacattttgcacaaactcacatctcgg

SEQ ID NO: 15135 - DNA, 1149 bp, Zea Mays
acttctgaaggatacttctaaagatttgtaaaaatattcatttgggcaaggatgaataattgctaattacttaaatacgtagcacaccatttaaaaacattacaaacatgcaatgaggttgagatgttattattcttttggtttaaaggcgagccagatcctgaactgaaagtatcctgccgtcaaatatctccatttattccccatgattaccaggagagcagccttcctacctctgtttttgtatacactgtaagtcttcaatttctttgtcagagtaaattttatgaaaatacaacattgactatttgactttatgtttcatatagccgtgaatctaaaatctttgttttatatagtcctatgtttctctgcatagcaacttatttttgttcatggagccagtgagagtatccataaccctctttaaccattgaggcatactggcatagtcactttgcaataacaattgtagttagacttgctggtagcgcagtggttgagcacccaaggtgcggagctccccaccagagtttgattcctggtgctgcatggttgtgtgcccattccctggttgaaactctttggtggtgcatggttgtgtgcccacctccctggttgaaacaacgcagatggttccttggccgccaaagaagcgtgcgcacgtgaggttcctgcatgtttcccaggttccgtatgccccttgttaaagtcaaggggatttatctccccttgataatttttttaaatattaatcgtagttatttgcttttttctctcgagtacactggagagttgtgtatcattatattaaaaagaaaggttttagaacccatacaagcccaacacactcacagtttaacaaagaaatacacatgaccttgatctatgaacagcagcctccaagatctagcctgcaattcgagtaagggcaccattcttacttttactgatattttgcagctagtgaatactggaaaggaaagagcaaaagttagcctattgatgacttgggcggtactagctactacttttcctcgagtgtttgcaccaaatttgtattttatgatatattggatctgatcatgttttattcttgatgctatgctagaattctataggaggactttcacatcattctggggatca

SEQ ID NO: 15136 - DNA, 396 bp, Zea Mays
gcagaaatggccgtcatggttgattccctcttcagcaactagtccggcctcggtaacctgtttgggaggaagggatgagctggtgggttgtggtcatggccctgctttgcggagaggagcctcgggttgagggcaatttctcaacggtgcttagatgccaccgtggagctcctacgcaccgtgaacagaagctatcacaacgcaattcaaggtaaggtatttgccctatcgttcatcatactcccttgcgtgttctgcacttgtgttggagcgggtcgtggtgttgggtaatgtggtggtgccttgccgcggttgagtgccgccgtggcaccacgcggtgtcgtagtcaggaatttgatcttgatgttaggatttgtgcggtaggccatgtgattc

SEQ ID NO: 15137 - DNA, 496 bp, Zea Mays
ggagtggacaacagtcgtgctgaccgagggcatttgtcgtctgtgaagaggaatccttgaaatgtactttgatgtgaggtatgctcgatgttgacgccaaagtacctatcatgaaggttgggggacaaactattgactctacagatcggcgatttcctatttgagggcctttgcttgttctttttcctcttggataaggtgttgtatcattgccttgacttcattgctttgtcttttggcttctaggtttcttttgcatctacaggttggaattgtgcatgtcgaggctcctgagcaggagttgttcttccgtgctgatgtctaggtctttactatcttgaagcatgccttcgtccactttagctaggtgggggtctagaagtgtgaatctaggggtacgacaggcatgtttcttgttagatcgggccatattttggcttggtatgggtggctttgcaggttgaaagggatacaatttgggtttttttgagttaca

SEQ ID NO: 15138 - DNA, 555 bp, Zea Mays
cccacattccgcttttctccgcgcacgggccttggcgtctggcgctccagcctcgcgcgggcgcgttccaggtcaccgccaagtgggccggtgaagtcaacctctaaccttcccctccgctcgggtacgctcggtcactggtcggtggacccgcatcgtcaggtcttcccctccgttggcgcatgtaactaaacccgagctcgccggggacagttgggctcggccgggatcttcgctgcggactccgcgactccctgggcggccgtggataaatatcgtgcccgtggactcttctccccgcctacccagcatctcctccacttattgcacgaagccgcaaccacagcgtcaactccgcgctcccccgcctctgacctcacgaccgccacggccacctctgtgccagccatcgcttttcttcgaccagtgggcgcctcgtcggagctcgggtgagcttcgaccagcaccaatttcgcgtattgaatcccgacactgtgcgaacttcttgtcgcgccgccacgcatcgcctcactccgtggacaaagcttctgcccg

SEQ ID NO: 15139 - DNA, 437 bp, Zea Mays
ggcaattattcttgtagtgactggggtctccgcagtgccaacagtcattggctggaggttggttgcttgcaacggagggggcctgaagggaactttgacctagctgactgaaacgtgatggagtgggtccagctggcttgttgaagcttggtcccttgggtggaaacccaaaggatcgaattctctggtgcctgtcttgctgctgggctcggaggacttggaacttcctcttgaggtgacccttttcttcttccctagccctttccacttgtatggccttgtttgagaggtgcgagaagctgaggaagtcttcgctggcgaggatagtcttgagttctggtcttagccctttcaagaaacgggccatcttcttggcttccgtgctaacatcgtcaggcgcatagcgtgccaattctgtgaatttgtggacgtattca

SEQ ID NO: 15140 - DNA, 706 bp, Zea Mays
ggcacatgcgggggagagctcccttaccggggattgaggcagcgaccagtccggccacgtagcctggcggacccgcggcgagcagctccgccgatgaggaattccgtgcggtttggtaggtaatctgtcctggcagagactcggtccagaacagcggagcttggtgaagcccatagatccaaaaccgaggcattgaggagtcgccacagccacacacatatcgagctcggcaaccgagcaacaatggcggcagcgaagtctcacctggttcgtgacgagggatgagaggagggatgcggcacggttttataacctaggcgaaagggagccgagcccgggtaggtagtattccacgaatttcggcttcgatttcggtaggcgcatgcgcgagctcggaatccccggacagcactgccgttctattgaggaagaagtcctcccttggagagtgggacccagccgtaagcgaaatccgagagaaggggaaaaaaagaaaagggagggaagtgggctgccagggagaggaaagagtgaagatgggccaccgttgaggactttggacccgagagccagggagttcttctttttttctgttttcttttccatccttttcttttctattcccatctattttcgaattctaattttttttagactcaaacttgtttcacatatttgaatacaactacaagaatttcattatgag

SEQ ID NO: 15141 - DNA, 803 bp, Zea Mays
tagaggtcgcccctagatgagtaaatgtgtgtgtgtgccgagtgtgctgcactagtttaagttagtattaactctgaccgactgtggccgccccgagttaggcaagtgcaagtattgggtaccgtcttaggtcgttgccgacttaagccgatcgctccattggcagggcatagtggtcaccccgagttaagtaggcgcgagcatgttgcaccgtcttaagtcgttgccgacttaagccgatttctctgttagcagggcatagtggtcaccccgagttaagtgagcgcgagcatgttgcaccgtcttaagtcgttgccgacttaagccgattgctccgttagcagggcatagtggtcaccccgagttaagtaagcacgagcatgttgcaccatcttaagtcgttgccgacttaagccgattgctccgtttagcagggcatagtggtcgccctgagttaagtaagcgcgagcatgttgcaccgtcttaagtcgttgccgacttaagccgattgctccgtttgcagggcatagtggtcaccccgagttaagtgagcgcgagcatgttgcaccgtcttaagttgttgccgacttaagccgattgctccgttagcagggcatagtggtcaccccgagttaagtaagcgcgagcatgttgcaccgtcttaagtcgttgccgacttaagccgattgctccgtttagcagggcatagtggtcaccccgagttaagtaagaatgcaggtcgatcatgaacaaactgagtattcttgaagcctttttattgatgatatatttcccattttaca

SEQ ID NO: 15142 - DNA, 469 bp, Zea Mays
tgtgcgcaaaggacgacgaaacgaactactaggatgtgaaactcaccgaagaagatgacgcacttgggctgtccacggcacaccgatttttccacggaggagcactacgccggtgagaaattcacgacggacccgatccaatcttggttcgagaaggccacggacaggtgcggttgactccggcgatgccacacaaccgcaattcggcgacagagctcaagcgcagcagagattctaccaacgacggccgctcggtggtactcactttcgctcagcatcgctcccgacctcacgctacggtggtagacgagctcggggtcgtggcaccgctttatagccaggggagcgctgattagggagaatctgctgcgtccagcagggacgatcacggcggagaaaacggagcccgattcgcgcgcttggttcaacggacttcaatttgttggtaggagatcgagctgacaggcgg

SEQ ID NO: 15143 - DNA, 336 bp, Zea Mays
gtagctgctcttcaggtaccctgagacatttcttcaactgtgatacatgaaaaacatcatgtacatccgcaagatgatccggtaactccaattggtatgccacctctcccactcgctttaagattaagaagggtccaataaagcgagggggacaactttcctttgactttgaatcttctcataccccggagtggtgaaaccttgaggtacacacgatttccttcctcaaattccagtggtcttcttctattatcagcgtagctctcttgcctggtctgagctaccctcaagttttccgtgattatacagacttgttcttctgcctcttgaataagt

SEQ ID NO: 15144 - DNA, 417 bp, Zea Mays
caggaatgctccaagtcttcgccgtttggcgttgcgagcctgtatgcgctgggggatgccttcgtcttgacaatgaaagggccctcccacttgggctccagcttgcccctggactctgtccgagctgttcggacgagtacgaggtccccttcgttgaattccctcgggatgactgcgtggtcgcaccatgcttttgtttttgcttggtatttatttagagcctgtagggcgaagacgcggtctccatcgatgagatccttcgaagtgggttcgtccacgtcggggacagctgacgagactgtccgtggggacccatgttttatttcctgcggggtcatggcctccgatccatatagaaggcagaaaggggtgaacccagtcgccctgcactcagtcgtgtttagcgcccagaccgct

SEQ ID NO: 15145 - DNA, 413 bp, Zea Mays
gcacacccccgaatgttaactggcccaatacaaagaggagaagcgggtgaactcgataggaatttacctaccggtgctaagggcatgagaggtgtcgctccacggcaaagggcggatccgcggcaacccgcgacttcggcgagaaattcccagtgcaacgcatgctaatcgagtccggcgaggccacgagcaccatcctggtgacgagttgaagctcctagacccgatgtcgggaccccgaagctagtgtacgtacgtgtcccccgtggcggcttcccttctctatccttctcccctccacctccgacgaggtgctcccgggatgagactggctcctgttcttgtaagcgaggcgcggtgatactttaccccgaagtccgagttcaaaccacccacgagattctcggcattgg

SEQ ID NO: 15146 - DNA, 639 bp, Zea Mays
tgcggagctatagggcggcgataattgttcaccggagcatttgggacaccgcggattcgtctgccgccgtggcctgagctctacaccgcgagcgcactagtaagaatcccctccttatgctcgcttggttctcctacttgtgtacgcgtctcggattgggatatggggcaccagggggcgagctgtgggtactccggcgggcgctccgccgtggtgtttggtcgccgctacgacggaccaggttgaagacgacgaccagggccgttgatgtaggggtgggcagtctggatcgaactgtggctcggtttggctagggctgtgctcgaccgatgatctacataccagcggttcatatcaaatggggatatcggttaagaggaataagttggggagcgtccgatcggaatcggacgatcggtgcttgcactagattcattaaattgtgagcgtagatctcggatctgagggcctggaacggataccgttttgttttgaataggcttctaatcttagccgctaggcgtggatccaacggtccaaaccccaccgtaccccttcgcgataacgttttacaaaacagaccttatgattttagaaaataggacccgccgtcccatattactgttcactgtgtctggg

SEQ ID NO: 15147 - DNA, 782 bp, Zea Mays
ctctcgaaagcaacccactgtatctcgctcaagcatggaggccgagtacaaggcagtggccaatgctaccgctgaaatcatatggatccaagtgttgcttcgcgagctagggatttcgcaacatcgacctccaagcttatggtgtgacaacattggcgctccgtatctatcggcaaacccgatttttcatcgtcgcactaaacatgtcgaagtggattatcactttgttcgggagcgtgtggcatctcgataattggaggttcgttttatctcatccaaggatcaaatcgccgacatcatgactaagccactaccggttactccattctgccatcttcagcgcaatctgaacttagttgcacgtcgtctagattgaggggggggtgtgttaatcatagaaggcaatatctattcatagaatgacagggctatacttagaaacgcatcatctgtatttttggagctgtgtctccttccttccctgcgtgccatgagccgcatgtaacttgccatgtattcatcctgtataaatatgagaggacctacaccatagagagtaggcagcgccattcatcttaacattgtgcacccactccaccgcattttgccatgccattgcattgttcctctactgcactaccacacaccatctctgcatcgcctccacgctcgatgctcctatgcctagccaccatatcctacccacattgcatatacacatcctagcttcttcatgttgtcttagtgccatttcctccattgcataccctaggtgattctgg

SEQ ID NO: 15148 - DNA, 447 bp, Zea Mays
cggacctgtagcgcgctggccacggcgagctcactcagtacggtgttctagactgatttggggaagtctcaaattgggacgcgctggtggacgatctggggcacgggttggtgtattgggtgagtgactacctagcggagccgatggcatgctcaatttataagacccaagggcggtggcccgtgaatttgagatggcgcggtggcggccggagagaggggagagcactggcacaaggaattggtggctttcaccatggtgaggtcaccggtgaccaacggagatgtgtaatacgagttactccgatgtggtagagcacctaggcacgtggcgcgctgtcgataggcggccaactccgacgagcttatctgaactgaccgtgagtcaggcggacacggcggccggggctgaacagtggcctaagttcatcctcaatgcgatatttcc

SEQ ID NO: 15149 - DNA, 590 bp, Zea Mays
tcaaattcagcttgtctatatgctcttgcagcaggatacattcctctgtaactatttccatggaatcttttgatgaaattttgcatcagctgtctgaaacattctctcttatcagcttgtgggaaaactagttccacaacagtcatcaaacccttgccggcatcaatacaaatatctagtttctccatattccctatggcccttcgaagctgtcataaaccaaacccaattatccttgctctcagaatccatgaacccaaacgcaaccgggtacatccaattgtgtccatctaacgctgttgcagctgctaggtgaccattccatctaccattgagtgcagttgaatccacacttaggtaaggcctacacgcagcacgaaacccttccgtacaaggctcaagtgcacagaaaaatctatggaagtacaccttttcatctacaacttgggtgtctatctccaccacactattaggggcttttatcaaaatttcttccttccacctatacaacatactgaaactatcatcccaattgccatacatctcttttaaagcttcctgcattcctttccaagtcacatcataactga

SEQ ID NO: 15150 - DNA, 410 bp, Zea Mays
ccggagtgtaataccctacatccactatgagttgtattgcatgagagcttgagtgtcttgggtctggatgtgaatcgacctctccattgcatcgctagtgccctccctttcattgttcaaggggagcatgttacaagggagctgggcccccaacaagtggccaggattactcttagacaaagcgtccagtgtcaggtaagagctggaagcactatatcttctgggcgtgtacctcctcttggtcatcgtgttggcttctagcatcctatcctcatgtcccatttaatcggaacgcagacgtagcccttggtgtaggttgcgacatagcacattgcagactggacgcaccgtgggcatttaatgtgagggatacgccacctgccccagacatgggctagcatgcatccctc

SEQ ID NO: 15151 - DNA, 911 bp, Zea Mays
agaaaagcgtgctctacagggtccgacgaggaggaagggacgtcgcggcggattccggtgaaattagggggccacatcggggctatacggccgaaaaggactaccaattcaccgtgcactaccaatttcgggaaagaaggaggagacactgccaattttggcttcaatcgagatcactgaagaaatgtgagtgcctcgccgtggttcatggcgctatttatagggacggcaacccagctaacgacgcagccacgaaatgcatcgttagagcatggctaccacgtaaggaagaggcacagtgaggtaaggtggtggcacgagtgacacggcaacaaaataccgcgccacggcgagcaccggcgaaaaatctccagctaggctcgtgggaccgtgaatcagcccgcagttatcttgccgcggtcgttcctatctccacttcacccgcacacatccgaaaacacagtaaccagagatgttttccttctgcagatatttctggttctctgatcttcattgttctgctgaaccgacctcctttcaccccctctttctcttgattcttgttaagaacagggtaatctccattaataaaaagtgttcaccagacaacacccttcaaatttgctataggattcatggatcaaaactgcatagatttttggatctggtgctctgaaatcgactgcatctcactaagaccatggtgttctgaatctggctttcagtattgcccagttcgcatggcttgtttctgacagaacaacttcacaccactagtcctttgatttttgtacatcaacatagtaagtcgactgtaccaaagttactcccctacaaaccagctttaatcttgttacaaaggttttagtcaaatacccttcaaattgagctccacatggtcccaaagtcgg

SEQ ID NO: 15152 - DNA, 610 bp, Zea Mays
ctcccccttccacttcaagtacttgtccatggattctagactctggtgcttcatattatatgactccttattgcacctatttttttgttgaccttcatcttgttctctcactatccatactgttgacggatctcccctttctgttgttggccagggtacccttctgtccgactcttttcatgtttctgatgtttcatttgttcttgatctaaacatgtagctcatgtttggtggccaaattcctgatcatgactgtcatatgttattcttgatcttaacttttgttatgttcaggattgacgcatgggtcacctagttggtggccttcgttgtcgtgactttcaacgcctatgggagtttgagtggcttcgtcttccttccgccaaagttatcaaggcgtcgccttagcatcgcctaagcgctaaggcgaggctcaggcccaaggcatcctggtcgccttactttcttggctaaggcgtcgccctagcgcctcataggaagacaaggtgtcgccccatagacgccttggaccggattgtagattttctatccccaaacccttttgttcgctgtccacgtaccagagaagggtgcagttagggcttcaggt

SEQ ID NO: 15153 - DNA, 401 bp, Zea Mays
cgaggagtcaaacgacactcgctcgctggctagtggaccgcttcatgcgtttcccatcatccccttgcaaaatcgcatttaaccacatccatttttgataatgcactcaagtaaggtgtttttggaccttcggtgcaaggcccccttcgttacaacttatttgtggtttgagcctattatagaaaacaaactaatccatgaggggatactattggggtgtgccattggtgaaggtcctcaaactaatgaaatgtagttgtttctaatgttgttttaggattaacaatttgagcttcatctgggaaactttcgtgatccaaaggaggaagcagcaacttagtcatcaggactagtttattccaaaaggactaaatctggccttcggtgagatggagatgaag

SEQ ID NO: 15154 - DNA, 305 bp, Zea Mays
atggcgcaacagatcgccatgattgagcaaggcaactgagaaactcaccgtctaatggatgtgatccaaacctccatggaaactatggagatgaccgtgaagggagtgatgaaggagcacgatgatctgctgaagtggtggttgaaggtggaaacaagggttcagaagatgaccgaggcgatgaagaccctgcagtcaacaatcgatcggttgccgctgaagcaaaaggtggaagaacctttgatcgagtttaaggatgcatcgactttcgcccacgtagaagtttcgcccatgtagaagtgtcg

SEQ ID NO: 15155 - DNA, 540 bp, Zea Mays
gtggaatttatctacccccaatccattcgaccagagggtacttagacaacaacaacaagcagagatgaatcctccaaatcctccaccagccagaactgatccagcagttgcagcccagatgtggataatgcaatagatggctgatattgtggcagatatgcatgcgcagatgcgataggagcatcaggagatgcgccaagagagagaggaggtgcgtcaggagaggatggggcgatagcagcaagtcccattgccaccacctccaccaccacttccaccccgggacaagcaccgagaatttatgagccacaagccacctaccttcgccagctcaccagatcctctacacgccgacgactggttgaagtcagtggataaaatgctaaacatttctcaatgctccgactgggggaaggttctctatgcttctagtcgtctgactggtcatgctgctgattggtgggatttctatgttgctgcccatgatgctgctgacactattacttgggcggaattcaccacacagttcagaaactacca

SEQ ID NO: 15156 - DNA, 361 bp, Zea Mays
gaacatgtttatgtagattacagcacaaagattgataaaaggccaaagcccatcaacgtacaatatgcatgcctgtttaagctcgattacttggcttctcatggacgcttgagctgcaatcctctttgccttctcgtggaagcctccgctcacgttgtccaggctacaacaattgtccggcaccagcagtagcagctagcagcgacagacaggagggatcaccttgtctgctgctctgtcatctgcccagacctggcttgacgcgcgccgtgcctcgcggtagcgacagggtagcgcgccctgcctcggcccttcgtaacttcgtcaggtttgctactctacttccgttgatcaattttcg

SEQ ID NO: 15157 - DNA, 669 bp, Zea Mays
agctgccacaatgcaagaatggaagcctaccacgaagaagttcggtgcctggaagataagtcctttggcttagaacttaatcacatcgtgcgacggtacaacgaggttgttgatgaactgacaaagatatcctcaggacggatcatggttaccccgaatatattctccagggatatctacagaccctcggtagtacccaagaaggtgtccgaaccaacccccaacgacgacacgcccccagctggtggacccgaagccatgcagatcgacagggaacagggcaggactgtcctagactggcagacattgtacctatagttcctccaatggggagaactccctctctgcaaggccaaggccagacgcctggctcggtgggcgaagacattcatgctacttggagacgaaaaggagttgtaccgatgcagtgactcgagaattctccattggtgcatacccatcgatcaagggcaagaactggtaggtgaaatccactcggggggcttgcgggcaccacacggcgccccaaaccctcgttggaaatgccttctagcaagggttttactggccaattgcggtcgccgacgccactagaattgtgcgatcatgccgaggatgccagttctacgcaaggcaaacacacgtgccagcccaggccctgcagatgat

SEQ ID NO: 15158 - DNA, 494 bp, Zea Mays
gcatagtggtcaccccgagttaagtaagaatgcaggtcgatcatgaacaaactgagtattcttgaagcctttttattgatgatatatttcccagtttacagagtacattgtcgtcccgatagcttttgaaatacagctaggggtaaaacttcctgaggtgttctatattccatgagttcctgatttccgtgccgtccatctgagtgagacgatatgatcccgaccgagtgacttctgctactatgaatggtcctttccataggggtgacaacttgtgccgtccctcccccgttagaattcggcggaggatgagatctcccactgcaaaggatcgacgtcgcatggtcttgtcgtgatagcgtctcagagtttgctggtaccgtgctgattgaattaccgtgttcagtcgttcttattcgagtacatcaacatcctccagcctagtagcctcggcttctgctatgctttcaaagaccaaccttggcgccccaaac

SEQ ID NO: 15159 - DNA, 609 bp, Zea Mays
gggaaatggtcactagagctgctttatactctgagccatacaatcggaaatgtgcctgttttttcacaaaagctgttcaattgctcagatcaatgtctgtccagctgattagtgtttattttgctgtttggcattaattcttactgcctattttggcaccaactgctgatggtctcaattgattgatgtgggttgcatgtaattgtgccaagttgttttgttgacaatttgtcatagcattctgtttgtgaaagtgaaacaatgatttattacatgcaaaatttccattctcttatgctgtgctatggagatgttgtgttgcatattcattgtctggaggcatcatgcatatttgcattttctgactggaggtcaaatttcacacatccagtcagcagccaaaatttacacaaaaaccttgtgcaatatgaaaatatctagtaggttttgctgctgattgtttgctggattgtgggcacgcagtgaacacgcacagtattgtttttcacatcctgagctacggaaatgattttttggtgtcatccagctaattgatttgattggtatcctatcctttgggtctgcaaacgtctatgctttaaatgtgct

SEQ ID NO: 15160 - DNA, 385 bp, Zea Mays
gtccaaagacgcattgccaatgataggaacttgcaagaggctcttgtggacaagagatggatttctgatatccgaggtgttctaactgttggagtcatcgccgagttccttactctttgggatgctttatgattggtggagctgcagccgaagatagaagataatcacattttcaggttggtgaacaatggtaaatactcagccaaggcaacatatgagagcttgtttatgggattaacatagtttgagccttgtgagagaatttgacagtcttgggttcctccgaaatgatttttttttcttgtggctcttagaagatgctggacaacagattggctgcaaaagcgggggcttcaacaccctgatcgttgccctctttgtgatt

SEQ ID NO: 15161 - DNA, 569 bp, Zea Mays
acgggaactcccagcctcatgatcatgggagcgtggaggcacaggaggcggaggcggaatcccaaaatcatcatcatcatcactatcatcatcaggaattgttgtgccttgagtctcaaactaatggaaagtcgtatcctctgcctgagtgtcgatcacgggatcaggtaccggcactgggttctcaggggctggatggtaggagccaaagtggaggcgtgaggcctcaagagtgccctggaactgcggtggctggatcagatgtgcgaagatgtagcagaggtaatgtgcatatggcagctgtcgccgggcacgaagaccatccaataccgtgtcctcgatctcacatataaggaagtcaacaacatcaaactctgaatgagagatcagggcaccgagtagccagagctggatatgagaggtagcctctctataacccatctggggcagaagcgtccgtctcatgagctgatataagtacttggccgctggagtgaaatctaccggtgagcgtcgcgacccatctatgaaaggcggttggaacagggccgcgacatgagctgtagctg

SEQ ID NO: 15162 - DNA, 305 bp, Zea Mays
gcgaagtgcatgccagctaacgaatcgaaaccctgtttctggttaataagtcatgcaacggacaaactcgatcgatcgatcgttcacttcctctgaatgtttcaataacaaactgcatccaggcaaaaccgatccagccatataggatggtttttgttaactagtaggagtactacgtactagatcgaacctatatatgtcggcacgggaatcctgtccctcgctgcgtgtagacatgcaaaatcaaaggggaattttgtcattattattaatgtccatattgatcgtacctaggcgcctaatgc

SEQ ID NO: 15163 - DNA, 544 bp, Zea Mays
tgggaggggaggtcttaccgccactgacgaactggacgacgaccggatgcagggcacagcgaggcgcagtattccagcgtgcttcactctctctcttcgcggttgcaactgaccaccgttcgactggccgacggtgaccgctctgcgagctgctccacctgtggtgatcacccgctggacccaccgtgctcgtccatggcccgcaccaggaaataacgccgcgcccggactcctcctcgacctccccgaatcgaatgcaggcagaagaccacggcagtgcgcgtccacggtctctctcctctctctttctcaactctctgtggatgcgttagtcgccgcaacgtagagtggcttgcgggtagaggattaggcatgatgaccccgcctttatccaggaagtccagctctctcgaggatcccacagtagtggttgagatccgatgtccacggagtccacgacgtccgccatgcgcgcagggtgaagggaggcagccactcctcggtgggccacgcccgtcagcgacgctagaagatgggtcatcgc

SEQ ID NO: 15164 - DNA, 784 bp, Zea Mays
gcgtgagagagaagagtgtggcgaggtaggggagagggtggcgctcgccgctgcgggaggtaggggtacactgtagccgctataggatgcacagtaatagggtaggggaggtgtagggtgaagcgttgcggacagtctaactacaacgtgcacgatgcaggcagcgggccacacagtggtggccacaacgcccaggcttgcccaagtgcctgccctaccaaattaagatagctggggcccctggcaggtgggggccctgatcctgattggccagatccgcacctgtcagctactccagccaggcggcagcctacttctttttttttcaacggtagtaaaggcattaaggcactcgctgctggggggccgttgttggttgccatgccacttcgccagccgtgagatgtttggaagtccagtcgggcgatgttcgtttccaattaaaatcctaagttttgtttgaaatgttgtagccgataatttataaagacaaaagtaacgtaaaatagtagaaaccggtatagcctgccgactccggtgtcgtatttacgtacttaggcgggcgcaggcatggatgaagggaggcagcgctgcaacatgcatgggcatgggtactcccctgcccctggaacaggggtctcctcaggctcagcgcgacgtgaaaggaccggcatctggtacagtaactacgcgtactacgcgagagtgtagctgtgggcccggctcgtcgtcgtcgggcatgcgtatgcacagtagcttctcacgtgccattgccgtcccgtcc

SEQ ID NO: 15165 - DNA, 384 bp, Zea Mays
tgccgggcaagcataaccgaccgaggcaaccttagaacaggctccaatttgactaatccggaccaggatgtgcttgaccacggtgatggcggacaccgagcatcgatcaagatgttctagttgcatacgtaaggtcaagctccctgggttgcagggataacaatcacgagcacgtgagggtgctaaaacacgagcaacaagagcgagggcggacctgggagcagctaaccacgaggaggcggttcacggcggcgtagtcgaccgaattgggggaagaaagaaattctccggctatagtgactaattgaagctgggactgggtgctttggcttcgtgataacatggcgcaacagaaccggccatcaatttataggattgctaagc

SEQ ID NO: 15166 - DNA, 1258 bp, Zea Mays
gagtactttccgtctgaagcaacactgaatatgtgtttgtcattccccttcgagcaaatctatctgttgtccaacatttattatgggatgctagccagatgaaaattttgcatctcttaggtgcccatgtctcccaaattctctcgaccgattcaaaatcaatggaaccagtgatgaagcgatcatatgctgacttggaagaatactcacctgtggctgttggcagccagcagagttgatctgaaactccaggttgcaactgaacttcctgagttaaatcccatatcaagaagcccataagaacatcagccgacagactgccagttaagtccgatacccacctattatttagcaatcaatgtgtgatcttctgatttttcctggggatgcagctcaggagtgctggagcaagttcacccgctgatttcccatgtatccatcgatcatcccggagcaaagtattttggctattgcccacaatagagcagacagagactgagaatagggttgctgcatttggatgtacatgtatgtcaaattctgaccaaggccgatctggttggggttttttaagccataacaacctcatattcaaagaccagcccaaaacctccaaattaaggattctcaggctcacatttttataggtttacataccttggcccatcctacattacaatggcctcctctaacatttgtcctttccttccataaaaccccctgcgaattttgtctattgctttgattacccgtttggggcaatggagggcaatcaaatgataaattggggttgttgtgaggaccgacttaaccaaggtagctcttcctgcaggattaataatagcaaccttcaatccaggtagtttgtcagcaattttatcaataagctcagtgaaggaggacctaggtaatttcttaactgacagaggcaaacccaaatacttacaggacaaagtcataaccttgcaaggaaaagtgttccttgtctccacaagctatggatcatcacattgaacaggagtcatactgcacttgttcaagtttgttaacaatcctgaagtttccccaaaaattattaggatttctttcaccacagacacttcctcacctcttggctgtaggaatagaactacatcatctgcataccgggataccctttgcccatttccatttctcaatagttgctgcagcagtcccatttcactagcctgtgtgagtttagaaaacttgggccccctccaaatgtcacttcttcctt

SEQ ID NO: 15167 - DNA, 599 bp, Zea Mays
tgatgaagttagtgccttggttgcttcgcttggggagattcctgatgatgaacggtaggtccattttgaggtgccgctgaaccctagtgatgcagagataagcgctatgcttgatttgctggctgaggattcttccgatgctgctcctgctggggcgttggtagtggcgcccctcccagaggctgatacgactttggatactcagaagcctgtcagtactcgcccgaggcgcccttgctgagccaatcagcctgatccttctgctgatgagcagaagaagaaaagaagacgcctccggcgagtatccagtttggatcgggacgctggtacctcaattcctgctactgaagaagtgcctgcgtctggattagctgatgctgaccccaatgggtgtacccaatccactgctgatcccaatgtgggtgctccatctgttgctgatcccaatgggtgtgctgcttgtgttgccaatgtggatgacgaggaggaagaaaatgaaattcctttgactcggaaaaacagtcggcagttcatcgtcagtggtgaaagtagtggagttccctctcctgctttgtctgtcctcattggtctgcaagaac

SEQ ID NO: 15168 - DNA, 302 bp, Zea Mays
ttggctatgctgtgctggtgtgattatggtcggtcttagcgcggtcggtttgatgctgtcgtttttgcttttgttgtagtagttcggctgcgcccttaggcggcttctgcgcggagtctttgcgatagacttcgggttttctcgcacttgttgtgctggtccggctgcacccttaggcgacttctgcgcggatagtgttcgcgatagacatcggattttttcgcacttgttgtgcttagtccggctgcacccttaggcgacttctgcgccgacagtcttcgcgatagacatcggattttttc

SEQ ID NO: 15169 - DNA, 859 bp, Zea Mays
caaagggctcctagctcgattgtgtgggtcggcaagcatcgcagacgcataagaatgcttaaacaagggagcagaggggaagagctaacctgagttgggctgaccacggcggggttgagttcacggtgttttagaaccggattagggagaatccgaaattcgtgcttgctagtgagggatttgggatgcaggtgggtgcagtaggtgcttgggtacatggcggagctaggggcacggtcaatttatagagcccgcgagcggtggccgtggatttggacgacggcgcgcggcagtcggaggtagaagaaggtactggcgcaagcgctaggtggcttctaccgtggcggtcattccggcgatcaacggagaggctagagggagtcatggcgatgcggtggcgtggttaggacacgcggcataaggccagaagagggcagtgcaccggcgaggttatctggttccaccacggtgaactttgtacggtggccgggatactttaatcgccgggcttatccacggcggtgtgctccgagcgtttatcacgacatccagagcacgaactgagacagcggcggcgcgaatcttagcgcagggagggtcaccggtggcgagcaagctacgctagcgttctaatccactcgggttactgtaccatggaatgctccatcagtgcttctaacaggggaatttacagagccaataactttcaattttgtgcagtaacatgatcgacaccctttaacaaagttatagtcctaagatccagctacaatattgttatagcaatcctaggcaaatacttgctcgatcatgcattaattcatgcccaaagtgcttgcagttgcactgcttgtctgaa

SEQ ID NO: 15170 - DNA, 397 bp, Zea Mays
gcctacctagattcacaaagtttctattccaaattgttgtcactgcatttagcacatcctctttgattgtgttccaacactctttgtagaatctcccagtgaatccctcaggccttggggccttatcagatggaaggcttctgatggtatccaaaacttcttgttctaaactaggaagctccaactcagaaagatcatgggctggcagcccaagagcctctagatcaatagttctttctctagaatcaaacttcccaatgaggttggagtagaactggtctaccaaagcagctttcttaggttggttagtatatatgatcattccatcactcaaccttgtcaccaaattcttttgagatatctggcatgaatgtgaaaaaattagtatttgcatccc

SEQ ID NO: 15171 - DNA, 584 bp, Zea Mays
taatgcaatgagtagattaaccccttttccccaaaaaatacactgcatatgtgtttaccaaaaatcttgcttcccagctgcttccaataactttgggaaacaaagaaagttaaaagtattaaccttaaccatttcatagaatgactcggtttgattctgcatgttctctgtaataattttatgagagaacagaaagattcactattcatagtgtgaaagtgaaacacctaacctgtaatgcttgtaccagagaactgtactatacaattaatgtatttcaacaattatgggagggggcacaaacttggctgatgatgcctatttgttcagaagaagaaaaactaccaggaacaaagctattagtaatctttctgttgaacctttcttgtgttccatttacattccagcaaatgaaaagaaaaatccctaaaatgtttatcaatgtgtagtttccttgaagtgatacatcttatcaaaacttaaaaaaaaactaatcatcttgctgcacattggatagtcctagcaacacaaggagtactatctgggtattacataactgtaacacccaagtaaagatcttgttt

SEQ ID NO: 15172 - DNA, 1040 bp, Zea Mays
agaaatttgtctagggtcaatacatcaaaattatagagctactaaaggagtataactttggttaagtcatcaggcataagtgatgtacaaaagatggagttaaatggactccaaatactgctttcagtcacccctatagcctgaattcttactgacagtgagagttgatcaactttggactcgattcaagctcaaaggagtgggaaaatgagtcaggtctctatagtcgatttgtagctggattataggactacaactttgatgtagagagttggtcaggtcactacataaaatctgaagcaaatcacgctgcaaaaatgctcggtcagaacgactgaaggtggtggccatggtacaataccaaaaaaatcttcagatgcatcacccctcgccgccggtgaaccgtgcgccaggattcgcgtccgccgccacgattcacgcctcgaatggatggattgtgctcgaaggtaaaaagatctcgtcacggatgagtttggggcactatggccaccctgttgctatgcccacttgcccagcgacgtggtcgtgcgatcatcgccggggctgtcgccattgtctctagttacgccacgccttaggccatttaccacgtcgtcgcgcgccgtagtgactgcccggtaaccgccgtagcttcgcaaccagtgatcgccacggtagatcaccgcggtgactcatatcttcttcccggccgccagcgcaatctcttcgaattggacaccaccgctcatggactctataaattgagcatgccatgagctccatagggtaatcacacatccaaagcaccaactctcgtctccgatcatccactagagcctccaaattgcccatttcccccaaatcggtcaagaactccgccgtggagcctctccccatggccagccctcctcaggttggttcatgcctctctattacatgttctagcatctcttaggtcccctgttgcttgtagacttggtggattgaattagaccacactaaatttcccggagcaccgtagtttcttctcggttttcgcc

SEQ ID NO: 15173 - DNA, 416 bp, Zea Mays
cggcgggctaagacaacgaggcgcgggacgggcgagcgcaacagacgagctcgggcgctcgcgacaggcagcacggttggaccattggcccttccatccttcccctcccccttccactttgcagacattccccaagcccactcttcgtcaggtccacgtcgtcttgcttctccgccacccgacgctctcctgcttcacgcctccataggcgccactgcccactggcctctttgcttgcctctgcggccactgctcgactctgcggctatttacccaccgcctttttgtttctagaccaaggcctggtcaaggaatcgtagcagatcgagggagggagggccaacggcggcaggtatgattcacccatggtggcacagctcctcatggtgaaggttgggtcgttgcgggatctggcg

SEQ ID NO: 15174 - DNA, 446 bp, Zea Mays
tacgaagatagggtctctggcttgctgacttattcccgtgccacacgtactccttttccagcatttttttgaattcgagatcacggcaagcgaggctcgcgatcacacgctaaaacaaatagacgtgtataatgtcgtggccctattattctatcagtagagaatcttgtcagggagctgctcgcctcgcctcgcctgctcctaatccatatggtaaaccacgcacaaatcttctgttgttacgctgagctcagcaataaacatctattcattcgtacgtagcctagccttaagcagccgggtggaagtcaacttgcggttgcggacaaggcggcttgggcagggagcggttgacgacgtcaagccgcctcccaccctctatctaacgcccatattaatcagcgccatgtaaacttgcattggtgacaggtcaccccgtccctcgc

SEQ ID NO: 15175 - DNA, 331 bp, Zea Mays
ggttggtgtgtttctgttgtggtgaagcgcatcatcgtgctgagtgtcagtggagtggcaggtgctctatctgcaactaggatcacaaggatgtggtgtgtaggaggaatccaaatgggaaacttaaatgggagccagtgacttcttcctcttcgcagggcactatcaacatgatggcaaccactgagcaacaattttctataccgccccctcagtagcagttttatatgcccgggactcctcagtacttgcctatgccaggttttcctcagtacttggccgcgcctactcctgcaccgaccgctcctttaccacctcagtttggagctcc

SEQ ID NO: 15176 - DNA, 709 bp, Zea Mays
tgggcaatctttggactggaattcaaccatgatctagtgagtgtttggctatagttgctatagcaagattgtagctggatcatcaggcaacaactttgttactggtggattagtaagttgccacatggaaaattgagatccaggccctgcaaattaggctgtcaggcgcactgaatagagaccccattgtacagtgactgaacaagatcctaaattcatcccccttcgccgccggtgatctgccattgcaattcgcgctcgcctgaaagattcgtgccacgagaagtatggataacatcaggtgtggtgagaatatccagcgcggggtgaatctggtcgctagccggaccagtcgccgtgtcttgccgtggttagtcacgctggcatcacgggagttcgccgttatccggccaggctacgtgcctcaacgttttaccacgtcgcagtgagtcaacgtaagacactctctgctactggttcgtcgtcggtgaggtcgccacggttgatgccaccgagctctcgtgacagtgctctcttcactcttcgaccgccaccgcgccaacccaaattcatgagccaccgccccaagtcctataaatagagcacaccgtcaggttcgtagggtagtcacgcatctagccaccaagccatgccttcaattgttcaccagagctcaccaattccagatttcccccaaacctgctttccg

SEQ ID NO: 15177 - DNA, 589 bp, Zea Mays
tttaagtttcactagtgtacatgggttatagatgaactatgggtggtggagggtgagttcttctactgatctagtggtggcatggttattatgagaaggttgattagctatgaggtggtgatgggatgtgatgagatgagatgctttcataggggtacccctcgaccttatatagatgactagagggctatccctttacaagtcatgatcactatctaaatcaacctgaatcctcttttaacatgacatgcgttccttcttatccaaagtttggtcgctcttcatccaagttatccccgagtatctagctcttcaggtgtgcgcaacctccctgcgcggggcttcagcgctcctgctgcgcataactcgattgtccagtcttcgtcattctggatcaagctcatccggcctagttgtgaccgagggcatgtcttgataggaaaaccatcgggagtcccatcaggtggcccatggggtgtttctgtgctcccacctgaggttggcctcgggtgtgttgaaacttcttctcccgcccgaggtcagccttgggcaggtcggaactgtgttttggtgctcgtaaggacccggg

SEQ ID NO: 15178 - DNA, 535 bp, Zea Mays
cggtctagttcaatcgaatgggttagggagctacagggaacatgaggaaggctagaacaccaattaaggaagcttgaactgacctgcgaggtgttcacgcggcggtattttgactgatttgggggaaatgggaaattgggcggctctggtagacaattggaggcaagtgctggtgtgttggatgcgtaattacctagcggagttctctgaggcttcaatttatagaactcaacgttggtggcactcaatttggaggagaagcgctggcgaccggggagaggggaggttaatggcgcaaggaattcgtggctttcaccgtggcaagttctcgggtgatggacaggcttgctacaccggttcatggcaacgtgctaagcttccaagacgcgtggcgcatgatcgttaagcggctaacgccggtgaggatcatcccggccagccacagtccaagtgggtacggcggccacaacggtgagcgagcccgaaccaatccgagcactaagatctttccttctctccgttatccacttgcgat

SEQ ID NO: 15179 - DNA, 377 bp, Zea Mays
ccggcggccaccatctccggccaccatctccggcgacctcgtctctctccttccctctctcggtgagcaggtcttccccctgtctcctgttcttctccctctcagttccctgtgttgagtttgcctcttctccaccccttctcacacctcttccaaatctgtgaattcctgtgaaatctggagatttcttgttgtggaatgtgttcctttgtatgccttaaactccattgcaggtttctagctccttcgggagggcattcccacctcaaataagcttttcaccgaaaccctaaatccccgcccttcacgtgttcggtgaaatgcctaaaccacccaaacttgctccaattgaacccaaatttttcaggcaccttcac

SEQ ID NO: 15180 - DNA, 1123 bp, Zea Mays
cgctggcacatgtgtggcctgtgcctccaagagttcctcactggcgagcttccatgcccaccttgtctcacggctcctgtgcaccctcaaatactagaaaaggcaactgatgaaaggcaaggcgaaacctcttgctgattttgatgaccccattgcatcatacaagtctcagttcagtgcttacaagttatggttgaatgaggatgctcctgttggttctattcttgctgctagtgtggaggatcggtttgatgcagaaattgttcactttgattggtctcatcagatgtggtcttctctttgtgatcgctgagtgtactggtcactctatttaccttgctgctattcgttaggatcaattgaacatcagggagattacacagtggatgagttctacaactagatgtctgcaatttggctttagctcgatgctcttggtccgcagttgtcccctagcacctgtgagttttgccttgatcagttgattgaccttcagtctcatcggatatatgacttcttgactcaactttgcaatgagtttgagcctattcgtgcccaactgctccctcgctatccttctgtttcattgatggatgctcttgcagatgttcgtaatgaggagacttgtcttcgtgcagctgttttactgccatcttcagtgttggctgctcgttctgtgttctcttgacctgctattactccatcacctttaccttcgtcaacacaccctcctacacatggcggggggcggtggtcttcactacaactaccatggtaaagatggtcatgtaaaagctttttgctacaaaaagtagaaggtgcataaggctcagactcgttcttcacaacctactagtagtgccagttttagaggttcttaggggagttttgctgattgtcactaaggagatgctgatgctccatcgcattgctgcctctttactgccaggtgctgctagttatgtgaccgtctttgactctatcaggttctgctgctgcttcttagtcttctactaagggaccattcgagtacttgtgcgtggattcttgattctagtgcttcttttcacatgacctcattacatcgatctttcttctatgtgtccttcctcgttcccttatt

SEQ ID NO: 15181 - DNA, 878 bp, Zea Mays
cggcgagcctgtatcggctggaaaatgcaatgaccggtgctcaagtgtggccgacacctaattccaccctcaataacactaatccctcaagcaattgcaaagttctagctcaaaaactctctgtccacggtgatggcgcacaccgaggacaatctgaggtgttcccggtgatccaacacgggctagttcaattggttgggccgataagcatctatagcacacaggggtgttgaaacaagagtgaggagggcatgaacggacctgcagaaggctggccacagcgagctcactcacggcggcgcgtagaactgaattgggggaactctaaattagagctctcaggaggacaatccgagacacgggcaggtgcgctggatgcgtgattacctagcggagctcactggggcggtaatttataggttccatcggcggtggcatccaattttgcgaaggcgcgctggcggctggagagaggggaggtcactagcgcaagtgattcgtggctttcaacgtggcaaggctacaggcgatgaacggacatgctaaggcgattcgctacaatgtggtattgcgcttaggcacgtggcgcaccatcggtatgtggctaacgccggcgagggccattccggtcgaccgcagtccaagtgggtatggcgagctcaacagtgaccgagcccgaaccaatccgagcgctaagatatttactgccctcagtaatccacttgcgtggggcacgaatcgcagcggctagggcgaattcgggcgcgagatcaccggtggcaaggggcgatgaacctggggatctttttcagttactgtacaatgggatccttattcagagcgcctgaccgagcacaattggggatgatttattccaa

SEQ ID NO: 15182 - DNA, 326 bp, Zea Mays
tagtcctaatgaacatggcttttctgtacaccagggagttatcagaaaaggctctcaaatttggatagcacaaaactctgctcttagaactaaaatcatttatgctctacatgatagtgtgattggaggacattctaggagtatggcaacctatcatagagtgaagaagttgttctggtggaagagtttaaagaatgatgtggttgtgtttgtccaacaatgtgaagtatgtcaacatgctaaagcagaaagagtggtttctccagggttattgtagccttcgtcagtttctcaaggtgcctggcaagacttaaccatggattttg

SEQ ID NO: 15183 - DNA, 627 bp, Zea Mays
ggaaaggagaaggctccaaaggctaggttcaaagtaagcgtcatggtaaaaatataggtattacaagggttgaaggcgataatagaaaagggtttaagagaagaggtaaaggtatagaagaacgaagggtatgagtacaacaaagaatggcagtaaggcaagatttgcgcgtggcagagatgaggttatgaccaagcatagggtaagtaaaacaacaccctcgaattgagaggggagaagggaggttttaagtggcacacatacgacaacatcaaggtaggatcacaagcgtaaaggagatagcaaacaaaacacattaaatgatggggttgaaagttcaagcggcagagaataggatacatccaagggaaaatgggtaaaatataactctcaatttgaggtggaaaaaggaagattttattgggcaggtatacaataggcaacaaggtgatatgtagagatgacaaaggtaaatatgatatcaataaaaagcatgacatgggatagaattaaggtaagactcgcgaaatgacaaggtggagaaaacaatcaagggtaagataggtagggttccaatagaagagttgaagtaaaaattcataaccgaaggaagttacaaggaaacaa

SEQ ID NO: 15184 - DNA, 597 bp, Zea Mays
gaacgaactattgtttgcaattgaacggtgtcttactccttcgcacggcggtcgacgcccacagttcgcggtggcgaagcagaggtgagcgaccgaggaggcggcagagtaaagatgagcgcaaagcagggccaaggcgagcataaagattagaagaggtgagcggatgtccttagaggtgcggaggcgaagcgagcgagcgacagccaatagccgacgatagagaagcgagcaatttcacctgcctgtgcgagcatcggcgcaaccaagaagccaaacgggtgacgaagaagcgagcaactatgtctgtctgcgagcgacgacgtaacaaagaagctagacagatgtcagacgcgaagaaaggccatgggtcttggacctagtgctgctaatgggtcgggctaaggtatggcgtgggctatacctcgccacattaggtcctccgcccctgctgcaaggtgtaccggcggcggtgccttctgcgacagcgcggacagtccgcaacctagggccggatggactgcgacctacagtatgagccgagtcttctctgcgccgagccgaacggtctgcgtgtgtgtagaggcgacgacgttc

SEQ ID NO: 15185 - DNA, 635 bp, Zea Mays
gcaaccgtcgcgcccatggcgtgcgccccacgcatggtcaaaccgcgcccacgccctcacgacccgcccacgtcgcccgagcacctaggtgaagaccccgcaccccctatagcttgcccctgcctctcattcactctctcatagccctcgtgctcactcagcccgcagtgcccccctctgttgctccgtcattcagccgtcctcgccgggcctcttttgtcatctcggccacggtgagcttcgtcggagccttgtgcaccgtgaacccgcaggggtttcccctctcaccgatccctgtgcctggtaagcgctcaacctctcccctgcgcaggttggagttcgccatcatcgtggtttctcgtcgtccggccaaccggagtcccctcgcgtcgtgccaagctaccccgtgcgccgtctctgggtaagtgaccttccttcgcccttcttcttcaccaatttggtctcaccgtgggtaatttcggctcgccggagtcgccccttgtcgggccgccgtgtcttcacggtgtccgtccattgcagcctgtccctgagcccaaacctaggtgtagagcactcctaccctctccccgaagcccatgctgacctcagcatgccggattgttccccaccgcgac

SEQ ID NO: 15186 - DNA, 289 bp, Zea Mays
acacccgtgaggcctatcgaaccttaaagttggactatgacaagaagctaaagaagctcgctcccaagaagaaaatccagaagaagaccaccaaccgaggatgccaaacggagaagaagaagacccctccagccccacctccccccaggatagatgattggtccgacgccgaggatatatccctagcaagccttgatgatcttctcaaggaatttggggatactttagaaaatgagttcggtagtacctcagggaacgctctcgtgtagttcagcctgtagtagtcata

SEQ ID NO: 15187 - DNA, 348 bp, Zea Mays
tagcaatcaagggtccagatctaatgactccgagatctacgctgatcgtcgatttccatctggacggtcaccgtttcccaccagcccgacgatgaagcgcggcggcggtgcccaggttctacggcggcgccatagacgggcctcaccgcagcacaccactgtgcccccaaactccattctaacgggttgtacatgactatgggacgcgtgcggattctatgggggcatactcaccggagatggggtcgaaggaggccgaccacgacgcttggtggtccggtgttgttgaaggtactctgacgagaaattgccggagtcgtggtgcccttctactcccctagcgaccac

SEQ ID NO: 15188 - DNA, 316 bp, Zea Mays
gaagaggggatcgctcgcccgatctcgttgagctgggggttggggaggcttgcgaggtcacgaggatgagacgtggggcagtttgggaatagcttggggaaggaccgcaggatgaccaaggtgcgcgttgatggcagcctcggatccccggatcggcgttgatggtgggatctcgttgattggtggcggtgtggtgtcgaccgagcaattggtggcgctgatggcggtgtgggtgggggaggacgatcgcgggcagaaccgtggtgactactgtggacgcctacaataggctcatatagagtagtagagatttaca

SEQ ID NO: 15189 - DNA, 727 bp, Zea Mays
tggaaaatgacgccaggaatcagagacagggacgacagattgggaggagcttgcgagaagaatgaaggcgacggtgtagctaaagacagtgaccaggacgagcttgaggagcgacgtgatgaaagagtgcagcatggaaacgacctgtaggtggagagcatgcgccagatgggtagaccagtggccggaggagcgcgcgcaccaggaagagcagtagccggtgaagtggaaaacctgggagccgagcgtgaggaagttggagacgaggactcgaccagcgtcgatggcgagatgcagcagagagcacgcctggaaagggcgccgcgagggagatggagcagagacacgccatggctggagtagatagggcaccgggacgcacgctgcagaggagcagggaggacgctgggcgcggtacagaatcagagaaaagaatctagcgaggggataaggccattgcccatgccgatggtggaaatatctgtccacacgcgtgtggtgaagaaaaagatcagagagggcgacggcaggggatagggatgggaagagatttttttatttctctctttttcatatttttagaaattcatagatattttgaattgcgatttttagtgatgattaaattttcagattaagtatgtgggagatgtaaatcggacgaaacaaaagatactagtcaaattagtacagactacgcttgatttaatttagagcagataattta

SEQ ID NO: 15190 - DNA, 305 bp, Zea Mays
ccaggaaaaagctctatgacaaactcaactttccgctcaggtggcatgcctggtaagttcttcgggaacacatctgggaattcggacacaaccttgataatctcgagtgaatctggctccttgctatcgatagccatctgatgacaacctcctttccttggctcaggtgagatcaactcggctaccacttcttctcctagtggggacaccaacttaattatcctcttatcacaactgataattgcttggtacttatctagccaattcatccctatgatgacatctattgcctgagtacccattac

SEQ ID NO: 15191 - DNA, 798 bp, Zea Mays
ctgatcttagatcaatcttggagaagtacttagctcctctgagctgatcaaataggtcatcaatccggggcatgggatacttgttcttgattgtgacggcattcaaatcacggtagtccacacatagcctcatgctgccatatttcttcttcacgaagagcactggggctccctaaggtgatgcagctggtctaatgaaacccttctgttgaagctcttcaagttgcttctttagctctgcaagttctggggctgctagtcgataagcattcttggctatcggcttggttccagggacaagatcaatagtgaactccacatcacgctcaggaggcatgccgggaagttcattcggaaacacctcagcaaactcttgaactatcgacacatcttctggtgattctgcctggatgtggttcaccattgcctctaacaagctagggcagatcagacaggtgatcgttaccccttgatggttggtgattgtcactgccctctcagcacatgctatgttacctcggtgtttggtgagccaatccataccgagtatgacatctatgcccttggaagcaagaaccacaaggttggcaaggaaggctaccccacttaggtttatagggaggtctatgacacctaagtggcagggtatatgacctccaggggaacgggtcattagtggcctcttaagggctgtagtaggtatatcattcttttccacaaaatgcgatgatataaaggagtggaatgctccagaatcaaaaagcactgaagctaaaactgagttaactaggaactcac

SEQ ID NO: 15192 - DNA, 791 bp, Zea Mays
ttgaagtgtaggctattctctagttttccataatggcgaatccctctcctacgcctccatttcgtcgaagccgcaccagcggactttcataatagcaaatttctcgcacaattcgacgacctacgttagtacatttctatatattaaagcagggaggaatgacgagctctgaagatatccacgtcacctctagaattttcagccgttcgattagatttgaacgacgcctagaacctctctgcgcgtgtcgccacagaaacggtccccgaacagccacgcgatggttcgcgacggcaaacgaaggccagggaagagggaaaaaaaagaacagtccatgaaagcgccggtagatatcccctcctccccctagctgagtaagagtaaccacgccgcagcgcccccgtctggccgtctccacagccacgagtccaccgcgtccatcctgttccggctcctcgctccaccgctccgacctccgagtctcgctgtctccgcgaccgtgagtcttcgcgctgcactgccgcgtccttcaagtccccggctccaccgctccaggcttcggcattaccgaccgcgatttgccgctgctccgcgccgcgtcctcaattcgcaccactgcatggctcaccgtctgcatctgcttcatcctatcgcgtaccaactgcgaaaaagatatgtgtgccactgccatccatattaacttttcatattaactttttacgattcggttgttccaggttgcaaattaaatatgtgacttcggttttgatttttttcctggtcgtttttcc

SEQ ID NO: 15193 - DNA, 557 bp, Zea Mays
cctagctcaaatccttaagtccccattgacaaaattgttctaaactaacccctctgcaacgtgtgtgaagatggcatcgagattcgtgccctagacacgtcaaatctgggatttcctctcggagttcagcaatgagacaaaccaaacttcatcactccatatctttggctccagtcagcaaaacccataagcctccacacacaaatgacaaaggaatgtcaggggaagagatctctcaatgggatcatggccataatcgcaaagatttggagccaatccacgcttgaacttgacctctctctgcgttgcctcgtgctcgacgtcgtgcccacgcgccagagcgcgcactggcgctcacccacgcacaccctaaatgcgtgtcagagccacccttcggccgtgctcgcccgtgcctttaagaccacccccagacgtgcctcacctcactctgcactcaccttcgctgaccagacactatccttagctccggcgagctctgcgccacccgcccgagccacccgagcgccggccactgtggccagccatttccagagacc

SEQ ID NO: 15194 - DNA, 443 bp, Zea Mays
gtggccctcgtgttggaacgacatgcgccggcgagcgaggtcctagatgatgggtccccgcgcgtcgagccacttggtgccgaggacgacgttgtacccgactagtggcatgacgaagaggttcgtcgggaacaggcaccaacgatgaggaggggtgcgtcgcgggtgacgtcctcgcaggtgacccgctcaccattggcgaccatggccgtgagacgtggccgctgtcgtagcggcaagccggagcttaacgctgcttcttcgaagatgaagttgtgcgtgctgccggaatcgaggagcgacgagggacgtggctccgagctacatggtgtccgccatgggcacccctgctagggcctgtagggagaagcaaggtgcctctttgtcagcccctgctgtgacgtcttcagcgtcgtcgatctccacccagtcaacgcagaaaa

SEQ ID NO: 15195 - DNA, 519 bp, Zea Mays
atacaatgtacaagccaaagcaacatgtcccttttctcactcacttgcactcagacgaccaataagattccccaacatatgtttctcgactctagccacctccatttcccttgcatcctatgctctcttttcatttgtcgccttcaatctcctctgctcaacacacatcatgctatcataacacattgattccgcgaacctacacatctcctgtatgcgacctttaatgtcggaatcgacgagttgagatccacaacgcatcatctgtcccatgagtctattggactttattgcatgcatcacatcttctttgtcggtgtatctctcccaactacatttcctcgtctcctaaacaaaaaacaataagtatggatgcaacattacagcttatgcaatcaaaaataaatatcaacctcatcgtaatctaccatatgtccacaaaaatagcccacaccaagctcgcaaggaactaatccatacttagcttaaataccacatttgcagagtactggatcgaac

SEQ ID NO: 15196 - DNA, 574 bp, Zea Mays
ataaaagcctcaccagtgattcccttcactaaaacctccagctcctcccaggacaggtcggtcctcggcccgcgctggatcctaccaatgtcactgaggccggtgaaccagcaacacagacgcgacctaccctgcaacggcatgacccggcgcttcaggaagatatttttctaaccgaggtggtggtaacaaggcgccccgcgcatgacccgatggaaccgccagacgtggggtcgtgggtcagtcagccgcggggatagatgtggcagtcgacatgaccgagggcgaactgacagcgcatacgtcaccagatgcactgagttaatgcagcgctcgcagaagagacgccctagtcaccagtcatgccacgttgatgcgaagtacaagttttggtcccacccgcaagctcgcatcctcccttatggtgggtctgtgggccactgtcggtaccctgaaacaggggtaccccttgctacagtgtgaaagcgcggtgcccatgcggctacctctagtcgcgtggtaaacagcgcctgaccccaccacgtggtcgactcccgggtcgccacgcggccag

SEQ ID NO: 15197 - DNA, 420 bp, Zea Mays
cgagagtgggtgctctggcttggggataatcgaacggagctcactaaggcatcaatttatagagatcgaccgtgaatacgatgaatttgagcggcggatggctatcggtaagaaacgagaggagtcaccggaggccgctcaacgtggcatttactgggttaagtctccagtgacaacgaggctggctttagtgatctacagcgggatggtagcatggctagaagtgtggcggacaccgatgaacggcgatcatcatggcgacggtcgcgcggccacgtcgcggcgcaagtgggtacggtgacaggccggccacagtaccccggccatatccacgacgagatctttgctctgggaattattatctgcgtgttacagggcgcgaatcgcaacgccggcgtgaatccgagcatgggatcaccg

SEQ ID NO: 15198 - DNA, 448 bp, Zea Mays
tggggggctctttagaaataataccacgacagctatattgcgcgctttcttggccgcaggatcccgatccaacgtcttcgatcagatcttgaatcgttacacgactcggaccgtaggatgctagatcgatggtcacggtgttgtgcgtgaaggggtacacgatgttctaatcacaaccgttcatcacaaacccatcatctcacctcttttctcctacgtccattccctaggccagtgtcgtgcgcgagaccgtggcaaacgttcactgacgcgctgcgcacctgccctcctagtgccccaaatcacgaatcgactacgagctacacaaagagacggtagaggctaacaacatgagggattccttactgatggtgatgcggcgtagatccccaccgatagtgcccgtcgacttcacgggtgtgggactacctccgacgaacattttctt

SEQ ID NO: 15199 - DNA, 500 bp, Zea Mays
gttgaagtattagccgtgttcacctttctttggttggaattcccaaagttctgttgggagttggttttattttgctttgggtatggacagtccttgatgaagtgtccggactttccactgttgaagcaaccagtagaagaactagggagagcagggaaacgagtaccaggggcactcggctgtttggtaggagcgagggcagtagtgggacgaataaaaataggatgcttgaagggatatgaaggtgggtgagatgaagaacgattttgattaaaaggtcggatcactaacctggttctcttctcaggcccttgatttgacctttcacctccaaacccctttgattttccatgcccggtatttttggcttccactgccagtgttgtactgatagccctactgtaggtaagatccagacatgttgccattttccattgaagtctatcattaagtcccatcataaaacaattctttttcttcaaatctgtattcacttggtc

SEQ ID NO: 15200 - DNA, 406 bp, Zea Mays
tttggactggaaattgtggcttagtgaaaaatagaatgctcaagttgggcttgagaggaaagaatgtatcttggtccgaatttaagttcattcgtgtgcttcagacttttggtttattggcaacacaattcctctcagctcagccaagacctgtgggctgtggcgaactgtccttgtcaccatcatttggcgcctttgggatgcgcaaaatggcgcattttctgtgacgtggtgttatagaatcagcatgtgatgactttgtcatctggagcaaacaattatctcctgcgtctcttagttttgatttgtgtcgttggcgtatttaccttcagagttcagacttgtaactctatgatccccccatgtgcctgggtaaacctgtgtacccttttcttctgcaatcaac

SEQ ID NO: 15201 - DNA, 747 bp, Zea Mays
ttgaggactgcacaatagggttgttaaattctggggctaatctagcttgtctccacttataaatttctctaaatgatggctcatgctttagtttccgatcaaaatggctaaattcccatgtcccatttagcattccatttgtccgtctgtttttcttcttttctgtgtggctcaaaagcttttgaataacaatcgaaatctcaataaaacctttaaagacaagccatgcatagaaatgaaaacttcttatcagaaaagatcaccattaaatgagtgtagtgcagattggatttgaggatgtagtatgaaaaggatgtcatccccttgaaaggagtcagccgaatagcaacgtagaggctccagttcattaaaataagtacgaggcatgtcgactacacttctcactcctatgcaacctcattactttaccccttaatgacacgtctcacatgccaatctgtgtgcagcgtggcttcttacactgttttgccattccttccatcgtccacatagtaaatcccttatataacagggttttactatttggtaaatatgcaagaggaacaacctggcatattgttaaagacaatgacattaaaaaaaaagagggatgacctattccatgtcaacactatgacagaggtccatttaaattctcacgtgaagctgccaggcccaagtccatacatgtgggcacacatgtcctagggtcagtagatttagaaatttaagccatgcattgaagag

SEQ ID NO: 15202 - DNA, 465 bp, Zea Mays
ctcataccagcatcgaggatttcgattgtggccttcgaaggggacgaagcgaagggccacactagtcaaggggggagggctcgctgcagctccacacatgcgtcccaaaggctcaaactcttttcctggcagcgaagtttaagtcccgacgaagtcaagggcacaacttcatggaatcgaggatgcaacacgcaggtgaaggccgcaccagattacagtgagaccctagatccgcctcgtcaccatctaggcccatttgtaagacccttcatgggtagattttggagtatgtctaagtcattgtacttcactccactgtgatgaccccgttgaggggaatattccgagaatgtagaagataaccaggggtacaacggtactttaggacccacctacccgtcggttacctataaataccccacactatacacgagtgggacacgcataacgagacgctacagttcc

SEQ ID NO: 15203 - DNA, 373 bp, Zea Mays
gtcgcattaccactttgggttgggtgatctggtgcgttgatcttgaatggacgatcaagattagaacaactaataccccttcggcactttgaatccgggacgttgatcgtcgatctggtggtccggggagatctcatttgtatgcacgtgtgtgaggtggtggggatcttgtgcggatcggatcccgtgcgcctcaccatgtgcaccggggtgtggcacgatctcagccagtcgtaggacgccacgtgtccttgtgttggaatccgaggtcggttttgcaaagaggcccctgtccttaaaggaaattaactcggcagcgtgcatgtgcaaagtaattacatcaaggtccctggaatttacattatagccctgg

SEQ ID NO: 15204 - DNA, 502 bp, Zea Mays
gtggagggagagcttaggtgcacatcaaaacagtaggcagcaactgtaacgtctcattatgcatgtcgcatccgtgtatagtgcgggggtatttataggtaaccggacgaattggtgggtacccaagtaccgttataccctcgattacctgctacattcccggaatattccccctacggagtgattacaatggtgcgaggtacaattagactagacatactatggaacctaccccaaagaggggcttacaagtgggcccagaaggtaacggggcatagcctggaccccaccgtagaacagcgtagccttcaactgtgctttgtgcctttcactctgcgaagtcgcgagccttcgacctcgtcgggactattttgctgagtggaagagtccaagtcatcggggcgcatccgtgaggctgtagcgagccccctcgagtagtgtggcccttcgctccatcccctccgagaatcccagtcgaagacctcttttctggtactggtcg

SEQ ID NO: 15205 - DNA, 454 bp, Zea Mays
aactaagggaggtggcaaatcaggctccatttgagttatagatgtgacaaaggagccaccttaaatagagactatgtagataggacaggcacaaatgtccattgttcaatggcccactcatgctaatgcactagttacaccttatgtcgagggactgaggcatcgaggttgtataccatttcctcactttaggacaacaagtatagaccacccactagtcatacacttggaccttaggactgctagtgcctcgagggtacatcaacttaggtttgtacctttagagtagtgattcctggctaagagagggatcccatgcatagcctcatagagtttatacaccatgttacacgaggatttccattcaatgaaggcacatagtcggatcacttcatgtccacatggagtatgtatcctacggatatagtggcagttggagaagagtagatactct

SEQ ID NO: 15206 - DNA, 831 bp, Zea Mays
gtagcccttccggctcaagcccagcagcagcgtccacaaggtctggcgcctcttccagccctggcccattaggcgcgttgtccatagagtcagcttcagtgccggaggcagtttgatttgtctccggcgtcgaggcctctataggtgtctcgtttagtgtggccggcgatggcgggcactgtcccggtactggcatgagaggataagtgcgtctgcggtagacacggccaggcaagtagcgacgcgcagcatgcgaagacagcagccctgtgcttttgcacaggtgcggcggtgaagaacagttctatctagccagcggagatccctccgcaccccttcccccgtggtctgaagcataggcgaccgaggggaaggtctgcggtccttctcgaagtagggagtagaggcctgattgcagcgtctgcggatccccgtggggatctctgggagctggcgaagcgagcggggggaggagcgatggcgatgctcttggtggcgatgtgtatgtcgttctcggctacggccccgcacatgcctcttctccaaaggctggggcgcagaaccgagtccaaggtggtggtgtcgtcctccattcctggatcctctgtcccggtgttgctcgcgccgcgaatcagaacggtctaggcctcgcgacgcacgggagaggatgtggaagagacgagagctccaactctccccattatgctgtcgacgcccacgccgttcatctccttcatcttcatcatctctgtcccgatgtcgacggtcgttgtggaggtctgtcgggggcggatcgtgtcggtcacgtcgctcgcgctccccgtcgacgac

SEQ ID NO: 15207 - DNA, 477 bp, Zea Mays
gctattattatttttctgttgtttgaattcaacagtcgttatgattgcagaagtaagtgcggtgtcatggtttttgaaacttcttcctatttcgcggggcatagagatcgccctaagatgagcaatcgcaaacgtgcttatgctgaatcgagtagtcgcaaacatgtcgtgccgatttaagtcactatcaacttaaaccggatgctccgttggtagggtctagtggtcaccctgagttaagtaaacgtgagcatgtcacaccgccttaagtctttgttgacttaagtcaattgctccgttagcagggtatagtggtcaccctgagttaagtaagcgtgagcatgtcacaccgccttaagtcattgccgacttaagccgattgctccgttaatagggcatagtggtcaccctgggttaagtaagcgtgagcatgttacaccgccttaagtcattgccgacttaagcctattgctccgt

SEQ ID NO: 15208 - DNA, 364 bp, Zea Mays
aaaaagcgcaataatctcagtgtgaagaaaaacaaggtgcagtaatcagctgcatggtgctcatgggagagagagacagagactctttcgaaccgaatgatggaagatgggacagaaagggtttcctgaccagtaatcgcacttcacccatgtttttgacagagcatcagtgatggcagccacgaccacgaagcggagcaaagcagaacgcatcggcagaaagatttgtccagggacatggcgcattgttgactgttgacgaccaccgcctcatgctcccgcactccctcccccttgcacttgcaggccgcagccttttccgggccgcgccagatttgcgtttccccgtcgcgctggctcccac

SEQ ID NO: 15209 - DNA, 478 bp, Zea Mays
ggatcaggttcagaacctcgccgccgatgaccgatctgcaccgtgatttgtgtcagggtcgggctgagttattgacgggcatctcctcgcgacgatattcttgaagcaggataagatcgccgcggtaggggggtgattattccggccgccacacggtcactgatctttccggccatgcttggtcaccagcgccgctcttctctgttcgtccacgccatcaccgatttgactgctttacggtcgcggttgaacgtggcaagctccaagagaagtaccgcgctcggtgtcgtcgttgatcgccagtagggtccggtgatggttatcaccgtgaccgccgtgatgctcacggagcctataaatccaccctgctctcacttcgttcgtctcaaatcaaccaagcccagctcttcattcctcagttgcgaatccaacaagccactagccatcacgttctatcccccatcctatgtgatcaacg

SEQ ID NO: 15210 - DNA, 476 bp, Zea Mays
ggtataccgaggcgaaggcaggcttggtgccgatggagaggcagaagtccctgaagtcctggttgtcaaactgtttaccgttgtcgactgtgagctcggacgagactccgaatcggcaaacaatgttttgccagaagaacttctgggcagtcttcgatgttattgtggatactgccctggcctcgatccacttggtgaagtattcgacggcgacaaaggtgaacctaaggttcccttgagccgtaggtagtggcccgacaatatccagcacccagcgttgaagtggccatgtgtgggcgatcagcttggtgaactgcgaagggttgcccgagcggggagaaaacttctggcaagcttcgcacgaccttgtgactcgattcacggcgcagattaacgcaggccagtaaaatccttgacggatcaccttggcagcgagggccctaggccctgagtgggagccgcaagttccgttgtgg

SEQ ID NO: 15211 - DNA, 484 bp, Zea Mays
ggcttcttgagcttctgtggtccactggaatttatccacctttttgagcagtttatagaatgacatccctctttcgccaagccttgaaatgaatctactgagcgctgccatgcacctagtgagcctctgtactttcttctgtgactgtggtggctccattctcataatggcttcaattgtttccggatttgcctctattcctcgatggctgacaataaacccgagtagctttccagccgataccccgaacacgcacttctttgggtttagcttccatcggtagcgcctcaagctgttgaagacctgttacaaatcctcgatgaagttgtctgagttttcagtcttgatgactacatcatcaacataggcttccactcgtttgccctagtggtcgactaagaatgtttggatagccctttggtaagttgctccagcgtttttgaggccgaacgacatggaggtatagcagaaggctccaaaaggc

SEQ ID NO: 15212 - DNA, 306 bp, Zea Mays
gtgcagccggaacagcacaacaagagcgttaatcgaagtctttcattcaaaacacactcagcgcaacagttacttaagggcgcagccgaaataacgttaatcgaagtctatcatcacaaagacactccgcacaaagtcgccgacgcacgcagccggaccaatacaagcgtacgaatacggccaacaggccacatcaccatacaaattacaattacatacacatggcgagggcatcgcctattacatacacacggcagggcatcgcctattacatcggctcaaccttcggaatgatacacatctccc

SEQ ID NO: 15213 - DNA, 450 bp, Zea Mays
atagtcggcgttacataatcagtggggagagtagtgatattccttctccagctttgtctgctctcgtcggtctgcaagaattatccctagccaattttgatcaagctcttgaggatgttgtccctgaagatttgctatccaagcccattgatggtgatatgatggacgtctgctctgacattccagatgtgggattagaggtatcccgggcagcgtctcgtgcatcatcgaccttggagggcggtcttcggagccaagaggttggtcaaggttgttcaattcccatggaggtgactgggagtcctttagccttagaggtggctgttgcagagaacctagttctcaaggatggtgccagcggttgcccagcccccgagggtgttgccggtaatgatccggctcgagtgggtagcgcgagctgcgacctagcccccgagggtgttgccggtg

SEQ ID NO: 15214 - DNA, 437 bp, Zea Mays
aaatctgaaggtatacttcagtcggaccagaccaccctcactagaatcggcggtggtctccttcggcatatcccagctctccacaagtggccatactctgaaggatatatgctcttgaatcaaatccattgtgccaatgaaggcacatacagtgctgaaagccctctaacatgcttcgacattgccatcattttctacctttggccttcggaggccgaagcgagaccagatgggtcgctgaatgatttctttgatgtctttccttgcatttaaatcatttttaacataaaaccactcccccatccaggacccaggccatcttttccggaatgttggtaccgggtggcttgcattggggcgagcaataaatccataacaactgaagttgttgtggtactgttctttgccagtagcctttgtctcatacaagagctcgt

SEQ ID NO: 15215 - DNA, 525 bp, Zea Mays
aatgcccacctcccttcaaattacatgaacacagtccataacattccctaacaccacgttactaatgtctagcctctccattctcctctggttttatggctaccaaactatcccttaacaatattctatactacttattaaagctgtaaagtttggtgactctttctcccgcgaggcaaaaatttgaggagtaaagaaatcgaactgtgaccaattctctggaggtgcacacgcttaagcacgccaactaaggctactttgagttatatggtggtcgttcaagctatttctactggcaaacattctttctctcccatcccaaatctcctttagtctgacacacacaacaacgcggaaactgcacagcgcctccaacaatgtctccgaagaaattcccagtcccatccccggaaccgctcgctctctccctctcgtcagctccacgatctgcacgtctaccaactcgctcactccctccatcacctcaactccatgatctgctcgtccaccagctcgcagaggaag

SEQ ID NO: 15216 - DNA, 625 bp, Zea Mays
tcggggacctgaccagggacaaggtggaagtatacgtcgatgacatggtggtcaagactaagagagggtcgaccctagtggaagacttaaccctggtcttcgacagactgcgggcaacccgcacgaagctgaacccggacaagtgcgtctttggtgtctccgcagggaagctgctggggttcctggtttcgtaccgaggcattgaagcaaacccgaagaagatcaaagcgattgaggcaatgaggccttcggcccgtatcaaggacgtctagaagcttacggggtcattagccgcccttagccgcttcatttcaaggctggctgagagggcgctacccttcttcaagctattgcggaagtctggtccattctcttggaccgaagaggcggaacaagccttccaggagttgaagcagcacctggtgtccctaccaatactggtagccctagagcctggggagctgttgtatctgtacatcgcggcggctagggaagcggtgatcatggtgctcgtcgtcgaaaggacgacacgagaaggccaacaaccgaggactcaggaccaactgctggggtccggaccgtccagagaccggtctactacgtcagcgaggtcctccacgaggcg

SEQ ID NO: 15217 - DNA, 600 bp, Zea Mays
tcaaatgctaaagctggtgttatcataaacagtgctgatgatacatcttttcctcctctggcaccttctattactcagtctgatgctcatattcatgatggtgctgatttcattgagttcaagggcacaagaaagataagtaacagggggaagaaacccaaaggttctgcagttaaaaccccagcatcacatgcaaatgttatacctggaccagctactgatcctgcacaggtacgcgaaccatgttctctgagaaatattcaggtggaagaagaacaggaatcagctaatcttcagcaactagtaccagcatcatcccatgcaaaagggcctatggaccagcatattcatgggaacaattcatcctggcaaggttctgaatcacctccatcgaggggtaacgaattcctcaaaatgacttctcatgtttccagtcactccactcctaattcagaagagtatctgttttgggagcctcgtgagcatgcaaagcaagataagtatgttcttaactacgggctcaactttgtcagcttttcttcattctttttattaatgaaaaaatggaccttcttgctaagcttataccctctggaagca

SEQ ID NO: 15218 - DNA, 988 bp, Zea Mays
accaaatcggatctatcctaagcttttcccccaactcaattgcatctaataccaattgaggagccctggccacggtgaccgagagcatggcggctaaggtgttttgttcccggcgatcccaagcggttcagtctgattaaaggggtcggggagcatcactaacatgtaagggtgctagaacaagaacgagaagggaatgagcagacctggggaaggctggccgcggtgaggtgagttcacggtggcggagagtggatttggggcgaatccaaaattcacgagttctagcgaaggactgccagcgattaacggtggttgggtggatgatgatgttatgcagctaggggagggctcaatttataggcagcttcgacggtggccgggaattttaacggcgatgtgtggcggtcggagataagtaaaaaccgtggcgcggtggttgcgtgtcccgtgtcgtggcaattgctccggtgatcaacggggagctaggagaggtcacgacgatgtggtggcgaggttgggacacgcggtggacaacagcgagggcacaacgacggggagcagctttattcacggcggtgagcaaggggaggagtattgcggctgaccggggtggcttccagctcgacggcgacgatgatctttttacctcgcagtgttatccggttaccagcgaacgttaatcttaacgcggcggcgtgaatccttgcacgggggagggtcacagacggcaagcacgcgatgctggcatcctgatccattttaactactgtaccatcagagctcgtttcagacagcctgacagaacattttgcagaggaatttcccttcaatttcatatggcagctcctcccaagctctgcagcagaattgtagagctacaaaccaaccataattcggctataggacttgaacccatttgagcactaaatcaaggtggaattcatactcaaagttggctctgctacactgaatatctgaatttcag

SEQ ID NO: 15219 - DNA, 459 bp, Zea Mays
acacaatcctaattgcctcaattcggttggactccttgtcatctactgataaatggtgacaggctccttcttctagtttaggaaagtacagcttggttactacttcctttccggatggggacaccaacttaactgttctcttgtcacaactgacagtggcttgatttctgtgtagtcaattcatccctaggatgacatctaacccttgagttcccattactactaggctagcgaggaagtctatcccccttatttcaatccttagattcggaaaaatcctatcagactgaactttcccccaactgaattaactcttaaaggtgggatcattggttctatggggatgttatgtgattctacccaagatgcagaaacaaaagaatgcgtggcaccagtatcaaatagtacttttgctgggtaggattcgactggaaacatacctactgccacgtcctgagc

SEQ ID NO: 15220 - DNA, 443 bp, Zea Mays
atcgggagcctcagccacctccagacaatgtgagcgtttcagggtgacaacccacctttccattacggttgcctcttgtttgtttcattcctataacttcaccacagtaacatcgcttgcctcacgttcacaaaaccgtaaaacagacatgcatatgcattctatttgaactggttcaagaatgggattgtcaataacactagggaagatgaatggcgatgtttggtctgttcagttggcccagctcccatttagtctagtccaaccgtgatagatgtgttgccaccatgtcacttgcagtcttgcagagcagtgaaggaacattgcaataacactcttggtttgtcattaatttgaatgaaaatcctacagatggtccgcgtaccacttataagcctagaccatcaatcttccagagtcaggacaacttagcaaaatatgat

SEQ ID NO: 15221 - DNA, 856 bp, Zea Mays
ccgacggaggatactcacgagtccgttgtttacatcccttttcttatctgtggccttgctcttcccatttctcccttctttcgcggtctccttgacttttacagtctgaatctgactcacctgaatcccaactccattctacaaatctctgtctttgttcatctgtgcgaggcctaccttggaattcttcctcacttcggtttgtggaagtatttgtatcattgtcgtcctaggatggctgggggcagcaccagctcgtgggcggtgcgagtctggagatgcgccgtgggaggaaaacagaataccttgatatcccacttaaggatagcattaaaggatggcgtttagagtggttcattgtggaaaaccatggcaagtccctcccccttggtcagggagacagccggatgttcgcactccaagttggattgagtctcctacagacttggagataatagaagccaaggttctgcttgctgaaatttgcttgttgaaggagagaggtctgaccgctgaagctgtggttgcagactttgtttttaagaatattcagccattgaaggacagagcatatccggcttatttgtacagtggtgtcaccgactcaacccgggttaccaacaagaggattcttgctgtggatttggtgagccgactggagatgatcttaaggggcaaagtatcaaatattggtgctcctgttgcatattctacttggaatctgccaccttctaagtccttttccgattttgtgtctaatcctcctgctggtgatagtggtttgggtcttagagtgcgaccctctctcgaagaagttgaggtcctggttgctacacttggtgatcttcccaatgat

SEQ ID NO: 15222 - DNA, 773 bp, Zea Mays
ttcgtcaatgacctcattagcaatcctaatcatatcgagtgcccccttcacagatggatcagtttcaagattgtatggctctggagggggagaaagctcagatgcattaaaatacaaatatctgttagtaccgaagctacaaaaatttacaaagttaagctataaaggatatacctataagtctggcccactcagtagcttcttcaactcttttagcctcttctaaggcgtcatgagactctttctcattttttctaatggcttcatcagctatttctcggccacccttcagccatacttcggaataaaacttcccacctagtgtagtagcttcggctgaagggtttctaacatcgtcagctgagatggcaaaatctggctgagctacagccttggcatgatcacaaccgaccttttccaaaatggacacaaccccgcgggcatcggcaaaggcacaaaaatccactctatcactaagaatctcttcaaaggcttcggcctcgccgttaatccattgaataaatccatcggggtcactacgaatgaatttctgctccaaagagaatgcaccaactttagaaaagttgttcttcaaattcttagtgcattccatagccacatcgtaacatttttctttagctgcacgaagctcgtcaacatttgttagtgcccttgatcgtacgatttcacatatttcatgttttgttagctccacattaaaattttcagttgcttcggcaactttctcttctaactcttgcacttcagctttg

SEQ ID NO: 15223 - DNA, 384 bp, Zea Mays
atggtattgaaggtttgctcatgttgaaatgtgaacacttcagaaattattgaagaaagtgatggttagtggtacgaaagatgttatgtttaaaaatataaactttgcagtgcatgtaaagtccgcaagcaagttgcaaatacatgtccaaacatatggaatcaacacataaagggatgaaatgaaatcctaatggaatattagtggtacatcatgccagccaaatcataggatagaaaactttccttcaccaacattattcctccataattcctgtaatccaaagaagcacttatttcccaacctgtttgtgcaaacgtgtgctttaggttagcgtttcccaggacgctttcagtcatctgttcgtctgctcaacgaatttgc

SEQ ID NO: 15224 - DNA, 1118 bp, Zea Mays
gagttgataatccagaatattgtatgttttggtataaatttgatctattaatatgaaacttgagaacaaatggcaggtcaatataatataaaactaactgctccgaaagcagtcatcctgcctgacccgatccaaggacacatcgtattccacctttattttttatattagttattgaaaagtctaattattgtgcctagctttttccatggttcgtaaccactcccttatatttcttgtacaagcactccacctcaatcaggttgcaagtcctacttttgctagttcgcggtcggaagaagccatagccatccaggaagaagaagccatagcaaaagcagctgaggggggattagagaagaacagcagcgcatcagatagggagaattgaagctgatcttttgtatcatatatctttcctgcatgcttcatcagtccgacacttgagagaggttcgagagagaagttattaagctgcctccacactggtagcaagtgattgcatgcatgggggataggacatggcagcagccacatgcgcaggcttcttccccagacgcagggaccaaggtccaagcttcatcatcgtccgtccatggcaacatcatgtaaaccctaacacacatggatatatagctggattcggatcttgctctattttcttgcgaatatatagatatatagatggatcggaattgaaggtttgctttttttttttttgcttgcttttgactcctttcttctgatttctgaagcatatggtggattatatatactgtggcgtcaatctcttctctggttttcatcagatttttaattttccacggtggatttaatttaactgttcaacatagaatttgctcgatcggaaattttgtctttacataaacttattttttttattggtagcatttccagtatatcattttagtaactgaccaaactaaaatgatgattgataccagcctaatttataattttgcgtgtattgatttgtgcaagtgcagcagaaaggagccagctggaggcggcggatacgacgacatggccgagttcgatcaagcgctcttcctctatcttaacagcagccaggatcaagcatcagttattcaagatca

SEQ ID NO: 15225 - DNA, 852 bp, Zea Mays
tggccgtagatcgtagccccgaccttaaaagtttgccttaaaagaaaagacctcttaccctcttaatcttctttccccgatattaaccaacccttcttctcttgctaccagatggaaggctcctttgtcattaggacatcctactgctcagaggaggaaggattccctcatcttttacggagttgcgcgcttcgcatggggatccgtaagaaaccggagtacgtttggaaggaataccacgagaatggaattgagaaatgctctatggcagtctacctgggagaaagccgaaactacccaaatcaccctcccttccaagtcaccaccactagacatcgcttcccagacacttgccaaaatattgcccaaaaagcccttcgccagctatgccaaaattacagaagggaagtctccgagacaccccttcgttactttccaccgagcaacaaaaatacccctacctggaggaaaagacttcaggccctgtcagggagagatcctaatgaggatgaccccaccatagtctacatggccggatatctccacactcttgacaaccactatgacgaccttttctcccactgcacccacctaaattcccgggtggaaagcctagaacaacaaatcaaggaattaaagaagaaaatggcatccctccaagagagtctcgaaatagcagaaggtgaagaggccaacactcgtgaggcctaccgaactctgaagatggactacgataagaagttaaagaagctcgcccccactaagaagatccggaagcagaccaagagccaaggatgccagactgaacgaaaagaggaagccccaccaacactgcctccctccagaatagaa

SEQ ID NO: 15226 - DNA, 595 bp, Zea Mays
agatcctgggttcagatcccctcgccaccggtgatctcgcgccgtgatcctcgtcgtcgttgcgattcgtgctctgtggggtgcagataactcttaagggtaagaaatatcgcatcgtggatgaactcaggccactgtttcgccccggccgccatgttctcttgactcgcggccgattcagatgactcatcggagttagccgcctatccaccgtgcgccacgtacttgggtgctctaccatgtcgcagtaactggtcttaggtgtattcgttgccgctggtgacctcaccacggtgaaggccaccaatcctttgcaccagtgcacccccttctctccggccgccaccgcgccatctccaattcacgagccaccgcccccggatcatataaattgagtgtgtcgtcgactccgctaggtaattacgcgtgcaacgcactagcacttgcctccaattgtccaccagagccacccaattgccctctttccccaaatcggtctaaacaccgccgcgtgagcacctcgccgtggccagcgtgctacaagtccgatcatgtcctctactctcttatttcagtacccttatgtgcccctgat

SEQ ID NO: 15227 - DNA, 491 bp, Zea Mays
ccgtcgaggcctggggatgatgcgcgtgccctaatctcgcgggattatatcctggacttcaaggaatttctcgccgtcgtcttccctgcgccgtgacttcgccctgtacgtggccagctgcaaccaagcaataactcccggtaagaactcgtccagcgtacacgccattaattccgcatcgcgtaggagcagtcggatttggaaatggtgagcttgggcccccggatcacatgtccgctggcgtggtctccgccgtggatggaggtgagcgccgccgtgcccaatgtcggctggttggggaaggtggcttcggccgttgattcatgaacgcgcggtccagattagcctgggaagaaatcttcgcgtgttttagatctggtccgtagatttggggatgagcgtgggagatcgagtccggccacaccacgttggcaatctgatctggaccgtgcattattgatctatcggatttcagggtgatccgctctccg

SEQ ID NO: 15228 - DNA, 606 bp, Zea Mays
ctggagaggattatttctggctcgccccataaaattacaatggacagtgaagcctcgccaagtgtttcttactcctccatgacctttgggatgaagcagactaccacttccatgaaggtatataccagaaaaatgccaagagacagggtgtgccaggatactgaggttgttcaggtgattgttgatggaagaggagatgttgagcaggtcctggataacttggctgaaaaggaggacattagctcggatgtggaaaaacagatcagttgctcaagctctgagtatttcctaaacagaattgctatcaggtcggctgctctattgccaaacccatgcatcaaagtacacaagaagacatcttctccactctcttcggtggctgttcctcgaagaagtcgtagagtggctagggttggagttgaatttaacatacaggacctaggaagaagatcaatgaaaaaagctatggcaaccctgcacatcatctcagaaactaagggcatcagtcaggaggctattgatgcatatgcaaaactttttcccaacccctgtctcaatgtcatgttgaagccctttcagccttgtttggctggagtgctccttctg

SEQ ID NO: 15229 - DNA, 428 bp, Zea Mays
gtttattctaaaattcagactttcagtgtagcaaagccatctttggagctgaattcaaccatgatctagttatcaaatgagctcagtcactatagtcgatttgtagctggtatgtagccctataactttggtacagaaagcttgctcggttactatacaaaatcgggagaaaatctagcctcaaatctctttgtcagttcatctgaaaggagctcgccatggtacagtagcttgactggatcagatcaaccgcgcggctgtcctcaccgccgacggatccctccgccgtgattcgggtcaccggcgtttggattcatgcaccggacttgtggataacctctcggggtaaaagatcctcatcgtcgtcaagatggaaaccacctcggtcggccgcggtactcctcccctggttcatcgcctgcgggtaa

SEQ ID NO: 15230 - DNA, 347 bp, Zea Mays
aagaatatctggtaaaggaacaacagccgctggcgggggtccttcaaacttcttaagcagtgaaacatgaaacacatcatgaatcttggcacgtggaggaagttggagctgataagacacattgccaatgcgccgcagcacttgatacggaccatagaacttgggccctaatttggacggagaagctgcagtgacaccaacagcagtcctgtgctgtaaacggagccaaacccaattgcccacgatgaactggacatcccgacggctcttgtcttgatacgttttcattgtcacttgagcttgaagcagtctttcccgaatttctgccaagaaaaggtcccggtcct

SEQ ID NO: 15231 - DNA, 708 bp, Zea Mays
gttgcccgattgaaggtaagatcatagcatgtggccatcttcttttccaattttgagttgaggcctctcataaagcaatctcttttcttgatatctgtgttcacatgctcaatagcatactgagaaaggtggttaaatttcccaatatactgcatcacagtatctgccccttgcctaagtcgtagaaactcttcaagcttcatttgcaaaaccccgtcaggaacatgatgagtacagaaagcttctttaaattcaacccaagtaacctggtgatctggaggttgtatggtgacaaagttggaccaccaagtgctagcggctccgcgaagttgttgtgcagcaaatagagacttttgtacctcagtgcactgaataaggccaaacttctgctcaatcacctgcagccactcaattgtgtcaagaggctcttctcctttagcaaacactggcggtcgagtctccataaattccatatatgttgcatttcttcgctgattctggggaatacgaggcccaccctgattgttttggtgatgagcaatctcatgcaaaaccctagcattatcaacagtggcattcactagggcagcaatggcatctgctagtgtaggtggaactagtggcggtggtgggttgatatcagcttctgcaccaccacgcgatgtgctagccccatccaacccacgagtacgcataggcatctggaat

SEQ ID NO: 15232 - DNA, 1065 bp, Zea Mays
gccgtgtgaagtctagagaagtaattcaaaggatttttaatctagcatgtggaccgaggcaaaaaatgaggagacaggcgcacttgcgaaggctgctgcaagaggagaccctaagccatcgaacgtctttttccaaataatcgaagcccccgtcataagggaccccgttgggaacaggataataagtcttatcatgaccaaagactggagggtccccatcgcaccgccacggaccaatccgaggctaaaaggctcaaataccgaagtcgttgcttcgtcctaatagaagggcaactctataataaaggaatttgtcaacccttgctcaaatgcatcacaaccatcgaataggtagatctccttcgcgaagtgcacagaggaacatgtggctaccactcaggccctagggccctcagcgccaaagtcatgcaccaaggattctactgatcggatatcgtatgcacggtgaatcacattgtgcgatcctgtgaagcctgctagaaattggctcctcaaaacaggacatcctcgcagcttacaaatctaatctcctacacatggcctctgcagctccaaggcctcaacatagtagggccactccccaccgctcagggttacctcaagtttgtcttcgtcgctgtagaatacttcatcaagtggatcaaagctagggcagtctccaccataacagcaaaaactgctcaaaaattcttctagcaaaacattgtctgtcgttttgggttaccctccgagctaatagtagacaatggaaaacaattcgacaatcaagatttttgggatttttgtgccttcttaggaacaaaggttgtcttcgcatcagtgtatcaccgtcactccaacggagtcgtggaacgcgcaaatagacaatgctttggggacaagataaggctcctggaggacaagaagggcaagtggggaggccaactaatagaagtgctttggggacttaacacaaccgaatctaggacaacatgcttcaccccatttagactgatgtacggagccgaagccatgacgtcgcaagagctacatctcggttctccg

SEQ ID NO: 15233 - DNA, 739 bp, Zea Mays
ttgctgagtaacacactgttactatttcttttattcccttttccaagcatcagatatactcccaccccatccttctcttccaaattcactccatcttgccccccgatcttatgaaaaactagtggatcttattgcctgtgaggcaaaatgcatcccttttgtctgccaaaatattgatttgaattcttgggccgactgcttcggagcctggcctaatccacctgaagcctaggtgatttggtttagaagagtgtcctaaacttactagtcctaatggcaagctactggcatagctgatgcactacctttgtcactatcccctattgtaaaggatgataacctcctcaaaaccatcggttattttggtctgatgctctaaactacttccttttcggccacgggcccttgacctctacgcttatggatgtcgtgatgatcactagtctagatatttagtctgttgtcccctctgctgtcagtatgcctgaagttcctttcaaactttcatctaaaaacagatagcactagttgggggcttacagttcccagcatgccagaatgaaaggtccagtatctgaaaaagagcacatgacttttcttaacctatggcttgagcacttcatgttttgtggcccttcccttgctctgaccaagaattatatctctctggctcatcgcttagccggaggcaaccccgttagttttggaaagcttttcctaggagaagtttactgattcc

SEQ ID NO: 15234 - DNA, 384 bp, Zea Mays
ccgaggggcagctatcgacatgaccgcacctcttcaagtacgaccccgagcacaccccactccctcgaggggccgatcgaccctgttcatggaggacctcatcatcagagcttctagaatgacccgaatatcagatagtgcgcaatagatacgccataccgggtgtatgactacacacgccaatgagtgacgcaggctcgtgacgacgggcaagaccgctcgtcgcacaactgctccatattactgacctgcaggccccccacgcactactacgagggtgtcagcgggagactcgctatagggacccatatgacgagaggacgagacagtacaccatgatgaaagtacggctgcacacgaccctacggacgacgtcagaagaac

SEQ ID NO: 15235 - DNA, 521 bp, Zea Mays
attggacctctggtagatggctcttggctggtcttcacctcgctctgtgcttcaatgcttctgctgactagacttgcagttcagtagctatatttggatttcctttgatccctatcgatctcttccttctgtctcaatacattcattgcgtatacaatatggatatgacttgttcagaaaatctattgaaatttcctagccgtccccccaatgggtgtggccaagggacgtcttggtacacagagcgtttagcacattgtcctagagtagtaacttgatgtgaccacggggtgtaatcatatcgcccgagcagttgaccttagtccaaatggcgtcatgttacgcgaagcggcatctgttgcctgactcattttaggtggcttgaattgcttattgaatacttgcgactgtttggtgagcgtggtaggaaatgaacaatcgcttccgacctctataaatagcctgcttgcaccgttgttctcttcacttatccttcgatcatctgttgcttctattctaac

SEQ ID NO: 15236 - DNA, 501 bp, Zea Mays
aaagatgaaaaatttgccaactgtaaaggtaatacatgtatttaaatggttggagttgttatttaaatgatgtaatcattcaactgaccatatatccaacattttgttgacaggttactcttttagttgatgagcataagtgcagttccagtagtagaattttgactacgatgccttctcaggcatgggtggctgataaagcattacctctccttaggaagaaccccaacatgggtgctaaagctatgcaaatatatttgcaggatgagtataatgttactattggatatgacacagtgtggaggggaagagaacgagctttgcatgaattgtatggtgggtggaatgagagtttttctttgttgtttaactggaaggtagactttgaaaagagatcaccaggaagtgttgttgagattgacactaaaattgtggatgaaaaggtatacttccacaggttcttttgtgcattgaagccttgcattgatggatttttagctg

SEQ ID NO: 15237 - DNA, 665 bp, Zea Mays
gggtgtgtgctaatgcaaaacgagaaagtcattgcttacgcatcgcgcctactcaagccgcatgaacagaattaccccacccatgatttggaattagcagccatagtgcatgccttgaagatatggaggcactacctaatcggaaacaaatgccacattttcaccgatcacaagagtctgaggtatatattcactcaaccagatctcaaccttcgtcagcgaagatggttagaactgatcaaggattatgacctagaaattcactatcaccccgggaaagccaacgtggtagccgacgccctcagtcgaaaaccattcggaataaaaggaaccaattttatagaagattggaagaaagagtcagcacagctaaatgcatgtctggggaacaacgacagtctcgaagtcaaaccaatgctagaggacctcatccgcaaagctcaacgactagactcagagacagcaaggcttgtggagagagcccgcaaggaacaactcccggacctcaggacagatgaccaagggtcctttggttcaagcaccgtctgtgtgtaccaaaaggggaagcccgagaagtcctactcaaggaagcccacgatttgccctactccatccacaccgaaactaccaagatgtacctggacctcaaaactagatactggtgg

SEQ ID NO: 15238 - DNA, 1043 bp, Zea Mays
gcgcacaggcagaggagtagcagcagcgcgttcagcctcagtgcatgcaacaagacaacgacgatcgcagagcctcagaggaaacacgatgggtggcgcctcgctaggttcctcccacccagccccgtcagtgcttgcttagtgttccttagtgcatagtggttgatgacctaaattaaaaagtatatatggtaattgtttttgtgcgagtacatattagattttgttggatttgtggtttttatctagctgattttattctcgaactggaaattgtagattgtacgatgctaccagcggctgcgaccagtgggtaagagtaagattgcgaatcaggcctcgagtccatagggctagccggctagcgctgcccaggtaggggaatcgatcgagccgacaacagctgagcagcactacaggcttgtagcagagggacagacggacaacagccagccaccaggccagcccccttcaatttccacgacgtttcatgagtggagggagacacgatgcttgcatgcagcagcttctcggcttgcatgcaggttctgcagcagcttgcggcttgcatgtggcttgcatgtggtttgcatgcggcttgcatgcagtggaggttgagcaacttgcgtcgcttgcatgcagggaggttgttgcatgcgaagcgcgagcggaggcacggtagtggtctacattagagtcttaatagttgtagagatactctcttaatcagaaccatgtttgtgtctcgtatcaccatctctaccccttaaatccactagtttaaactaagctaagtacacccagcgaaacaacccacgcactcatgcccctgctaaatccaccaagcattttaacccaaacaaattcatctataaaaaaccaacgctccagatcatttcatttgtctactatctcttactcaatcccatccatcggttattcttcaatggatcatctaacgctactcatcaatcattatcatcgatgatcaatactgcacaaaactctgtctcgtggccgcacttcggccacatacgaacgcg

SEQ ID NO: 15239 - DNA, 468 bp, Zea Mays
tttggaaactttctaaccctatctcctttcgttactctttggagatggtttcttttgcaggacgactggttcaagtgctcgaggagacagcctctccggatgaggagccaaggtctagtccttagggtggcaggcccaggtgctccaccggggtaacgcgtctggcgctccagctctgatcggtcacccctcccggtcgtagggttggttgggcctaggtcgtgtaattctgagcaggagggttgttgctccttcccttccttctggtcatatgcagcccggagcatctggccccagacccttttgttccttgcgttgtccgagcttcaaggttgtctagacgcgtcgcaggtgatcttgaggacttatgatgttcgcattgcgggctttcaagcgcgactggctgccgtagaggctcccgctccgtatcgcctttcacaccttagggttatttggacctcatccttg

SEQ ID NO: 15240 - DNA, 850 bp, Zea Mays
tacaaagtctttactataagttatccgagcaaaggccgcctaagggtgcagcggacttgcaaatacgcgacatcaccctaacgacgcaaagtgtattacgatcaccttaaaggtgcgatgtctctgctatctgacacggtcgaacaaaaatcacctactgacgcaactaggtacgtgtcataagcatccacacatcgccatggcaagcaaagtccccatctcatttcacaacaagcaatgtcgtcatagtttacatacacacagcgaagggccaccggccacattgcacaaataatacaaatcgcattttgttgccctccctctctattgcgagccgggggagggcagcgttttcgctcaccaccgcaacacataagcgagggcagcaaacatgctacatcagctcagccttcgggataaggtctgcctcacaaaaattaaacaacatcatcctcaactcctcaccttcaaaaagattccacagatccccctccccaatacacgtcccagaagtcgaggtcagcaaatctcgttggccacccctttctacccgaagacgggttcgttccatccccatccgtcgacgcctaccacttcgcgacatctcgccaacattatgcttcgacaccactctacgctggaggtgctcttcgatcatcaccctagccgggggagcagacgcttcgcgcacttcagactgcggcaaggactccgtcgcggccacatccaacgcaacaaaataatccagtccgcatctgaagactcctcagtccacgaaaacggactcccaaactcacccccgtcagatgaccaagacacagtttcagaaccagacaaattttcattaata

SEQ ID NO: 15241 - DNA, 320 bp, Zea Mays
gtttggacctcaaaacgacccagcgctacggacaacaggttttgctgagtttggacctcaaaacttggtggcggcggttccagtgagaatcggtagcaacacgtggcatcacaacgaaggtgtgtcaaggcaaagtaacttcgtgtgaagcacctggccgtcggtgttgggcactgtcacatggatgaactgacaggtggacccaaacactcgggggacaggtgagagctcagatgcacaacaaaacaaactgagggaactatcgcttcttgttatgcgtgtctcatcttgctacaggacgagagtatttataggcccgc

SEQ ID NO: 15242 - DNA, 421 bp, Zea Mays
cgagcgcgcgtgcgttgctggagcttggcatttctgctgctcggcgcggaattcgtttttttgtgcgtgtgtgtgggggaattttttaagactgcagtgtggccgcatggttttcgcgttgcggaaaggatctagcgacgcgtgaggcctacgatactgtcggtggggtgggttcggtacccacttcgtccccatccccgcgcgcgcgtgtgcggccactggcgagtggcgtagtgtgcctgccttttggaatgggggttctgcttagactggcacatgccttcctctcagttggacctcgttgcaactcgttctagtaagggctcaggatacatgggattgattgttggatgcaaaagttgcaatgtacgagtgctgtgctttggttttgtttgtgcatggaggctgttgcttctttacc

SEQ ID NO: 15243 - DNA, 409 bp, Zea Mays
ggaggatgttaaggaggttattatgcgtcccatatggtcccgcttcagccttcgaaagccgaaggttgaaatcgatgaagctgctgaagcatgccagaaggcctttggtaccgtatgcttcttcatcggtacaagagacttgattcaagaacatatagcatttagagtatggccacttgtggaaaactgggagatgccgaaggagactgtcaccgagtctaatgaaggtgacctggttcgactgaaatatacattcagatatggagataaatttgatgaaccaaatgatgactggttgagatgcatcgaagctacaagtgatgaactgcttgggtcatattccaaagcagaagataatgcattatccacatccttcggaggctggggaaaaaagagattgaacatggtt

SEQ ID NO: 15244 - DNA, 723 bp, Zea Mays
cgaaaactcgtttcaacctgacatacgagcctcgtatatcccaactccttgttagctccgtcttcgttgagtatttaccgacaattttcaccacctccgcttccacctccctgataaaggcggtcgcatccctccctcatagctcaatggcgaaggcgaggttctataccatccgattatttaagaagggcatcgggcgcagcttgacttcacctagatcccagtcgtgagccagcggccacacaccgcatgcaacgaattcctccacaaaattgcgatcgctgctcatcctagttgtgcgtcgaagggcctcttcacccttatctcccttcatcatcttaaattgtggtaacgccacatagcattgtgagcacggaatagatgtggcagcccaggcaccccctcgatgtcctccggcgccatgtagaactagaagtcgcaccaattactccacttatttttagcacacgacacgatttcaaccacttcacctaaattctttcctgtcctcagcgtgaagatgcaagatccaaactacgcaatcaagaccctaatcacctttttctgctagtgaagatagtagttcttggtgaagactttgaccgacagctctccgccgtacgatgtcaccgtccacaaaaacttcaccagtgacatcatggcatttggcgtcagctgatgaatctgtacctcgaaccttcgtagcacttcaactatgaaccg

SEQ ID NO: 15245 - DNA, 457 bp, Zea Mays
gaggaagtccccttaattcggaagaatagtcggcgttacatagtccatggggagagtagcgatattccttctccagctttgtctgctctcgttgatctgcaggaattgtccatagcaaactttgatcaggctctcgaggatgtggttcctgaagatctgctgtccgagccaacagatggtggtatgatggacgtttgctctgacattccagatgtgggattagagttatcccgagcagcgtctcgtgcatcgtcgaccttggagtgtggtcttcggagtcaagaggctggtcaaggttgttccattcccatggaggtgactgagaatccttcagccttagaggtggctgctgcagagaacccggtccccaaggatggtgcaagcggttacccagcccctgagggtgttgctagtaatgattcaactcgggtgggtagtgcgagctacaacccagccc

SEQ ID NO: 15246 - DNA, 417 bp, Zea Mays
atcgtttgattcgaacgagcggtggagatcaaatcgccgtctctaatgatctggaggggatcggtgccgttggatgaatagtgggcggtctagattagaaaggccatccccttcgtataatgagacttagaccgtcgattgtagatcggatgattgtaatcacgcgctagttcataataacgtggtcagatctgggacgtcgtttccgaatcctatggttgaggggagagcggatgacttgtccagggctaatctaatcagggcgccttgtttctgatcggacggccgagggatcacgatatcccttcgtcgagcctgttttgctaaatagaccctaggaatagaagtattcaacccaccgtccgctgttgttgttcactgagttgtggtaaaactaaggattagcccctgcgattt

SEQ ID NO: 15247 - DNA, 531 bp, Zea Mays
ctgcttcgtgcacgcgcccttctgcgccgtctactacgcctccgctagcgccgcggcgcgggaggctcgccgcgacgcgacgcacgtgtagtctgttcggttctattagccacccctccatgagaccatgactgtatcgtgctcttgacgaaggtgctggcacagaagatggcgtcggacgggctgggcatgggatgtaattttgctcgtttctcgaacgatcatgcatggctgtgcatgggatggaatttatctcgtcttgcaggtatgcggtgtgcatgtgtagtatgtataacatctcgccatggcgttcgcgaactggtacgctcgccggtgaaatctttcaggaactcgatagcacgatgtttgcactgttccacaatgatcgagagcgggtcgagttgacagttgacacaacattatattcaggttgatgcaaattaggatggcaaccgagaattccctctcgaggaataactccccgaccccgtgacgagaattccctctcgaggaataactccccgaccccat

SEQ ID NO: 15248 - DNA, 779 bp, Zea Mays
gtcgtcgatgcctcctattgttgagtgaaatctctgcccctagcgattcttttacttgtctttgtacaattgtactaaccattcgctctccggctcaaaagtctcctccagtatgaccttcgccgtttccttgttgctgatcttcgccgtttcatgagtaacatcacgggggactgcagtctgcaagtctgttatggttattgcgcctccatttttatttttattttacgtttcgtgtcagttacgggtaggtcaaagcccggtgctggtacctggtagccgttgctctagtgaggtcactgatctgtgggtgaacgatgaaaaagggtgggcggaccagcggagtgtaggagcagcggcttcatcagttttttttcctctccctggcctgatgaggccggagccggacgaggaaacgccagcacccagcaggcacaggcccaaaaatacctgccccgaaaagacagtagcagattttttttaaaaaaaattccgagcccgcatttcttaaataattgacttgcagtcgtggttaagcaggaggtggacatgcctgtcgtgtagacgtaacaatatggtaccaataagtggcgaagccagagcaaaattaaggatagtgcatttgacttgtggatgcatagaaatttattttaccagtgtatatatggtgaaattttaaccaattctatatattttgtgggggtgcatttgcatccgctacctatagtgtagcttcgccccttgtaccaatgtaacacacagaatcacagcggaaaata

SEQ ID NO: 15249 - DNA, 377 bp, Zea Mays
tgaagaagaagaattgttttacgaggggacttaatgataggcttcagcgaaaaatggcaacatgtttggaccttacctatagcagggctatcagtacagtgctggcagttgaagccaaaaatgtaggacacggaaaatcaaagggatatgcgggtgagagataaaatcaaggacctaaaaagagaacaaggttggtcatccgacctttcaatcaaaatcgttcttcacctctcccaccttcatatccattcaatcaacctgtctttattcatctcactactgcccctgctcctaccaatcagccgagtgcccctggtactcgtttccctacccttcccagttcttccagtgggtgcttcaactgtggaaagtccgga

SEQ ID NO: 15250 - DNA, 490 bp, Zea Mays
tctcccagctgacttaatgagatcaaattggggccagattgagcatcaggaacagttgacacgtcatcgatatcacgatcaaagtcttcagggggacggtgtactacaatcggacgcaccacaacctccatgagttacaaatgggtcttcatagccgaagtaacataattatcccaatccagttgagaatcaattgggatgactcgtcttatgacatttggtggatgaccaatgttaagcactccgtcaaccgcaatgtcatcatcttcatggtaacctagcttttgtttagcctttgtaaacacatcactcaaggagggtctaccaacgaatagtaccagcacgtgtcgcatgtcaatgaacttggcatttccatacggatcttcttccacattgcctccatgatataagctcaaaaaaattgtccatctatttgaaacacgaattaaacattcaatgtccattatgatggttattgcataaccacaac

SEQ ID NO: 15251 - DNA, 1219 bp, Zea Mays
attaagccttggtgtcatgtaaaatttggagataattaggtccaaagtcaagctgacagtcagccaatgaactgaataaggggtagcagtgaggttgggcaagctatgagattggattcgaccatgatccagtgattgtttgagtatggttgctatagcaagattgtagctggatcatagggttacaactttgttaaagatggattaataagtgttcacatgaaaatgcgagatctaggctctgcaaagtggtatgtcaggatgactaaatgagaaactgatggtacagtatcgaaaatatctctggttcagttcatctcgccgccggtgatcctgcgccgtgatcggcgtgtcgctgcgattcgtgctcagtgaagtacagatagttgctggggatgagaaatatcgcattaaggatgaacttaggccactgttcaaccccggccactgtgtacgcctaattcgccggcgattcagataagatcgccggagttggccgtcgatcgatcgcgcgccacgtgcctaggtgtcttactacgtcgcattaactcgtgttacgcatgtccgtttatcgccggtgagctcgccacggtgaaagccaccaattcgttgcaacagtgctctcccttctcttcggccaccaccgcgccaactccaattcacgagccaccgcccccgaatcctataaatggagagcaccatcggctttgccatgtagtcaagcactcaagacactcacccatgcctccgattagccaccagagggtcccaatttaggatttccccctaatcggtccagagcgccgtattgagtgagctcaccgtgaccagcgtgctgtaggtccgttcatgccctctgttctcttgttttagtacacttatgtactcctgatacccctcgacccatccaattaagctaggacccgaaggatcaccgagaacgtcttggtttgtccgttgctcgcgctgtcaccatggacagtgtgagtaagagctcgaaccatgcaattgatcgaggggaaatgattgttagggatcgaattaggtgtcaaccacttctaagcaccagtcattgcgtaacttggccggtacaggttcatcggagctcggcctatcgctgttcgtcgtcgtggacctggcgttgtaaagagaaagacggggagggaccttgatgcaaaatgtcaatgagacaaaacaatattgttgcgggctctttaag

SEQ ID NO: 15252 - DNA, 507 bp, Zea Mays
gcatagaggatatttttatgaagctaacgcaatttgaacggagcaacatggagttaaagcgaattagttatgaattttacaagtttcaaggtttatgcttatactaaaaatcaatttcagatataattaataaaatatctagattgtggccacgaatccctgagaactcaagtgcttttgcaaaaattgtaggactggtctatagaattacttacactagcatggatgtcgggttagttctttctaaacgcaggggttcttttgcaatttggcgctgcccaaggggtaagctttaatcctggccgtttgatggctagtcaagcacctagattatattaggttgacaccaaaccagtacgccaccctggacacccgatctaacatcaacgttcatgatttaaaatgctgagatggaatcccatacgcccaatctcgatccaacagcatagcctcaatctaatctcgtccatccaacgacgaatggatggctcccatctctcttcttcc

SEQ ID NO: 15253 - DNA, 510 bp, Zea Mays
gaaacccacaacggcagcattttctacgccatttctgttgcttgtgttattttctcaaatttttaactcttgctatcagctctcgcttgattttcgagcttcgtgatatacacaagtgcttgttgcatgtctaaagagaagaagatgtttgtggagaagaaagttgtggacccttttcttgctaggttttacgaatctatggcaaaaacaaatacagataagatcacaaaggaaataatggcggatttgtgtgaagattctgacgatagcgatgactatgatgtggaaagtggggatgaagattctgaagaccggccctggcggccaagccataccatcttcgaaaagtcgaccattaaacaaagtcaaattgaagccatgaagggaagatactttcatgacatgtctattgtgaggtttggaggggacaacaccgcccctgctcctgaagaaaatgaggttgttgtctacagaagctttatgaaggcgggtcttcggttcccattgagc

SEQ ID NO: 15254 - DNA, 491 bp, Zea Mays
ctaggactgcaggttgatactggaataacaaaggggtctatttgcaacaaagcgcgaccaaaggggtacgggtgtttttcggtcgttggatctccgtcagatggcatagattatattgccccaggtcatgtcccccgctaccgttggatcagggatccatgtccaggatttgaccagcattattatgaactagcaattgcttacagccaccaaatctacgatcgacggcacgaatctggaggcgtgaacgggtaccccaacttctaatctggatcgttgttttatagatctacagttgagacttgtcttctacccaggccaccagcgatgatgcgagctaagtctgtgcggcggatatcaccgccggcgaaaatcaatccgccccctaacggtgaggtgggtcgatcctattgaacgcgaaatgaaattaaagatcaggcgatcgctaaggagatgtattaccagaattatcacgatgaataagccaacga

SEQ ID NO: 15255 - DNA, 418 bp, Zea Mays
cggtggtgccgccggtcacacaccacggtggagggcaccggcgagttcggtgaactgaggcccgggtgccccaaatcgaatacccgaggttcctacacatagaaagggacatggcacacgcggagtaagctctcgtaccgtagatggagcgccgaggatggtccacgtcggcgggtggcggacgatggaggtgcagcgagcaattacgaccacacacgacgaagatcccacgcgagcctgaatcggaaggtctccacaaccggtggtggggcacccaagctggtcactccggtccaaagggcggcggcacacgacgaagagcggattcgcggtggcaatccacgacggcaaggaatttctccggctactgcaggcgccctcccaattagtctctcacccatttcctatgaggctagcc

SEQ ID NO: 15256 - DNA, 433 bp, Zea Mays
aaaaaatatattccgctgtcctagaatcattgtttagccttgcaatttcgtttcagattgttttgttgagtttgtgttcgtgtcgtcatcatagttcaaccgctctatcgctgttatttgtttccgccgctatcccatccaccttacccagattacaagtcgagacaccacattactcgatttgccctcgctagccgccttgtgtgaattctcgccacgctagccctagattaggttgcaagccgcattgcattgcagcccttccttgtttcatcatctcgcgcttacctattgcttataccagggaggtttgtgcccctgtgctctatagccgccgctacggttcctaccaatttgtgccctggaaaaccataacttgatgtaccttccataaaacgggcataacttttcgctcggtgctccgtttgagctc

SEQ ID NO: 15257 - DNA, 881 bp, Zea Mays
caagaaccttgctgcgccaaccacgaaagttcatatttttaatagcctccatttcatctatatgcagtaaaggaccttgaagtttcagtcgatgacactgatgttctgttgtttcagataagtcaccttctggaccaatcatacactccatggatgtgacaattttttctctaattgggtcgattggtgggtttgtaacctgagcaaacatttgcttgaaataatcaaaaggcagcttctctctgtttgacataacagcgagaggggtatcgtttcccatggatcctagagcttctacaccatttttggccattggtagcagcaacatttggagtgtttctaccgtgtacctgaagttcatcaactgggttatatgtaaaagaaaagaagtatataaaacactaaggttgagatgttgcttacccaaaggctttcagcggagccaaaattccatgaatacaaaaggcttccttgttctcgctcttttgctgcacaaaagtgtagaagaaccataaattagttcatctaagtttttcagcaacaacttctagcccaacaaaccaagcaaaagccatatggacttactggaagcatgccaatcctaggagcaattctctcagtttcagatacagattctataatatctgcaagttgtatcttttgtctctcaagccactccccatacgggcgagctccagagtattgtttcttcaatgcatcatcatccacaatacaatgcttctcaaaatcaactaaaagcatcataccagggtttagcctgccctttctcatcacatcgtcattagggacatcaaccacaccaacttcgctagccatgatcacgcggccactgtatgtcacataaaaacggccaggccgca

SEQ ID NO: 15258 - DNA, 755 bp, Zea Mays
aaaaagcaaaaggtgaactaaagaaagtttggattcagttcatcggaatttcttcggagatgatgaattttttgcttatatgggcagtgggttctacactcggagttacgaaggctgtagatatgaaattcaccaataagttcgaggttggtcgcctgcaagtatcggttcttgatccgaatcttatcccgcagttcatggatgttgtaattggtcgtttcatttatgagcttcaattttgggtggaggaaaatattgatgaaattaacccagagccaatggatatggattatactggctttggggaagatgataaaaagtcataggataatggttccagtaaacaaaaatttgggtcactaactttggaacaaaacaaacagcatgttgtttcaaccggaaatagggctacaaggagtaacatggggaagaaagttactgaccagggggtgcagacactactgggttcacaaccaagtgttgttgatacacagattgacagtggaaaggacacaagctgggcgctggttccaggatctcctaatgtctctacgctgagtgctgatctgaacatggctgatgttgggattctatctcctgaagttctggctcttgctgctgtgtcggaagctaacaactcagctaaattacttaggagcaaaagaagggtagctacaagtatgaaggactctgttgctcgggccaccaaactgaaagctgcacgcaacttagactcggcgttcgctgaaggtaca

SEQ ID NO: 15259 - DNA, 517 bp, Zea Mays
ctgaagatctatcaccttcggcgaatttagttgcacctttttttgtcagaatccttcgaagttggcataaatcgagacaatgtgggtcccaagggacttgaaggagagaatggcagcggtcgggtcattacctcaagaatctgagtgtagcctagtgacgagttcgtggtggtgcttcccttctcctgctcttgaacaattgcagtcttcgttggagccgaagcttttttcgtgactgcatctttctcagcaataggattggctttttttcttcacctgacccaaaattggctcttcggcctcattctgtgcaaccctttttcttttctccctagccccagtattggccgaaggatcttcgtaatctagttattcaaaccctaggtcatccataagaccataaccctattaagccgaagcttcccttgaccctcgaaggcagatcgcatatcctcttgccctctagcaagataattaccgcacattttatttcatttctcttcaataaacttttgcc

SEQ ID NO: 15260 - DNA, 388 bp, Zea Mays
gccgaacggtccggggcattccagcggacggtctggcaaaactcaggagccacaacgaccgtgtaccttcaaaccacgacgactagagatacgtacatggaaaactaatacatttaaggcagctggtcggctggtcaaaaatctggcccgacctttgatcaattattatctaaatatgtgaaaaagaaggccggccaaagtgaccggccgccaaaacgaccttgctcacccacccagaagcaacaacaggtaagaccgattggaacacctcaccaatcgacaaggacggaaggtcataatattcaattaagacctaatgtgcctgcgtggacacctccacctccatatacacccatgccatatcattatacatacataccgccaccac

SEQ ID NO: 15261 - DNA, 795 bp, Zea Mays
acaatggcgataggtgcttgtggtagtcgtcgatactttggtgagcaattgtggtctatactatgcgtaattgggcgtgggcatgggtcctggatgttggttaccttcatgcaaacctcctggcgctgaacagtgtgtcaacatgtgcctaggaacctcgatcgacgacggtaggtcatgacaaagtcagaagctccatggcccgggatgtggaagacaatagagttccatctagggatgttgtagacgtccctacctccgatgaaacttgtggtatcgacagtgaggtcaaaggtactctggtgcgggtagaacgcatttcagaagctcgatgatggcgacactagcactggtggtgaagtagaagggttctggtggctgagagctcatgctataaggagataggggcgcagggggtctggttttagaggtcgatgccattgattgcagggagaggaagaaaacgagggtagcacgaccgggggaatgaaggcgaatgtcgtgagctcctcgatgttaatgaacgctttctagtgaggaacaaacaaggataagagatgaatatgcttagcgagatccccaccttcgattgacggcgatggaaagtccggtagggtcacacaggggcatgaatgtcgacgatgtgtccaacgcaaataggagaaatgagcgcaggaggatagggatgacttgcgattcttgtgtgtttaaagagagtgtgtgtgcgtggacgtggctgaccatgagggacggagcggggcgtgggccgagagccactggggtgctggatttgca

SEQ ID NO: 15262 - DNA, 1252 bp, Zea Mays
gcgggtcagtgttcacatccagaatctcagcgcatataaaattgtcgacaacagaagcatcgaactcctttgcacccgcagccaaccacacaaggcaatttatatgtggcaagcctcgtttttggaactcaacagtatacaagaccgcgagaactggtccaaatgtcacgccctgccttatatcagctatgagctcatcgactttcatatggaagactcatacaactaagtctgaacgatcgcatggttgctgacccggttcgaagcgcaacgcatccgcaatttccctccatttggggttgcatgtgaaagtcaaaaaagatctggtgggccgtacactctgcaaatagccatcgcgtcttggtaattcataacatggtatcgcctactgccagtgaaactcgcaggcacgatcactttaccgccaacagcgtccgcactaattagccctctgtcaacggcatcagctatcccctgcactgattcagatcgcaggtctttttgatggtcggctatgaactgtaacctggagccctcgatagttgaatacgcgtcgacaatgacctgagcacttaacctaccataacacgtgtatgggtttgactcgtgtaatctgtaatgtaaatgtcttcttacaaattcaagcattgttacatattttcgtttggtcccaacactgtcttcatcatcgcagtaccgaatgccaagatggtaaccattttcaccatacggaaacaacagagggtactgcaaagccatgtaggatggatgcaagcatgagacacgtcgtagcccgcaatttctatcgtgcacaaggacatcatatgtgtattcatcggcggtgtagtcgccgacaatgatggcagcgacttcgccgctggagggaagattgtattggacatcttgtctagcatcacagcctaacagcctgagtgttatcctctggttacccgcttgttccaatcgctcccttgcatatcgaaacgctttgacaagtttgttattgtcatttaacatggccaacaaagccatagttatttcacgttcaggttgttcagcgacaccatcatcgacctcgaacatgtttagcctgttttgtgtctcgtggtttgtatcatgaatatacaattgggcaaatttaggcatcgctccacggcgtggaagcaaggtgccgatacgatgatgtactattccatttatcttgaaaacataaggcgcagtaccattgtttatcgctttgtctatagcggca

SEQ ID NO: 15263 - DNA, 474 bp, Zea Mays
aggccgtttaagtcgtttaatccgtttaaccccgtataatccatttttagtctgtttaaacgcacgtgtagtccaattaaatggtaaacagaggatggacaaatgtttaccgtttagcgtttaggataacactggttgcaggtgtacatcctggattcttgtcgagcgcgacaaactcctgaatctctggtttatagtaattttgtttctcaccaagctgatccatctatcttctatacactcgctagcaactgactcatttttccaggtgactaatacaaacatgtgaggcacgaggttccttggggccattccatcaagccagctgttgtgccagaactttgcatttctactatcgccaaccgagacccaggttaaggcgcagaagaacagtatatcagtgttgtcacagggagcatcctgtcgaggccatagttggttcccatctcttaaggctcgccaaagctaatgaag

SEQ ID NO: 15264 - DNA, 572 bp, Zea Mays
atggcggtggggtgatatttggatatgcaaaaagagaaaaagtaatcacatagaccttcataaattccaaggctttattattgtttatacctcctaaattttaggtattacaaatcctacccctttagaagaattttgacctcgagattacgacgggctaggaaaaagatggggaaattctactcgcaattcttattctctctcctaggtagcttcatcctccgcgtgatgactccattggactttgcacatgtttatcactttgttcctggtaactcgagtcaggttatcgatgatctcgataaggtacttgatatatgtcagatcaccctacacactaagttcttccataggcaactattcctccgggactctaaagcacttcttcaacaacgacacatgaaacacatcgtgtacatctgctaggtgatttggtaactccaattggtaggccatttctccgactcgctttagaatttttaagggtccaataaagcgaggggacaacttccctttgactttaaatcttctcgtaccccaaattggtgacactttcaggtacacatgatcac

SEQ ID NO: 15265 - DNA, 443 bp, Zea Mays
attctttcacggtggcggaaactcagtttgggggaagtgagaaatttgtggtctctggtgcataattggaggcaagcgtgggtgcgttggcttcgtgataacatggtgcaacagacccggccatcaatttataggatcgttaagcggtggccggggatttggacgaagacacgcggcggtcagaggaataggaggttactggtgctctggttagtggctttcactgtggcagtacaccggcgatccccgtgcatgcgagacgcgatttacagcgacgtggtctaacgctttagcacatggcaggagatcgacgggcagccaatgctggtgaactgatctgcgctggccgcaaagcatgggggtacgacggccagctactggagttatccccaggcgaagatcttttgccccgaagtgctatccggtcactagtgagcgcgaat

SEQ ID NO: 15266 - DNA, 518 bp, Zea Mays
aagatgacggtggtgttattgcctacaaaactgtcatgccaaaagtgagacacagaagattgaaacaaaaaaggacggaccgaggaatgggacttgcctgagaagccgagatcgaggtttacgacacgcttgtcgtaagcaggcagcaaatctaggtcagggggagatggaccttgcaacaagacataggggttagtaaaatcgaagcaaaaatacaagaaaatgctaaaagaacaacagatctagatgggggacaaacctgagaagatgaagatgtgattgttgctgcggtgagctgatccaggacaagggaaagcgacgatccaaccaaccttgcaataaaaaataacatagtggtgaatcggtaattaggggacctatggggactaacgaaaagagaagatctagagggggactaccctgagaagagggagatgacacaactagggttcactcgcagctgagagccaaacgaggtcttaggtgagtgttccttgcgaaaaacaaatcaatcgtcg

SEQ ID NO: 15267 - DNA, 532 bp, Zea Mays
cattggtacaagagatttaatccaagagcatatagccttcagcgtatggccgcttgtagagaactgggacatgccgaaggaaactatcgccgaatctagcgaaggtgagctggtccggctaaagtacaccttcagatatggggataaattcgacgaaccaaacgatgactggttaaaatgcatcgaagtgacaagtgatgaactgcttggatcatattctaaggcagaagataatgcattgtccacagccttcggaggtcgaggaaaaaagagattgaacagagtttttgacgctattgtcttcgtctatcccgactaccgttacccgctgcgggggcaagggaagaaaaggaaagctactgttgtggccgcctcggccgaacctgtgtcgaaggctacaagcaaaaagatgaaggtccttacccactggccacgctatattgaaccgaccgtggtgcctgagtttggcggggagacttcttcagctgctgaaccaaaagagcccattcctcctacgcagaaggctgaagag

SEQ ID NO: 15268 - DNA, 746 bp, Zea Mays
tactcatgatttacgggtcctaggcctgagacccgctcacgacctatggatccttggcccaagacccctgacgtcctacgaccctgcacgacgacaagagagaagacaagtggacgggctacaaaggcattgtttcactagtgctagttttaatcttatttggcaatgacgtgaatatttagatttgttcgtttcaagtacacatatgccatcatgttcatgctttatttttgattaaattgaaactaaatattctaatttatccaccatttgccatagctttgattatatcaccggataagggcactttctatcacatggaaaccctaaccatacaaagacaagccacggaaagggaaagtgtattcctagggcattttagtcacacacacatcctagccatttgattatctttttttgcaccttgagcaaaccaccatatttgtgcaactattagcagcatgtcaaactctaccacacctatggcagattttacgcacggtgacgcgcgcgctgatgccaccaccggtgccaactcctattggcacactctgccgcacaaggaaaacgacgttcggttcagttcatcattattcgtcaaaactactgcaaccatatgtctatctgactttcttcccacacatcagctgaccaaaaacaccacacaagccaggttccacgccatcccgggcatgcattctcgtgcctgcaacaagtcaacagcgccacgcacccacacgctaatt

SEQ ID NO: 15269 - DNA, 790 bp, Zea Mays
cactgcacccacctaaactcccgggtggaaagcctagagcaacaaatcaaggaattgaaggaagaaaaggcggctcttcaagacagtctcgagatggcagaaggcgaagaagccaacactcgtgaggcataccggaccctgaagatggactatgctaggaggctgaagaagctcacccccgtcaagaagatccaaaagtgtttcaagagccaaggatgccagactcacccgaaggaagaagccccgccaacactaccctctctagggatagagaactttttcgacatcgaagaagtgtccctggctagccttgatgatctccttagagagtttggggacactttagtggataacgctcatgcgtagtgtaatctgtggtggttgttatgcttgtaatgaattggagtgctgaataaaataacatgtttaaaaaaatgatggcatatgcctagtaataatcctttcttccctctggcagatggtctcggataaaaccacgcctaccgcctcgggaattggagcaaggattcccctaggtatcgatggagaagtcggtggagaagggagtgagacccacctccccgcgtctccagaactgccgttagacctagcccaggttctggccaaccaaacccgactcattgaggtcctcactagaagcctcgagaaccagcgcccgattggaggaagacctcaggacagaatgggagagttcctaaggatcaagcctcccacattcgccggatctagcaacccgctcgatgctgatgactagctgcgcacagtaaag

SEQ ID NO: 15270 - DNA, 736 bp, Zea Mays
tttgtgacaaactggcggctgaagtcgtcctagtcgtcgatgcagtggtgaggaagatgtcagagccattgcagcgcatcttgctcgaggataatgggcaagtacgctgtcatgacatccttcgttgctccggtgacccaagccacagtcgtgtagacagccaactagccacccggatcctgcttgggctcatacttgtcaacgttttagaatttgaagttaggtcaccattgaattgcccggagccgaggggaaagggccgagacaccgcatgtcccccgctcctaccagcgatattctcgagcatggtatcgatgacggtccctaggaggtgagtgacatcgtgcgtcatgtcgcctctcctaggcagattggcctacaaccgggcagttcatagaagatgttgtcgacttagctctggtggcatggctgtgtgctggtgcaccatgatctcggtcgtaatcttcctgtcacctcatctccccttcgtgccgacgatcgcgcgaagcattgatgttgctccctgcatctcgctgactattgatgacgtggcacatctcgtttgctggatgggcgagtagaagaagattgttcgccacctgggtgaggatctgcctgtagccttccgcgtccgaggtgcgaggcaagcctttagcattggcgatctgagctaggtctccactgacttcactcggcatgttcaatgctcgagcaaaatcaggcagcaagttccgag

SEQ ID NO: 15271 - DNA, 657 bp, Zea Mays
ccttttatagtttaagggaggtacatacaaggatgctaagccccaacatgcaggcccaggagcataatgaatacattatgtgaataattaatactgacagcacaccaagatctttactggatgctgtgttgctccctctgtcttagtaactcatgagtaatcagcggtagtcatgatgactgcagtccatgcagcattgataggcagtaacccttttcttggaaacacacgagtaatggtgagtcattgccctcgctatggtaacgtgtgagttactgcacggctcacgcatcgtggactggccgcgccgcctgtcactggaatggacagacgcacgtcttatccgtaataaatgccaagatgcgcgtagcccagaggctctatgcaggctccacccgttggcttacgccacgcatagtaggccatgtggcagcatcgggtctccgcctgggtggggagcaggagtgtatgtgataaggcgtggatcccaccagatcgggactagacgcgtgtcggctccggacccccgcctgggtcctgattaaggcccgggtatggcgctaagaggttgtaggaccctctgtagcgcacacaatcctagtgggttgtgcagatggtacgccactaggaccgctagcttcaaggtgctagtctcac

SEQ ID NO: 15272 - DNA, 368 bp, Zea Mays
ttgtgaccaatttagcggtgttctacatcttctcccatataaggcttcaaaaggtgccattttcaaactggactggtagctgttattataggagaattctgccaatgaaagacacttgtcccaatcctttccatagtgtaacacacaggctctcaacatgtcttccaaaatctgatttaccctttctgtctggtcatctgtttgaggatggtatgctgagcttcttatcacatgggtcccaagtgattcctgtaattgctcccaaaatcgtgccacgaatggtgctcttctgtccgatactatagtccttcgtattccatgcaaacgaactatctggtcaatgtagatctctgcatacttctccgtcc

SEQ ID NO: 15273 - DNA, 430 bp, Zea Mays
cgccggctggctgctcaagcccatctatcgtcggcgccgagggaggtaaacatctcaaattccccatctccactttctgatatggtaacaggtgatgcccctatggagtgcttcatagacttaatgttgttgtcaaattagagtcagtttaatttcttccagtgcgagtgttaatttggttaaattgtcctggaccagaaaatgcgtatctaccagcctctattcataatgcttggtttcctagtctctgaaaatatcgagcctatcctgttttgacctgtaacaagctatgggattgttccatatatcttttcggaatcacgaaccaaataatagccgcaggactagtgtgtgagtttcaatcgcagttcagtaaccaatctttataattaaatcatgttgtaccaacaatgacatataataagtcctc

SEQ ID NO: 15274 - DNA, 382 bp, Zea Mays
aacaatgacaggaccaaagaatcaaatggacaaggacaaggggcctaagcttaacgacaatgagtgtgtctctcagatggaattgaaggagatgatgcacgcgatgactgaagcttttaaaaaataccaggactctacggcgacatcctatgagcagcttgatcgacgagttgctgaacttgttacacgcatggacgtactggaggctcgtcccccaccaccaactccagccccatctcactctcctgtagaggacgacggcgatgtttatgcaccgctaccacaacgcctcgcacgtaatcgacaaggtatgggtggtaatggtagacgtcgtcttcataatcctaaaccagaccatgatccatttgctaagattaagttc

SEQ ID NO: 15275 - DNA, 432 bp, Zea Mays
gtttggcagtttctctgacccctcatctactattgcgtgagtccctcatctactactgcgtgagtaacaagagtaagtagcatatcctttcagaaagcattaaactgaattatgtgagtgaaaaaggttttgagagactctgcctgttcgattcaatgaagttgtgtgaataccagtgccgagaaaacattaaaaacatttatttgatgggtttcacgcattcaatccaactaaatcgtgtgattgaatacgtttatttgagaagctttgtccttattttatatttgtttgctgtaaaatactttaagttattgctttatattaaattgtttgttgtcaactaaaacgtatatatacacacacatatatagatttgtacatgtagttctatataaaatctgccataccttaatttttgtgcgtcctccgtca

SEQ ID NO: 15276 - DNA, 735 bp, Zea Mays
aattgtttctgtggcaagaacatgacaacgagagaaatgaaaattacaataggtgtatatggagtttttaacccagcccctctatagcttcagtaaatgtgccttgactttggaacaatgctattaattgtccgagcttcggactattctctggcatcgtgttgttgctgaatttggcgctgcccttcaggctgctagttgtgggaggaagttggagccatgatcggtggttgtggtaaggcccatgcagctggagagtggcatgtcgaagctactgaaactgtgggttgtgaaaatagctattgattgcccacatactcaggaatgtatggggaataacacgaagcatatgtagcacttgcttcggctgattctgtcgcgcttcagcctgagctatctccttttgcttttgtattgtaacttggcatgtcctagctgtgtgccccttatcctctccacagaacaagcagaatagccttcttgcttatgagttgaatcttcctccgaagcttcgtccccctctacctcttggggctggtggtctgaaggagctttgttgcgtcctagttgacggggaacagtgttggtgcccttggttgtgattgcctctatcttcactttggctgggtttgtgtattgtcctgacatgccttgggtggagccttccttcaaagctcctagtcatctcagaatatctgtaagtttactcacttctttgccagaagtcattgtcgg

SEQ ID NO: 15277 - DNA, 545 bp, Zea Mays
aaagatgaaaagatggactatgaatttcaattgaaaaacttacttttggaagaagaaactaaaatgaagcaaatcgctagagaaaaaaatgtcatggctcgggatgagaatactaaatattttcatctaaaagctaatggaaataaaagacgtctgagaattcattctttgcttgataatgggttacttgttgataatgaggatgagattaataagctagccactaactactatagagacctttttggtccttcaaatgtctcgaatattcatatgaatgatatgaatatgcgaaaacttaatgatgatgacagaaaatttcttactgctccttttagtcttgatgagattcataaggtggtctctgatcttaagcacaattgtgccccaggtccggatggactgcctgctgagttttttcaggatttttgggatattattaaaaaggatttgtggaacatgtgtgatgattttaataaaggaactttggatattaaaaggcttaattatggcttgatcaccttaatacctaaggtggataatgc

SEQ ID NO: 15278 - DNA, 550 bp, Zea Mays
attttttaattctattttctctctgtttgctttagaatatcctctgtacatgagcagatgagatgccctacacggtgacatagaagctaaatataacgaataaaagataaaaccttgttgcttggtaaaaatttacacgaagcaaactttggtgcaagctcactcattccctatgtaaaacagtaaaagaaccaggacctaccagcacctactggagtcctttttccttttattttttggtccaatgtggacagatttgtgtaggacggaggtctcatcctgttcttgtaccagcatatttaataggagcttattatttggtcgcagtgagcagcactgatcgtttggtatgaatcatgcacccattcaatgagtcctccaagcagtactcaaatcagtatgcattcaggcctgatcagtggcatggtgtgggtggaaacctggacgacattacaacattcactaacaatacaaccatgttttaattacaaacttttaagcatatcttcatgtgtcacaccgctggtcatcaggaacaacgatagtgttt

SEQ ID NO: 15279 - DNA, 719 bp, Zea Mays
ctgaattcttggttatcgaaatgctttctgttatccacagttatttcggaggggaatccgaaccgatagactatgttatgctgaaagaacttatgtgatgcctttgatgttataatttacactgtccaagactctatccatttggtgaagtattctacaacgccgaaggcatactttaagttgcttttatgttgtagggagggggtcgacgatgtctaggccccaacgctggtgggaccatgtgtgggtgattatttttgttgtatgtgaggggcccctcctcatgggtagaacttctgatatgcttcacaagactacgctacgtggagggcggttgtgatgatgtcgggccagttgcatccttggcgcatgaccttttttgtgagggctttgggacctgtgtgacaaccacataaccctttgtgcacttcgagtaggagttgtgtgccttcagtgtcatgacacacttgagcaaggttgattgtcgttgtccatgaggaccttgtggagttcccatccggctatattgcacttgatgaccatcgcatcggtgtgtgaagcacttcggagctctacgtcacgggaatcgaaaggtagggggatgtgggaccacttcatctggaccacgggtttggtgactgtgagatgattcaccaggtggttgtagtccctcttttgccattttgagttgaagtcttgattagaccctccgaagatca

SEQ ID NO: 15280 - DNA, 854 bp, Zea Mays
ctcgtggctagaaaaccggcttccgcccggggtataaatctctgcactgctcgttgactcttagcccctaatcacgaggatttcttggccactaccaccggcgtcaagggagagaaccgagagagagaaagagtagtcccgccgccgcggccacagattcatggtcctatcgccgttttagcctcaagttgtgatcggagcccgtcgccaggatataccgcttgattcgggagcttcctcgtgtgacttgggtgacctggcgcgggtgaatcgctcgccggaaccttacatccgccgcggtgccgcacctcaccatggccagggctgtccgcgctaccaaccgaggtgagaaccccctttccgtaatcgccatcaccccctctaggtttggcaccggtcaattttaaggttggggcgtccaggcttcgaattgcaagtccgtggtgatgctccgccgtgtcgctgtgctgcgccgccgcggcgtgagcgaggttggggaaaacgatgccagccgtaggatgggatatcgacgatccagattagaaaccggggttcggttaatcgggaatcgtggatgcaggatctaagggcgcagattcgatctggggttggggcaccgtggtccgtcgatcttagatcgggtggatcctgtcgcgtaccgtttcgggttaagttagatgtaatctgagccgtccgcactggatcgtgtgtcccagatgtgtggataccctttcggctctcgaatcttactaaagagtccctgggcaatttaataataaacccgccgtccaccctgactgtactcagagtcttaggaatttttacgcgccagcccctgcacttctctgtatttg

SEQ ID NO: 15281 - DNA, 911 bp, Zea Mays
cgcgatcgttgcagtcgtcatcatggtcttcatggtcgtcacgacgccggtgcagggggtcacgcgcgacagcacggccacgctccctgcgagctcccagatggtcaggaacaccatagtgccactcaaacatgcagcaacgcatccggccaggttcagctcccccaccaaggaagaaagagagatcatccaccacctccaagtgaataagcactctgtaagaaaggtcgtgcttgatgccccttggatcctccatctccctatcaggatcagtgatggttagtctcacctcgcgggggatcttgctaggatcttcactccatgcccatagatcaaaagtgcgagttcgcttgtgaggcatggtcttctcgtccaacacatggacggcacagtggtttccaatgatctgggcagcaacgtccttgttccaggcgtgcactgggacaccctccagccgtagccgaacatgaaagtcccagcgcgccacagagctgtagcgttgttcattccactcagcaaagcagaaaacccagccacggtgatggaggcgactttggtgtagcacccttctctgatcttgctgctcctcaaagatgatgaggtactgctccggatgatgcttcaaaaccttcatcttgtttcctctgatccctagttgctcggatagtgcttcaatgacatgcctgggctctgaggcatggctgttgccatcatgagagcacaccaccgatttaccaaccaggctgtccctctcacgcttaatctctccatttgccgacaccgcacagtccacacgccctggccgtgcgcgcgggtcgccggggtatgtggccatggcctggtgaccacccttgacaacttggaggtaggatttgtacggtggttcagagattggagatgaagttttgcta

SEQ ID NO: 15282 - DNA, 634 bp, Zea Mays
cgcaggtttttgcgggggatttttcgcttgtatattacatgactccgcctcgttaaaaacctcaccccccgggaggaaaagagtgcgggccagaataaaattgtttttgcaaattacaagggcgaattggccctgatgagtcaaacaaaaaatttgcggagattgtcgatgttccaggagtgctccaggtcttcgccgtttggcgttgcgagcctgtaagcgctgggggaagccttcgtcttgacaatgaaagggccctcccacttgggctccagcttgcccctggactctgtccgagctgttcggacgagtacgaggtccccttcgctgaattctctcgggatgactgcgtggtcacaccatgcttttgtctgggcttggtatttgttcagagcctgtagagcgaagactcggtctccatcgatgagatccttcgaagtgggctcgtccacgtcggggacggctggcagaactattcgcggggacccatgttttatttcttgtggggtcatggcctccgatccatatagaaggcagaaaggggtgaacccggtcgctctgcactcagtcgtgtttagcgcccagaccgcctcaggtagcaaatcggcccacttgcccttttttcatcgaggag

SEQ ID NO: 15283 - DNA, 545 bp, Zea Mays
caggccctaaaagggtccgtcgtcgcctgtcaactcaaccgcaccacgcactttgggtacaccaaaccaaaccgccgctgcagaatcgcaacggatccactcacgtaggtctggaactggaacaagtatacgtcggtccgcaacagagacggcacggtggttgcgcggtggtttgccttgcgatttgcatgcatgcatgcatcacgataataatcggctgcacccaccggacaccggcagagcaagcaactcgctacctaatcctaataatcggctgcagccaccgtacctaatgacaccctgcagcaaaagcaagcatgcacgcagcagcaggacgcgcgccatcactgagacccacccgctacgcgtcgccgtctcccagccgccatccctccccgctagctactattcgctaacggctaaccctttctctctgctcgcctcgccattactgttcggactgagctctgcctgctggagcctggactacatcgtgatgatggcggaggtgcctgcgctcctctttaacaatttctcccttcctt

SEQ ID NO: 15284 - DNA, 353 bp, Zea Mays
gaccctttcaggaggaaagttgcaggctatcagcttgacagctgcaagccaacccactattcaacactgctccacatggcgcttgccaagaccacgctttctctcaaatcaaaactccaaaagagatcctccatgttcttctttcctgtgacgagaggaggccagggatacccccatgctttgccgaacataagaaaatggaaaagctggccaaagctacaaaagctagggcttgtcctatcccactaccaaccacttactacctgggtctgacgtgtcatggcctggatatgcacgccttttgtgttctctatgactattctaataaaccaataatccacccccaacccaac

SEQ ID NO: 15285 - DNA, 416 bp, Zea Mays
aaatccagcatgatgcataatttggtggcatacatttttatttattatttgttttcaaatgaagtgttctcatgtgttgataaatggaggaatcacatataaagaagaaaaaaattctccttttatttcctttacataatgggtattacattcaggtaattaaggaaatgatcaagcagagagcagaaaaatacaaatgcttccggcaggacagcaaaggaatcttatggtttggagatcgattggttgttcccaaggtccctgagctcagaaagaagatattggatgaagctcacctttcaaaattctccatgcaccccggcagcaacaagatgtatcatgatctcagatcattatactagtggaccagaatgaagagggaaattgctaagtacatatccgaatgtgacacctgc

SEQ ID NO: 15286 - DNA, 865 bp, Zea Mays
gctcgatgggcgcaagatttatactggtttgggcagaacgtccctgcatccagtctttggtggctcatgctactgacacctttgttgctcaatgctcgtagtagggactacaaacgagcgagagagggaggagctaccaagcctcttatgcgtggatggacctacagactatgggactagggttctaagttaagccttggacgtcgcgccttagctctagcctctaggtcttctgatcttgtcgagtatgtgtgttcgtcttccgtcgagtgtcctgattgacctccttttataggccaaggtgggggtcggccactagtagcttccttgagaaggagaaactatgatgtggtaaaatggagtgttctacctgtggtaaggttgcatttgtccatatatgtctcggtcatctaggtttccttgatcctgctctttatggcgggtggtgtgggcagcgaagagtccctgcaccatcattgtcgtctttgtgccgtgtcgacccctggccgctatagcctaggcctcggtgctgctcatcgtgttgaggggtctgtaggcggccagcgcacttaggtctagcctcaatatgtcataagtgggccacaagcctagaagcccgtaggttgagtgcaaagtggatcgactcaccctctatggctcgatgtcaagcacagttaatgcgacatagaggatcagtcctggttaggcatggaatccactcgagtgacttccccttgatccacctgaccccccttgctgctccgcctcgcccgacccttggctcggtgcctcggtttatcggggggcgagtccttccggggtggacctttcccatgtccttctactgatttgtgggccttggggg

SEQ ID NO: 15287 - DNA, 536 bp, Zea Mays
tccggagatctcgcacgttgtccattactcctagttgatgtgacagtctaggtgtgatatttgataaccaaataaacaaaaggcaaaaattaaagtgtcgtttaggatggcagggcagagaagcggcggtgcagggaattgagaagaagagaatgagtcagttgatgttcgcctatgacctgcgactgaagggcgtctgccctttatagatgggtcaccataatcccttgatttgatatgctaaattttaggaaccggcccctgaaatatctctacgtgcaaccgtccggagatctcacacattgtccattactcctagttgatgtgacagtctaggtgtgatgtttgataaccaaataaacaaaaggccaaaattaaagtgtcgtttaggatggtagggtagagaagcggcggtgcagggaattgagaacaagaggatgagtcagttgctgttcgcctgtgacctccgactgaaggacgtctgactttatagacgcgtcaccataatcccttgattcgatctgctaaattctagg

SEQ ID NO: 15288 - DNA, 1225 bp, Zea Mays
cacagcccaaatgcggcccctccctctcgctctcacgtgggccaccaaccggcccaactcctcagcaacagtcagcccacgcgcgtggagtcgttgccatgtgggtcccactctcccgatccccgctcagctgcgcgcgcgtcgggttaggtctcagataggtcgggcccacgcaggcagctgctcaccgtgtacatccatatcctcccccgaccactgactggtggggtcctctcgacagtgccatctctatcctctcaacgaactccatgccgtagcgaacgtcgattccgccgggaagctcggcttctgtccacgcggactccccatctagcctataaaatcctagcgctcgtgaccctgagccatagccatcgcaagccggacaccaggagaacaaaagaagaacacgagggagagaaggttggccgccatggggaaatcggagttcggtcgtcgcgtgggcctccaagctttgctggggttcatctccatggcgcggggacggttaccatgaccacccggtgaaggaccgcgcctcggcgactccccatggtgatctcgtgctccgccgcaagaccaccgacggccatctggatctccggtacgttaaccctcctataagtcttatacccacgtaacccgtgcctagctgctacgatagttgtgactgttcgtcgtgggcctttttcaccggggtgctcctcgccgtggaagggctaccggcgccggtcagccatgaagagagagaaaggggggatagaagggcgcgggaggaagaagaatagcctaggccgtggatctgtggccaacggtggggattagatggggaaataactcttcgatgcattaaatccgggtcgttggtgcgatcgcgggcggatcggatgtagtcgtactgtgggccgtagatctcaaatcctggggtctgtattgaatgtcgttcggattaatgatgatctaattgtagccgctgatagaagatcggacggtccaggatggcccgtaccccttcggcctggccgtcttccaaaagagcccctcaccttatgcaaaatcaacctgccatcctgtgcggagttctctgtgtctgggggattttacgtgttagcccccgagttttcggaaaatagtggccgccgtccagagtctgggaatttcaggaaataaaatctaaaatgattttcaggataaaaataaatatgataaacttagaaaattcata

SEQ ID NO: 15289 - DNA, 367 bp, Zea Mays
gtgatctctggtccggtggccgacaccgaagacgccgctcgggagggcatacaagatactgtggaggtggtggccgagcgcttccagcgggatcctgccgatgattagtagctagatctgcagaaacagggcaagggttccgctggggtgcggcttgtaatatttatggttatgtaagatacttttgggaagtattaatctaatagtgacagaacttatctgtacgctatttgtctttgttgtgtgcatcattaccaccttcttcctggtacttggccccctgggatgtaggctcgacgtgtcaaggctggatgccagtatacttaagaaagaattggtgacctggcctccaggaggtagtctcgac

SEQ ID NO: 15290 - DNA, 604 bp, Zea Mays
tggcggtggtggtggtgaaggagggtgctctctagcgctgctgctgccaagttgatgtgaattttgtgggttgtgttgcgtagatcggaatgtgctgctgcctgctgctgtcattgtacggggtcggtggccagtgtttctgtgtcgatgtttcccaatcgtgtatcgtccaccttgttccgttgtattttattttctctgtcttgtttgattgatcgaaaatggtgtgtcgtgtggcggttgtggtattggattatcggtacattttttttagggtgtgcaacgaggccaccaaactggatagaatactggagccctcagattttgctgctcctaccggcttctctggttcgtggtagttatgtttcggataatggctaatgaatgtggacaagaatgtgacagcgctgtagttcaatattcggttattaccacaaaacatatattttcctatgaaaaagctaccttgtgattctggtgccatgcccttaaagtgcctgttggattctatacttctctgagagcactgcactcatttacagttttgtttttttcgagagggtcactgaacaaacagctctcaggttggtacggtggatgctct

SEQ ID NO: 15291 - DNA, 862 bp, Zea Mays
ggcgagcctgtaccggccaagatactcaatgaccagcaccctagcttggctgacacctaattccacccttggcgacactaatccctcaactaatttcactaatccggcccggaattcatctacccacgacgacggcaaggtccgaggagaaactatggtgtttagggcaattcaacgcggtctagttcaatcaaccgagcctacaagcaacaggagacataaaagatgctagaacatctaacagagaggcattaaccaacctgaggagggctggccacggcgagggactctcacggcggggttctgactaatttgggggacatggggaattgggaggttctagtggacgatcagaggtgagagctggtgctttggatgcgtaataacctagcgaagctcactggggtagcaatttatagactccattggcggtggcgtccaatttgaagaaagcacgctcgcggccggagagagggactgagtttttgcggcgttctaccgtggcattcactggctgaggagctacgacggtcactggtgaactattacgactggcaatgacgtggtgaaagggtcatggcgtggcgcgatcatgatgaacgacgtacacctcgacgacggctgctcggcctcgtcgccggcaagtggatgaggcgacagagcggccacagtgctccaacttcatccacgacgagatcttttcaccagaagtcgttatcagcgtgttactgggcgtgaatcgcatcgctggcgcgaatccgagcgcgcgggtcaccggcggcgaggtgggatgaatctgaagatcttttcgtgcactgtaccatggccatcttcttcagtcgttctgacagcgcgatttgag

SEQ ID NO: 15292 - DNA, 401 bp, Zea Mays
cctcaacctttttattgataagatgagaaaaatgtttttattgacaatatgagaagaatggggaagaccattcgggccaccagacacggacctgtaaagatggtcgggcaacaatagcctacaaagaggattgtgtcgtgccatgtcaatatatggactacaccaacgacatagacataaagattttgtgctggaacggtggcctaattggtaggcatagcgtgtctgtttcagatcaaggcccaacacccctaggctcaaaacaacatgtccaactcagaatttgaagtacaattcaatagtctcatagatcacaacacatcacacttatatacaccacatattaacagatcatgcattcatacattcatttccagtctcatagatcatagccattgtgc

SEQ ID NO: 15293 - DNA, 759 bp, Zea Mays
gccataattgtgcatgttgcgcttattacgaaggtttgatgtgttgtcgttgccctgatggccgcacacgcgttgacgccatatacgctagagcttgtactagcgtggattgtggtgggttgttcaagcccctgaagtcacattatgtgcaaccttcgtaatttggctttatatcttatttgactgtgttgtgtggcatcatatttatatatcgccaagtggccataacaactatatcaagctctatagtgcttggaaatctgggaaattaaattgaaatacaattaaacacaaataagttaattttctgctctctcctcatgcataaagttttacccgaagtaacccgaagacatataatataatgcatgaaagccattttggcatagaagatatcacacattgggattctattagtaagcaaaagaccttaccaaatgaataaaggctataaatcttagttatatattgctcaaccagatgttggcaaattgctatttgttgctgaatgacatggagcagactttaagataaatgactagtacattagcaacacgaagttgcgagtacatcgaaaggtaattctgagaaatttttcacaatgtttgtgtgaaaaacatagtgtgttcccgtcgaaccactttactcgttctatctaggacctctatgcttgtgccgcatacatctctcggaattgtaaatacttatagtcactgaattgactcgagatagtcctttgacaagtttggtatatacttg

SEQ ID NO: 15294 - DNA, 657 bp, Zea Mays
aggcctcccactgctcccgagtgagatgtagcatcctgccgatggtgataggcccagagagggcttgtggttcgtcgccatcgacgaccttgagacgatcaatcgcttcttcaatcgtcatcgtggagaggtttagcagagactcaattgagcgagcgatttgcttgtacttctcggggatgcaacggaagagcttcttgacggctctctcctcatcgtaggtgtcgtcgccgaactgcaccatcttctgcaacagagtgtttaggcgaatagcaaagtcatcaacatcctcacctggcttgaaggctaggttcttccactccttgcgaagtgcctgcagtgtggtcttgcgggcacggtcgctgccgatgcgggtcgcagcgatggcgtcccagacttccttggcagtccgcttctgggaaagcgaaaactgcatctcgggcgggactgcaacaatgagggcatctagcgcccgtcgatcctcgtagtagtcgacgtcgccgtaccaaactgcttcccacatgtggcggacctagagccgtaccctcatcaccacgccccactcgacgtagttggtcttggtgagggtagaccacccaccgccgagaccgatgtccctgacaacagcctggacctcgcggtgaccatggtaccgat

SEQ ID NO: 15295 - DNA, 448 bp, Zea Mays
taagtcagaaaaagtttcaaaaccaaagtcggccttgacgtcggtgacaatgtcatcaggaaccactacgttgggcatcctcttcaagatccgccccgcacgaatggctttgtccatagccttgtcgcgttgagctttaagaacaacgcagttgtcctctgaggctttgatagccagtcggacagtttctagctcctgtgcaacaagtttctttgaagcacgaagatctctaatgattgaatccttggacgataacagctgtccaagccgctgaacttcatcctaagatacttgcagctcgtgacgatgatggtccaggtccgacatagtgaagtggtggctcctttccaaaatagtcaaggagttgctggcgtcacgatataacctgtccaaattatcacgagaggctgcgagtgctcgtttctcctcctacgaacaagaatcaaca

SEQ ID NO: 15296 - DNA, 316 bp, Zea Mays
gttaccggccgcaacgaatggaggaagaaaggggtagaaaagagggagtattgggctcaccacgggtgatgccggcgagcacgatggcgtggaactccggtagtgcgaatgtagatagtcagcgggcgacggcaacggccaaggcacagacaagagcgcggggtggttagcagagtcgggagcacacgaggaagggagaagggaggggggtttatcctccgaggccaacatggcgagtggacgtcgtgggggagagaggctgataggtgggtctggggcgacgtgggcgagcactccgtgcaggggagcagttcgg

SEQ ID NO: 15297 - DNA, 507 bp, Zea Mays
gcttggaccagggtgcaggcccttctgctccggttcctgatgatgtaccagtagaggcccttctggaggttgatgccaagcgttgtgatcgtgcacaggctgctgtttgcatatttgacgaggacgaagaggaagaagaagtctcgctgatccgcaagaacaaccggcactatagaggtagcgaggggggtagtgatattccttctccagctttgtcggctcttgtcagtcttcagggactttcaatattatactttgatcaagtactggaggaagtcgtccccaaagacatgctattcgagccacctgcagatgatatcacgaccgtctattcagaggtcctagacgatgggctttccttgcttgattccgctgggaaagaggtaacccgagcggtgtctcgcgcatcgtcgactttggagggtagtcttccatgccgaggcgctggtctgagtcacccatctcccatggaggtggctgaggagcccgcaaccttagaggtggcag

SEQ ID NO: 15298 - DNA, 399 bp, Zea Mays
tttcggtcctcgcccacacaatgcatccttaccatcacctttaggccatcttcccaaggtcaacttcccagtttttgatggggacagccccaaattgtggcaatctaggtgtgaagattattttcacatgtacagtgttgacccgagcctctggatccaggttgcaaccatgcagtgcaccggacccgcagctcgctggttgcaatccgtcaaaccatcgctatacaatatgtcgtggtcccaattcactcatatgctccttgaacgttttgggaagcatgaacatgaagtcctgatccgtcgtcttttccatttgaaacaatccggttcggtgtcagattatattgaccagtttgcccaattactcgaccaacttcgagcataccaaccagtcaccga

SEQ ID NO: 15299 - DNA, 712 bp, Zea Mays
caccgctctaccatttatggatcagggtacgaaaatgaagacatggaccaaaatgacttagctgcttcactatttgctttgctgtcaaacatgcgacaagggagggggtgtaaagtttttcactgtgtgtgggcttgtgtggtgatcatgcagaggtgttggggacatattagtgtagttagcccttgcttagtccgagccaagaagttcagaaactccagcttgtggtgactgctcaaaatcagccaaaaaccaaagaactacattttaccatgtcctggtgattcatagcagtttcaccatgcccttgtcgtttccctacgtctagactacctcctccatctttcccctactcatctggtacactaagaaagcttgaactcgaaggaaaaccggactatggtgaccaccaccaccaaatcccccatctccccgtggctagccttttcgggaaggtaagatgttcgatgtgctcacgtttcagaacccaaggatcatagtgatgctcacggaatcttccttttcaactctacagcagtgttttcaccggaacaccgtcgagatatacggtgaacactatcaacgtcgaccgacccaatcgtagcttctttgagcgaacttcggtgagtgccatatgcttgaagggtcgctggtactcgtcatgaactcggattgaactctaccgtgcttgtcgcctcggtccacctcaccg

SEQ ID NO: 15300 - DNA, 931 bp, Zea Mays
caccgcgagagagaaaaaagtcatggggcacattgttatagaactcacgcccgttgtcacactggatactctggatggtgtgaccgaactgagtggagacccaagcgaagaagtgagacaggggtgggaaaggtgtccgacttatgatgtaagggaaaagtccacatgtagtgcgagaagtcatcgagaacgagtaaataatacttatagccagaaatgctgattacaggggatgtccatacatcacagtgtattagatcaaaagtgcctgctgccctagaggaggaggtggggaacgggagccgaacatggcgacctaactgacaagcatgacagaggtgctcaaaagatcccctacaaccggaaaaagaggtactgttggagagcttggacatcacatcacgtccggggtggtcgagacgacgatgccaagtgacagaggaggcggccgctgcgagaacagccggggcagaggtcgatgtaggggaagcatgcaagcgtagcgtgtagaggggcccagggctgtcacaccgagcgagaagggtcctggtggcaagatccttcacagacagaccaaacgggtcaaattccatagagcaagaattgtcagtagtgaactgacgaacagaaagaagattttgcacgatgttgggggcgacaaggacgttggttaaacggaagggaccgggaagaaccgcggcacccacggaggtgacgggtagggcagagccgttttccacaacgatggaagaaggaagggaggggtgggggagaggtggaagacagtatacctgcgtccgaggtggtgtgacaggaggcgccggagtccggcatggagagcgcactggaggggaacccgggggagaggactgcgacggccagggcagatccgtgggggcctggcgcggccccggcggacagagggtggaat

SEQ ID NO: 15301 - DNA, 625 bp, Zea Mays
agcaaatgtgccctacaccggattttaccacagatcttgttcccagcacttgacagcagctgcacataagtaagagccgaccatacctttgaatatggcgcatcccggtaatccttttgtggaacactgggcgccccaccaggttatatctttactcaaagcactcggcatcataataccgacaagtgtatatggccccaagaatgcccatacattgaactgatgccggcatccctttttatcgaaaggctaaaatcatcacagacatattatcaccaccattaacaaactgattcatactaaggcaaaaggaaaaggagtactttagtatagtggctgagctgttcagtcaggaactgggttgttgtggcaaaatttgggttacaaagcctggaaatcaaatggcagtacactaggaaatcaaattaaagtcgcttacctttcactcagtaaaggccccgcacaaaccagagggacaagtcaaaagccagaacataaatcaacagaatactggctctagctggtaaccagaaggtaactgaaaggtactgaccgtctgatggatttcgagtaaaatattacatgtttgagaatggtaagacacagttttcctgctccatttcca

SEQ ID NO: 15302 - DNA, 582 bp, Zea Mays
aatagagctctaatgcataaaggatgtttcagattgcatctttctcggccatgaccatctgatcaaaggatcaaaatgtatagaatggaggtgctcccaagcttgaataggcaaagtgactatgtatgtaccacatgttcatcatcgtgccattccacatttgaatagaacaatatatcaacgatgagtaggtgggtggaaagtatcctggcgtcacttgatgaataggcaatgcttgctacgtcacctttcggaccgttttattctgccattttgttttcgcgggtgaccgacgtttctttgttggccgatcgcatagaactaccttcttgctagcatatttggagagcaattggtcaaaagtatgatcgaatttgaccagtagaccatgtgtgttatatgtattttgcccctgcgtctcctttttcgctttgtgtggaggccgatgcactggccatgggcagactgtatggttgagttagttgtatcgtttgtttaagcaccggaccttccgagcccaggtgccggaccatccgcaattatcgagtcacggagctttgctcgactactcgattaagccag

SEQ ID NO: 15303 - DNA, 597 bp, Zea Mays
gcttgttgtgttgctctggtgtctagattcggttttgaactagaaacacatgcgtgacaccccgctggaggcaaccagcccactgctgccagcgatgactaatccactaaaattggtcatctgggccactgtattttcttaggcttcgaataatgtatttggtgcatttttcctgagtcaggccactttgagaccatgaaccttgactgcataacctccctgatgctatgatacgctgcagtgtgcagttcctcttagatctcaggtcgtcagccgtagaactcaagcatggtgaataacaccactatgccatatctagtgttataatgtgataccatgttctctcaagtaaataaattctatcatgtttgtgttaatgttaaaataattcagtaagtgtcttgatgtacctcagcttccatcttaaaggatgagtgctaatggtacgaggacgatcggataggttggtcgatgcagccgtgcaggcgctatagctcattctagaagccttagcattggatggacggttcgatctcacactgttaatgatatgatggctagagaactatgaagatgcagcccaatcattgcccgatt

SEQ ID NO: 15304 - DNA, 503 bp, Zea Mays
gattttagccgtgtgggattgctgcgggattgccaccattgaatcagccgacgcgagagaaataagagagggagagaagatcccctgcctgctccagcgattcccacgtcgggcgctgccgttgctttccctctgcgtgaaccggtagaccgccaagcgcatggccgaccggaggtacggcgattgctcgccgtcgattagcgccgccgcgggcccgtccttcactgcgaacacgcgcgtcttcgcctctaatcttggtaaagaaccctttccctctgtccgctttcagctcctcttcgcaatgcaccgatcggatttcgctattgggcgcttgggacagaaatcgctgtgccccggccatggcaccaccgtcagctcgggcagcgccgccgttctgctcgggtttatgggaagggatggtcgtggccattgatgataagatgggcgggtctgattgaagggcggtagcatttggttacgggccgtcgatcattgcacgggcg

SEQ ID NO: 15305 - DNA, 340 bp, Zea Mays
ggaaagctgctaatttagaggctgaaaatcaattgcttcgtcaacaagcaattgcaactcctccatcaacagcaaagtcttctcaagctgcatgctctaaaatcagtatgatccatgtaatatatcttcagtagtcttcaatttgaattgctgataatattctaatctgaactggtagatgcatttcaacagagatgtcaagaaagtggtcatattttaaatggcaacgtagcatatgctgaaatgaagtcctcaaccggtcaaacagaaatgagaccctcgatggtagtttaaccaagtatatggctgcatgccattcttttttctcatacacggctgc

SEQ ID NO: 15306 - DNA, 1521 bp, Zea Mays
gaaaacttgtacagacaagccccccttatatctaacacccatttacgatctgtgagcccctccgctactgttttccgttttaatgcccttttaggaatcatttggatcaggcttggacggtgttcagccacaattttaccaagaagccaacgatttgtccaaaacttcacaaattcgccactgcctaccacggagacaacaaccacatcaaagagtgtatttgcattacagtgtacttggacatggagtgcctttgcattacagtgtactttggatcattcttctgaagccaaagccaccggacaggtggacacgtaaggcccatcctagcatctcaaggttgagaatacccagaccaccatactgcaaaggccgctggacagattcccaagaaacaaggcagttacctccatttgcatcaccttgccccttccaaagaaagcctcttctcttatcgattgccttaaaaccccatttagggagttccagcgccaacataagatagatagggacagaagacaacactgccttaaccaggacaaggcgaccagcccgactcaagagattggctttccatctaggaagtttatcagcaactttatcaaccagtggcaagagatcggagttagagagcttacggattgatagaggaatcccgaatccccaagtaggtgcaaggaaaattttgtatttcgcaaggcaataaggcagaaatggtggccaacttctctccacattggatgggagtaactgaactcttggaaatattagtttttagccctgtagcatgaccaaagatgtctaaaatgctgataattgctgagatatcttggtgggagagctgcaggaacagaacatcattaacatagaaggagatacagtgtttggctttttgagagacaatcggttgcaggatatgtactcggaaagcataactgaccatggcattcaaagcctccatcacaaggataaacatcatgggggacaagggatcgccccgacgaagactaatgtattctccaggctcatcattgacaaggatccttgtggaggaggtggatagcagcagactaataagattgcaccaatttcgatcaaatcccaagtgctgcaacatatcaagcaagaatgatcaggaaaccgagttaaaggccttggaaatattcaacttcaataggatgtgaggctctttcttattgtgtaaggatctggcaagctgctgcaccaacaagaagttgtcttggatactccttcctttgataaagacactttgattgatagagaccatgcttggcaggtggggtgctagccgagctgctattactgctagctgatctgtgatataacctggtggttctactttgtgttgtctagttgcactttggtgttcttttagtaattttatccatatctatcgcacagttacactgcaatgagttgtggctgttgaccttattgagagcataaagatcgactatgtagtaatatgtttagtattatggatgtttacttgctagtgtt

SEQ ID NO: 15307 - DNA, 839 bp, Zea Mays
aggtgatcgagcaccatctgaagatccaccctgacgccaaaccggtgagtcagaagcctcggagacagtctgttgagcggcaagacttcatctgaaaggaggtctggaagctgctggacgtcagcttcatcgaagaggttcatcacccagtgtggctggccaacccagtcatcatccccaaggcgaatgggaagctttggatgtgcatcgactacaccagccttaataaagcttgtcccaaggacccgtatccacttccacgtatagatcaaatcgtggattctacctccgggtgcgacctcttgtccttcttagatgcttactctggtttccatcaaatcttgatgtctagggaagataggaagcataccgcttttgtaacagtggatgggctttactgctatgtcgtaatgccttacattctgaaaaatgccttgccgacatttgtgtgagcgatgaataagactttcggggatctgattagggacagagtagaggtatacgtcgatgacatcgtggtcaagactaagagatggtcgaccctagtggaagacttagccctggtcttcgacaagctgcgggcaacacgcacgaagctgaacccggacaagggcgtctttggtgtctccgcaggaaagttgctggggttcctggtctcgcaccggggcattgaggcaaactcggagaagatcaaagtgattgaggcgatgaggcctccgacccatatcaaggacgtccagaagcttgcggggtcattagccgcccttagccgcttcatttcaaggctgggtgacagggcgctgcccttcttcaagctgttacggaagtccgccccattc

SEQ ID NO: 15308 - DNA, 497 bp, Zea Mays
ggagaacaacttcgtttaaggggttaaacaacttcgtttaaggatggagtcgtcacataaaatttggtgaaaatccaccctgaaggtgctcggtcagtcgttctgaagaaactaggcgatggtatagtatcccgattagactgccagctcggtcagctcgccgccggcgatccgcgtccggatttgtgctggtcaccgggattcgtgctttgcacgcagaagattctacgagaaggtaaagatctcacgggggaatggataggatcgcggattggagtttatcaccgtgcctatagccgttgcgacgtggccggactaccggcgtcgtcgtggaagtgccggtgacctcggttgcgtcacgccgtagcttgttactatgtggtagtaatcgtggcacccttaggagtattatccttgcgctgttgcaccggtgaacgccacggttacagccactgtgttcttccctatctccggccgccagcacgccgtgatcaaat

SEQ ID NO: 15309 - DNA, 678 bp, Zea Mays
aaaaaccatgaaattaaggtgtctttagtcatatggttcacatacttggggatttgcaaatgaaaccctaagttttgggcctatttgcaaaaaaaccacttttgtgaccatatagctaagtctgaaaacagttgatcagggctaactttggagctctgtagatcgaaaaattcaaagaatttgccctgggtcaatgtaacaaagttgtagagccattgtagaagaacaactttgctacaggtgttaagtcttggtgccatgaggaatttggagataatttgatccaaagatgggctatcaagcgattttttaactgaaaatggcgcattgttcatcgaacttcagaaagatctcgccggcgataagaacgccaccgcggttggggatgggtctgcggccatggtaaagatcatccgcgacgtggcgttaaaacattgcggtggcactgcccggttaatcggcggtcaccggaccatcgtcgtggctctgcccgcgcgggtgagctcgccatcgcggttacagctccgcgattctcatccaactccggccatcggcctataaattgagctcggatcctgcttcttcaccacatcatgcacacaagctcttgtgcaatcgactcaatttcaccagaagaactcacacagtccacaaaaccattccgcccctgttcttcgc

SEQ ID NO: 15310 - DNA, 988 bp, Zea Mays
gtcttcttcccctcgagaatagcgcgggatgaacatatctcaccgtttcctgcggatcgttcctccaattgcgcgttgcggagtccttggcaccaaggtataaaccggtcgccgcctttcctcgttctatacccggaggatttacaccgtgctaggaatggccaccattaaaactgccggcaggagagagaaaagagataagggtgtggctagaggttggatagatcgagggcggagttaggtgggtgaagcgctccgcaaagtttcccgtgcgatggtggttggctaggcatcgccgtgttggggtgccaacgcatcgaccttgccgaccctaggagcaccgtcgcattaatcgtctgtggacggctctgcgcacgcgtctaacaccagtatggttgcaagcttgtaattagccatcgttcctgtaccgtgctggattagtgcatactccttaccgtggtcggggaccgcctactcgccgctcaccggatttgcactacgaccgtagcttggaacttagggcggaagacgaccctgtgtcattgatcactggataagccgccaggatcagagagagttttgaagtgttttgaaccatgggattgatgttgggcaggcgagatcatcggtagcataccccttcgatctgagaaatgtgtgccctagatctcagatcctacggttctgagcgcatacccattcgattaagatttagatctaatctgatccgaccgctcctaattggatggtcctaatccgacgataccctttcatggttgtcattttgcataagaacccccgcaaaagagtgatgccaacccgtggtcctgggcaagtgcggtctgagtctactgatgttttatagtttagcccctacatttccctgtattagtgcgcccagtccaggaagttaagaaattagataaatagaattagaaaatgatttttaatgcaaaaatgaatgctagaatttatttaatgcatagaa

SEQ ID NO: 15311 - DNA, 423 bp, Zea Mays
gtggcgaagcgtagagtgagtgaggtggatggtggtcggcttcgtgtggacagggctggcaagcgggaattgttgtcctctccggttggggcgagtgtaggtgagggggagttgcgaagtctttttgagggtgaggagcttaggataatgttgtttaactatagggagatgggtatcatcccgaaggttgaaccaatgtaaggtgtgatgccctcgctgtacgtatgtaactataatttgtatgatccggccgtgtccataggggacttgtgcacttggtctagcacatttattatgtcggttcggctgcacctatagtcggtttttgcgcggatagtttttcgacgaagatttttgcacggatgtaacgtgccttcgattttgcgcactcgttgtgctagtccggctgcacccttaggcgac

SEQ ID NO: 15312 - DNA, 423 bp, Zea Mays
ctagagggttgcaggtgggaccgaggaggccagctcccaggcccgcgatgcgcagaggcgcgtgagtcctcggattctgccgccaccaccaccatccaggggtgatcactcccgggagcaccagcaacagcaacagcagcatcagcaccagtagcaggagcgggagcggcgatcgcctcgcttctagggtcactagaaagtccagggcccaagtaagtgtagtccctttttccactagtctaatcatcatgccgacaagtcttaacccatcatctgtttgccagggcttcttcctccgctgctcccaaggccactcctcctccgccagataccaggcccaccgacgggtctggctctcagcagtaggaatctactaagggtggtgctggcggtccgctcccagctgctgccaggacagcgcca

SEQ ID NO: 15313 - DNA, 415 bp, Zea Mays
gggggacaggacctcacctaccagcagcccgagagaaaccttagggacattttcaccgaagagaccgactccggtaatggcaacgaccgccgcaagaagctatatgtcatgtacggcggaagctaggagctcgtctcccgcaggagtgtccagtccctgcgacgggaggtcctatcggcattcccgggagtccccaaagctgccccgcaccaacggtggaggaacaccaccatctctttcgaggcactcgactgccccgacaacatggcgggggccggcgtactaccgctcatcaccgcccccattgtcgccaacatgcggctgcatcacgtgctgatcgatgggggggttggcctcaatgtcatcagccatgcagcgttcaagtagctgcagatcccggggtcccggctggggg

SEQ ID NO: 15314 - DNA, 760 bp, Zea Mays
ctgacgaagcattccatggtacaatgcaccccaaacagaaacagatcgcggttcacccccctcctcatcgccggtgatccgtcgctgggatggttgattgctcgtcgcgattcatgcaacgtggtcagtagataagcacgggcaggtaaaaatcttagcgcccggatggaattgggtgtcgtggcggctaagcttgtcgtacctcccatgctcatcggtcgatcggataaccttcgccgccgttgatctgtcaccggtgcgcgccacgtgcttaagcgctagcccgtatcttggtgaatcatggagtgcatgtccggtgatcgccggaggactgccacggtgaaagccacccgttcggagcaccagtgcccctttccccctccgggcgccagcacttctctgccaaattgagcgccaccgctgttgcgctctataaattgagtgcacccgcagctccgtagtgtaatcacgcatctattgcaccaaaccttgccccggattatccaccagggaccgagaattgctcgtttcccccaatcacggtttccgccaccgtaaaacacacctcgccgtggccagcgcgatacaggttagctcgtcccctctgctctctcatttgagtgttctcatgaacccgtgatgctcatagacccgcccaattggactagaagcccactgaccaccgggaacgcgttcatctgtccgcaatgtgtacggtcactgcggccagagcaaattaggtcacccttcttgaaattaa

SEQ ID NO: 15315 - DNA, 375 bp, Zea Mays
ggcgggtgctgggtggggttttcatcgtgcatggggagagggctggcgcgtgggaggggcgggcgcggttggatcgcgtaggctgttgcagcgcacgtggttgacacacgtacgacgcacgaaacgcgtacggtacgcgtgtacgaaactgcttcttttatataggaaaatggacgtgcgtacatatattttggtgtgagcacataagagataataaaattaagaaaccgcaagaaaaagtgcacagaattgatatgtgcaaacattagatacatatatatacgcggcggatacagaataaaaattatacaaaaacagtctttgtctggccggtttcgtggagttttcaattacgacggctgtctgctacagcta

SEQ ID NO: 15316 - DNA, 709 bp, Zea Mays
ccaaggcccatggatcaaggaaaagaagaagcatgctcaaaccaaacccagacaaaagccaacctacaagccacggacacccaaccactcccccgcttcaatataagactagggtcgggcatggctaaagctgattcctctagtcaagctaaacacgcctgactcaggaggtctaccggatcgcgcccatgtcaaggccgacctctccacggacaaagatgaccctccacatcgccttctatcatagaagtccggcaaggaaggagggatgcgtgaacgacctacatggcagcatcttcttacagaacttgtgggtgaggctaccaatctcgagggatggtgacgacgttagatagccctacgacgactacttaggcttaggcctcttatcgaggtaaaaagaaccccaacccccatgccaaggcccggggcacgcttacgcctacactgcaacccgcgatcttcgtgaaacttctctaagcaagtcaacaaagctgtgacaccagtggtaggagacgacaatggaggaaaaaagccccgactgttttacaagcataccaactccttcaccacgatagcaccacacaagattgtaacccctctcctttgatctataaaagggagagaagcccccctaacaagggacatgacacaagagaacacaatccagagacttgggaactttccctctctcactcttttgtaaccc

SEQ ID NO: 15317 - DNA, 598 bp, Zea Mays
caaaattcgaaactgctttccgtgagcaccatgtagcccacgggatcattcaactcaaggaggatgaattccgggaactaactcaaggtggaagatctgtcagtgagtatgtgcacaaattcatagagttggctcgttacgcgcctgacgatgtcagcaccgaaaccaagaagatggcccgtttcctgaaagggctaagaccagaactcaagaccatcctcgccagccaagatttcctcagcttctcgcacctctccaacaaagccatacaagtggaaatggcaaaagaagaagaaaaagggcacctcaagtggaaattccaagttctccgagctcaacagcaagaccgacacctgagagctcgatccttcgggcttccacccaagggaccaagcttcaatagaccagctggacccactctgtcatgtttcagccagcagagttagagttcctttcaggccccctcggttgcaagcaaccaaccgccagcaaatgcctgttggtactgcggagaccccagtcacttcaagaataactgcccccagttgaaggcacccagacctacctactccaactcggtgaatggccccaagaatac

SEQ ID NO: 15318 - DNA, 591 bp, Zea Mays
ggttgccccgccccgcgcttctgcgcctcgtcctcgcctataagtgccccagaggccttagtcgtatgcacctgtgcacacaaagccccgcccgagccggagatcaccggagttcgccgttgaaagcgagcgccaccgcccgccatcactgcccgagcacggccgttgtggtcagtccttttcgtcgacccccaacctcgccctagcccctggacggcttccccgagaggttgtgaagcttccccaagcttgagtcgaggcattgcctcaccggagaagcgggatcaccctcgccggactttagccgcccgccaccgcgcgtagaccaagctatcaggtgaaccattcttcaattcctcgcacccatgccttccctgacccctagtgaagctcactgaccagtttaattgaactctatcgccctggataggtcggatccctcaccgtcgacgagctctcccgcctgcgcacgtggaccggcctactccgaccatcctcggcgacgatccgcacatcgacgtgaccgtcacgacctcccctacacccttgaccacctcaccagagcaatctcgctgtcggtaagcccctccg

SEQ ID NO: 15319 - DNA, 480 bp, Zea Mays
tagatggttggccacggtgagaagctcacggcggcgcagaaaacggaattgggggaaaagcgaaattggggcacggtggtgcacgatagtagctagctggtgatgggttggacgcgtaacaaagaggcggagcagagggtatcctcaatttatagatcctgattgaactaggcacgaattttggattgggatcacagttaccacgaccaagatatttcacagtggcttgctcgccgtggcgcgcgagaggggactggtccgcggatgataatcggctgcttgccacgacccttacgatgcggaggagtggtcattacgtgtcatggccggaaaaatggtgagctcaggtgatgccagcgtgactgaccgcggtgggacacgacgaccggtctggccagcgactggattcacccctcctcggatactttcaccctgccccgacattatcttcctctcccgcagcatgaatctcccaggcgg

SEQ ID NO: 15320 - DNA, 503 bp, Zea Mays
gtggaagcatgattaagatagagacgcaaaccgacatcaaacatcaacgactccgattttttttaatgaggtatcaagaagcgcggaagctttccctagtcgtcattgaagtgcctcgcaaggatgcttgcgtaaagacaaagctctcgatcggataactctgtgaataagacctagacattcgccacacataagtgagtcttcagaatggcctctctcggactactccccaccgttttcactatcaagttttttatcgtaacacggtgatcctcgttccttactatatgatggtggccacaccataaacacgattgatatgatctcacaagactacaagcttctttgaatacaaatattgggggggtgcaagcactcaagacttcgaggtatgcaaatatcactaaacactaggcttacctatatgtgtgttcatatccctaccgcaaccgcaaaggagtggttacacaacctatgtatcaatcatatcacttagcctagcg

SEQ ID NO: 15321 - DNA, 686 bp, Zea Mays
cgaggaaggcggagcttgggaaaattgggatcatggcttcacaatgcatacagggatagggaggagaggtagcaagtattaatagggaggaaggtaccacacgatgggtcgtaccgaggagcacacaatggcttcacccatgcctggacactattgaggcgtggatgaactgtgaaggcgtgggcgacgggatcgccaaggattggcacacgacgacagaatagtcaggtacgtagtgactagtgatctgcctctcttcttgtcgccactgaatgtgaggcgtcacgcaagcagggaccaccagaccagtgacaactgggccacgccgcgaggacgatagcgcgcagagaggatgacaccccatggcgggtgtagattgacgtgtcctagacatccacctacccaccacagacatgatttgagatgtgtagaggtgggttctatcgttgaagggcgggcgcacccgtgcgggccgtgccctccgagcggcgccgtggtacagagtacagacgaggatcacgagcggagcaaagagtatcactgcatgtgggggtcgagacaggaagtactggtgtttccaagcagtccatgtgaccactaaagctatccgcagcgatttcacctaaatttatcccttatatctcacttttatgccacctcagctagattcctttctctaatttttc

SEQ ID NO: 15322 - DNA, 477 bp, Zea Mays
agaaaaaaaagaaagaaaccctacctgggccgagtatccccattccggcccacctccactatacaaccgcgctgcccatcctcacgccacacgcaccgacatgtggaccccgctggacagcctcacatcgggtgtgttgtttttggcgaatccgctgacgtccagtcactgacaactcggtcccttcagtcggatctatcctgctccacgcaacgacctccccacgcatggcggacctcacctaactgcgcgcgatgcacgacgcaatgggtggcactaccttcgaacccctctttccttcccctcgtagataaagggatcatggccgagccatatcttcccctttctccttccccgcattgcctcagcctccatcgcccatagggaaaggattctggttgccaccatggaatcaaggagagagaaagcaaagagtgtcaccgccgcgtgtagattttcgattacatcgtcgtcgtg

SEQ ID NO: 15323 - DNA, 736 bp, Zea Mays
cgccggtgtgggagcttcatcgcatcgccaccgtgtgccgtgggcagcctccctggcgtcgttcctgctcccggtatgccctcccatcttgcatgcgtttgctcaggaacgcgtaggtctctcaggtttcaggaatagggcgtcggcgtgccgggatggtggccaccggtgggctccgccgtgtgtacctatgtggcgctgcctcggagccgtggtaggatagctgaggagggtgaacggttggttgccgttgatctggaatgtgcggccaagatcagaacgtgcatacctctttgacgaaattaaatcttggccgttggggcgaatccgagggatgagtatggctgatggcgtgaacgtactacaaccatggatctctgatcctgcagccatcattagataccgattcacccaattgatacgatctaatctgggcccctgaactgggatcgaatggctaggatcgttagataccctttcggccgcccatcttatataaaagcccctggacttattaagtataaacccgcggtcctcccctgggtggttctgagtcttggtgtcttttgcgcagaaccccctgggtttctattaaatagtggccgcagtccaagtaactcagaaatctattaaatttaatacagaaattctttttaatgcaaaataatgtcccaaacttaggaaattcataacttgatgaatttagctccaaattgattcattccagtggcattaa

SEQ ID NO: 15324 - DNA, 516 bp, Zea Mays
cgcgctgatcgtgatgattcgtgctggactcgggcaggatagtgccgggagggtgaaaagatcagaaggggagcggatttggtcgcggggtgaagcttatcaaccgtgcctgtagccgtgtgacgtggtcgaaccgccggtgtcattgtggaaactccagcgacctcaattatgccacaccgtggctctttactgcgcggtagtaaccgtggcacgcctaggctcaccatctctgaaccgctgcaccggtgaatgccacgactgagccaccagtgaccttcttcctctccggctaccagcacgccatgccaaaattaggagccactgcccttggaaactataaattggtgccccagcctgctccgctaagtaattgtgcacccagtgaaccagccctcacctccaatcgtccctcacaaccccccaatttgggatttcccccaaatcagtcaagaaccccactgtatgtgagctcgccgtggctagctctccacaggtctggtcacgccctcctcg

SEQ ID NO: 15325 - DNA, 804 bp, Zea Mays
ctcggcctaggcaatagtgtgtcacactatcaccacacccccacattgtcgtccggctagtgtacatgtgagccctgctggtcagctacacatgtcacatgcgcacataggaaccagccactgccatgtgggcccatccatcagaagcttctcctccctcgcatcgtaacaaactcgttcgtagtgtcacgccaagactcgaccaatgacctatcgccctaggctccgtacttggtgtatatatgcatacatcgtgacattctgtggccatagattgagagagcaagaaccttgggtcgccgagccgtgcacctggatagagggtgaggtagccgctgagaaagagaacattagtcgtcatcatcattgtacgtctataccgccgaccgagccctgatcgatagctccaagcattcaccaaagaggggtcacaagaatgccaatgctaatgcctcaccctaaatcctaatccacagaaggatccatctcctaggtgtcggagtgaccggaagagtgacatcctaatggtggtactggatctgcccccttttctacaggacagcggtgggaggcgacgtcagtaaggaccagatccatctccactactgcagggagaaggtatgaactcctattcccctctgcggtcgtgttttatgtgcactgatccaagatggattagttccctgttatcttctaaagtaatctcggagttctaagtatacacagttagatccctaatttctatcagatatatgttgctctgtttatctttatacactttcctccttgatagcctcttttcgg

SEQ ID NO: 15326 - DNA, 780 bp, Zea Mays
gcttgctgaagtaggcgaggggtcccatgccctaatgaaggacggcaccgaaccccgcacctgacgcgtcacagtcgacgacgaagagcttggagaagtccgacatctagaggaatcccgagccggcgccatagttgacggcgtagcccacatggcagcctgacaggcgctgatcaagcacgaatttcagtctgtaatgctcagtgcgaacagaaaaatgacgcccccacaagtacgagcgccagtgacggacgacctgcacgaggccgatgagctccctctcgtaggctgccaacttaagatggcaggctgcaaacggcttgctgaagtaggcgaggggtcccacgccctaatgaaggacgacaccgaaccccgtacctgacgcgtcacagtcgacgacgaagagcttggagaagtccgacatctagaggaatcccgagccgacgccatagttgacggcgcagcccacatggcagcctgctagggctagaggtggcggctagggctagaactggagggatcccgactccctaaaggaagccggaaacaatctcgtttctgcttaaaaaatcccaaggtgtcttacaagtatttataagaaagctagctatctagataagtatgaactatgggccttggaccctatcctgaggccctgttgcgcctagtataggcctggccgtacataacaaggttacttgggcaggtcaatcaaatcaaaggaacaccatggattggttgatgatgggcattgatcaagtgcaaggcattgcggcaaag

SEQ ID NO: 15327 - DNA, 444 bp, Zea Mays
tggaaactgccatcctcgcgcggggtacgggtacggctgtggccggtggcccacgcttcacgttttgcaccagacgttagcggcttccaaagttgacgaatgacgagcgatggtagcttctaactgacgacgaacccacgttttgaatcatgcactactgctcctgctacaactgtgtcatcgatctgtggtctcgcacctgctgacgatggacgatgtacatgttccatgccatgacctgcactagtgtctagtgctagtgttactgccatcccgtggacgtggacgcatgttgccaaaccttggccggccattgccgtcacgtcaggtgcgtgcccgcggccgcgctaccactagcacccgtctccctgggccaagcacacagagcactatataagctagcgcttgtggcagagcacaatgcacaaagaacaaaccacacag

SEQ ID NO: 15328 - DNA, 353 bp, Zea Mays
gaagtgcccacacattgccctcaccacctccgataggagatgcctctccttctctagctcctcgaggtagctttgcacctcgatgaattcccctcggcggaatcgaatttgatctgtatggctgaccggacaagacataagctatgagagggaggaagtgggcagcggacgcctagctttaggaaacactattaaaaggtgttaccttgcagagagaccaggagtttctcctcctccttggttcgatcgcccagatcctcctccaaggccatgactcgggcctcggtggcctctttcccttgctacaagatatgtaggtgggagtttgctttcacactcaagatgtgcaaggg

SEQ ID NO: 15329 - DNA, 351 bp, Zea Mays
cgaacgaaatctgacctatcgagcaagctcgctcatgaggatgacgagcgaggcgggggcaccgggaaggggtggggttgtgtagtgtcgcgacataaggaacgagacatcgaagcggactggatcaggcggtgtcgataagaatgggactgggtcatagtcaaaatgttcctagatcgattggattgagaagcggggtcatgggtcgtgggtcgacactttaaaaggagaagtatacatctatgagacgagaatattatgaatttgatatgttgagtctaatgggccgatgatcttgggtcgattctatgggtcaagggtcgtgttctaaaatttcaataacaacctaac

SEQ ID NO: 15330 - DNA, 323 bp, Zea Mays
cgagggatagattaggatcaccaggggtggaattaggtatagaccgagttaggacacatgtcgttgcatattccagccggtgcaggttcaccggagcgcgcacgccgccgttcaccgtcggggacttggagttgtgaagagaaaggagtgtgagggtttaagtgtgaatgtcagtgagacacgtgaatagtgtcgtggcttctttgcgggtttttcaaatcgtcagggttctctgcgaaaaaccatcagcgtgggcgcgggtttcccctgttgatgggccggcttgggctcgattcagcccagcactattcattctattcctt

SEQ ID NO: 15331 - DNA, 296 bp, Zea Mays
atgaaccacccttctcatgatgtttatgctcagcctattcagatacgtcctacgaggcctagaggtgctttgcctcttactgctaggcctctagaggagagaccatgtggtggtcatgtccttcgggatggtggttgtgtgccatatggccaaggaccccgtgacagtggctttgattcttacttctctagcggaacacaatttccttcttatggtgatcgtttcccttcaggaccggggatgagtggtgttttcctaacatttttatgggcagatgccacaacactgtattatcc

SEQ ID NO: 15332 - DNA, 440 bp, Zea Mays
cgcacgccacatgctcggtgaaatgcccaaaccagccaaacttgctccaattgaacccaaatttttcaggcaccttcacaacacttccagcaacatccttgccaaatttcacgccaatccgagatcccaggcttaaatttcaccaaaatccccgttttacgcgatcgtttccgagccgagtgcccaaatccctatttcttcgcctaaattcaaaccaagcacacacttcactcatattgacctatataaacctattcgtgaagtatcggctcaattccatatcatttcatgcctcattttgaattccaaacctcctatgtcactatttgtctgtcaaacgtcgttttcacgtcgtttgacttcttgatcgtcccgtctcgtgccatatctctctgtgtatgtatttattcacatttcatatgcttatgactatgtgacta

SEQ ID NO: 15333 - DNA, 1004 bp, Zea Mays
cgcacggtgaagatccgcaccgaccattctctatccctctcttcgcgctattgttccatggcggcggacaggttcaggctatggggtccttctccgcccaacgacttcaacgcaagcatcgaagctcgccgtcgaccaacgaaccgaggccaaccatcacgcgctcgttgaggatccgcacaggcgcactatctctctctccctgtcggtccgcggcagaagcgccctgcccagcggcgaccaagcacgccggagcgtagtgcccgcgcacaaatccccacacggaccggtgctacacgtacggcggagtaggacgagcacaagggaggggaaattaccagtggatagaagggcagaggtggctagccacggaagcgtgcggcaacaactgggcatacagcagcggcatggcgatgaacatcgagctctgggagaagtttgccaaggcttgagtgaaacccagagcatctgcctacccccagtgccgcgaccgtagatggaacgttcccagtgcagttttaccccgccgacggtggtggcgacgccgcccagctccaacttcggttttatgggtggagggtcatcggatgcggccgttcttatagtgcccaggtacgaggtccgagttggagtcccacatcccaactacaccgcgacaaaacccctccagttcccagaatcgcgcgcgtctgttgtggcagcgagctttttgcgaggttggtgatgaacccgccaggtgggacccgttcgtcggccacacacgcgaagggggcgcgaggaagcaggcagcgcccaagaggagggttcaagcgcgcgcgggccacttgggccgagaaagacccaagctgggccaagccagggaggtttcagcccgagtgcttttatcctctttttcctttttctaattttatttcctgctttgtttctcctttatattttaaacctagaatatgaattcaaatattgtggcgaatttgtactaaaatttgtatgttttgaacatg

SEQ ID NO: 15334 - DNA, 704 bp, Zea Mays
cgtttgaacgataaaaagtgccataggaggtttggaattcgaattgaggcacgaaatgacatggaatggagccgatacttcacgaataggtttatatgggtgaatatgagtgaagtgtgtgcttggtttgaatttaggcgaagaaaatggaatttgggcactcgactcggaaacgatcgctcgaaatagggaatttagtgaaatggaggcttggaatatcagattggcgtgaaatttggcgaatatgttactggaggtattgtgaaggtgcctgaaaaatttgggttcaattggagcatttttggctggtttgggcatttcaccgaacacgtggtgtgcggagttttagggtttcggtgaaaagactatgtggggtgggaaaaccctcccgaaggagctagtaacctgcaaggatactcaagaagtacataggaacacttgctaccagtaggtttcacagggattcacaagaattggaaaaaggcacaaggggaggaagaggggggcttcactggtggcaggagctcagagagaaagggggaaagagagagagaaggggatactcaccagagagggaaggggagaagcacttggacgccgccggtgaagagaacgccgaagaggggtgatcgccgacgagggagtgatcgcctgagaccgagagaggggcagagaacatagcagagtgactgcctggcctcggg

SEQ ID NO: 15335 - DNA, 1344 bp, Zea Mays
gagaccaagagcctggaagcgctcgttaaggcctctgacaatgttgaggactaaagtccgatcagaaacaggttcgccgagatcacgcagatcttcgacgagttttttgtagcggcgacagtattcggcgaccgggagatcgccttgggagaaggagcggaattcttggtcggcatagagagcacgtgtggtgcggtttcctaggaactgggactctatagatagcagagggtgcgggtagaggtgccgcgctgagagatgatgtcagcgagggcatcggtaagggtgccaagaagccaagtgcggacgacggcattcatgcgaatccaatcaggtgactcgaaacagaatcggagaggacgtggcattccagagaaaatttggtgagggtgagaaagaaagattcggaccagcgggcgtaaaaagtggagttggtgtcaaggagtagagggacaagagcccggatgttggttactgcaacaacctgggcgtggagatttagcagcgcggctgcctcatggtggagaagagcagcatgccgagttgcaggtgggatgtcgtcgtcaacgtgagtgccagacgaacgagtgtcctcctccggctggggaggagcagcagtagcgcgctccctggtggcgcgctcttgggtagcgcaaacgcgggcttcagctgcgtcgcgttcctgctgggcaagcgcggcctcgtggtcggcatcagccgcgcgcgcaagggcagcctgacgggcggacagagctcgtcgctcgtcctcttccttggcggcgcgaagatcggcgcctgaggaagtgtcggcgatgttggggtgctgaagcacgtcggagccggagacagcgtcgaggggcgacgcagggaggccggacatggcagcgccgagtggtgggcgcgcgctgaggcggaagcgaaaaaaaggggaaaggatcggtcggtagacctaggtctgtgataccatgtgagtgagcaggattgaggaagaactattgtatattgaatgagggcagactgtgtacatatatattggagaggaggaagagaggtaaaaggaaacccctatgtctatggaagctaataatatacaggatcaatcagatccagactcctctccctaatttcctctatctataatagtagtggccgaccggcacagggttgccaggctcaggcccttccatatgtagcagattctctaacattttctatcggcaagcttggttcaacattctcataacagtcggcctccagaacctttctccccaacatgacacttcttcctttgatgaatggtgggaaggaacaaacaaggctcttgttggaccaatgcaaaaggac

SEQ ID NO: 15336 - DNA, 887 bp, Zea Mays
ggattttataattctctggactgggcacaagataaccagatagcacaggggctaacccgcaaaaagtctcaagactcagatctatcgtatgatggacggcgggtttatttggttaaaacagggggtctccttagcaaaatggcaccgcgaaggggtatcgttgaatggtggccgaccgatctaaaccaagggctcagattagatcaccacactcgtgaaccggtacgcactactagtcatcggatcaagatcctacggctacgatgaaaacaaagtcataaactcccatggccgttgatgtgcccaccgacggacccgatcaaccgattgaattgatcctgcccaatctaatcgcggccgcccacacatcatccaacggcacgcacggattcccccatccttctctacttccccgcgcatgtaaacaccttgacccaatcccagccgttggtggcaggatcgatggacaagggacgcctcctacctaacgacgcccagacacggacgagcgccccaacgaatacggcggcgactcgccggagccatcccccgatggcgcaccagagcaccgttttttctatccaagaggcgcaatacgacgagaggagactggtaaaccgcatggaggttgtcttacctcagatcgagcgccgggaggggctatccacgtgatgaggcggtcacgcggcggatactggattccggcaaggaattgaagagcttccggtgatcttcacagcgtactggggccacggccaccaccagagccatccgccgaagctttctagccacaaatcgaggccgtgacgacggtgaggctgtggatctacgtcggcggcccgctttctagctttttccccacggcggccatggcggccggaatctcc

SEQ ID NO: 15337 - DNA, 692 bp, Zea Mays
atgtatagacctatcaaaggagaacaactttgcttaagagtgtaagcatagttgttgagaagaatttggagataattaagcccaaagttggactgtcagactacttaaagtctgaaatcagactaacaatggaattgcatgaacttcaagctcaattcaaagcatgatcctgtgactgtttgtggatgcacgatgtatcaaagttggagctggtctattaagttataattttgttgtagagtgttggtcacgttgctatagaaatctgagaggaatttggccctaaaccgtgactgtcagttcatctgaatggagctcgccatggtacagtaactgaagtggatcagactgctagcgcagagctctcaccgccgacgaccgatctccgccgcgattcgtgccgccgccgttgtgatttacgccaccggtgaccggataagcctgccagatagtagctcttcgcctaaggataactctggtgactcaccgtcgtgcctccccccttgctcactgaacccgtggataaggttctcaccgccgttaagccatcaccggcgtccgccgcgtgtctctacctttccaccgcatcgccgtagcctactctcactctccgttgatcaccggagtaatcgccacggcataggacaccaagccactgcgccagtgctcttcccttcctccgaccgccgcgc

SEQ ID NO: 15338 - DNA, 1001 bp, Zea Mays
tttgagaatacttctcctcaaagtcagagcatcgttgagccatatctgacaatgcagctgaaagggaatgcacgattaagaacaagttgatcaatcaaagcagctagggaagctgtaagctcactaaccagcatttgacgcctttaaatcattgatctgtttatggagcagcaatggattccactatatcagagatagagcttgttcaggaacagcggcgccgcatgacttcaactaggcagataccccatcaacaaaatcctatgatcatagacagatgagcagaagaaagataattcgccagtatgtacaacatagagcaaaagactgactcacctagagattggaaaggaacaacggtagacccagggcaggaggagctggggcatggcttgacgagggaaggtcagcaggaacaatctgaagagcactatctagggtgacctcaaccccactagcagacagcaggctccttgcatctagcttgccgacctctaaggcgacttgtccagttaaagctgtagaagcacgtgctgccgtcgctccatcggaccgaggtggggatgaaccgatgtggacatccatggagtcattggaaagagagcacacctgaacaccctcgggggctgggtgtagtttgcactacccacaagagctggatcgccaccagcaacacactcgggggctgggtagctgccagcgccaccctcagaggctgggtcttctgtagtagacacctctaaggctgaaggcccctcagccacctccatgggagtcgggtgactcagatcaacgtctctggatggaagcctgccctccaaggtcgacgatgcacgagacaccactcgggttacctcttgcccggcggaatcaagcaacgaaagcccaccatctgggacctctgaacagacggctaggatatcatcttcaagaggctcttatagcatgtctttggggatgacctcctctagtgcttgatcaaaatctgatattgaaagccc

SEQ ID NO: 15339 - DNA, 634 bp, Zea Mays
ataagatcacgacggaacttccatgcaaaggatgatgaatgcactatgcatgtcaacaacatgagaccaccccaaataacatgtgttaaacatatacttccaccccttccaaataataatcaacatgtgtaacttgatcaaaccacatcctcaacatatgtaaataatagaacatgaatatcttcaagcaacggtacccaacaaggaatatgaggatgaacacaattgacataaatataatcaagtataggacacattaatcaaccaacgagataaaccatcactattttacttgccttcaccggggaatttggacaaagccctaagtacgatccaaaagtccaccacctgtttttgacacacaacttagtgcacaaatccacatataaacgctcataaacgacgctgcatctacgcacaattccgaacccgtcgcgagcgacttatcaccccatcacccaccaactgcagcggcgctgcttgacaatttcatatctttaaaattatgacagcagtggtaacaaacaaaaactccagaagcatctacataaaattccccacaagttttgtattcaaatgataattaaattccaatatctaattagcccaaaacagtccacaagatacaccctgc

SEQ ID NO: 15340 - DNA, 624 bp, Zea Mays
ggaagatgtctctagcaaccaaggaccatcggtcagaggaggaggaaggaaatgtcttccctagaagcacctgctcccgggcgaaccccgaggcaccgagcctaggttgggcgtggtggagctagagaggagggcaaagaggtgaagggaaaccactcgagtgtatccctcgcccagcccgagactggcccacagtaaacgaccgtccacattaactacgccaggtgccgagccgcggtagaggcgccggtccgcctcccactcatgacctatgagccccttgggctgcaacacactcatgacctacaaaccactcggattgcaatgcatttatgccctctcaggggtaggcctcagcacgcaggccgcttacagggaacaatgagacaagccccactgagacccaggctacgaaggccaggggccagcatagctcgactaaaggcgcacgagccccacgctacccacattgtccgccataaagaatacaagacgacacggtgacccagacgctcacgaatgaacatgacttcaccggggtaaaacgccactcacggacgaacatgacttcaccggggtaaaacactcgtttttaccatcgccatagtgactccttctcgagga

SEQ ID NO: 15341 - DNA, 383 bp, Zea Mays
acaggatccgcgatcaaaggcccagatttaatgcatcctgcgatccgacttctaccgtttatcgcaagatcaacgattcagctgcactcgctcaaatccgatcgcccatcaacgatccgaccgtccaacacccacccgacggcgcaagtgtatcttcctccctcggatacaggcagcgaccaggcgctgttagtggcacggccgacggcggacacgccatggccatccccatggtttctctctcttatccgagcgcgcggccaaggaaacaaaccccatctaagccgtagatcaacacgccaacagtccagaccccttcatctaccgctatccgagctccacggagttccagcccccatggtggcgcactgcgcagaccggag

SEQ ID NO: 15342 - DNA, 333 bp, Zea Mays
cgtcatactaataagcctagctttgccataatcttctgcctgccgggaaaattaacagcatgccctgacctgatggtcctataggcgccattgacatgggatattttatcggtcgcggaataatcttcttttgatgatgctttatttattctacttgagagtttgcatagccgccagccgttgggctagcataagcattggaagcgtccaaggggaacaagagaaagctagccaggaggagcacggccatggaatgcaaaagggggggaacaacttttactaggaagctatcagtcctcggaaatggtccacaagcgatctcactcacccaac

SEQ ID NO: 15343 - DNA, 280 bp, Zea Mays
cagaagtattggtggtatgggctaaagaaggatgttgcttcacatgttgctctatgtgatgtttgccagagggtgaaagtggaacatcaaagacctgctggtttactacacccgcttaagatatctgagtggaaatgggaagagattggcatggacttcattgtgggattaccccacacatctgctgggtatgactctatatgggtgattgtggacatgctaactaaagtagcccattctattccagtgaagaccacgtattcaggagccaagctagcaa

SEQ ID NO: 15344 - DNA, 480 bp, Zea Mays
gttggggtctggtcaaaaactggcccactgtcattgtgttccatttcctctgttgccatttcacctctctacacaaaggtatataattagtataactgtgtagtatgtatagtaaaatggaattataacatgagacatgaactgctaacaaacatttttttccggtgtcacgtcaaatttcggcaagcgggtgcaagctgatgtggtttgaggtgtgatatttgtgttcctcaaaatgatgtttcgaacatcaaaacagaaatcttgttgacaaaaagtgtggttcgtatactgctaaaaagtagtatgcatacaatgtacgtatgatgagtgaaaatagtattggagttggacaaattacctgttgatctgtaaccacatccgattcatcgggacacgtctcaagcactctacggatatgctgttgtctttcatgaatttcttcaaactgagtaccacccagctgggtctcgagttgcg

SEQ ID NO: 15345 - DNA, 719 bp, Zea Mays
acggcgagttgatactatgataacagaggggtctatttgcaagttgcgcaaccgaaggggtatgcacgcgttctggccgctggatcaaatatgaacgtctcagattagatctttcgattactgacccggtttgcgcttctgatccttggatctgaaatcgatgtcctagatcccatcacgctagcgcccgatcacgaccatcaaatggacaatccacaacacgaatttaatgtgcggcaggggtacctctctagtctaatctcagccgtctacccccaaatctacggcgcacgcgatatcacccacctccaaccacacctgcgtagagccacggcggtgctccacgccggagttcgcgcaaccggctgaccagtcctagtttccctttaatataagtcgtacgcgaagaatagggagcgacaaactaactggtcgtgagcttaccggtgattaagacgtgtagttctctgccctcggaaggttgcggttcacggtggtggagggatttcggcgactaggagcacctccccggttcgggtggctagggctcaatccgagggttcctgctaaagcctcacgaccacttcctggtcaccaatttcaggtggacatggatatccgtcacgatggcgacttgggtggcgcggcagtttcttttctgggagctatccggttgacgtcgaggggaagaaagcgggacacgagtgcctttatctagc

SEQ ID NO: 15346 - DNA, 459 bp, Zea Mays
gcttgaccgcgaacgagacgttcatccgtgcggtgctctcgacttgccacgtaatgtaccgcggagcacgaacgcagccgccgcggcggccaccaaagaagcgcaagaaacctgtgaggatgacgcccaggtagagcggcatggatgtgagcagggaggtcatgggcatccgcacttgggaagagagagatgatcttcctgaggaaggcggggatgcgggtgcggtaggtcgatgggaggtcacaaagtagtgtggcaacgacaaggagcgtgaaggagggcctgctaggtgcatagaaaatgtcggcgaatgcgtcggaggcagaggagggggagggcaagagagcgaggatcgtagagagaagtgagaggtggcccacgggggaggtggcgatgaccgaggttggggtgcacacgggcatggcgctggggagggggttgggggtgcagatctgttgc

SEQ ID NO: 15347 - DNA, 674 bp, Zea Mays
ttatattatgcatacgatgtacaattatgtaggacaccatacaacatacatgttatggatatatgtacatacatatatattttaattttttgcacaggaagttacaattgatccgaggttggtacctaaagttgatatgacattcagtggtgtggatgaagcatataaattttatagtaggtatgcatatgaagttggctttccattgaaaaagtatagggaacgaaaaaattgtaaatggttgaattgctcgatggaaggaaagagtgcagtaaggggaatatcaaacccaaaaggtacgtaataccagctcgaagcggacacaatgcaaggccggtatgaaacttaaaaaaaatttatgatgatgcaaaagagacagttatatcagtgcgtattgatctgttgcacttggatcataatcatgaattttttaagaaggatacaaaaaagaatcaattacaatgcaacaagacgcataatcctgaatacatggatttcataagttcaatgcaggagagtcgaatcccgcaacattgtattatggattatgtttcagaaatgcacggtggtcctgagagtgtgcctgtaacagcacatgacatgtataacctgtaagtttataataggtttagattgtaattcagaattgaaatttgcaaaatgttggtttcgcc

SEQ ID NO: 15348 - DNA, 609 bp, Zea Mays
tttcgaatgatagagtttgaatcggtgtgattcgttgcctggctggttggacccaagctccacgggtgcgttgaccatgattgagtatgtgattggtttattgtatggcttgagcttagtgtgcatgtagggtgcattataagtgtttttttagctgtccactgcatgggatgagacacaagacagctgcgtttctacggcaacaggctgacgcaggccaggcacgagaccagcaaccaatcaagccaaatataaggatgctgctggagatagccaaaacccctttttccccacggctgcagtttgagcgcgcagaaacaggtgtgccctagcgcgttgcctggcaagagctgctccgttcgtgttcccatgtcgtcgtctcgtctccatttcgtttcccgttccgtgcaagtacacaaatgaaaaggaatgctgacgctttgggaacttcctttccgaagcaaaacttctttgtttgtgttcagcgttcacaccgtaccccttgcggcccagtacataaggcaagctcaaaggtccggtggtgggccttgggcttgggcgaggaagtccggcggatggtttgtgtccggtcccaagaaaaaaaatatg

SEQ ID NO: 15349 - DNA, 496 bp, Zea Mays
cagtactctcctctctctccgaccgccatcgtgccatctcaaattcacgggccaccgctcggggatcctataaattgagcatgccgtcgtttccgcaaggtagtcaagcacccaacccatcaactcgtgccttcaattgtccaccagagcccccgaattgctcactttcccaaatcggtccatagcaccgtgcgaagtaacctcaccgtggccagtgcgtttcaggtccgatcatgtcctctgctctcttgtttcagtacccttatatgcccttgaagctcattggcacaaccaattgcactagactggggtagatcaccgggaacgctgcatgctgtgcattgatcccgctgtcaccgtgggcagggtgatttagagctcaaatctagcaattaagtgaggggaaatggtcgtgtagggttgaattcggtgtccagcaaaggggagggctagccgttgcttattctggcgagtacaagctcgccggagctcggcc

SEQ ID NO: 15350 - DNA, 583 bp, Zea Mays
cagtgtactgtgctcatctttgtgaccttgtaacttctaaacaaaagagattttgccctaggtcaccacatcaaagttgtagagcaatcattggagaacaaatttgcttaagggtgtgagcatagttgttaagtaaagttgggagataattaagtccaaagttggactgtcaagtcactgggtctgaatttttagacaaacagtgcaaccactgagactttgagcatggattcaactatgatctagtatgaatctgcccatggcatctatgacaaacttgtagctggttagtagctctataactttgctgcagagcttggcatgagtggtcatcggaaatcgagagaaaacttggctccaagtttgtctgtcagactgactgaactccaatcgccatggtacagtaccgggatcggatcagaacgccagcgtcagaaagatctcgccgccgacgactccccgccgtgattcgtgctgtcgctgccagaactcccgctcgtggtggatggataacctctcgggtaaaagaatctctgccgccggtgagctggaggtcactccggtgactcaccgtggcctccct

SEQ ID NO: 15351 - DNA, 635 bp, Zea Mays
acgatgagcaagattatccaacatctgtttctcggctctagccgcctcccattcccttgcatcatgtgctctcttctcatttgccgccttcaatctcctctactctgcacgcatcgggctgtcaaaactcgccgatttcgcgaacctacgcatgtcctatatgtgatcgttaatgtacgaatcgacgagctgagatccacaacacatcttctgtcccattagtctcttggactttattgtacgcatcacctgtcctttgtcatcataactctcccaaccgcatttccttgtctcctacaaaaaaatagtaagtacgggtgcaacattgcagctgatgcaaacaaaaaataaataccaacctcatcgtaatctaccatatgtccacaaaaatagccaacaccaagctcagaaggaactaatccatacttagcttcaataccacatttgcagagtactggatcaaacttcaaatcttccgcccactcatttttttcttttcctttgactctggctctagccaatgggacataggaccatataaccactctatgaaatgacacttacgccacctgtgtggctgcatgaaaataagttagtaaatttgtgcaaaaaataacaaaagtttggacatttgt

SEQ ID NO: 15352 - DNA, 444 bp, Zea Mays
gcggaaaggaaaggaaaggttgctgcgtgcctcaaaacgattgtcaagcggacggtttgtttgtttgtataccacatgcatgctggggctggccatttgcagcagcaccaagtaaactctgacgaccattcaactgcacaccaaaggatacgggaacagactagcaggaggctatcgatatccaccagagagactagcatgaatgaagtagaccggacgtaggggagtgcgcacaggcacagagtatctaatcgtactatctgagattctggctcgctgggtgtggtgtggtgggtccgtctggttactcgtcactgtcccgcggcagcggcactagagcgcggcgcggggccatgtgcttggctgggggctaagctgtcgtctcgtcattggagaacatggatcccacgattcccggtcaggcggaccccgtgtgtcaagttg

SEQ ID NO: 15353 - DNA, 334 bp, Zea Mays
tataacaatccaccggtataaacttcgcaaaacccaaccaaccaaatcaccctcgcatctatgacctctaataaacgtaccaaacaaattacactcagacttaacacaccatcaaaactaacaattcagattgttggataacctactctcttttactcatccaacttcaatagataatattatttggatcatccttcatctccccttccccacgacccctcatcctcccctaactcacgttgccaccaccgttgacccctccctcctcaaaatcataatgttagcacatcatatatgctagtgttagataaaacatcatatccttctacttaac

SEQ ID NO: 15354 - DNA, 474 bp, Zea Mays
gcccaccttgctcccccacgcgcaactgcgctctttttccgcactgatctgctggccactgacatctggggcccactcgtccgactcacgctcgctcttgactcacactggattgtcggtcccgcacgtcagctctatcccttcccctttcttcgctgcgtccgcgtgactcgggcaagctccagactctgcgcgcggcgacaatagaaacgcccgagatcctcgccagtggcagtccacctccctccgtgcggaaccccctctctgtgccatatgaccggtgggacccacgggccacgggtcttcttccccagccgcgctacggactcgcacggaagcgcgcagaaatcgcgcttgactcggtcgaacggcgcccgcaatcctcgctcccgctcgcgacctgacctccaacctccccggctgaaatcctggcgcccacgcggacttacctcggggctataaaatcgaggaccg

SEQ ID NO: 15355 - DNA, 521 bp, Zea Mays
cagggttctaaacagcacggatcgctcggcatccgcccgatcaccgattgacggtcagggcgcgctccaccgaaacggtaagttagatctaatctgaggcgttgattggttgatcgacgctatgcaggctttccacccctcaccatgacagcgcacggcggcgcccgagcgcagacaacggcgccatggccgacgaccacgaaaaccccaccccgaagcccaaacttctatgcgtagggtacatcacgaagcgcatgactaggcgttcaagtttacgggacctacaccgcagatcaagccctcaatcgcaccgacgacggcgcagggcagaggtgtggaaaacgcccaacttcgatgagaaatctgacctcccccgcgacccaaacccggtttctaatgtctaatacatgatgctaccattaaatcgagtcagtggggaaaggaattacctaaaaccgtggagtagaaggttctacccacagagagcttcgtcccggcggcgagacttccgctccaatgag

SEQ ID NO: 15356 - DNA, 2634 bp, Zea Mays
taactgtgtaggttgtggtaccagatgaatgaacagttacaagttgtgcttaactggatgttatctgatcctctcagtctgagtacccttttcatccctttattcttctgttgatagtgaaagggcctttaactgagttggtttctgttgataataataagctactcattttctaattttcttgctgtgcttctaattgagaaataattacttgcatctctgctatggatcctcataaaaactgctaatttggaaggacatttgcaaaatgtagggccccagctccgccaacttctgaactggccacgaccactgccaattgaggaggaaagagtacgccttctccacgaggtaaaactctgtctgtaattgctccgttgaacatctcaggctctgaactttgataatacacaagttatgtggtaccatgagcttttacactgcaacccagtttgttttgactaaatttagttgtctgcttgatttctagaattatctttgttggtaggatttagtttttttctccactgtgctttactttttccagtagaactgtcttacgattaacatatttccaaccagttttttctccaccatgctttactttttattcctttccaacattactttgttttgaatcatttttttcattgtcatggcacctgtgtcaaggttgggcaggaacttaaaagaagctttggaggtcaggctgctaatctagtgaagtctgctggaaactctgctgcgactcttattgaactgattactcgacattttcctggtaaatccacttggtattatgtttatcgtctttggtcaaaagtaggcaaagtccagtttgtcattgtattgcacaaataagttcatcagctgatagtctccttttgtcccctttctgcccatatgctatagcttgctatctgatattagtttcctgtattgggaagcacagcggtgttataaattattggtccaaaaaaatatttcgttcatttgtcaaatggttatggtggtccctgttggctgtaggcacctacagtgaaagtgaaactggaatggcccatccacccactactactgtttgtctgcatatggatttatgttctgcctgctactttggatctgagagtcaggaaacagtgatgattgatgaactggtgcctcatctaggcatatgaacttcgtatgagctgggccattcaaaaccagatgattgtgaatatttgatgcttacacttacacccttacattttttcatttctcgtgcaaaacgttagtggttttcattttttagcagttggccaagaaatctgttcacatgatttcacttgaagttaacatttattctcggtgttggtgctttcgttggatctccattgatttgagacattgaacatggagtttatttcctcaaagaagaacatgaaactgttcccgtagtgtttaactgattatacttgttcgacaaatatgtccagacatgagctaatcatctgaaattccagtgatttaggagtaattgatttcaggcttccagcacattattctatcatatatggacatatttgattgcacagataggttcactgacaaacatgtacaaatcttaactattcaaccggttagtctgaattcagaaacaaggaaggatgctagttttacccctgatctggccatagccaacttcagaatatttcacaattcgttcttcgatcattgaatttaaattgtaccttgcgctcttgcagggaattttagcatgtattgaatcttttgttaataggatagcgttgtgcaacttgatggtaccttttgctaacgttctatgaacacgtacatctgcatgcattcaaaaccaggttatattttttcttgttttgtactgtcctgagtcatgacatgactcatgaccaagtgtacatccatccaccaaatagtattttaagtttccattttggcaggtttccgggaccattcactctacaaggggcaccaggttttcctgtacaagagagcccagatctttgttgctgatttgtggggcgccttcaagggacaaaactatggcgagttccacgatatcaattccatcaccatatttgctgactacattgttccagcggtcctgagggagcttggagtacttaaatatggctcgaatctatcttgctccatcgactcgaacagtgagatagtgcctggaagcgaggaggaagtggagatacgcgcgtgctccatctatgcagtggagaagatgagggacctgatcagtaagaagtttggaaagcaggtaggcgcatctgaaccagtttcgcctgactacctgagacttccattcattaggcatgccaatgccgtttgctttctgacctgcattctcggtgggccgatttacaaaaaaaaaaaaaaagaaattcactaatcttcatagccgttgaacttgaacgagttaaattaaccaactcataaagcagtcactcgatacgtgaggttcggctcggaactaacgccctcttggtctcgtgttttctcggcagcttctgagcatcgacattgatctctggctctggtcctgcggcgtgcagaacatggcgctgtcacatcaccgcaccctgtcgatttactactagacag

SEQ ID NO: 15357 - DNA, 351 bp, Zea Mays
gtgatggtggagatgatgatgatggtagccatggggatggtggaagttatgctggaacatatgatgcttgggatagtcatgcagaatggagtggtatgagggatttgagattcactgaagagagtgagatcacccatgccacataacattcagaccatggagcatctcattcacaacaggagacaagaagcggtcgttgtcgatcagtttccctttccgttgatgatggatgccagaacacattctgctctagttacaactatatagctcgatgagactgaaacctaaacccttatgcatggcaatgatctctaggtaaagtacaaccatcaattatgtatgggtacgaac

SEQ ID NO: 15358 - DNA, 430 bp, Zea Mays
ggatcatatcctcgacatgaacataccaagaccaagagaatagaaattgctgaaagatagcaacttaacaacagaataggaaaggatctcagaagacatggaggttaaggacatataaactggaatgtttaaatgggcagtagagatacaaatgtaagtatttgaattaagggataagggtattgaagaatccaaggatgtgtgcatgtcaataccaatggaatagagattgccaaatggcagcaatttaacgatggaagaggaaagaatcccacaagacaagaaggttatggtcaggggcatctacaaagatgtcgcaagcacaagagtgggagcagatctaatagaataaataagtagagcacatacaatacttgaatggaatacttttagcaaggtaatatataaaaacataacatagaattagtcg

SEQ ID NO: 15359 - DNA, 451 bp, Zea Mays
cacgaattccagagaagtcaggggtctctgcgcaaaagatactagacccagcgcacagccggatcggatggcgggttaattttcgttttagtcggggtctctttagcgaaatgtgcaagccgaaggggtatcatctaatctgaaccgttcgattaggtgttgacgcgcgagattagatctagcctttcccgaaccggtacgcgactgcagccgttggatcccaaatcaacgcacccgatataaaacaccaaggtctaatcctatccgtgcaatccccgatcgacggtcacaactccatgcggcgaaggggtacgctcagttttaatcacacccgttgatcactgatcttacggtgcccaattcccttccccgccgtgacaccagacaccacggtgtccgcggtggcgccctgaaccgcggcggcggcatcaccgggcctctcctgcttttg

SEQ ID NO: 15360 - DNA, 460 bp, Zea Mays
aacgagggagcagaaggtttgcactgacctgaatcgagttggctgcggtgaggctaaaccgagcgagttcttaagcgttttggggaaaatccgaaattagtgctctctggtggggggtttgggatgcaggtgggtgcagtagctgctggaatacatggcgaagccgagggggggctcaatttatagatcccatcgacggtgatgtccaattttgcaaggttatgctggcggccggagggaaacaggtatactggagccggggatgggtggctttcaccgtggcgcttccttcggtgatcaccagttgaggagctacggcggttaccggtgagctggtgcggctagggacgacgtggtggatggcttggagcgtggcacaaccgcagtaaagcacggcaactccggtgacggccatgaggccacgtcgccggtgaaaaggggcaggggacagcgaggccaa

SEQ ID NO: 15361 - DNA, 892 bp, Zea Mays
cgagctcctttcgattggagtcagcttgaggttcgaaggcatgcccaaaggtacccgcgggtgattcgcctggtcctagacccgttcgatggggtccgagcgaacgatgcctccctatgattggataccatcacgaatctctcctggggttctcggatatgtcttaagatacctcgggtcgcaacccgagctagggccatgtacggacgtacttatagtcatcactaactctgtcctctgggcagttttgaagcccttttgaggggccaaccttcgaacccctgatcagtattaggctcgaagccctgaagtctagaggcagttcgtctaaaccctactgagagtcgagccttcgaacctttgaacagtatctttccatgcctttctcctcccaagcgtcaagccaaaggagaagatgactttttctgatttgccacttattttccgagggggtcgcccgaggaaggtgacgcttcttccaagttcggttgccgaggggagtaggaggcgatatagtcgagaggagagggtgtgcattttgaggtggagtgcagaaagacgcttggcgtgttttttcctcggaggggacacggtcatttaatgtgacgtgacgttctgcttgccagccgaccgttcatggtacgcgtgctcgcgaaattcgaaacaactattgttcagtcgtttttcaatcgtaccttggtggctctgtccgtccaataaagctgaccgggagggagggcttcggaccattacctttgcagtttcaatcctttgcctccaaacgtcgttttcaccttctgcccagatagctcttcgccttcttctcgccttctgtttgtttcaatggcggaaaagatcattgtccttcctccccgctacacgtggcctgtgt

SEQ ID NO: 15362 - DNA, 904 bp, Zea Mays
ataatgaggcgattcaattaatttcgaatcaattgaagggatgtagaaggggcggggcgaacctgatggacattagcgactgaactatgtaaaagaatgtggggaactcgaaagaatgagaggggaaacgaaccaggggaggagaacgacggcggtgaatcgatgaagcgcggagattacggtgggtggaagcggtgggggcggtcgtcgatggcgatcgcaggagcgaatgacgacgatggggaggagctgatttttttagggtttgggtggacccgagctgaattaattgaaaggggtttgatgggtctggctcgttgaccatattggctcggtcggcccgcgggggagcggcgagggactgtgggtccactagtcagcgcacagtcagttggaaggtttggttactgcgtgttcataataagaataaatagctgtgcaaagtatcgtaaacagtttacaaaaaagaattaatcaagacccacgccaaagtacgtaatataataaatcccaattgatacgcagttgttaacatcgaattatacaaacataaatcccaaatactacaccacaccaaccaggccgcatcgctgtgtcaatttatgtaaccgttggagtcataatatgcatgtataaacgcggtcaattcccacgcgggacgacaccacgactccggagaacccacgcggaacgagcggactcaccgtggcagttacacgtttatgcatacggaattcgaatgaaacagatgcataaatggtaatagtgggtgcgcacgtacgacccaccttgactcagtgcatgcgcgcggtactccgaccacctgccacgtcgacccacgcccggcacacctagcctggcaggggctccctgcattgatggaagcccagggctcctaatacta

SEQ ID NO: 15363 - DNA, 387 bp, Zea Mays
cgcgccttgcccgccacaaggcgcgccctcgtctcaggctctgctggccagaccccctggtcagtggaccagacagtggggtgttcccctggcctcctatgggccacctcccggctacgctggcccacccgctcccactccggtctgggatcagcagactctggctgccaacttctagactattgctcttcaacaacctgttcagcatgagtggcacttcgacactggtgccactagccacatgatctctgacgccggtatcatctctcgaacccctccttctcgtcatattccttcacatattgttgtcggtaatggtcatctcattcctgtcacttccactggcaccgcttaccttccacataatctatcccttaataatgtcct

SEQ ID NO: 15364 - DNA, 393 bp, Zea Mays
gctactggccgtcatccctcttcaccaacctggcgagcagtgcctccaacatccagtggggcggcgaggtatactcgcctgacgcgggccaaacatccacacagatgggcagtggacatctccccgaggaagggctcgggaaagccagttacatccggaacatccaagtggtcgatgcgtccaacactcttctgtcgccaagtggtggtctgggtctgttcgcttcacgacccaactgctataatgtgctcaatggtgctgctggtaacagctttggcacctacatctactatggggggccagggaggaaccctaactgccagtagtagtcaaattgaacgtttcctggagtgcaagcatagctctctctcctttacttaattacacgtgaag

SEQ ID NO: 15365 - DNA, 1526 bp, Zea Mays
aacagtgacatcttgatactggcctgatggctgttgttatacgagaactctgcataaggcaaactggactcccagctgctatcgaacgttaacacacaggctcttaataaatcttcgaggaccttgttgaccctttctgtctgaccatctgtctgggggtgataggcggtgctgaagtctagcttggtgcccatagctttctgaaggctcgtccaaaacttggaggtgaactgggttcctctgtctgacactatcttccttgggatgccatggagtctgactatctttttaagataaatccatgcaagggtggctcctccaaaggtagttttcattgggatgaagtgggctaccttggtaagacggtctattattacctagatagactcgttccctttttgcgtccggggtagtccggttacaaaatccatgtttatcttctcccacttccattcgggcactggaaggggttgcaataggcctgtaggcttctggtgctcggctttcgtccgttggcaagtgtcacaccgggccacatactgtgctatctctttcttcatccctctccaccagtatctggttttgaggtctaggtacatcttggtggttcctgggtggatggagtaggctgagttgtgagcttcattgagcaggacttctcgtgccttcccttttggtacacacagacggttcttgaaccaaaggactccttgttcatctatcctgaggtccgaaagttgttctttgcgagctttttccataagtattgttgtcttcgagtccaggcgttgagctttgcatatgaggtcttctagcattggtttgacttctaggctacctttgtttcccaaacatgcattcagctgagctgattccttcttccaatcttctaaaaagttggttccctttatcccgaaaggttttcggctgagggcgtctgctaccacgttggtctttccggggtgataatgaatctcaaggtcataatctttgatcaattccagccatcttctctgacggaggttgagatctggctgagtgaagatatacttcagactcttgtgatcggtgaagatgtgacatttgttcccaattaggtagtgcctccatattttcagggcatgcactatggctgccaattccaaatcatgggtgggataattttgctcatgtggcttgagtaggcgcgatgcataagcaatgactttctcgttttgcatcagaacacaccctaagccttgccttgaggcatcaaagaagacgacgaaatcttggtgtatattcggtagtgtcaaaacgggtgcggtcgtgagcttctcctttatgatctggaaactttcctcacactttggggtccacacaaacatattgtctttcttgaggagctcggtcataggtcttgctatgctagagaatcccttgataaagcggcggtaatatcctgccattcccagaaagcttcgaacttcactgacgttagatggctgcctccattttgatactgcttctaccttggatgggtctac

SEQ ID NO: 15366 - DNA, 769 bp, Zea Mays
ttctgagatccctttctattccactgttaagtcatcatcctttgcctctttctattcccttgtcttggtatgcttggcataccctaatgactattcaagacatttcagttaatatgtccttgaccacccttgtttcttgatgatccatgagcggtcattttatttttgcacatccgtggtaacctcgttgtttccttgtaacttccttcagttatggatttttacttcaactcttctatcggaaccctacctatcttacccttgattgtttcctctactccgccattctgcgagtcttaccctaattctatcctttgtcatgctttcattgatatcatctttaccttggtcatctctacatctcaccctgttgcttatcttatatctgccctctaaaatcttatcccgtctgtctcgatttgaaagttctatcttacccatttttcttcggatgtatcctattctttgctgcttgcgaactttcaacttcattgtttaatgtgttttgttcgctatcgcctttacccttgtgatcctaccttgatgcttgtcgtatgtctgccacttaaaacctcccttctcccctctcaattcgagagtggtgctctacttatcctgcctttggtcgtaacctcatctttgccacgtgccagtcttaccttagctctattatttgttgtactcataccagtggctctcccatgccttcatcttttctctcatacccttgtccgctatcgtctttgacccttgcgatattgaggtattc

SEQ ID NO: 15367 - DNA, 357 bp, Zea Mays
ccgctccgctgctccagctcccaacttccccccgcccaggtccagtggccagctggccaacgaacgagcgtccgctctaacttcgtcctgtgagttagtgtgtgaccgtgtgtttgcagtttggttattggattggatgcaaggctgctggcaggctggcagcatgtaggcgtgtaggaacgccggggtttgcttgttggattggaagtaggtttgcttgttggacatgtagggctccaggtttgcttgttggattagatgcaggtttgcagtttgcttgttggattgaacggaggtgcagtggcagtgcctagaccctagtgcagtttgctcaagagtcaagttattcgggttctg

SEQ ID NO: 15368 - DNA, 533 bp, Zea Mays
gcgatattacacatatgctaggcacaccattaaagcagaagaatggagagatacagaacatgatgaaatgagcattgcattagacaatacaacatcatgggaaggcacaatcgaaattgcaagagtttgccaccaaattagctgaaacaacaggtgcctcgtacaaaaatatattttgcagagataagcagacagggaaagtgagagcatgagcagtgcacttgtcaggtaaatggttgctaaatggctacggtacggtaaggatgggctgtacataaagcaaattttcgaatcggcacatgggttgtaaatatcggagataactatgtgctatgcaggtaggatttaaaggggagaagagacgctaggttatgtcagccatgtacgtgagagcaagattaagcatgcagtatgaacattgaatgtgttgtgctgaaaattccttaatatgtaggatctagattaagcatgtagcgtggaagaactgggctgcggcttgccattagaacccaaatatcctcaccaacactcac

SEQ ID NO: 15369 - DNA, 740 bp, Zea Mays
tttgatttgcttcggatatcgacagtccttgatgaaatgcccagacttcccacaattgaagcaaccactggaggaactaggaagggtagggaaacgagtaccaggggcacttagctgattggtcggagcgggggcaggagtgggacgaataaatacgggtggtttaaatggatatgtaggtgggcgaggtgaagaacggtttggattgaaaggtcggattaccaaccttgttctcttttcacgtccttgagttgatcttgcacccgcatatccctttgattttccgtgtcccgtatttttggcttcaactgccagtgatgtactgacaaccctcctgtatgtgaggtctagacacgttgccatcttacgctggagtctgtcatttagtccactcctaaaacaattcttctttttcaagtctgtatccacttggtcaatggcgtactgggagagatgattgaatttattgagatactgcatcacagaatctcccccctgcttcagtcggatgaactctttccagtttcttttgtagcacgcctttcggaacataatgttccctaaatgccaatttaaactcttcccaactcacttgatgtcccgtaggttggatggtggaaaagtttgcccaccaggtgctggcgaggcctcttaactgctaagcggcaaatatgggcttctgaacctcggtgcatcggattagcccgaatttatgttccattactcgcacccatttgtcg

SEQ ID NO: 15370 - DNA, 619 bp, Zea Mays
tacggttcatctgattttggggttgccatgtgccggaagaggtagagagtttattgattggtacggtgaaatcgatgctgctgcaaatctgagacgtcatctcaatgtttgtaaagaagaacttgatgttgtcaagcttcaagataagatagtgcttggcaacgatgatgagctatcaattagatgttttttctcattctattcaatcgacttctgtttccttctgcttcttggggcattacaaacaatgaggtactcatgacttcaaacatggcccgaatggctgatattgactggtgtcaactagtttacacggatttgtgtgatgctgccgcacgttggcataaaaggaacaaaacaaacatcacaacaacaatatattgatgctcactcattgttttagtaagttattttttattgtttactgtgcatatatatggtatgcaaatatttgttatgtactaattttatatatttgtgcattccttttttcagatttactatcttgatcacctacatcaccctgctgctcctgataacaaatatggtactccacgcattaagttttttgataatgagaccataagagagttggctcggggtgacagacgcccccccc

SEQ ID NO: 15371 - DNA, 553 bp, Zea Mays
gatggggccgaaggcttctggggtttttgttgaggaattgacgaggacatgtgttgggcctagggaggttatgacttcgctcgagctcggagaaacgtcttcacgaatgttgaaggttaccgggggtcgatttcataggaaggactctattccctggcgatgactattttacgtctcgtatggctcgtgagatgaaaatctttccttacggaataaatattggtgctcttgtgttagtagtgatggataaggatcgccaagaggcccagcggaagaagcggaaggccccactttgactggtggatccatgtcacgacgccaagatgtcgcgccccagcgcgaagggggccacttcggctgcaacgatgcccccctgtggcgccagtggcacccgcggaggcgtcttcaccaccgcgcgttgttgaaacagaggagtcggagacgggagggataggccaggagttgtctatcgacgactacctggtgggggcattaccatgttcgacggccagacggggctaccgcctgcttgtatgtagcgtgtctattatgg

SEQ ID NO: 15372 - DNA, 353 bp, Zea Mays
ggggatgtggcccaaactttcaaggagagagttatcgaggagggcccttgggcagaagagggagacgcaaacatcatgtggaggaagatggcgacatgcatctgaaagatagcttcagaagagtttgggttgagtcaaggaaacagaagggaagttaaagacacttggtggtggaacgaagatgtccaaaaggctatcaaggagaagaaagattgctacaaacgcttaatcatgacaagtgtgcagacaacatagagaaatacagaatagtgaagaagtctgcaaagcgagcggttagtagagcccggggtcaagcctatgacgacctttatcaacggttggacacaaagcag

SEQ ID NO: 15373 - DNA, 698 bp, Zea Mays
tccttcgcagtgggagatctcgtcctccgccgaattctaacgggggaggggcggcacaaattgtcacctctatgggaaggaccattcatagtagctgaagttactcggcctggatcatatcgtctcacacagatggatggcacagaagttgggaactcatggaacatagagcatctcaggaagttttatccttagctatatttcaaaagctattggggcggcaatgtattctgtaaaccgggaaacgcatcatcaataaaaagacttcaggaattattcattgtcaatttgcattcttgctcaactcggggtgaccactataccctactaacggagcaatcggcttaagtcagcgatgacttaagacggtgcgacatgctcacgcttacttaactcggggtgaccactataccccactaacggagcaatcggcttaagtcggcgatgacttaagacggtgcgacatgctcgcgcttacttaactaagggtgaccactataccctgctaacggagcaatcggtttaggtcggcgatcactatacccctgatagcggaacgattgatttaagttggcaacgacttaaattggcacggcacattcggcacgttcacgactattcatcccagggcgatctctatgccccacgaaaaaattcaaaaccatcataatgcacttacttttacgactgtagatacc

SEQ ID NO: 15374 - DNA, 520 bp, Zea Mays
cccccacccttttgtcagagattcaacagtcttcacatggctctagtatactcatcaacctcaaacttcggcatcaccaacatagaaaaatcgctccctcctccttgattgtaacatctagttctcattcctatacactcttcctatgactccgattagggtctccatatctctcgccattgcctccaacctcaagcgagataactcctacccatctcttcaaccttctgcaccaaggcagttctctcctccgcaacctgttttgccccaatcatagctaagtttgcctgtttgagcaactattgctagacttcctccatctcttccatcttcctagtcaacttctcgaacactgacatcaccttctcccacctcgcctcactctgtttagattccattgctaaaaaagcgtccagtgcctagcgggactgcatagagggtttgattggtggtgtcgccgtgtccctcctcctcaactcaccttctagatggatggagtttgtgcctagttgcttctttc

SEQ ID NO: 15375 - DNA, 390 bp, Zea Mays
gctctttgtatgtcaccgtcggtggttgtttgttctcgtgcattaaataactcatttctctgttatgccagtgagctgactgtgtgtgcgatgtccctagatcacaacaacaaagcataccagatgaatccttaatcaaagtttaagctagaccttggttccaggtgcggtgcctacagagatggagagaacaaatacgatctccatcttcttatcttgctgctgatatcgacaatatttacatgaagagaagacagaacaagtgatgggtcgaggaaattgaaaattatcctgtccggccaagaacagacgcaaaggttcgctgtgcaatctctctttcagttgggtacatcattcacatcaaacgtgtactactgatccccccccccc

SEQ ID NO: 15376 - DNA, 506 bp, Zea Mays
gaggaattggtggtggtggattgggagtaaacttctcaccctgagacgaaccagccccatccgatccatgcgtgcacatcgacatctgaatcaaaacatagctcataaatacacatccaacatccatgaaatatattacaaggatcaagtacatggtgcattattcattacattacccaagtcttacacaaacttcctagcgttactattacaacagaggagatgacaacatatacatgtgctaatcctagtcctctgcatcaatggctacctctgaaacataactaccaccaggcagatcatcacctaaggacactagaggaggaactgcctcaacatctaggtcctcatctgcctctccaccatcctctaaaactgcaccaccctccatctctgctaccctaggctggtcatttaggtgcaactgataatagatctgatgaacctcctcatgtaacccattagcatactactcgaggtcatcataagcaaacaccaaatcctgg

SEQ ID NO: 15377 - DNA, 671 bp, Zea Mays
atcgataacgtggaagcagtagggtcgatgaagtcgaagcagcatggtgacgacgtcaagcggcagggtcaacgacatagggtcgacgagagagcgtgagtagacgcatgaagacgctttctaaaaagcttatttgcctcctcccttgcatcatctcgaaggcaactggttctagagacctgctctcctgatcgcagatgtacgttggcgctcgagatgaagaagactacagtggcagagcagaagaaagaagaggcaaaaacctaattcatgtgggctatgttttggcgatggctatcagacgccttaacaacagataaattgaagtataagataagatcagatgatgcgtactaattaaacataatgattgacgatgtggaagtgatatgatcgacaacatggaagcagtagggtcgacgaagtcgaagcagcatggtgacgatgtcaagcggcagggtcaacgacgttagtgatagggtcaacgagaagagtgtgagtagtcgcatgaagacgctttccaaaaagtttatttgcctcctcccttgcatcatctcgaaggcaactggttctagagacctgctctcccgatcgcagatgtacgttgatccgatctagaacacggttaaataaggacttggacccttatctgcaaggtgctgaatttcgac

SEQ ID NO: 15378 - DNA, 361 bp, Zea Mays
caggattaatatcatatccacatttgacttattgccatttgatctattctcagggatgccttcaaatatgatccatcggccttagtcaaagcatatgttctgattgcagattcacgtgctctataataactcttctctgatgaactcgccctgctggtgatttggctcacgaagaggttcatcttggtgatgaaattcctagcaatgcacgcaatatcattgtgctaggaatacagaacaatgaatcttttgtttttgggaaatgacaaagatcattattaaatgtgggagacaaatatgtcgacacctatcttgcctctatagattgcaaagggatccaaaataaagtcctaggcatgag

SEQ ID NO: 15379 - DNA, 461 bp, Zea Mays
ccccttaaaattatgtaaaagtttcagcatacttttccaccaaaaagagccaattcttctatgatcagggagtctgccagacgtataatagttattccaaatgatatttacccatggtaagtcatgactattgaagaacttgtggaagaatttgaggagaagcgcatcattctgagtttccaaccagatcaccccaaggcctccactgacttttttcttagcaatcgtggaccatgcaactagcggtggctttttttgagttcatgtcattccccctccaaaggcaatgcttcctgtaaatgtctatctgtttaatgatagaacttgggattttgagcgtgcacataaaaaaagttggtaaggctgaaaaaaccgagtttaccaactccaatcgcccaacctgagataggaaattagacgtacatgacagtctcttttcaattctttggattagaggtaag

SEQ ID NO: 15380 - DNA, 531 bp, Zea Mays
ccagggttggcatccgatgaggggtcacttcgcccaatacccagccatgcgccaagggccacaccccataggcaataaactccaccaagtcacgcccgctactcaggcgggcagcctgtcaaagggctccttcatcttcgtcttcctccgccacctcaaatcgagggaatgccacataacagtgcgagcacaggatggccggaggcagactcggcaagccttcaacatcaccaggagccacatagaaccaaacatcccaccagttaccccacttgttcctagcgtaggggactatctccacaaccatagccgaagtcttcttagtcctcagcgtgaaggtgcacgatccaaattgggctatcttattccctatcttcctcttctgccaatgcaagcaataatttttggcgaagacctccacggacggctgcccgtcataggaagtaactgcccaggcatacttcgcaagcgccaccactgcgttaggtgtcaactggtggacttgcacctcaaaccttcgcaacacctcca

SEQ ID NO: 15381 - DNA, 348 bp, Zea Mays
ggatgatattgggggcaacaagaatgttgttgaggttcaaaggaccaggaaagaccgtgtcacctactgagatgacaagcagagtcgatccattaccaacaatgatggaagaagggaaggtggagctatgggaatggggtaaagaaacaacactcgggtcaggagtgatgtgatacgagacgccggagttagcaagtcagtcgattttagtaggagtaggtggcgatgacatggggaacaaggagagagccaccagagggatgctggggcctccagtggcaagcatgctgacatcgcgcatgggtggtggagacgatgggacctcgagcgtcatggagacaatctcag

SEQ ID NO: 15382 - DNA, 446 bp, Zea Mays
ccgcgacctaacctatttaatagtgtcgtggcctagcccagtaggcacaacccatttaatagtgtcgctgtcggtgcgacacgattcaaaataggcccatgtcagtccggctcgagaactatgcagtgcctggaccgtcttctagacctggcctggtgtcgtgatatcggaaatcaggggcacaatagaatttgtgtttggtgagggtgctagcgtggactcactccaagtaatgaatcgagtgactcgagagggcttatactagttcaggctcacgtcatacgtctaatgtagtgctaatcgttctattgctcttggaaatatgttacaaagggtgcaagtgtgagaacgaaggagagaactctggttgaatgctcgtagctcttctgccttgttcatgtttaaccaccccttttatagttcaagaagatgtaggggcaaatttg

SEQ ID NO: 15383 - DNA, 428 bp, Zea Mays
gtgccttgaacattcttgtaggttctcagctccttagggagggttttcccacaccacatagtgttttcaccgaaaccctaaaactccgcccaccacgtgttcggtgaaatgcccaaaccagccaaaaatgctccaattgaacccagatttttcaggcaccttcacaacatctccagtagcatattcgcaaaatttcacgcccatccgatattccaggctttaatttttccaaattccccgtttcgagcaatcgtttccgagccgagtgcccaaatttcattttcttcgcctaaattcaaaccaagcacacacttcactcctatcacccatataaacctattcgtgaagtatcggctcaattccatgtcatttcgtgcctcaattcaaattccaaacctcctatggctctatttatcgttcaaacgccg

SEQ ID NO: 15384 - DNA, 507 bp, Zea Mays
gtttgtcctagcttgcagtctgagctagcagatagagacgctaggatagctttgcttgagaaggctagctcagtgagtgcatctgcacctacgcagtgtgcactttgtgagggtttgcaatatgcccttgagtcctgcagacatgacaagacaagaatcgaggaagaaaacacataccttcgatctatcttgagttgggtgtcgtgcagtgagccccagttgggcatgatggtcagttagttcaagaggggaactggtggaccgggattaggctttgctactaaggatgggagtgtcactcgctttgggaaggttggtgagtgcagtggtttaacaccttcagagaaaccttcacccactcctaagcttatcaaaaccacctctactaagcctgtcacccctgtgagagatggtgtgattgatgaacctatgagagctcctcctcagaaacaagtgtggcttccaaagcctaatcatcttaggaacacacttgacacctttcccgac

SEQ ID NO: 15385 - DNA, 304 bp, Zea Mays
ggcagtttggtgtagggtttagcatgggtagacttttgtggaagacttcgaatttgcgcacttgttgtggtagtccggctgcacccttgggcgacttttgcacggatagtctttttgagaagacttcgcctttacgcacttgttgtactagtccggctgcacccttaggcgacttttgcacggatagtccttttgaggagacttcacatttacgtacttgttgtgctagtccggctgcacccttaggcgacttttgcacggatagtctttttgagaagacttcgaatttacgcacttgttgtgc

SEQ ID NO: 15386 - DNA, 776 bp, Zea Mays
gaccaactcagtgtcatcagcgaaaatcaaaactctggcatcaggagcgccgacctctaaggcgacttcctgacccaaagctcgtgccgctaccatgcaaccagaatgcggaggagaagaccctacatgaacatccatggaagtatgagagggagaacccactcggacaccctcgggggctgggtcacagctcacgctacccatccgagccggatcatctccggcaacaccctcgggggctaggcaagcgttagcgccatccttgaggaccgagccctctgtaacagtcacctctaaggctgaaggaccttcaaccacttctatgggagcagagcaatctagaccagcctcctgactcttaagaccacgctccaaggtcgatgaggcacgagacgccgctcgggataactccaacctggcatcaggcacatcagcacaaatttccatcatcccaccatgtgccggctccgacaatagatcttctaggaccatatcttcgagagtctgatcaaaatttgctagagacaattattgcagaccaacgagggtagacaaagctggagaaggaacaccactactctccccgctggctatgtagcgccggctgttcttccgaattaaagggatttcctcctcctcttcctcatcttcatcaataatgtggacggtacacccattgggatcaactttggtcggattacacccattgggatcaacatcatcaaggtcacacccattgggttcagcatcagtcgggtcacacccattgggatcag

SEQ ID NO: 15387 - DNA, 631 bp, Zea Mays
taaaacatggacaaggagtgcgagggcggacctggagatggttggccatgacgcgacgtctcacggtggcgcgggcaacagatttgggggaagaatgaaattctttggctatggtggctaatcgagggcaggggtgggtgctctggcttcgtaacaacctagcggagctagcagcgcactcaatttatagtgtccaagagtggtggctccgaattttgaaaggggagactggcggccgaagagagggggtgagtcaccggcatgaactaccgtggcgttcaccagagcaatgtctcaggcgatggacagactacctacggctatctactgcgacgtggtaactcttctaagtatgtggcatggctacgaagggcggcgaactccagcgaggacacctcagtcaatcgtgcggcaagtggcatggtgaatagtacggtgataaggctccaacccttccctgcattgagatgtttcaccgccagccgttatccacaaaccagggcgcactaatcgcaacgaccagcgtcaatcgcggcgtaaggtcacccacggcgaggtacactgaatctgaagatctttttgctactgtaccatcaggatcttcttcagttgttctgatagaacatcttca

SEQ ID NO: 15388 - DNA, 694 bp, Zea Mays
cgcgttgggctcgacgacccgttcgaactcgaggaattgcgcgccgtcgcctatcctccgccacagatccgccgtgtgacgaagctggggagcattgcttcacaatccatggtatggatcccctcctccgtttcgttttgccttcaattcggttttacatttagtagggatcttggtttgcgctccggagtgggttcttgtgaggttcagcaatggcgccgccgtctgtggctcgggcgccgtcggtgtctggccggagaagttgggcaagttgcgcagaccgtagatcctgtgacgtacgattgagattagatggcgaataacgcttcgatcggaatccgcgttagccgtagattcccgatcggatggatactgggtgatttgccccctttaaaactgtgaccgttggatggagatctggcggccttagtttagtaccggttcggttagaggtagatgtaatctgatccgtgggttgctaatcgtgtggttcccgtgcgatgataccccttcgcccgaaacaatttgctaaagagccctcgtattttaatggattcaacccgcagtccactgggactgttcacagagtcttaggaattttctgtactagccccctgagttttccaggaattgacgcccgatccagagcccgtttaaaatgtataaatgaattagtaaatgtatttttaataca

SEQ ID NO: 15389 - DNA, 587 bp, Zea Mays
ctgccctgaagcgggaagtgcacaagaagccggtgtccatgctcatcgacgccagaggcatcaactactacatcgagggcgtcttcacggggccgcgcactaagaagaggtctctcacgaatccttagatctgaggccgacgtcgcctcagtgacctcatcctccatccccatcaccagctccttgctgatgttgcgctccactgtgggagcaacagggctacaacagctgtcgcattagctgctcatcgcccccacaggcgatgatgccagccagtaagtcagcctgaccactctcccttcgtttccctctcgccgggttctactggttagggttttggtctcatgccctagcaccgttgatagtcgccgagttctccgcctcccctcctccagtcggcctccaccgctcttctctagtgccgacgccaccacattgccactcgctcccacgggatgccgcctctctgtcccagctctttggcttcgcctcccctccccccgtcctccatcgctcctctctggtgctgcctccacaccactctctcccggggatccaggtctgataaacatagttctaggcctcga

SEQ ID NO: 15390 - DNA, 601 bp, Zea Mays
cggctgaacacgaacatgacacactgccacgggtcatcgttgccaagctgaaagcaaagctaccagaagctctgacttcctatggcaggccacccacggtcacataccggtgggtctgaagcacggacatgaccggtcatcgttgccaaactcaaacatgagcggctccgacttccaatcacgaacccgggcctcgcccccagcagaaccccagactatgaagaaggggggcttgcaacgtgtcatcgttgccaagctacgatcccgatatagcagcttcgacttcaagctgcagaatccacctccgttcatccaccataggccaagaagtacagccgtctaaggataccacaaagccatgatgatgatccaaatgcaacgccttcatgaagggagaaacaccgatggcgatggcaccacggttacacacccatagctgatcgggtttcacccttggatgaatgctagaggctacgttcccaatagggaaagcagcgcccaccggcgtcgtcgtcaccgaggctttcgcccagagaaccctctagcacgacgtcgggccaataagaagaaccccttgctcgccaacaccgccctcgccact

SEQ ID NO: 15391 - DNA, 428 bp, Zea Mays
attcacccccctctaggctactttcagatagtccttctcttgggatcttttagtggctttctccaggataggtatcccatctcttgcaattctagagatagcccttgtagccagaactggaatcttcctcttgtatttttcttcaattttttacttgcaactttggtccaccttggatctgcctcgtcatctagaaagtagcccctgcccctctcgtccatgctgtcgagttttcctttctcctcctccctcctcctaagagcctccagactcctagatgccatcttcctattcttaggcaccacattcgactgccccctagcactcagcacaatcccagcttcaacagaacctcttttatcttctctaaccctgcccacttcacttaattgagtgccatccaggtccccctctttgatctcctcgct

SEQ ID NO: 15392 - DNA, 598 bp, Zea Mays
agacattgcgaggctccataacaaagagttttgtgattggtttaaaaagcggtgtgaaaacaaggtaccaaagaatgacactgtgagacggttggcacagggaccctcgtccattgtagcgacatggcagagttacgacattaatggatacactttctacatagaaaaacaagtggtaaaagcacccgacaaaatagtggagtttgcaacgacgcgataactgaggtgtttaatcgcaataaaaatcgtcatatctaaggaaggacatgtattatggacaattagaacacatctaggagttggactacacacttttcaagcaaattgtttttctttgtaagtggttcaaccctaaaggtgttgtcgttgacccaaaacatggggttaccactatagattttagacgagaagcttacaaggatgatccatttattcttgcaaagcatgcaaatcaagttttctatatcgatgatcttgcaaacatgcatcatcgactggtgctcagagggaaaagaagaattgttggtgttgaaaatgtaaatgacgaagaagattatgacctctttagtaatatgagtagtttagataatatggtcat

SEQ ID NO: 15393 - DNA, 586 bp, Zea Mays
ccaaattcaggcactacggtcgtttcaatatatcgtggccggtgggtcaaaacctttattttcttgcccttcagcacaacagtggtggccgaagaggcagtttttctctttttccttgccttcgcaaggggtagcagtaatcagggtatatgaagccaattgcatcaaaaaccctgttcaatcttttcttgccccaaccaccgaaggctgaggacaaggcatcatcttcggctctagtatatgtcccaagcaacttgtcgctagtagcctcaacacatttcaaccagtcatcatttggttcgtcgaacttctctctgtatctgaaggtatatttcaatcgaaccaattcgccttcactggatccagcaacagtctccttcgacatctcccagctatccacaagtggccacactctgtaggctatgtgctcttggattatgtctcttgtgccaatgaaagcatagacattgctgaaagccttttgacacgcttcgacatcattttcaatcgccaccctcggcctctgaaggtcaaagcgagaccagatgggacgttagataatctccttaatgtcctccctctcaat

SEQ ID NO: 15394 - DNA, 633 bp, Zea Mays
gcatcctgatccgctttggtctgccgcgggcggcgttggccccgttcaagatccgcaatctctgccttcattgccgcgtctccctgcgactgattcgtccgacagtgaggcagtctgctcgccgggctaccaattccctttcaagtcggagggggtcttgagttctggctgtgtgttgtcccatcgccgtgctagaggtgtccctgccgcgccgtgtgtgagcagtcagctaccccctgcagctccaaatgtcaacgtggggggatggtcggttgtccggccgcggcattggtggcgcaagatcttgcaggatcctgatggcgcttcacggaacctccaatcggacaagacaggcactagtcatttcaaattgaagctcaagggtaaatgctacaactgcttctcatcagcgcatctcgcgttcagctgttcggccccttcgcgttgttggctctgtctgaaatctgggcaccgggcgagatcttgcagccaaaaaggctaccagggaccattcaatgctgcgctcttcaacactggaccaaccaagcattcatcaaagagtaccaactaccaggagttactgccaaagtccaacttcctccataagtaccaggccctttcccaggaatcctc

SEQ ID NO: 15395 - DNA, 700 bp, Zea Mays
gcgggagcggtgaagggtagacgtgaggcttggactgagggactagatcgtcgggtgaccagccgtagtggctgacacttgggacatcgacaagtgcgaggacacgtggagtgaccatgtcaaccgggtcaagacggcggatttgcaagtcgagcgggcagctcaaaagacatggcgcctaggcggtcgagaacgacggtgacacatgtcaacaaacggtggacgcgtacgcggtacgttactcatggcccagtttggtggtttggtcctcaaaaccattagtggcgggtttgggcctcaaaacccgaacgaaggttctgatgctggaaggacgacacatggcggtatcggggagttcgcttcgaggcgaagctaccggtgagaaggcgtggtggccgtcggatcatatttatctcgagtcgggccatattgccctcgctgatgtggtatggctcaattagaaactagggatagtttagggatatgtaatttggacgataaatagagggcatcaccctcccttctccctatctctctcattttcgcagttcttcatttaggtttttcatctccagctgctttgctttgtgagagatccactgcaactttgtactgttcatccgtgtgggaagtgcacccccttaggtgctgagtcctctaggctttttggattgaatcatggtgttcttgtgattgtgtt

SEQ ID NO: 15396 - DNA, 751 bp, Zea Mays
ggcggagatccgagcaccggcgagtctagactggccggaccacgcaaagaccggcgctctccgtcgactggcaccaaattcaagccttaaccaaagtttcccctaaactaatttcactaatggcacactaaaacaccctgaccacggtgaccgtatggacaatggccaacagaacgcgttccctgcgatctatggtagctcagctcaattgaacgggtcggtgagtatcaagagcaagcaagggtgttgaaacaagaaagcagagggcgagatcagacctgaattgggctggccacggcgaggacacaaggcacggtattcttggttggtttggggaaaatcccaaattggagctctctggtggaggatctgaggtacgggtgggtacgctagatgcctgaatacataacgaagccgatggtgcacttaatttataggctctaggggcggtggctctcaatttaatcacggcgtgctggcgggctgcgatagggaagaacacgggtggctgtgaccgtggcgttcaccggtgcaacgaggataatactcctaagggtgccacgattactaccgcacagtaacaagctacagcgtggcgcaaccggggtcaccggagcttccacggcgacgctggcggtccggccacgtcgcgacgggtacaggcagggtgataaacttcaatccgcgatcaaatcctttgccccatgagatcttttaccttcccatggatatcctctgcgtgccaagcacg

SEQ ID NO: 15397 - DNA, 788 bp, Zea Mays
gccatggcggggacctgggcttcaggcggatcccatcttggaagttgggcttccagggctacaatcctggcatgggcatcctccagctccaagtgcaccctagagagatccagggtggcactgtccaggtcggtgttgagaccggccactacactagctagggtgttgaggcgatcctcaccagcttcacctaggacgatgctggtctagcttcctccactcagacgcagaggaagatgtctgaacctcgtgtcatgcagctgctaccagtaggtgtggctgagagaccacagggtccgtctggaagcatcactgaccgaagtagtgtaggtggatagcgatgtcagggactcatgagctgacagagtcatgaatcccctatcctctatcccctgcatccatcaccctaacgtggatgcgagtgatgtagtagcaagcccggggaggctcactcactcgccttgtttcgtacagggggcggacgtaggttcctaatgcgtgcagcacatcttgcaacaggttggggaagtgccccgtctcgaacattgatgtgtaatgtttggtgacatgaccaaaccccatgaagtagtcctgctgggcatagttggcctcctcattgacttgttcctcttcgtcctcctcgtcgtcgtcatcctcatcatagtcatccctagagtcgtctgggtcatcgcctccgggtgcaggagcttgaacagctggtgcaggcggtgccgaggttgatgacctagatgcgaaggctagtgtctctgccaacggggtgggcgtcg

SEQ ID NO: 15398 - DNA, 558 bp, Zea Mays
ggagatgcaccaagagcgggaggagatacgtcgagagctgcgccaagaacgataagagatacgccaggaaaggagggcgcagcagcaacaacaacaacaacaacagcaacatcaacaagcatcactgccaccaccaccaccagttccaccccgagataagcaccgggagttcatgagccataagccaccgacatttgctagttctcctgatccactggacgcagatgattgactgaagtacgtagagaagatgttgaacattgctcagtgtactgaccgggagaaggttttatatgcttctggacgtctgataggtcctactgccgattggtgggattcatacactactgcccacaatgctgctaacactatcacatgggtggagttcacacgcagtttaggaatcatcatataccagctagatttatgaagattaagaagaaagaatttctgtcgctgaagcagggaagcatgtcagtcagcgagtaccgcgacaagttcattcagctatccagatatgcacctgatgaagttgctgaagatgagaggaaacatgag

SEQ ID NO: 15399 - DNA, 471 bp, Zea Mays
ctaaaacaaacaaccttatttaaggaatcgtcctatcctatctcgttatgtcattacaaccaaacgcaccctaagagaacatgcacaatacatgtaacagagttaattttctagtgttggagctggattacaaatcaaacgcatcaaaatattataaatttctcgagtagagctgctgcatgatatagttggttgagcaaaattagaattagtagagtagatcagtcccaaacacccacttaacatcgcgcggtctcattgcggagtttctaaagcaaaattgggcctcgctctattgttttatttcaaaagttcagtatgccattttctcctgttttaaattataactagcataatgaccgtgcggtgtaacgacgtataaattcaataaaatgtaaatgtacaacaattgcataaaaatgaacaacacatatcattatagatctcaatatttcacactgtcccgacacg

SEQ ID NO: 15400 - DNA, 350 bp, Zea Mays
cgagaagcagatcgttcttggtctccgcaaaggttggaaaaggcttcatgcgggtaagaatgggcgtcacacgatcgaagcgagggctcaaaccgcggaggaggttgagcacgaggcactcgtcggtgatgggggccccgagggtgcggagagtgtcctccatcgtcttcatctgacggcagtactcgtccacagagagatcgccctgagcaagctgacggaaggggatctcgaggtacaggatccgagtctggcggtggccgaggaactgagcctcaagggcaccctagatccggtgagcggtatcgtccggcacgcgaacgatgtcctgaagtttagccgtgagggtg

SEQ ID NO: 15401 - DNA, 350 bp, Zea Mays
aatctaagcagtaagatccgaatcggacagttgggattagatctggtttaattggagtcgggtcatacgattacaaatgagcggttaggatgggcgccagggactttgcattctccggtcaggcaggggtggcatactccacagacacgacggcagaccgaggctcctagggcgctaggggttggtttggatagctagaggggttggggatgacctagcaagcgttatggcggggtcagggttgcatgaacggggctgaggcgaccagatggtggaaggggagtcctcggtggacaagggaacacttcggcgagcaatcatgcgtggctaagtgcatgataggggaaagt

SEQ ID NO: 15402 - DNA, 485 bp, Zea Mays
cacgatgtctgccaccccatcccactgcccatccatccccatccacctcatcaagtttccactatcactatcattgttgtccaaatctttagcgctcagtgttcctacaattcctagtcccagcaccaccaatggaccttagtacaaccaccgagttaggccttccttgatttagcaaacttgatttcacctcctatgatggactcaaggattctttgaactggctcacccaatgtgagcaactcttttgagggcaacacatgcttccatctgatcatgtctgtctcgtatcgtactatgtatggggtgtcgctcagacatggtactgtgcccttgaacaggatgagggcatgccttcctaagaacgcttcatggagctttcatcctgtgttttagtttggccattcgtacaatctgtctatccaaattggcatggctccctttcacctccatagcacaagatctctatgattgttttagtgccc

SEQ ID NO: 15403 - DNA, 532 bp, Zea Mays
aattagcaggggcttttgcgctttaaagcgcgaaatcatatatagattttttttgctttgagtttttaaattcgcgaggaaagagggaaacagctttgtccgggttgctttggtagggcgactctgggctgtccatttctgaaatgtactacacctgacctgagcctagtgtaggtgtgtgccttcgcccagttcagatcgtgattcgtgtgagcttgtttattcccatactactactactgcagggtgcagggccatgagccatgagccatgaccagcgttgtccgggtgagcagggcagattcaggcattcatgattcgagatttaattacaataatactgaggtgagggcgctctgaatggcactgaatacctaccataggaatggaattctttataaactaccatgatggcgtgaagagtgaagaccgaacttattcaaccgccaaagccgggtcaagatcagttttcacctttcactggccctttctttgaaggcctggatattccccttctatcctattgcatgat

SEQ ID NO: 15404 - DNA, 308 bp, Zea Mays
aaaatatttggcggatgtcaggttcggagcgataagagaccaggaaggaggacagtacgtacctgaacctctttgttgggcgctagcggctcccaatggctgtcgcagtcgctttcgttgatggccacgatgtagaactgcgaacgagcgagaaaagggtagatccttctctcccaactcgtcgattcccctcccctcacctcgacttcgtaaaacagaacaacgataacacccgggtgtggcgtccgagaggccacgacaagagcaggcgacccgtcgcgtcaaggctggtgcagcggtaggtgcca

SEQ ID NO: 15405 - DNA, 528 bp, Zea Mays
aatacccgaaggggtatacacccgactgatccggagcgttcgtggctgatccaacggccgatcacaacaacacatcacaaccccccatcaaggatccaatggccactagttttcttcccctccaaccccgagcagaggcaccgccaccaggcaacaccggcgagccacccatcctgcccatccggttaaacaaatttgaacccaggcacaacctacgcagagagaagattacggcaagcctggcggatgcttttcttaccgaacactgtggtgacaaagacgctgcccacgcttcacacatggtgatcattccaacacatataccaattgaaaaacgacaatgtcatacatacaaaaaccaatatctaagcgcaccatgatcacaaagaaattttcttgggtacaccaaatgaaaggaaacaacatattaaagcataaagcacctaagccaagatattactaattgaaaggcaagagcacaactatgatcacaattaatggaacttcaagatattcaatgaatttgca

SEQ ID NO: 15406 - DNA, 322 bp, Zea Mays
ggtcaagtgagtagaggtaagaaactaaccaccgaatcactgctgatctgatgtgccaccatgggtgcacatgttgtgtgattgcacatgggcaggcttgtgggcagcgtgtgtcactaccttgcagttgttgctgtgggtcttgaggtggatccgttgctgtgtgactgtgtagttcttagagggtagacatcagaaggaaaagtagtgggatgtagagttagaggagaggaaagggactcacctcactgtcgctagtcaccaggggtcactactgcagtactgctggagttgggatgacagggaggcggtgcagctgtgc

SEQ ID NO: 15407 - DNA, 1130 bp, Zea Mays
aaaaaaatgaagaaaggaagaaaacgacctagctatccttagattttctccccctttttggcagcaagtactaaaagagagagagagagagcacaatattcaacaacctctcaaaggaggaggacaggaaggagggtaggaaggatactccatgaagaaagtacacatcatttcttccttgaatgatgattctcgagggggctcatcaccagagggaaaacttgatgaggatgaaggatcctaataaagaggggaggaggatggtgatggtaaccagatccagaaggcctcgagtcaccaggaatgggtcctggacccgaatagggaggaggaggaaagtgactggagtcgggcggcctggggtcaccgggaatgggtccctaacccgggtaggaaggaggaggagctgaagtatagaaggagttatcaaactcctcgatctcatcctcaggggtaacaaatgacacaccatactcctgttagtgccactcgttgaggttttcgtggtaggtgggggtcggaggcggaggagagcctggaggcatgggatgacccgtggaggcgatgtaacgatgaaagtcctcatgcagcgccacagtctggcacctatgcatagactcctcgatcgctcggctgtggcacatggcgatgacgccagcgatgcccttagctagacgcacaaatagtccccggccttgaccccgtcctcggccctgacctctacctctcctgctatggtccatcggacacaaagcggcgacgacgcgagaggaggatcatgaagaggaggcggctcattagaagaaggagggcctccagaccctgcgggagcccgcttagtacgtgcggctgggttgttggagtctacccagtacgacacgtagcgggagtgtttgaccggcttctctaagtgagtctgggtgaccacttcgatcatcttcatgataaagggtgcatgtagacaccctttgagtggagaccaggaagcacgaaggatctcttcccagatcatgtcaaacgcgttgatgcgggcaaggctgttgggagcaaggagaagaaggagaatctgactctccccaaggacgttcatttgattcccgccctttggaagaacggtcatcctaaacaaa

SEQ ID NO: 15408 - DNA, 774 bp, Zea Mays
cagtggagtttatccaggagataatgttcaggttcggaataccaaatatcatcatcacggacctaggatccaacttcaccagctcagagttcttcaatttatgtgaacaaaggagtatccagatcaagtacacatcagtggcacacccaagagctaatgggtaggtagaaagagccaacagaatgatactggatgcactcagaaaaagatattcaacaagagcgagaagcttgtggggaagtggattagggaactgccatacatggtcttgagcctacgaacccagcctagccgagctctgcatggaaacaccccatttttcatggtgtatgggtcagaggcggtgttgaaagcatagctgaggtagaagcaaccaggctagaggacattgatgtgctgggggaggaacaactaaacatggtaatccagtcggccaggtaccagcagcctttaaggtgctaccacgacaaagttgtgcgacaccaatcctttgtagtgggagacttggtcctccgccgagtactaatgggggagggacgacacaagctatcaccacaatgggaagggtcgttcgttgtagcagaggtcacacggccgggatcctaccgggtcactcagatggacggcaccgaggtggggaactcatggaatatcagcaccttaggaagttctacccttactgatacctcaaaagtctcgagggaagttgtactctataaccagaaggtttcatcatcaataaagctttcatcttccaaaggcattcaaactctt

SEQ ID NO: 15409 - DNA, 578 bp, Zea Mays
gcccaatcttgctagtccatcctataggatgactcaacaggaaacctatcaggtggcccatgacatgttttagtgcccatggggacatgggggatatctgtccccccacacggatcgtttggcctcaggcccggactattcgaccatgcgtaggggcatgggttattcccaaataggtggcggaggatgtggctggccgttataggtgttcatcagcatcccataaagtggctgggattgggcatgtccatttgcagtcgatgggtcttgtgggtcttctttagtttgggcatcatgtgatggaaaactagtaatagaaggtttatcaaatgcacgtgctagcctccaataatcctcttgtacaccccctaagatttgttgcataaattccccatcgtttctctacgtaagatcgaagagcttggatgtcgtcgtgtactcgtgtttacttatagggggtccgattgtagcaggacgaagactcgttaggttctattccctctatcggacaagctccttgttccgatcaaccttgaaatcagctaagaacaactcatcgagttcaacctacatccttt

SEQ ID NO: 15410 - DNA, 1038 bp, Zea Mays
gaccaattgatccttgctactgttctaccagcttgtggtcatataaggcatttgagaatcgggaaagccattcactcgtacatgttggtgtcggacatgattatcggcgctcacattagtagtgctctcatcagtttgtatgctagttgtgcgaacatggagatggcagaaaagctatataacgaaatgccaaggaaggacttggtctcatcaactgccatggtttctgggtacgccaggaatagaaaagtcgagattgctcgctctatatttgatgggatgccagagaaggatgttgtatcttggagtgccatgatatcaggatatgttgatagtaaccagcctaacgaagcactgagtctgttcaatggtatgcaagagtgtggtatcaggtctgatgaaattaccatgttaagtgtcatatctgcatgtgctaatttaggttccctcgataaagccaagtggatccatgccttcattaagaacagtgggttgaataaggtactgcacatttgcaatgctcttattgatatgttcgccaaatgtgggggtattaaccttgcattgaatgtcttcaatgaaatgcctctaaagaatgttatcacctggacaagtatgattagtgcctttgctatgcacggtgatgggaaatcttccttacgtctgtttgagcagatgaaagatgaaggcgctgaacccaatgaagtgacatttcttagtttactttatgcttgctgtcatgctggtctagttcatgaaggccgtttattgtttagctcgatggttcagcaatacgggattgaacccaagcatgagcactatggttgtatggtggatcttctaggaagggctaaacttatgcaagaagcagttagtctcatagagtcaatgcatttagagcccaatgtgcctatctggggatctcttttagcagcatgctggatgcatggtgatctcaagctcggcgcttttgctgccaagaaaattttgcagttggatcctaatcatgatggagcatctgtgcttttattgaagata

SEQ ID NO: 15411 - DNA, 1000 bp, Zea Mays
cctcattccaaaagggggtaattagatgaacattcttggagagagcaaggtcttgctctctttcatgaaacccagcagctcagaaaggataaatgtctttggtatggtttggcaggaaatcattcatgccgcctgctttcccttgaaggggtgtcttcatgctccgtttatcatgaagatgattgaggttgtgacccagtttaaatttgacaaaggtacaagacatcagtcatatacccctttctggattgatcccaacaatccagcagggcgcctcaggaaagcccccttaagctctcgcgctcatacatctgagggtccgtctgctggtcctgctgctgctgctaccggtgcctcgcgtccctcccctggccgcggatctcccacgccatgtggtcgtggtcgtggtcgaggtcgtggccgagggatgggtgcccgcttggcccacgggtttgcggcatttttctccatgtgccggaacattgctgcggatgtccatgaggtggctcgacgtcagagactgacgacaacctacgtcgtcaagcttcctctttgggtactccattcgccccccgctcgcctgacgtacctctccatcctcctcctccggagatcaacgagtggtaccagcaggcatacggggtgcctttcatgccagcagacgacatcgacgaagaagaagaagcttattttgatgatcgggagcagtttgtcccgcctccgtatcacggggatccgggccaatcgtcctcttaccctccgccccaggatccttctggcagtgctcctcccccggaccagtctggggaggaacactttgcctctcacctggcgcaccacctctttgctcctcatcatcctcctcccaactggtgatcattggattggcgtctctctctctctttttggttcttgttgccaaaaagggggagaaggtttattatggcagtaccctttatgcagtaccctttatttttgtaatgaacaatcggtctgtaat

SEQ ID NO: 15412 - DNA, 1137 bp, Zea Mays
acagtattgggctgattttggcccgaaccggcccaaccacacaggaaaccagggcgcgctcacgcccgcgctggtggctttacagaaaggcccccaatggtttatggaatgtgctaagaatcctcggccactattcaacgtctcgctgacagcttacacaaaggtccctggacttccttttcttctccaaataagtccccgaccacggcgcgtttgccgttcatcaccgacgtcgcacgaactggccctggccagcggcgaacgctcagtcgagcgacagggggagaataacctacccaaggcgacctaggaacgagctttattgtggcttgaacacttagaggacgtcctgcccatgtgcacggcggaaaccgtgatgttgatcccgtgttcctaatcacctacacccgaattggtcaaacggatgctatggtgagctttacgtgcctacatagctgctagaacaacacttgagaggggcagagctttactagagtggtctggccacggacgagccgttctcggcggcgcgacggaccgaattgggggaaaacggcgtcgcggcggctctgggtgaaattgggagctaggatcggggctatagggccgtaagaggctgtgttttcattacgcgcaatcaatttgggcgaagatggagagggtagtgcgaatttgacttcgactgagcttcactggtggagatgaaagcacctcgccgtggctccttgctcaatttataggcacgacggtccggtgattgatccgcggccatgaggtgcgctattaacgcatggcaaccacgtaagggagaggcacagtgaggtgaatcaaagcatgtgcgacagcgtggcggacaatgctgagtcacggcgaccgccggtgaggtaactccggccacatgcggctgggttcgcgaagtcgtgccacgtacgagttaccctttccccggcgttatccatccaatactgcgcacgaatcgggacggcgatcaacgtcggcgagctgagctggcgttctgatctgctcagttactgtaccatggcaattgttcttcagttgccagaaccgaccatcttctcccatcttgatctccggattcttattagaaacagagcaatatcctttactaagatttgt

SEQ ID NO: 15413 - DNA, 786 bp, Zea Mays
gacgaccgagatcacctactccacccggacgacgaaacgcggcggcggaaaagaacggcgcggcggcgccatgactggtgagctcctactttgcactctagcgcctaaaacttcgaacccaacggtgctgcgcgtagcggatagggaaccaaggaggatgggggtagttttacctcgaattggggcggtgacttctttgcccacgcggtggtgctgttttccgtcgtcggtgatacgccgatgagcaattcctcacgcacggactcttgatttgccccgccgagaccacagaaggattcaccgcgaacccgcaatgctccacggcccgacaacttgcccagatcggcgaaggggaaggctagccgcagcacgcgacggaagtctgcgggtctatgacgacggtgagcaattcgttgctcggtgatcccaatcaacgcaccaactgtggcgggaaacgcgtgacgaacaccagggatcacacccctactacgaattggggcttgggagttgtaattctcgaagtcaaccacggcgaccggtcaccattgccctcaatgcccgcgacgaagggccagagggtggggtggttggcggcacacgcgaaattgaggaggagagagaagagaggagattcttatagtgcctagggacgaggccgaggtgaggatttcggtcaatggctccgaggttcgcggcaagctccgccacggccgggattccgttgagggcgaatacaccgagcggatgggcagctgacctacgcggctgacaggtgggtccctgatg

SEQ ID NO: 15414 - DNA, 484 bp, Zea Mays
tagtcttgatcaagatgtcatcaacgtatatctctatcctgttcctaatcaggtcaccaaaggtcttactcatcgcccgtacaaatgtcggcaaggcatttttcagactgtaaggcattacaacataacagtaaagcccatccacagttacaaaagcggtatgcttcctatcttgcctagacatctggatctgatggaaaccagagtaagcatctaggaagaagaggaggtcgcacccagaggtagaatccacgatttgatctattcgtggaagtggatatgggtccttgggacaggccttattgaggttggtgtagtcgatgcacatctgaagcttcccgttagccttgggaacgatgactggattggccagccatactgggtgatggacctcttcgatgaagccagcgcgcagcagcttccggaactcctcacggatgaaatcctgtcgctcaatggactgtcttcgaggcttttgactcat

SEQ ID NO: 15415 - DNA, 891 bp, Zea Mays
ctcgtgttcccggcgatgggtggtggtccagttcaattgaaggggttgtagagcttgaggagggtctagggacactagaacaagcaacagagagactggaactaacctgagttgggctggccgcggttgagctgttcttcgcagtggcggagaccagtttgggggaaacaagaaattctcgagctctggcgaacgatcgtggctaattagcggtggctggatacttcactgccttacggagctcgcggcggggtcaatttatacgcttagtgagcggtggccgtgaattcgggcgagacgcgcggcggtcagcgaaaggggaagttcactggcgcagtgaattcgtgtcagatgtcgtggcaattactccggcgatcaacggggagcgagaggaagtcacggcgatgcggtggaagtgcatggacacgcggtgcaaggctgggaagcagtgatcaccggcgttcttatcggtttccatcgcggtgaacatggtacggcggccggaattgtttatcggccggagtttatccccggcgacgtacaccgggtgttatccactcaccccgagcacaaagtgggccggcggttgcacgaatcgtggcggcaatcggtcgccggcggtgaagcgactgcgctggcgtcctgatccacaacagcactgtaccatggtgaactccattcagatgaacctgacagcgaatgtttgaactcgattttctcccagattcatatggcaacacaaccagtgatctgcagcaatattgtagtgctataaaccagctacaattttgctatattgtgttcccacaaaaagtcaatggatcttgcttgaaactgagcttgaagttcatgccatatatttgtcagtctgaatttcagacttaatcagcc

SEQ ID NO: 15416 - DNA, 512 bp, Zea Mays
tagggttaaacggtccgaaccacacatggacggtccgagaatgaccagagacacccgcgacccctgaccatcaaaccacaacatccaaaaaaggtacgtggacgcaaaatacatctaaagcatctggttggctccttagtgttagtcctacttttgatcaacttctttctaaatacatacgtaagaaggttgttccgcacaatcggtcaacaaaaatatcaagatcgtccacaaaaaggaagcaatatgtgcaggggcaaaggccgactaaaccggcccaagaagtagtgcaaccaatgttgcctactcatcagtctctagggacgtcatgatactttccaccggtctactcatcgttgatgttttgcgttgctcacgtgtgggatagtgcggcaatgaatttgtattatgtgtatagtccatttgtttatttgggctggggcaccatagttttgtaccttttgacatataaccagatagtcatggtcgaagaagatacaatcctaaacaac

SEQ ID NO: 15417 - DNA, 386 bp, Zea Mays
gtgatccccgacggtggacggtgaaaggccgactccggcaagcttgtactggtcggaataggaaacggccagccctttcctctgcttgacacccaattcaacccctgacgaccatttcccctcacttaattgcaagactctaacgcctaatcactctgtccacggtgaccgcacaatctggggacaattcaaagtgttccagtcgatctactctggttcagtgcaaatggttgggccgatgagcttcaagagcacacaggaatgctagaacaagagcgaggagaacatgatcggacctgtggagcgctgaccgcgacgagctcacacacgcggtgttctggaccgatttggaggaaatctcaaattggggctctctggtggataat

SEQ ID NO: 15418 - DNA, 898 bp, Zea Mays
ccgatgctcagcttcggactaaaccaaatcgatgacctaaagagtatttcccctaacttaattgcactaatgaccaactaatgagctctggccacggtgaccgagagcatggtggacggatgaaggtgttcctggcgatctaaggctactccgtgcaaattgagggttcggtaagcatcacagagctgtgagagtgctcaaacgaggaagcagaggacaggggctgacctgtggagggctgaccacggtgaacttagtttcacggtgttcttcgactgatttgggggaaatcttaaattcgagctcactggtggacgattgctagtgattctcgatggctgggtgggtgatgaccttgcggagctggtgggggcttcaatttatagggagagcgagcggtggccgggaattttaagaaggacgcactggcgcacgtgaatccgtggctaacgtcgtggcaacctcaccggcgatgatgggacggcggtagggagtcacggtgacgtggtagatggacagagacacacggcgggctacggcgaaggtttgacgatggtgagaaccttatccacgggcggtgagcaaaggggaagggattacggctggccggagtggcttctaggtcaccggcggcgaggatccccttaccccacgatgctatcaatccgccccgagcgtgaatcttgacgccggcgacacgaatcacggtggggagtcaccggcggtgggatttttctggcgctggcgatcagatccacaatagtcactgtaccatggcgatggtcattctgatgaactgacagagcaagtttaggtcacattttctcttaatttcaaatggcaactcatccagtgacctgcagtaatgttgtagtggtacaatccagctataacattg

SEQ ID NO: 15419 - DNA, 722 bp, Zea Mays
aaatcgctctaaatatttatattatattgagcttttgaactcacgctgagcgattaaattgtatagtgggtactcggacacgccgatcaggctgcgttattaaccggctgagttatggcatcagctatgcattggttgcgccctggcaacacgacgcagtatttgtgtcgtacgaacttggctacgtcatgtgattgctatgtagcactctcgtttattcggacagctcccgttgagtcgacccgccatcactgagtcgcgtatttttcgcatgccctgtaggcactgtctgtctgccgtgatcattgagccacaattgcgcctattgcgcacgttgcgtggatttatcgtgtaccccaattaccgagccataattgtgcctgttgcgcttattacgaaggcttgctatactgtcgtagccctgatggccgcacacgcgttgacaccagatacgctagagcttgtactcgcgtggattgtggtgggttgttcaaggtcctaaagtcacattatgtgcaaccttcgtaaacaattttgttttcactttatattttgtttgattgtgttgtgtggcatcatatatttatttatatcgccaagtggccataacaactatattaaatctggaaaattaaatcaaaatacaatgaaacacagataagttaaatctctgctctctcctcgtgcataaagttttacccgaagtaacctgaagaaattca

SEQ ID NO: 15420 - DNA, 544 bp, Zea Mays
tactctataattataagtcgagtctatacgcgttaggcgttccttaagttgtgcttcgcaaataagtgtatgattgtgtttatgacttgaatagatgtcttcgagtgaactgataggttcctaaggcaaatatgtgtaaggtgtttatagtaacactttattccgaaaggtgttaagcctgcacaaaaataagagataagtgtacttgttttatgcatgtgatcgatgattgggatagtcgaggcgaatgaggagtatgattaatccggttagagtcactatgttgttgatgccttgtgcgtaacctggggcacgtatgtgcgtgtgtgccgtggtgtattatagtggtggtggcataagatatttgattgagatgtgcgggtatatgccgtgatatggttatactcgcgacgaggaaggatgtatgccttgggtaacgcgacgcttaggtcgttgttgtataatcggataaaggttgtattattgagcttgaatcaaaatatgggaactagtggtacgctaggcagacggtgttccaaataaa

SEQ ID NO: 15421 - DNA, 467 bp, Zea Mays
cttaatagtacggctatctagcctactaatccggtcaaatatcttctctaaactcctggagaccagcaaaaacaaaacctatgttatacctttgccttcacttgatccacaaccaatgcttataaatctccaagattttctgttctatgtggtccaaccctgcattcttatttctccaagaaccgttagtccacaaacagttatcattaattaccaaaacatcactaagggcctagatgattcacaatctccccctttttggtaattgatgacaacactacacattatatccaagagaagttttgtttttcaaatctcccttataccttaggtataagaaggattttagagatgagtttcaaaagacttatcttgatttgaagttctgtccgagagatagataaatctcaataatactcagaatctaggaataactccccctatgtgtgtgcatgatatttctagtt

SEQ ID NO: 15422 - DNA, 1021 bp, Zea Mays
gttctatcggtttggtagaaattctgatacattcgtcgtagattcgtcgtacatctctggagagcaagcgaagctggacgtaggcgcacccgctttgctggctactgaagaatcccatcatcccatggcgagatgatcaggtttttccttcagatattctcgatggccaggtaagaaatcttggttatcgatctctatctaccttctcttctacatcgtttctgtccatctttctctctcgccactaccttctttccatcgttctgatgcgagattttgattatgaaagggaggctcaggattcgccgtctcacgatggcgaaacagtctctttcatctggtccgttgggtggttacccagaggatccagagttggaacgttttctagatttggagcgattgcatcggatgaacgaatgcttagtcgcatcaactagtaaaacgggtccagttgttcatggagtagagaagtttcatggaggccgtttctgggctcttgcaaacaactccaattcagactcagatgtggaacaaaccagtgctctaccaaagacacgacaattgcatcagttggcaccaccggtatcatcagtggttccacattatttcccagccggatctgtcctatctccagtattgtcaacagcttccggggataggtctgttagatctttttcctcgccaatgttggagtctgcgcagaaacgaaaagatcggcggccttggaagggacgcattccagcgcctcgagtgtcgccgtgtttaacattgggagatgcaatcagcagggccaaaatcatacagaaaaaagcaaactcttggccacgatctgggattactaagatgcattcttctttggaccagcgacagccatcaaccgtaattaggaaagaatttcaaaattcttctaatgggcgtattctcaggcgtaatgctgggtgcgttgatggtccagtgtcctctgtttcacgtacaatgaaattgggccctcgtatgccgtataggcccacagctggccttg

SEQ ID NO: 15423 - DNA, 358 bp, Zea Mays
tgggaactcactgggtatccaaatggttgtggctggacctgcatagcagctggtaccccatttgctgacctctgagtagaagcatcgtccatcctcctaccaagccccttcctgaactgctcttcctcccatttcctctctccttcgtcggcatcatcatcatctctatcatcctcaaccttcctgctgccatcactgaaagcccccaaactggtggcaggaccctgttacttatcccattgaatacaccttttgtgctcctcgggccatcacctggcttgtcagtgtacattgcaatctgatctgttatctcattgtcatcctcatcactcgactcaccagcagcattccggctgct

SEQ ID NO: 15424 - DNA, 345 bp, Zea Mays
ctctgacccctcctctcaaattgagtctgcacagtgaagctatagcttcttacggtcgagtagcctcaatccccaaccccaatttcaaccagagccgccgcaacaccaattctcccctttctctgtcaccggcaagtctaagtcttccgcgctccgtggccagccctctctggtaaggccctgtccgattcaagcattgttttagcagctctatgtgtccatgaagctcctcgtagtaaccgtttgaccaatccgagcgtaaataattgggaacacgggatcgacaccacggtttccgccatgcacgcgtgcagaccgttttccaagtgtccaagccaaagtgaa

SEQ ID NO: 15425 - DNA, 408 bp, Zea Mays
aagccagctcctgctcatcgcctgacgcaaacaactcgggttgcggcccataggagcgggggcggagcagcgcggtgtccacccatgcctgcaggtcctcgtcggtaatggaggagatgggccgtgggtcgtggggaggaaggacacttagcttctcgaacatcactgttgatgaagaagatgagaagagaccgcaagagctttttacggctaaggtagaaagcggctagggtagggaagcgagagcagaaggtaaagaaccaaagaacccatctcaggcaaatttatagggcggacagagtcaccaagacatgggccgatccaccctgagtcaaagccgggaatgggctaggtcgcttcgaattccccgtgcacgcgcgctgcaatggtcggcctacaggccgacgc

SEQ ID NO: 15426 - DNA, 642 bp, Zea Mays
gttggtttggccaacacccaactccgctcaagccggaaggcggagtacttcaaggttccgctcccctcttcggtgcggtatgagatcgagtggttttacggtaggaatgtggatggcagtgctccgctgttcaccgaatgggatctagtgttgacagagtagtggcattatggtgcagaggagtgcttcaagaattaagtggcgattcttctagaggcagtcaaaacgttgaagcaataaggcctcttcggtgcggctagtgcgcaccttcatgcactgccggattcagcccctaatggcccgctagaagtcgatgcacctatactgtggtgttaacgaccctgaccgccattccccgatccacatgtgttgtccgagatcaagactcgggtcaaggccgtcacgacgttgtcgtcggagtccttcatggacaaagattctcccagtcctttgtcaaaagatgttgtgagcaatttagtgagttctttctccctcgcctcctcccgctgccttggttttttttttcgtcggtagcaatcgatcaggttttcgcaagggattggacctatagcagcttgccttctgccccatcctaaggacgccaccatcaagcagagcgaaagcggaagaggcaggcggagg

SEQ ID NO: 15427 - DNA, 755 bp, Zea Mays
accttcaatatacgataaactagaaacacttagcatagccagaccatctgacactaatgcggactgtccggtgccacaccaagctcactacatgatatgatgtagagcatgaccggatagtccgggcataaccatgaaccattcggcaccttatggcaaaccatacggtgtcacattagattgttcggccacccaggtagaaccgtctgggtacacatatctagaacaagttgatgtgcataacaccccgttttgcacgcaccatagcaacaacactcctttccacctatggcacatcgaaaccgcagcatgccacttcgatgcatgggaccgaatatttatcggcccccacatagttagagaggttcaccccataccacataatagtgggggtggcacaagtataccatgagatcatgtaccaaataccgccctcaatcgtgttgggacagaaagctagcgtaacgacgtccaatcacctagcctcacatcaatagagccagtccattaccatcggctaccatggttaagatttgagaggaaatatctgaattgttcagagacagactcgggatcagtatattcggcctaggttcatcatatcgtaaaccatacgaccagtgatttgataccttaccataccctccggggagtaaggtatcagacttttccaaatttttaggcgaaagtggtaagagcactcatgagcacacataccaatacctagcatagttagaagaattagtcgattggct

SEQ ID NO: 15428 - DNA, 438 bp, Zea Mays
cgggtgcgttggatgcatatatacctagagctcactagggggtaatttatatgttccatcagcggtggcggctaattttgagaagacgcgcggtggccgggaaagagagtgagtcatcgtagcggtctgtcgtggcggtcactgggcaatgagctattgcagttactgggcagtcactatgagtcgcgacgacatggtaaatggcctaaggcgtggcgcaaccacggtgaatggtgtatattccggtgatggccgctcggccacgtcgctggcgcaagtggatgagcgacagagcgcaatagtgcctccaagttcgtccacggcaagatctttttaccccgcgaagttatccgtgtgttaccaggcatgaatcagaatgtcggcgcgaatccgagcgcgaggttgcctgtggcgaggtgcactgtatctgtgatctta

SEQ ID NO: 15429 - DNA, 710 bp, Zea Mays
atgaaatgaaggagggggggaataggggggttagggtttcaaacctgggttgggattttgggatgttacaaacttaccccacttaaaggaatctcgccctcgagattagactggatttgggaaaagataagggtattccctcctcaagaagtcctcactctcctaggtggcttcctcttctccttctctgctccactgaactttacagagctttacttctgaggtgcgggtctttctgactactgaatcaagaatcttcactggtttctcacgatattgaagatctttctgaatctgcactgtctcttcttcgaggtgactttctggtgcttgcaggcatttgcggagctgggatacgtggaacacattgtggatgtcggacatggattctggtagttctaggcggtatgttgcgggtcctaccttgccaataatgggatagggacctacaaaacgtggggctagcttccctttgacttggaacctcctgacaccacgcattggagaaaccttgaggtagacgaagtctccttcctcaaatcggagttccctccgcctgttgtctgcgtaactcttctgtcgactttgagcttcaagcaaccttctgcggatcagtgcaactttctcttctgcctctttgacaaaggcaggtccttctagtgccttttcccccacgttggaccacatgagaggggtctggcattttcgtc

SEQ ID NO: 15430 - DNA, 667 bp, Zea Mays
gtttttgagacttgtttgcgggatatagaagtcatccctcgagttacgtaagcgcgagtatgtcgcattgccttaagtcattgccaacttaagccgattgctccattagcaggtcatagtggtcaccccgagttatgtaagcgtgagcatgttgcaccgtcttaagtctttgccgacttaagccgattgctctgttagcagggcatagtggtcaccccgagttatgtaagcgtgagcatgttgcaccgtcttaagtctttgccgacttaagccgattgctccgttagcagggcatagtggtcaccccgagttatgtaagcgtgagcatgttgcaccgtcttaagtctttgccgacttaagccgattgctccgttagcagggcatagtggtcaccccgagttatgtaagcgtgagcatgttgcaccgtcttaagtctttgccgacttaagccgattgctccgttagcagggcatagtggtcaccccgagttatgtaagcgtgagcatgttgcaccgtcttaagtctttgccgacttaagccgattgctccgttaacagggcatagtggtcaccccgagttatgtaagcgttagcatgttgcaccgtcttaagtctttgccgacttaagccgattgctccgttagcagggcatagtggtcaccccgagt

SEQ ID NO: 15431 - DNA, 393 bp, Zea Mays
gaagagggaaattgctaagtatatatctaaatgcgacacctgccagagagtcaaggccagccatctgaaggtagcaggcactttgcaaccccttcccataccatcttggaaatgggaggacatttgcatggattttatcgtgggattgcccaatacctcccggcaccatgattctatttgggttattgtggatagattgaccaagaccgctcatttcctgccagtgcataccacccacaagacagagaaatatgcagaaatctatgttgatcagatagtgtgtttgcatggtattccaaagaccattgtatctgacagaggagcactgtttgtggcacgcttttgggagcagctacaagaatcacttgggacccatgcaataaggagctccgc

SEQ ID NO: 15432 - DNA, 285 bp, Zea Mays
agccggcagaagggcctcgactgtgctgaggaggcgtctgaagttgaggatctggtcggcgacgtgccccctggcgttgtagcggtcaagcgatgttcgaatgctcgagctagatacatggctttctgcaagtcctgaggctcacggagttctacgtctatcttgatatgttctggcagaccgcctacaaacaggtcgactttctgagtggcggagaggttaccagcatggcacaacacgacgttgaagcagttggcatagtcttggactgtagacgtgaatgga

SEQ ID NO: 15433 - DNA, 303 bp, Zea Mays
gacgatggctctaagctcggtgcaacgaggcagatcaatggatggtttgtgccatcgtggaatggtggtggccgggtgcagtggcggatctagaaattactaaatccctgaaccaaacttaatatgacaaaaggataacaaaatatagcattacgaaatttgagtgcactaaccaaaccaattcatactagctaaacaccacaattgagatgcatgtaggtttgcaattggatttacagcaaacaatgaggaacaatggcagcgattcccccagcatgattaggctatctccaaccattctcc

SEQ ID NO: 15434 - DNA, 429 bp, Zea Mays
gtatctctctcggccatgaccgtttgatcaatggatcaaaaagaatagaatgaaggtgccccccagtatggatagacaaagggactatacatgtaccatggattcatcatcgtaccattccatgtttgagcaggataatataccgacgatgggtaaacgagcggaaagtaccctgggctcataggatgaataggcgatgcttgttgtgtcgcctttcgggtcgttttgtttacccgtttcgttttagcaggtgactgaggtttcttctttgaccgatcacgtagaacggtcttctcgctagtattcttagagagcaactgatcaacagtagagtcagctttgaccagccgaccatttgtgctttgccgttgtgtctccttcccttttaaggttttgtgtggaggctgacgcctttgggcataggcgtac

SEQ ID NO: 15435 - DNA, 631 bp, Zea Mays
taaatttgtcaatggtgaccaacacgtgagtgtagcctccctgagctttcttgaacggtccaatcatgtccaatccccagcacgcaaatggccatgttacgggtatggtccgcagttgctgtgctggcaaatgatgctgctttgataaaaattcgcaagctttacatctctggactaactcggctgcattaatctttgtcatcggccagtagaaaccagacctaaagaccttcccaaccagagttctagatgttgcgtgtatcccgcattgtccggcgtgaacctcatctagcagttgcttcccagtaaccgaaggaatgcacttcatgaggactcctgttgcaccccttctgtacagtgtgtcccctatgagggtgtagtgggctgactgtcttgcgatgtgtttcgctgcggctttatcatctggttcctcttcactctttatatacctgatgataggctccctccagtcattagagtctgactctggctggctcaaaacattgcactcttctgcttgatctgaggaaatgctcgggcgtggcaccttctggacaaaaacaccagatgggacctgagttcgactggatcctagtttcgacaacgcatctgttgctgcgttgcgatcttg

SEQ ID NO: 15436 - DNA, 380 bp, Zea Mays
tggaggtgcattaccatcttggcaaagccaatgttgtggcagatgccttgagtagaaaggcccagtgcaattgtatgagcacggatgcaagaattaccaccttgtgtgatgagttgtgcaagttgaacctggaagtggtttcttcaggtgatttaaattatatctcggtagagcccacattacaagagcaaatagtcagtgcacagattgaagacaagggtgttcaggttatcaaggaaatgatcaagcagaaagcagaaaaatagaaatgcttccggcaggacagcagaggaatcttatggtttggagatcgactggttgttcccaaggaccctgagctcagaaagaagatattggatgaagctcacctttcaaaattc

SEQ ID NO: 15437 - DNA, 541 bp, Zea Mays
aatctaggtggaggtaatgagttccacaatcatttgtaggctcacttaatgggatcatattgggggcagattgagcatcatgcacagttggcacgacctcaacaccacgatcatagttttcatcttcaaggcgagaggcaactaacaaacgtcgtaccactacctccatgacttgcttttgtgtcttcatagctgatttaacataattatcccactctcactgacactcaattgggatgataagtctttgcacgctgggtagaggacctacgtttagcaccccatcaatgacgatgtcatcagcatcatgacaataaatcttctccttagccttagcaaccacctcattaaaggagggtctatcatcgaatatcacagccacacgttgcatgtcaacgaactcagcatttccataacgatcttattccacgatgcatccatggtatatgcccaaaaaattgtccatctatttgaaatacgaattcaacgttgaataaccaattgtgatggttagtgcataaccccatccactatgactaac

SEQ ID NO: 15438 - DNA, 640 bp, Zea Mays
acaatctaccatatgagaggaacttcttcaaagaatggtgatataatttaaagatacttgaagtgctttatttttctatgtgactacataagacacataagaaatgatattctaaaatacttgcacttaaaagcataaatgttaccatcctttggctttcctccatattgtagatcttgacttttcggcataggattaattctttatttcctacaacattaatatcttcccgagatgatatgagttttagacataataatttgaaataaccttgggtcaatcttggatatgtagatcattgtagattgatagcttgagttaatgaaaattgaattgactctctcaagcatcccaaagcttcataccatctccatctcctgcaaagcttgtcaagcatgttttggtacccatctcttgatgggtccattatggttagttaacaaggatctatgaacccaaatgtcctttgcactagcgtttggcaaattcattgcctttctagcacaagttgcaattttgggttgcctagttatatatgaatcaaatgacaagctatgagtggaggagttaccaatgggacaatcattgcattgatgtccctttttccggcatgtgtagcataggcgttttccaagttttg

SEQ ID NO: 15439 - DNA, 556 bp, Zea Mays
caagccttacttgggttgcaactgctccaactgcgctggccacagtgaggtgagacatctgcggctgtggtcatggacacatgaggacagcatacatagctttggaactgaccaactaagagactgaggagagggttagcatcaccatgagcacaagaatcaccacatcctcactgtggtcatcggttagagcttaaggcaggagagaaactctactagactatgccctttaagcagctgaactatgggatatgcccctgcacttgtcaaaaactcagtgtgcatgtactcccagggcgccagcagcacatggacacacctacgtggctgtcatgctcaagttcacagacacagcaaggaacacagaacttagtccccttctccagccaaaatatcacatgacatacaatacacaaatatcagcctggtccaacaagcagataagaacaccgagggcagactcaaatgaatctaaaaatgatatttactgcagggaaaactggatgtagtgtaacaaaattctagaatgagatcttaaaaataaggtatgaaccag

SEQ ID NO: 15440 - DNA, 419 bp, Zea Mays
gttcccactgtcctaacctttcatctaatcttgaccgcaagccatgagatcaacggcccaaacactctcccctaccttccgctatttaccaggtcacggcaacccatgaccgcacgcggaggtcacggcgacgcatgccggagcaccggattccaacccaccgtgccccactcccaggcctgaatagtacgacgcaaagcggaggcaacaaccattcaccagaggaggtactcaccgtgaatcaccccgcacaaagacctgcccacggcagaacgccggcaccaaggtctggtgcacgattgcttgagttccgcccagccgttcctcaaattggtggtggagaaagcttccccaagactcggcgatcaatcctatacccacactggacaccgaatggcccccagatagcgtgacgatgg

SEQ ID NO: 15441 - DNA, 482 bp, Zea Mays
caaagaaatcattcagcgccccatctggtcttgcttcggcctccgaaggccgaaggtggaaattgatggcactattgaagcatgtcagagggcttttagcactgtttgtgccttcattgacacaagggatttgattcaagaacatatatccttcagggtatggccacttgtggagagctgggatatgccgaaggagaccaccaccgattctagtgatggtggtctggttcgactgaagtataccttcagatttagggagaagtttgatgagccagacgatgactggctgaagtgtatcgaagctaccagtgatgagctacttggagcttactccaaggccgaagataatgctttgtccgcagctttcgggggtcggggcaagaaaagattgaacagggtatttgatgctattggcttagtataccctgattaccattacccgcttcgagggcaagagaaaaagagaaagactgtcacttcgg

SEQ ID NO: 15442 - DNA, 591 bp, Zea Mays
ggcatccttagatggtgtttatgtccactcaagtaaaacaccacacaaaaatagtgtgaatacaatgcccacaatatcatagaaacgtcatttgaggtataaaaggtgatctatcattttgaattctttatattccaactttttagccactgtatggtggaaaaaggtgtcttacaaccttaacctatgtttggacagttcactcacgaaatttggctaaattttccgtagtctttattttattttgagaaacgatgtggtatattgatgtgtggtgttttacttgagtggacataaacacaatctaaggatgccatgaatagacgggattatagttaacatattatcacaaaaggtcattagctagcccaataacgtcttcatccactagttgtactctaataccctctagtgtgaatacaatgcccacaatatcatagaaacgtcatttgaggtttaaaaggtgatctattgttttgaattctttatattccaactttttagcaactgtatggaggaaaaaagttgtcttacaaccttaacctatgtttggacagttccctcacgcaatttggctaaattttccatagt

SEQ ID NO: 15443 - DNA, 470 bp, Zea Mays
atttagactgtgacgataacgaaggcctttaatgtcatacccggatttaagggataaagccgggtgcatcagatggaggagatgacgatgacccttctcaccccttcagacaggtcaaaggcaagactgtctaccttgagcagcaagagggcagaaagaagaggcgtttggacagagccgctcgtgtagcgcttgcagcagcagcagcagatcaggtagagcagggaggctagttacatatttcctctaatcagatcgccttctgagtctgtcgcctcgggtctcggactcgctcctccattgctcgatccactccttccgacccagtctccactctacctcccacttcgccagctcctgccgctcttgagccgtccaccactcccactgtttccaccacctccaccattcctgcttccactgctcccgctcctgcttccgctccacctattcctccacctcgcttccgg

SEQ ID NO: 15444 - DNA, 450 bp, Zea Mays
gctagacatccctaggcccaaaggtattgagatatttggacgagctatcaagaatttcatcctttggcctcgatgggatgtccaattggttgagccaccaccagcatcatctcatgcccaacccctaactcaatagtcatcacatgcagatcctattgctaaaccatcctcacctcctaaatcttcaccttttgcccaatctattccttttcatctaccattgccacctcctcgccctctttctaacccaccatctactccaccagcatcaccattatgggctccaccaccttctccagaccctactcatcctctttgtgacccaatgtctccgccactagcatcaccatcaagggctccacctccacccccaaaagttcttaaacaaacaaaaaatctatatcaaaattggtttcctcattcgacacaaaaaagcctaaaactgctggc

SEQ ID NO: 15445 - DNA, 291 bp, Zea Mays
gacacgctatattattcagacgcaaaatcgactgcaccacttgaggagatggatgaccaaggcgtgcatgccattgagcacgactaggagacaaccgactaagaagagcttgcttcaaatctgcaacatccgatggctttagagagtagagacccccttcacatcgtccgtccaggagcattttccgggagattggatccttaatagaaaaatgccagggatggaattcaaagaaaactttattatcaaggcagaatttatgaacggaaagcagatgtttagcaatttcag

SEQ ID NO: 15446 - DNA, 506 bp, Zea Mays
gctctgagcaccaatcatccgaggtgaggtcccaatcatacacaacatggctcgacgatgcccccttgactcggtgccgaggccccagtaacttcatggactcgctctgcgcatgcgcaacggcgctctctcccttctctctgttaacgacgatggcaaggtggccacggccccccggcagatttggtttcgaaaggaccaaggaggggtgcgcgcgactcgcttatatgcatgcggggcgaggtcaggtgatgagcatgggtgaggattctcccaagtggagtctagtccggggggtgaagtttgttagcgtcgtggcagattcgtggggattctgatatgagggagatgcctcttgttggcatgacccaccatgcaatgacactatggcaagcgctggcgcgactgagtctgatgagcggggcccgcccgccggatacggcaagagcaagcaagcgtaggcgcacactcacacgcgcgcgatggctacgatgagctacggacgc

SEQ ID NO: 15447 - DNA, 643 bp, Zea Mays
tgcaaccttgtactgtagccacctccatcttcccctctccttcagtcccgtccgctgtccctcttttccacctttccctccctcccctgaaccttctcaatctcccctccccacgtggagtatatcacccatacgcagacgccacacgcgcaagcacatgaaccaccaccatcccggcggctcccacttgctcttgctccccttcctctcctcgctctgatcctcctccagtgcactgctccgttccggcgacctcgctgccggcccggcgctccccggggcaggcgggtaatgcttcgtctccgttgtgtgcctgtcagcctgtgtgacggttaccttaccttggtttcatctgtgcggaaaaaatcggagccttctaactgttcttcgccgggagcgacagcgaccggcgagtttgtggccgggaatgggaaggtttttgtttctgggaagttctgagtggatctttgctgcttttggcaggaaagggaacggctttatttgttggtcgcggcgtgtcggtttggcgcggtttgagagttcttttggttccttgtttttgttcttgtttctctggacgaaaccggcttaccggcaagccaagcttggcttagccttactggtacagacacctggagtttac

SEQ ID NO: 15448 - DNA, 367 bp, Zea Mays
gtgaattctagactccggaggaaacacggtagggctctggcacggtgacctgaattgtagaagggaggcgagccgatgggaaaggggcgcctgacatctagccatgggggcggcacttcagggctctgcagaggagcacctacgtgtgtccattatgggagccgagaggaggcaggaaaagcttcgtgaggaaggtacctagcggctgcaagaaaaattagaagagaagggggatggcgtctggacataaatatgtcccacgaccacgagtcctcgtcaggtctaggaggatggccacacagctttcttaggcgataatttaggaggcgggagatcgcaacaacatgaggaggaagaacctaaaaga

SEQ ID NO: 15449 - DNA, 297 bp, Zea Mays
tgttgttgttaatctactaccatacacactctcccgactggtaaatctataaatcccaaaataaccccatcataaaatgattaccttctaaagtattcgaccttatgtaattcttgtttcctactcatgctcattctaagataaggtggctgggatatgtaatgcatgtatagctggatttacacttctttgttttgtgcttggtttattaatcagtcacccacataccccagtcaatatgaatgcgatgtttcccaagttgagtggtgaaagcgcttattcactgatggcacttct

SEQ ID NO: 15450 - DNA, 874 bp, Zea Mays
ataaactaactagttgtgcttcataacatatggatgttggtttagactaagattattattttgtaaaacaagtcacttatatattggtatcatgagctaactaaaaacaaaatagtcttcttttccattgatgcggtgggcctgacctgttctagtgctaatgttttatacatatttgcttgcaacttgacatatatggagtggttaataatggaaaacgaagatggaatcatgtacagaggagatcgatcgaatcgatggtgggtatatatcacaccttgttgtgcgagtgatagtcgtagagtagcgtcggcgtcaccgcctaaggactgagccctagggctaagggtgccgacgtgtcatcgaaaaccatcatcgcaagccccaggcctagcaataaggtcgtgccacacggtggggactactacgaggaggaagatgacgatagcgacttcaggtcccaactgctattggaaaacaactatacaatgttctcgtcaccgacgctactctacgactatcactcgcacaacagggtgtgatatatacccaccattgattcgatcgatctcctttatacatgattttatctttgtcttccattattaatcactcaatatatgccaagttgaaagcaaatatgtatagaacattagatttaggactggtcaggcctgtcgcatcaacgaaaaagaagatcgttttgtttcttagttagcttatggcacaactatataggtgatttattttatagaataacaatcctagtttaagtcatcatgcgtatgttataagcattagaagttagtttattattattagaaaaaacatgtacactagttgtagatcatgtcactaccatatctgattctta

SEQ ID NO: 15451 - DNA, 702 bp, Zea Mays
aatgccatgcttttccacaaaactagtggcgatgaaagaatgggatgctccagaatcaaaaagtacagcagcgggggtaaattcgactaggaactcaccgagcactactccaggggcttgttgagcttcttgagcatcgacgtgattcactcgagccctatcgtgaaactgggtcttgcttagctggctgttggaggagggtgccttggaggcgggtgctgaaacattcttggggccattcaccgaattggagtaagtaggtacggatgtcttcaactgaggacaattattcttgtagtgactggggtctccacagtgccaacaagcattggctggaggttggctacttgcaacagatggggtgtggatagaactttgaccaggctggcgaaacgtgacggagcggacccttttggcttgctgaagctcggtcctttgggaggaaacccaaaagatcaaactctctggtgcctgtcctgctgcttagctccgagaacttgaaacttcctcttgaggcgacccttttcttcttctcgagctctttccacccggatggccttgtttgagaggtgcaagaaactgaggaaatcttggttggcgaggatggtattgagttctagtctcaggcccttcaagaaataggccatcttcttggcttccgtgctaacatcattaggcgcattgcgagccagctctgtgaat

SEQ ID NO: 15452 - DNA, 516 bp, Zea Mays
tcgcctccgcaagaagagaatttttatttcccatttggagaatgaggggaggacagtcgccagccatgaacaaatgcagggggttctggatgatttcttctccaatcttttgggttctaatatccagagatcgtattctcttaatctggttgcttgccacagagacgctattgacttgagttcccttgaggctcctttctcagagaaggaggttcgcgacactattggtgctctcccatctgataaggctcctggtcctgatgggttcactgaaaaattttacaaatgttgttggcatattattaagtcagatttgttggcagccataaattcactccatcagggaaatactcacaagttggggatgctgaattcagcttatttagctcttctccctaataaagttgatgccttatctgcaagagattttagaccaattagcttaattcatagttttgctaagttggtcaccaaaatgtttgctaatagattgggcccttacctacaggagttggt

SEQ ID NO: 15453 - DNA, 381 bp, Zea Mays
agatacatagagcctatccacttagtcgggggcaaaatgtaccaactcctaggattttgatcggatggtcacacgctctacaccaagttgcttcacctcgacacacccttcgttatgacgccacaagccacctctgattcccaccgaatccgccaccgccgagttttgaggccaaactccgtcgaaaaacctgtcatccatagcgctaggtgggttttctaggatagaccaccaaaccgctgcaagtagcgtgccacatgcgcctcccctacaacctggacacgtgtctcgccaatcctcaacctcgccgacaacatggctcgctcttccccatcctcgctcaggtgcgtgtcacaggtgttagctaatacgtctagtcac

SEQ ID NO: 15454 - DNA, 367 bp, Zea Mays
gttctccatgtgccgtccaagtatcaattcgctgatatcatgactaaaggcctgccaattcagctatttgaggatttccgatccagtctttgcatccggaatcctgacgcttcgactgcgggaggctgatagatatatatagcaagtgtatattaggcaagttcatattaggcaagtcctcaatcagtgtgattagcacctgccatgtattgtgattagcacctgccatgtactgtgattggcacctgccatgtattgtgattgtcacctgccatgtactgtgattggcacctgccatgtacactcagccacattggctatatatatgaacgtcaccacctcactgcagtgtgtggtgtcttctcca

SEQ ID NO: 15455 - DNA, 550 bp, Zea Mays
cttctccaggatggacgtagccccacgggcaccggcgaaggcacaaaagtcccctctgtcgctaagaactaccaaagccatcaagcatccccgtagcaactccaaagaaaaggagaattgctagtgtgctagatgttgttatggagtctgtgaaaacatcaactcctgcttttgtcgaagcgcctagcacgaagggtaaagtttcaaagaaatctgatgaggccggcatagtgcagactatttcggaagctggaccctcagaagttcctgccgaagctagacctttggaaagcgctccgatagtcctagagaaagagggtgcttctgagaaatccaaatctcctactcctgaagcacctgctaaagagctggaatttattgtgtcacatgcttcggggaagcggttatcagaagagcaagttgccaaagagcaacattatgccaaggaactgaagtacccccgagggtccttgttgtatggtggcgatgatgaagaagacttcctttattgtctgttggacaacaaagagatacatgtctaccgggaaat

SEQ ID NO: 15456 - DNA, 750 bp, Zea Mays
gggaagaagggggttggagcagtggtgtgtcctctcccgatctcccttaagagcggagtggtcaggacgatcattgatggtgctcccggagtcttgtatggagcattcatctcccttcatcgagtgatccgtgtccacaccttagtgcgcgaggttgacaacggggctcgtcgtgccggagaagtcctggtcgatcgagctacagtcatcagggtgattccgctggtgtagttcgcgatttccctgtggccgcctttagcgatcatagggaagatttcttcctaggtggagccgttatgcggtgcagagtttcctcttggtctgcaatgcatcaggcggttcgaaagtagaagactgctcctggactgaaggtgatcatgctcttgaaggtgactgccatggagtcagcatttatcaacgtcgcaccccctacctggcacgccagctatcggtgttcgttactcgactgcgcaccacggggttccccacgtgatgcttttgggcaggacggcggcgttgatcgtgactcgatggttcatatggtgacacaacagaaactcgcgcagaattatataggttcgggccgcgagagctgcataataccctacttcctatggtgattcttggatcggggagagattacaagttgggaactatgagtgttgtgggtcaaggtgagatgaaaatggtaagggtgtctcctggccttatatacacgaccaaggatagttattcccgcacaagtgataa

SEQ ID NO: 15457 - DNA, 538 bp, Zea Mays
gcaggtagccgagaccaagctcgggcgaggcggagtttgttccgaggctaagaccggtctcgagcgaggcgtagtttcctcacaaaggtcagaccacgctctgtcgtacgcgcgtcccatccggagttggcagacgacgtgggggaacagtagccgttattcccgggcacgcgtcatcgtagtttgtgaaagtggacaggaccgcggtcatgttcgttcctgttcgcctgtgatgtcgtgtgggtaggtatgcgcattgaatgctcatgtcccctacggccttgggctgaggcctagctcggggttgtcttgctcgcctgagacgggcgagggcgaggcagaaatgacagttctgtggagaggagacctcgggcgggactcaggcgaggcggagttctgagcgtctatcgaatgggaccttgggcgaatcgtggctcatactcccttgacctcggggaatgattttgatggtagccttggggttaagcacgttttggggtgtaatctaggtacccctaattacgatacccgacagtgg

SEQ ID NO: 15458 - DNA, 712 bp, Zea Mays
acaagaacactaaaacgagagggcagagggtatgagcggacctgagacgagctggccacggcgaggtcacaccgctcggtgttcttgggtgatttgggggaaatcccaaattggggagttctagtggatgattcgaggcattggttgctctactgggtgcacaattacttagcggagcaggcggggtcggtaatttatagcaggcttaagcggtggccagtgaatttaagagagacgtgcgacggtcaaagaagaagaaggttactggcgcggtgattcgtggcctattaccgtggcaagctccccggcgaccatcggatgagctaacatgagtcacggcggtgaggttaatgtgtcaaggcacgtggcgcaagaccgcgcagtggctagctcccggcgaacccatccaacctaacagtggtctgctcgggtacagtggccggagtaaaatagtggccagagcgtatccacagcgtgatatttacggatccctggtgttatccaactgatctaagcgtgaatcaccacgacaatagcacgaatccgcgcgtggctcgtcggcgacgagggtatcagaacctgatcctacatgttactgtaccatgggattgttcttcagttagcctgacagcccaagtttggggcgaatttcctcctgattttacatggcaacaagaccattgttctgtagcaaagttgtagcctaatagac

SEQ ID NO: 15459 - DNA, 430 bp, Zea Mays
gcgggttgaatccgcagaaacggaggggctcttttgaaagaagtgcacggcaaaggggtaccgttgattcagagccgtccgatcctagatccagggaccagattagaaccccgactcggtacgcgcctgatttaatctctaccgcttgttttcaatccgaaggcccgagttctattactatgggatcccatctccatcgcccaactacaatcgaacggtcagcatccatcttcttcctccagccacacccaccgatcgcggcgcccagacaacggtggcaattcgccggcgagcacacacaccgacgctctaacgctccaacacacgttctgccaggttctatacgctaagggggaaaacacgaatcttccagtggagttcttaccgtagggattgacatcggtgcgtctagccacgatgacaggcggat

SEQ ID NO: 15460 - DNA, 589 bp, Zea Mays
tgaaggagagcctattagcgcatattgaaccctatccctaataccctatctgccacacacacagacgccacatccattctcatccacgcacacaaccaccacaccgagcctcgcatcgcatccactggccagctgctgcttggcacccacgactgccaattgtcgcctcgcgccccactggtggtcgctaccaccgctagttgttgtctctgtcgtttgttgcttactgtcgcttgtcgctattgcttgctgctgcttgcttgctaccgctccacacgctaaggaatcaacttatgaacttatttatggttgtaatgtttcaacttatatatatgtatcgttgttcctaattttaattactggttttggccgttatcgatacgtttccgatcgattatcgtttatcgtcatctcgttacttccggtttcgttttcctgaccgacaatcccattatctctactatctattaagtcaatagtgtaaaccacggcactaccatgacttcaccctccccagaccccaccggcagatatgcggcccgtcgcggcctctattggccattccggtctcgaggcccaagcatggcgg

SEQ ID NO: 15461 - DNA, 299 bp, Zea Mays
gaaaattggtctcacaattttaggatttttctacatttttccaaggatttctaaagttattctgaaaaagaaaaggagaaagagtgaatagtattgggctgatttcagcccaagcaacccaacaatggacagaagtgcgcccgcgccagcgcgcgctggtgatttcgcaaaaagggccctgaacaaacgaataactcgacgcggggtcatttactattgcgcagagtcactgacagattgcagataggtccttaaacttctattccttcgcagaccaaggtccacgacggcgttcacgc

SEQ ID NO: 15462 - DNA, 342 bp, Zea Mays
aaatgtttggtttgctcttaagtaatgtagacttgccatggttaagctagagatgacatgtgtgtcttgttttatatgttcctttctctagtgattgcgatataggagttccatagatattgacgcttatgtcctctattgaatatgtgttatcagtgatgcttgtgtgtgatcaataggagaactaataaaaagtcatgtccaaataaataaaatgtgcgtgcttgtgatgttgtaattgtgttgcgtaaataaataacatgttgtcgtctttttaatggtgttaatgttgaacgtcgataatgtgtagataactaaagcgaacatgtggttgttacggtg

SEQ ID NO: 15463 - DNA, 446 bp, Zea Mays
gccagggcgaaggggtatcactcaatctaggccgttggatcaacagccgagggcacggattagattgggtcttaggtgaaacggtattcaacccgggccgcacgatccgagatcgatggcccacgatcccccaagttagcttcagtctgcgcgtgacctagtccccacgatcccgatctaacggccagttgctcacccgcctctggatctaatcctggccctacatctagatccaacgtcgcagagcgctccttctacacccggtcactagagcggcggcgcataggcatccgacggtggaccatcgccggcgcaggccctcccgtcgagctagaactccaagctcacaactaatcggtcccacgcgaactagatacgatagcggaccaatcaggtagcttcttacctgtagttatgacatagaccatcgcgactacgcaccacgg

SEQ ID NO: 15464 - DNA, 375 bp, Zea Mays
tattgccatgtttggatggttttacacttttgtgcgagatcataccgtgtacatatgttctgatggaatatgcaataaccaaacatgaggcgttgctcaaaccactgaagatttctatttgattcagtgcaaaatcttgagttctgtcgaacttgggataatgctgtttgatgttaaagccttacctggggaaagaaggcctcaattcaaattgacagaatttacaagaattttgaaatattcagttccgactgggggaaaagaatcggaactgtatacttttatatacttgctataaaagccgagttacatctgttcttgcttggctcatgtttttttggctgttcagttcagaacttgccatatgaatgcacc

SEQ ID NO: 15465 - DNA, 440 bp, Zea Mays
ttcgtcggcagcgaggactccggcctaaccacggcgacatagcacgatccagtgagttggggagcttcacgggaggttagggaggtagtgggtgcaaggaatcgaagaatggttcacctggtggcccggtctacgagtggtggcgggtggccgaagtccgacgagggtgatcccgcttctccgatgaggcaatgcctcggctcaagctttgggaagcttcacagcctttcggggaagccatctaggggctagggcgaggctgggggttgatgggaaaggctggccacgacggctgtgctcgggcagtgatggcgggcggtcgcgctcgctttcaacggcgaactccggtgatccctggctcgggcggggctttgggtgcacaagtgcatacgactaaggcctctaggagcacttataggagagggcgagacgcaggcttg

SEQ ID NO: 15466 - DNA, 348 bp, Zea Mays
agcaactactcgtgcgcctagctcctgcccaaactggtggccaccttttgtgtgccgccgatggtggtgccccagcatgtttgggagcaaagggtatggagaggattggacaaagcaacacctgtaatgaacaaagcgacacaagagaaaacaagagagatgggttgggccatgacccataggaaagagggagggggttatgtgcgctacagaaatacagaatcccttgccacatcgtatgtttgtgtggcatccaatggcaaaaatcggccacgatttagataatccggttttaattagctattaaaggtggatggtgtgctggactgctggtttgtgaaaccacca

SEQ ID NO: 15467 - DNA, 573 bp, Zea Mays
cccagacaatgtcctcggccccagggaaatccttcgcgagcaccaattgaggcccgccagtggaggtcacggcgaaatacgatggcggcagaggagttcttccgcccaggtggtactcggtgatggatttggggacggcgcgagcgatttcgagagagagggggtcgcggaaggatgggacttcgtatttaggatctaaccgcgcggagtcggtaggtggtccagctagcgcgaggaaaacagaggctcaccgcgcgatccgcgcgggcggttgcaacggcaggcgacaggatgacgagctcggtcatggggctgcgaaagaacgtagctgtcggcgtggtccaccctccagtctcacgggagcacacccctgcgcgcaatgaacggctccaatgtgcgcgcgattgactcggcatccgttgcgcgaggtgggcggagtgcggcgctcggggagagggatgacatgtgggtccgctgtggcagtggcagagaagtctgggccgcgcgggtgtgattcggggttgggccgaattggcgcctggtggcccaattagggttatactctttttcttt

SEQ ID NO: 15468 - DNA, 349 bp, Zea Mays
cgaccatacccaaaaaaacctaacctacatcataggttgcctagtccatctatcctaaaagcaaagtaaaactatgtgtaaacctacctaccccatgtacctcggctaaactatatgttcttagtcatatgtccttagcgtagatggcaactccaagattaaagactgaagatgaccaacttcatcaaagaaggataagcaccaactcaagtcttcaaagagccaagttggatcaccagatgaatcaaggtccaccatccggaatggaaactccttgccctaatccttcttaccccagccttctctacttctgcctaatagttaagcataatacacccaggatttccta

SEQ ID NO: 15469 - DNA, 749 bp, Zea Mays
accttgtccaccggatgatctctttgaatgatggtttggactcttggttgtggcgcctgatcttgaagtggtggtactccatcttcatccttcttagtcttgtttctcctcaacccccttgatcattgccaccatcttgagcttctttctcaccttgcttgggggttgagcttgtatagagggtgaaggttaatcttgctcttgtggcagctcctgtagacgcacctctctaatggatatgttccttaacgctaagcttagagcctcctataccccggccttcgaccctgccccgaccaaagtcccttagatggccaatgcctcacttacatagcgcaacaaatcatgttacaaaacatgttggtgacaccatcctcaatggcgaccttgccgctagctccatgcaagcaagctcaaatcatccaccaccacgaagggtcccccatcgctgccccggttgtcgccgcagccttcgcctccttcggtgacctctcagcgacgacaatatcaccggcatgtgcattccttttcttcaaccgccctccatgtttagaacaccatatatcagagtgagcgccttccccttcgggttcattgctgcagcaatgacatctatgcgagtatgggtatataagtaaatccctctctaacacgacatctccgcaactacacgcaatgggcatatcccatacaacccatcgtttagcactctccaagccaaccttcatctaaagcaactcctttccaaa

SEQ ID NO: 15470 - DNA, 709 bp, Zea Mays
atttcaaacttgcggattgtataacattgctactgcatatttacagtgcaaactaacaacaggttaggaaattttaacaggtgtgagtattgataagagggttctaacaaactatcagtaccatctaaagaaaaaagaataaaaagaaagacctaaccatcaggagcttccgatgtcttgcaacgctttctgctagcattaggctccttcagtattgcatcttgctttctacctttacgttgctttttctgagggctttcatctaaatttcaacagggcaacattgatacgcagaattctgtcagcacgactattgcttctcatacataagtggcaaataacaagcaaaatttgatgaacagaccggtcaagcattgtagaaatgacaataattctgcaaaaagatatcaggacgacgtaccaaccaaaatgactccatctttgttcgattgatcctgccattgtttctgtttgcttgaagagccctacaaaagtttggtaaagaaaaaaactattttaactagcgacacaaggaaaaaagtgaactacatagcaaacaggtatgtatttgttggaatgaaaggatacatatttcttaacttaaaagataaacgtaagggccaaaagggggtattccaaattgtaagtcgttttggcttttctagataattagcttctctatagacctagataggcttgcaagtgggtc

SEQ ID NO: 15471 - DNA, 282 bp, Zea Mays
tcaaagcagccgacgcggtctgttatcactcggttgttacctctaaaacaccgatgtcgccagtaatcgttcggctgttacctctaaaacgccgacgtcgccagtaaccgctcggtcgttatttctaaaacactgacgcggcccgttaccactcggccatcacctctaaaaggccccgacatcgctgataatcactcggccaccaccactaaagcgctggcatcgtgaagaaggcagtctgaaacacggctcaacgattctaagttgctactcaagtattac

SEQ ID NO: 15472 - DNA, 389 bp, Zea Mays
ccgactgtcttgttcgagccaatctcaggcagataagacagaagcgcccgataacaggaagggaacacctgcatttaatgcgcgtacctacccaacgatgcggcagcagagcacagtggttgacaagacgacaatcacatctggacgcaacaacatgattacgtctccgctacagtacgcgcacgccgcctgccatcccccgatgggacatctaatacgacaagcagagcagaccggccctcgggcgcatttctccgcctcgcccgacgccgagtccaatccacgggcgcaatctccgcatcgcccgatgccgagtccggccctcgagcaatttcttcgccacgcccgacgtcgagtttagacctcaaatgaattcttcgcctcgccca

SEQ ID NO: 15473 - DNA, 519 bp, Zea Mays
cacgacatgccatctttggctcactctcaagaatcagtttcttgggaatcgtgagatcgacaccctctagctcgacactaacttccacaccttcatccagggcgacctactcgtgggtgactactgttgcaagatgaagatgtttgactttcttgccgacttgggcgcccccgtcaacaaatggatcctcatcctcaatattctttgaggcctaaacaagaagtttgagtgcattggggccatcatccgacgctactccccctgttgcaagctaaggaaatggcagactccctagctggcttgggcgccgctgtcaacaaccagattcttttcctcaacattctccgaggcctgaccaagaagtttgagcatgtcagggccatcatccgacactacttacccttctcgtcctttctcaaggtctaggacgatcttgttctagaagagctcaacatgactgccattggcactgctattgcttcgataaccttcatggccactcctctgccagtccccccc

SEQ ID NO: 15474 - DNA, 741 bp, Zea Mays
ttttgtcaacaggtctgccttccagctatggagctgatcagctatcctatcaatgattggttgaatgtgctgtttactgagtttccttagagatagagacaccccaagtatttgcaaggaaaattggctaattggtagggaggaaaacctggatgacagcaacatcttcatgtgagcattgggtaggaaacacactacttttctccatgtttgttctcagacccgatgcatcccccaaaagcttaagaatatcaaatttgatcccaagatcaacagctgctggatggagaaagatcaccactgtccttcctgatagaggctgcaaaaggctaacatctgctgccttctttaccatgtagaataagacatccatgactaaaatgaacaacatggtggacagatgatccccttgtcgaagtcccctttgatgcaggatggtgtgtcctggtctgccattaatcaacacttgtgtagatgcagaggccagtagtctgctgactatatatcatgccaaattggcccaaaacccagatgctgcacgaccacaagtaagaaaggccaagactgtcgaaggctttggtgatgtccaatttcagaaggatccttgcaagtttttttttgatggaacatcctagctgtctgctgaacaagcatgaagttgtctagaatagatatgcctctaataaaagcactctggttaagaggcactatctgttccagcttccaagataatctgttggc

SEQ ID NO: 15475 - DNA, 455 bp, Zea Mays
aaagaatgaagaggaaccagatgacaaaaatgcagccgagcgtattgctagacagtcagctcactacacactcgtcggggaaacgctatacagaagaggcgcatcaggagtcctcatgaaatgtattctctcaactactggaaagcaacttctgaatgaggtccatgcgggacaatgtggagtgcacgcagcatccaggacgctggtcgggaaagtcttcaggtcgggattctactggccaacagcaaaaagtgatgcagccgagttagttcagaggtgcgaagcctgccattacttgtcaaaacaacagcatctaccagcgcaacaactgcagaccataccagtaacttggtcgttcgcatgctggggactggatatgattggacctttcaagaaagctcaaggaggatacactcatatactgatagcaattgacaaattcactacatggatag

SEQ ID NO: 15476 - DNA, 518 bp, Zea Mays
gtttgctttgttgtagcatgaacggtgggcgccaattgttgggaccgactaacacgtggtcaggtgagcccaatcactcgagaaagagggaactcaggtgctcaacaaaatagtaagcagggaactacaatgtcttgttaagcgtgtcccatccatatatagtgtggtggtatttatagataaccgagcaggtaggtgtgccccgctaagtcccgttatgcccccggttacctggtacatctccagaatattcccccttaaagggtcattactacaatgataagtacaatcggattagacgtactactgaacctaccttgaggaggggcttacaaatgggcccaaatgatgacagaatgagacctaggcctagccattgggtggcatggccttcgcctacgtgtgtcacccttcgctctgcgaagccgagacttcaacttcgccaggactatagtcgttcagaactgtccaagccaaaggggcaccttcgtgaggctacgacgagccccgttttaaac

SEQ ID NO: 15477 - DNA, 472 bp, Zea Mays
caaagtttaaagtcagtggactcataaccatactcatcagcttctccctcttcttctcgtctgctttcatgtaaaaccattcactcttccagccagttggccacttggtgcggtagctgagaactggtgcctttgtatcctttcgatatgcaaaattgtagcagccaaaattttcatgaaggccatctgccctggcctttgtctagtagtgcagctcgtgcactctacaaaaatcttcggcattatggctcatcccctggcttcggagagcctagatgtagacactaagtctaacaatggcgttgtgtgtcaattgatgaaggtatatttcaaaattcttcaaaacctcccctatcatatcatagagagggaaccgaagccctgccctgaagaagcttttaaacacgataacttcatcatccttcggctctggaaccacttcttcgccagcaaaacgaacaagcctactctc

SEQ ID NO: 15478 - DNA, 629 bp, Zea Mays
ctggactgggcctcatttacagagaagtgcaggggtctcggggcaagaaacctgagacacagcgcacagcagaacgggacgacgggttaatttattaagtccctagggtttcttttgtaattttggacggccgaaggggtatcgtgcactgcgggccgttggattagacgcgggcgaaccagattagcccagcgctgctgtgaatcggtacgcatccaggatcgcaggatctgagatcgacggctagggttctatgagatcccgatacattgttggtcgtcgatcgaccgctcgatccagatcaacggatcagaacgaatcgtggcgaaaaggtatggcaagatctaatccgagtcgttcaccccgtgatcaacggtgggtatcggatcaagtcaagcaattaccttgacctaatctgagccctccgctctgcatctaacggctggcgtagcttcttcctcgctctggtcgcgcacagcagcgccgccccgtgccgcggcggcgaaacccgccggagccattggaacacacgacacacgaccctagctttctattcgaacggagttacgcgatcctgcgagctcggcgaacatggttaaggccataccagaggcgaatacgacttcaac

SEQ ID NO: 15479 - DNA, 357 bp, Zea Mays
cttcaacaagccagctggacccactccgtcacgtttcagtcagcagggtcaaagctcctttcaggccccctccgttgcaagcaaccaacctccagctaatgcttgttggcactacagagaccccagtcactacaagaataattgtcctcagttgaaggcatccatgcctacttactccaactcggtgaatggccccaagaatgccccagcacccgcctccaaggcaccctcctccaacagccagcagagcaagacccagtatcatggcagagcacgagtaaatcacgtcgatgctcaagaagctcagcaagctccgggagtagtgctcggtgagttcctatttaaatttactcccac

SEQ ID NO: 15480 - DNA, 540 bp, Zea Mays
ccggacgctaccctacagtagagctcaagcaacgggtccgaggagcaacacgcgcccagagggacacagaacacgcacaaactaagctaggattaccttggtccgtgttggcctcgaggagatgtacccgagcaggcacggcgagcgacacttggcatgggctgagcgcgccaaggggtgctcgaacgatgacaggcgacgaaactaaggctctaggagcgtggaaggatggtgaagcccggtgcttagaccaactccagcgagggcgcgtatacggtcatgctttcgtaaaatacacggccgaggctactgttcacgcagccagcggactccatatccgagcgcgaagaacacgcggcgccggtgctcgctcccttttctcgcgtcctctctctcttccccgcacttcaaccgtcgcttttgcaaacgaggtatgtctccacgagttcgttcatccggacgccgagacgtagattccagatcgagctcattcctcctccttcaaagtttcgatttcggtaactgtaggttgaacggcgg

SEQ ID NO: 15481 - DNA, 287 bp, Zea Mays
gggatttggaggtgacaggtccaatcagggacctgagaagcgaacaaggttggtaatccgacctttcaatcagaatcgttcttcgcctcgtccaccctcctatccgtttaaacagcctgttttcattcgtcctaccactacccccacttctacaaatcagtcgagtgcccctggtgctcgtttccccgccctccctagttcctcaactggctgcttcaactgtgggaagtgttgtcattttatcaaagactgcccatatccgaggcagaataagtccaacaatcagc

SEQ ID NO: 15482 - DNA, 489 bp, Zea Mays
gccgtgcctgccggtactaatccctccccttgattcgcctttcacctgacatcatgtagaggggtgttaattgaactttggagggtcggggatgagattttggtgcactccggcgagggcgccaccgtgctcaggtagctgtgccgccgcgggatatctcaggggaagtggatgagcgcctgccgtcgatctaaattgaatggccaggatcatatgcagtgtaccgattcgtgggaattcatcgtggccattgatcggtcgatcgacgatcggcgattgatctggttctcttttaatccagagcgctgatctcagatcgggcggtgctgggcgcgtaacggttcgatgaagtggactttggatctggaccgtagatcgtagattgcgcggctgaaatcgcataccggttcgctgtttaaatctgggccctagatctttaaatggatggcccaggcgcacctgagttcgctcagtcgtggcattttcgtc

SEQ ID NO: 15483 - DNA, 790 bp, Zea Mays
ttacgatattgacatgaactaaacagttggattttttcttaattgcttttgaaaatttctgagctatataatttggctttttgctatttattgtttcctggtggaagatggatacaccgtggtcatgctacgtgacactatgatagtataacactctagtggaccttgaaaagctgtgaccttgatcttttattaattcttcaacacagggatctgtcgcttcctgttgtctttggagagcaatatttcattttaagatctccaattgccatgtccccttttactggtctcttgatgcatgagaagggtgggatatagaaagaaccttgtggttctatgacaggccagcacagatgtccatcattcctggaaagcaatcctgattaccagagtacaattgcactgtaaccttctgcatttctactccagtagccttgaaatataatggattctatgttgtcctaagtccaaccattctgagtttcaccaagtttctggactaaactaaaaacatgtaccacattagaggtaaattataaaaatacatttcataatttatctaacgaagatcatttgatatcgtaaatgtgattgctctttactataagatttgttaaacttagaatggaaaatccactgtggttttgtacaggatatgcactagacattctcagcttgctaggtatgtaacccttatgtttcttctgaattacactgtttagtagcttctctcgatcctttttatagtgcagattcaccggcagcactgtcatcaccccaatagataggc

SEQ ID NO: 15484 - DNA, 921 bp, Zea Mays
caagcctgttcccgttgggtctgggttagacttggtagggagatcccatccccaccccctgttgcgagacattgctccagactttagtttgagcgagatatttgcctgttgtcccagagctgaaacccgatgtgaaatttgtttcgcctgtgtccttaatttcaccttcagccgaaggctacgtttgttttggtaggatgctgtttactgttgcgagagatccctgactgtcactcccaagtgccaatttgattgaatttgaggtagggtgtctccggatggggtctatggttatgtgggtgctatagcttgaacccagttagatctggcctgaacttcagcttgaaccatcaaggttgtatgtttttcatcagtagttctagccttcactgttacacaaattgcttttggtggtttccagattataggttttaatatggttgcacgatacctttatgctgactcatctactgtcagctgcatgtgcatcacaagttgatgcaaagaaaaaaaatcaagggtaatcgatcacatgattggttgagaagttgtcattcagtaagacaaaatggactttgataatttgttgccatcttttgcactaagagattgtgacaaacaaatcaagttgcggttgccaaagtttatttgcggttctctgtaattgcttctctattcaagaggacaagataacaaggctgtggctgtgctttgttttggtcagtaatgatatctaagtgctctattgctatagatacagatggtgcttttggtcttggtcattgtcatgtggagtagcgtgcacagatgtgattctctcaagattgcttgtgctcatattgtcgtgggactattggtagcttttgtgttggacgtttctcatcttagggtatatgtaggttccttgtgttaccttactat

SEQ ID NO: 15485 - DNA, 496 bp, Zea Mays
gccaccgccgataatacccgcttccttagggaaatggcgggtcagcaacaattccagcagcaagcagcaagaggttatccgcaaggtccccgtgagaccacctatctggatttctcggaaactcgaccacctctattcgtcaaggcagaagatcccttagaagctgacgagtggattcgagttatcgagcaaaagtttggtcttcttcgttgctcagagacgcagaagccgttgttcgccgcacaacaactccgtggtcctgccagtacctggtgggaaaattttatggctattcaacccgacaaccatcaagtcacctggaatgagtttaaagcagctttccgtgaacactacatccccgaaggagtgctgcatatgaaacaagaggagtttatgaagttacaacaaggcggagataccattactcaatatctcaacaaattcaatcacctgtcacagtatgccattgaccaggtgaatacggatttaaagaaga

SEQ ID NO: 15486 - DNA, 484 bp, Zea Mays
actcaaggtttgtagatctgacgcatcaacgcaagttttatggtgatgtcacatggtgcctctagttcccatcagaacttcacatgggttttgaggaccaaacccaaaaaccaatcgccagtggttttgaggcctagaccacttgtgagtagcgtacttcatatactcgcctcatgatcttgatgtcattgtttgtcctcgattgttcggtcaccaagttatcttccattaccaccatcgtcttaacttagtcaacatggtatactccccatatactattgcacttatcgatgccctcaaatgtcagccatcatggccagtcttctagcttctcccatcctctagtctaagcctcagaacccgtccttcacaccttttagtctattaacatgaacccactcgacattcatattcgtcgtcgataccacctttgtgctccatattggcgaagtcaagagacatgttgcatacgtatactaactta

SEQ ID NO: 15487 - DNA, 1401 bp, Zea Mays
ctatgaggcagtatgcgattaataatgagtttgagttaggaattgagtcaagctcaccttggagatatcgaggttattgcaaaggaggtgattgtccatggagaatcaatgcaaggctacaaaatgtcgggtctcccactatcgttgtgagtatttttttagcacacattgtttgtactttcgattgttgatgaaattagggaagctcacaatggtactattttttttgcgcaggttacagttatcgtggatcagcacacatgcacttctagtggccgtcgaaatacaacaacacccaccagctcatgggttgcatccctagcactgccaatcctaactaagaaaccacatatgggagcaaaagaattgcaaactaccttgcaagagcagcacaattgcacaatttcttatgatacagtgtggaaaggtaaagagaaggcccttagagagttgtatggaacatgggaggacagcttcaaattactatttagatggagagaagctgttttggaggttatgccagactcagtgattgaatttggtctagtagttgaagatggaaaaatatatttcagcagattcttttgtgcttttggcccttgtcttgaaggttttcgtgaaggctgcaggccctacttaagtgtggattccacagctctaaatggtcgttggatttggttcatgcaacaacttcgtaaggctataggagaccctcctgttttagccatttgctcagatgcatgcaaaggattgacatcagcagtaaatgaagtgtttccaaatgctgaaaaaagagaatgcttccgccacctcatgcaaaactacattaagcacttcacaggttcagagcacatgtatcccgcagctagagcatataggaacaccattttcgagcaccacttcagtaatgctagggatataccaggtgtgaagcaatggatagatgagtggcaccctcttttatggtacagatgtggtttcaacacggctataaagtgtgactacataaccaacaacattgctgaggtatttaacaactggattaaagactacaaagacctaccagtttgtgaactagcggacaaaatcagatgtttggttatggatctcttttttagaaggaaaaggatcggggacaaattgggtggtaaaattcttccaatagtcatcaatctgttgaaggctagaacgaggggtttgggccatttatctatacaaaaaggtgactactatcatgctgagatccgtgataacaataacattcaatgcagacatgttgtgaaggcagaacagagatattgttcttgtctcgaatggcaacacacagggaaaccctgccagcacggcctaatggtcattatagcgcaacaaatgcgagacgttggaatggagcactttgta

SEQ ID NO: 15488 - DNA, 299 bp, Zea Mays
gaaagacgcagtacgtacgcacgaaccagagatgacgatggagattcacacattgctgccgtgaccgtgggacagattttgtggtggcgacgagacgacggcgtctttctcgtctttctcagcgacagtgcgtcgtcccagtacgttgttgcagcaaaccgtttctctttcaacttcctaatcgtaaaaattgtttgccatatatatacatgcttctctgcctcccttcccatgcatgcatggtgttaataagctagcgacatgcaaggagaccatgggttgctgggtcgcccagtcgc

SEQ ID NO: 15489 - DNA, 361 bp, Zea Mays
gagggaagatataagaggaattattcaatgtcccatctggtctcgcttcggcatcaggaggccagccaccgctcttgggaatgatatagaggcatgctagagaagcttcaacattgtgtgcacttttattggcaccagagacctggttcaagagcacatagcctacagggtatgaccacttgtgaatgagtgggagatgccgaaggaagctgctgccgggtctagtcagggtggcctggtctatctaaagtataccttcagatatagaggcgagtttgatgagccaaatgatgaatggttgagcagtattgaggtaactagcgatgaattgcttggggcttacactagagctaaagatgat

SEQ ID NO: 15490 - DNA, 608 bp, Zea Mays
caaaaaatcaagtagaggtagttgatgctgaaaatataacgtcaggatattctgatccgcctcgacatccatcaaaacttaaccatagcgcaaagcaacttgcgctgtggttataaaagatctggctatgatttaggaaatacgaacaatacttgtttcgtttcccatgcgttttcagacgatagacctgcttgtttatgctctactagaaacgtactatagaatatagagccaattgagcctggtgcagtgctgaagaagaccgatcagatggtagcactacattccatttcgtcgacgtgcacgtgtccgtgatgaatcttaatcttctccaaattttcactcagttctgtgcgaaaagaatatgatgatgtttagtgttcctgaactgaaactgaaaggtcggtctttgactgtagcgttactgtactcgaaccacctgttccctgttctctcttggaggctccagaaggtgccaaactcttgcaggatagcagccgtttggaagaaacgcacaaacgtggacgcggcacgccactgcacagtgcagaccagtacgccagacagagacccatgagaccatctctaaccgtttccctcacttttct

SEQ ID NO: 15491 - DNA, 631 bp, Zea Mays
ccaattaccatcacacaccacctttcgccatttttggataaccggcacgacacacagctattgtaatacatctcaagttcattcaacccatcagtggagcactagcatatttcagaaaatttcctgagactacgacgacaaggcatcgagcttatcatgcacataaaagcatcacaagcatatttacggaacctatcgattaacctaatcgacacactagacatgttcttcgcccttcaaaatttatcgcacaaccaaaatcatcccacttgctaatgacaccaacaatacctactgatatgttattcacatcacgagcacagttacacgctgcatactagtttctaacataatcctcatataactcgtaattcaaactactcactaacaataaatcacgcacgccaactaccacatcgaccagttaatttatttggacaccgcctgtctagcgtaccactagtaccccacattttgactcatgctcaaaaatacatcctttattcgattatacaacagcgacctaagcatcatgtcacccagtacatacatctttcttcatcgcgagtataaccatattacgacatacacccgcacaccccaaacaaatatcttacgcccccactattat

SEQ ID NO: 15492 - DNA, 395 bp, Zea Mays
cgggtccgtcaggttcagccggaacgccacgcacagccccgggttccccgccacgctctccagcaggccctccttgatcagctgcaggggcaccggccccgacaggttgttgttggagaagtccagcgagttgggcagcagcttgcacagcgactccgggatctcgccggacagcgcgttgtccgacaggttcagcacgttcagcgccttgagcccggcgagcgtctccgggatggatccgttcagcctgtttccctgcagggacagctggttcagcttcgacagcaggcccacggactccgggatgggtccggcgatgaggttgtcgctcaggtcgatcttcaccagccccgacgcggcggcgatctccggagggagctgtccggacatccggt

SEQ ID NO: 15493 - DNA, 449 bp, Zea Mays
caagaatgttctaagtcttcgccggatggcgttgtgagcctgtacgcgctgggggacgccttcgtcttgacgatgaaagggccctcccactttggctccaacttgccccgagactctgtccgagctgtccggacgagtacgaggtctccttcgctgaattccctcgggatgactgtgtgatcgcgccatgcttttgtttgagcttggtatttgtttagagcctgtagggcgaagacacggtctccgtcgatgaggtccttcgaagtaggctcgtctacgtcggggacggcagacacgattgtccgcggtgacccatgttttatttcttgtggagtcatagcctccgatccgtatagaaggcgaaaagaggtgaacccagtcgccctgcactcagtcgtgttcagggcccagaccacttcaggtaacaggtctggccacttgcctttttt

SEQ ID NO: 15494 - DNA, 491 bp, Zea Mays
ggagaacccaaacagatagattttgccccagtgcaagagttcaaataggggggatagagttccccgctgatctaatgggtaaccaggatgcgactatagatgtcatcctagggatgaaatggctaaccaaatatcaaacaagtcttagttgtgacaagaggacgatgaagttagtgtccttatcaggagaggaagtgttagtagagttggtcttgtctggaccaaggaaaggaagctgtcaccaagtcaccgcccatattgaggaaatcgaaacatcagaagctatgaacgtagtgtcagaatacacatatgtgtttctcgaggagctaccgggcatgccacctgaaaggaaagttgaatttgccatggagcttatacctagcaccgcccctatttccaagagagcctatcaagtgtccagaccagaattggtggaactcaagaagcagattgatgaattgttagagaaaggctacatccaaccaagtacc

SEQ ID NO: 15495 - DNA, 678 bp, Zea Mays
atcgatgttccatgagtgctctaagtcttcgccagatgaacttgttagcctgtaagcacttggggatgccttcgtcttgactatgtacgacccttcccacttcggctctagcttgccccgggactctgtcctggtggtcctcacgagtactagattcccttcgttgaattctcttgggacgacattgttgtcaagccatgccttggtctggacctgatacttgtttagggcctgcagggcgaggacacggtctccatcaatgagatctttggaggttggttcgtcgacgttggggatggctgattggtttgtttggggggcccatgctttaactcttgtggtgtcattgcttaggatccatacatcaggcggaagggtgtgaacccggttgctcgacattctgtcgtattcagcgcccatatgacttcgggtaattggtctgcccatttgccatttttgtcgtcaaggagccttttcttaatgtcactgaaaatcttgccattggcatgttcgacgatgtcgttggattgtgggtggtagacagaggcgaagactggcttggtgccgatggaactgcagaattcccggaagtcctggctatcgaactgtttgccgtcgtcgactgttagcttggacaggactccaaaccggcagacaatgttttgccagaagaatttt

SEQ ID NO: 15496 - DNA, 475 bp, Zea Mays
ccgatgttggtgcggttggtcagttattttttcaagtgttcatacgatagcagttctgctattactaataactatgttctggagtatgcagatgcagtgaccatgctgcagttcgtcgacgtcgcccagatcgactcctttgcctcccaccatctccaaaatttgtggcggagcgctcgctagcgccagagctgcaggggttcctcgccgcctcgaccacccacaccttcctccatcggcgcgacggcttcagagccttctccaaaatctgtggcagagcgctcgccgatgccagagccacagtgcttcctcgccgcctcagccacccacaccctcctccatcggcgcagcagcaacggcttcacgcacagtaaaatcctaattcacctccactgctacagtccaggcatccgctctaactggaattcatgttcttgaagctgacgaattagcggacttcacatgtggacgttct

SEQ ID NO: 15497 - DNA, 434 bp, Zea Mays
gccaggggctcctgcgcataagccacacagacacaggactaatgcgcagtggacggcgggttctaattcgtataaacagaggggttcaagtgtaaatcgcgcagccgaacgggtatggagctctgctggccgctggattagacgccaagcgcgcagattaaatcacgctgaagtaacagaatccgacccttggatcgatttcctacggcatagatttaaaatacccagacgcgttggtaaccatcggatcacagatccatggtcgcagttctattgggcaaagggcacgtgacgccaaatctgagccatcgatcaacagatggacggctcgaaccctttcttcctcccgggattccaccaaagcgacagggcgtggcggcgccagttcttccccccgacaccaggtccggccgactgcgccatgtccatctccc

SEQ ID NO: 15498 - DNA, 466 bp, Zea Mays
tggcggatgaatagcgacttagcggtgctcacgtccgcaagctcctgagggaggaaaacaggatatcacagaatgccctggtcacacgaggtgtacgtctaaatccttacctagaagaccctgggaacgtccctggaaaggatttccatggtcgaccgaagcgacctcatcgccgccttagtgtattcacggaaattatcccgaaactgctcctccaactcatcattgagggagaggaggggctccgaggtgtcgtggctccagaacaggagcggttgcccacaccactcattgggattgagctacgtggggataaggccgctgctccccaagacgggccacggttctgcgcgcccctcaaccgaggcgtcgggtccccctgcagttgatgcatcaggtaccaccgcagtcgacgtaccaggcctctcctaggccgaggtgacaggcctccgctcaccgacctcgg

SEQ ID NO: 15499 - DNA, 1046 bp, Zea Mays
ttttaatctttagaaacttttttttgtagctggggctgtcattgcttttatgctgatgccttggagggtcttaaacttaaaccttttttcataatttgttgaggacttggggttgttgatttttgtttcctcgagatttttgcctgctcttgggattatcttggcaaatgatttatgagcttttggcttctgtctacagtatttcaatcttttgaaaacttctgtttgtagcttgaggctgtcattgcttctgatctgtatgccttctgtagtgtccttttaagcttaagctgtctcttaacattctgagcatttcatatttggtagggttcagaagtgtgccaagtgtacaaacaatctgtcagtttacctgacttcctccggatcatttactaaatataggcatgcacgtattgcaatatattgacttttcatgtggattttcagttcatctatgattttgtattgaaaaggtgttttttattagtactcatttagaaatagtgaggtatagctgtatagttctcttagatctttgaatagtgcttgtcgcggaatagtgaggtatatttgtttatacgacccttaggtctttgcactttatcatgtaaacattgttatgattatgaaaaggttgatcaaggtgtttgatatcccctttcctacatacattagtttgagggtagatacatgtcatgtaatttctgttccagccttgctgtctgcttacattgcttgatcatgctcttgtttcaaaaatgtaactgttatttccatgtgcagcctcccattaggagcatagggcacacttaagtgttttcccaggccaagcctgccgggcaaggaagtgcgggggtgcatggtttccttttctggcatcgatcttaaacttgcttcttctttcctcttctttcccgttctgatcaactcatcgctgtgctgcgttactgcctgccggcttctatttagtgtcttgttcatttcacttgatatttgttgtgtcggcttgatttgttcgccagctaaatcagtttgtatcttgatca

SEQ ID NO: 15500 - DNA, 359 bp, Zea Mays
gcaggccggttcgcacaaggaggcctaaccagctagtccatggaccagagtggacccgttaagctgaaggtggggttttctttttgtgtgagtatttagttgtgagttggggaggagcaggcaaggaagaaggggatgaaccagtaggtggccggctgcgtccggaaaggctgagaggtgaaactcttgtaacctgttattctggatttgtcgtgggtaaatctcttcgtgagggggttcaccgccaggagcggtgctcagatcgtcgccggtttagtatcgttacatgctgtctcagttgtacatttcgcatcatcttttcactaaccttgtaggaacgtcaagaaggtaaataattt

SEQ ID NO: 15501 - DNA, 794 bp, Zea Mays
tgacgaagatgtgttttcccttggtgtctcctcaccatccaccgatctcgactctctccttgagtctaatccggttccccctccaccccgatcgctcccgactgctctcccccagcctagacaccccgctcgtgcctctacctgcaccacgtgcgacctagacactctgacacctccggtcgcgcctctacatgcaccacgtgcggcctagacgctccgacacttccgatcgcgcctctacccgtgccacacgcggcctcgacacctccgctcacatcttttcccatgccacgcacggccccataaaccccacctatgccacgcgtggccccgtcgaccccgcttgcaccatccgtgaccctgttgaccccgcccgcgccatgctcgtccccgtgaacgagcatgactcgatttgctgaccctgccctcgtctaccaccgtcgcgaatggcccacgcccctcggttcccgtcgacccacctatccctttcccgcatcaagccccccggtgtaccacccgaccgccatccattgcgacctcggccacatccaccccatggcgactcgtcgcgccaccaccgtacttcgccccgtcgaccggttgatactgacggtcgacgctcctccggacgcctccccggttccctcctccattcgcaccgccctcgccaatccccagtagcgtcgagccatggtgtaggagtacgcaatatgcggccctgatggccaaccacacttaggacctggtgccacgctcaccatgcaccaacgtggttaccgacaagtggattttct

SEQ ID NO: 15502 - DNA, 677 bp, Zea Mays
aaggtccatgtaaaatgagagcaatcatcaagaataataagatagtatttaaaaccagaaacactgagaataggagatgtccacaaatcacaatgtatcaaatcgaagtttttgatagctctagagtgtgaaggaacaaaaggaagccgagtatgacgacctagctgacaagcatgacagagactctcaagctcatttttattacatgcagggatcaacttagataaagcctcaaatcctagatgaccaagacgttgatgccaaagcgtggttggtgtagcgccagctagcaatgcatggggcgggtgatgcgttgggagatgaagaggatacaatcgcccggtactattgcacctgacgatcaggttcctggtgtccagatcctttacagaaagacccaaaggatcgaattcaacggaaacattattatcaatagtaaattgccgaacagagataagatttttaataatatcaggagagactaggacatgacgtaagtgcaatggacaatctagagcagaaaaatgagtgtgaccagtggaagtaacagggagcagggacccgttgccgacaataatagatgttggattgcgagggggtttgagaggacaagagattaccagtggtacaagtcatgtggctgtcggtgccagtgtccatgtaccagtccgttgtag

SEQ ID NO: 15503 - DNA, 1071 bp, Zea Mays
agagtctgcaacgctatttctctgtgtcactgacaatcgcaaacagaccctccccttttctatttcttcacaagtcgagacccccgaccatggacggcagagtagggactccgacgagcccatatcgaccggaaaacgcaacgactatgcttccccgttgcacaacacctaattctacccctaacgaccatttcccctcactcaattgcaaggttctggctcacaatcactctgtccacggtgacggcacaaaccgaggataatccgagatgttcccggtgatctagcgtgatctaattcaattggccgggcagctaagcatctacagaacacagggatgttgaaacgagagcgaggaagacatgaacgaacctatagagagctagccatggtgagctcactcacgacagagttttgacttaattgggggaactttgaaattggagcgctctggtggacgatctgaggcacgggctggtgtgttgggtgcatgactacctagcggagctcattgcatgctcaatttatagggcccgagggcggtggctcgtgaatttggaatggcacgctggtggctggagagaggggagagcactggcgcaagagatgtgtgcctttcaccgtggccagaccaccggcgatgaccggacatgctagagcgagtcactgcgacgaagtactgcatctaggcacgtggcatccaagcggcaggcggctaactctggtgagcttatctgaaccggccgtgagttaagcggacacggcggtcgaggcggaacagtgccttaagctcatccttagtgccagatttttcatcgaggagcgttatccgtgttcgactaggcgtgaatcgcgacaccggcgtgaatctgggcacaaggtcaccagcggtgaggtgatctttttcagtcactgtacaatcagaacaccattcagtctgtctgacagggccatttgtagggcattaatctccgttttctgtgtggcaacttgttaatctctctgtaacaaagttctagccctataatctagctacaatcttgctatagtaaccatgctcaaacactcact

SEQ ID NO: 15504 - DNA, 451 bp, Zea Mays
ggaaggaaatttcagaccaacaatagaaggagaattctttcaaagcctatgggtgctagacgtatgccaaacagattgggaattgactttatccccaaatgcaatagagacgatggcaacaaacattagggagatacatataaagagcggaagaatatggcacaacaatctttcgtggacatgtctggggaacattcacaagcttcgactgatcaaccctacacgtccttgggagacaggtaatgaggatgaatttaaggatatggtgaagctggagcttcttgacctgtcagggaataccacaatacaatttttgccaagcttgtcaggtgcagttggcctcaaaacccttattctagatggttgtattgaattgcaacatgttatgcccaaaacactccctccaactcttgaaacatttagcttagacggaggatctaaacaaactaaa

SEQ ID NO: 15505 - DNA, 716 bp, Zea Mays
aacaccccctcgccgccgcaccaaggctccaggccaagcgtcgtgcacaacgcactagttgcagacttgcgcagtgcaggtcgctgtcgcaccaaggctccagcctccaggccaagcgtcgcgctcgcacactagttgcagacttgtgcagtgcaggagcacatcaacacatcccgtcaccgctacaaggattgatcaagcattcaaggttccagctccagagtccatagaagtgtgtacacgagcacaaaaaagtattccaggtttgcggccacatgctcgcctaatcgcctacaggctacaggtatctatcaattcctctccttcaccattcgattagttgtcatatttattgatccctcataggctcgtactagaaaatccatgctattgtgtttatttattaatccatgtattccatttaatttagcggttgtggccgctacagatccttgcctagctccagccactgcccattgatgtcagcaccatgacttcctcctcactgcctcaaagttcaggcgacgacggcgacacaagaaggtgagaactgagaacataattcccactccatatttactttggaatttggatctacctgtataatcttatatgattgtggatggcttaattgttgagtgactaacgctaacccaccggtgatcctcacaaagggacacctcgaacaagaactggctaccacatgctaccagtga

SEQ ID NO: 15506 - DNA, 449 bp, Zea Mays
aagaaattaggaacaggcattgcgatcccaggacgcgagtttcatggaatcgacatactagatgattattgcagggtagaagtgacgacggtcgtccaaggatctgaggacgacatgctagacatccctgggcccgaaggaatcgagacacttggacaagccatctaaattttcatcctttcgcctcgaagggatgtcgatttggttgatccaccaacgtcgtcgtcgtctcatccccaaccatctctgcctcctcaaactttagtacctttatatccatcatcacctccacaatcttcccatgctgctcctcatcctctttctaatccaccttctccgccacaagcatcaacatttaggacaccacctccttctccacagccatcaagggattcacgacaatcaaagaaatctaaattccctctaccaaaattggtgtccacattcga

SEQ ID NO: 15507 - DNA, 1274 bp, Zea Mays
gtgatcagagtcttaggaagtagaactctatagcaacacattagggaaaagcagctctcagtcaactgcgcatagcaccctgtccaacctgacaagaatgggctccacttgttgatttgaccaagtaaaacatcgaccatggagaggaacttctttaagggcaagatcattgataaagcgcctaaaacgccccatcatagctctgttgaaattattgttgttcttgtctgaggttttgtaaattaagttgaaatccccagcaacgacccaaggtccattgcagccctctctgacatttcttagctcctgcaaaaatgagatcttctcttcatccccttgaggaccatacacacaggttaaccaccaggtacctccttcctgcttatgaaactaaatggagacactatgattatcaactctgctcgcacctgtgtatctcaaatgattttccaagccaccaaaattcccccactggccccatccgaaggcaagaaaacatactcagtaaattcagaacccaaaacagagactagatctctaactgaatcttggcgagcatgagaattgagacctcgcacgttccaaatcagaattttggatggatccattaaaaaacacagattacagcactgaccagacatacaattgcatccagcgaacaacaacacccttactaaagggggactaactcaggggctctccacccaaacagggcagatagagcctccacctcactacgagtgagggagcgcttgccgagcatattcttccaaggcttcctaactaatcccctcattctcggcaataatatgcagggatctcatgactttcttggtagttctccctcctaggtcatgtaaattaaattccactccaacacccgcaacacgacgatttcttcttggcatgggagcagcaggtggggaaggtggaggatctgcatgcaaatcagttcgcggaacaagaagaatcccagaagattgcttggtgattccattgaaaaactcatgttttctagcttcaaagcttgctgcttcatgaggttggacttcagcagcaattctatgggcaggggcatcagcagtgcacataggcatagagttacccaaggactccgaatgaggcaggcaaaccatctctgtaatgttggcctcctcgacctgtatcacctgtccctcctgaatctgggcatgtttgcttttgaatctgcttctcgagtatactctccggggggcctcagcagcagatggaccgtcaggttggggcgaattcgc

SEQ ID NO: 15508 - DNA, 578 bp, Zea Mays
ggagcgtcgaagtcggcggtagtcgatagtgccccaaagataggtaaggatctgcttgatcacacccaagtgcagctatctagggtcatgcatataaaggtagacctactgaacggcgtaggcgacgttgggcctggtgaaggtcagatactgaagagcaccgataaggctccggtaggcggtgggttcactgacagaagcgcctttgctagtgagcttggcctgcatgtcgaccagggtcacacaaggcttgtaattgaccatgccagctcgttcaaggatgtccagagtgtactgtcactgctggatgaagaggccccctgagacgaggctcaaccacaatccctagaaaatggtgaagggggcccaaatccttcatggcgaactcatgctgaactacggtgatgatccgaaacaggagagccaaagaggagatgagcacaatgtcatcaacatagtcgctgccacactagtagatgaataaagatgtgtttgacttggccttgacaaagccaagagattgagatgtggttatcttcctccatccggtaccttttgatattgagatcactatggac

SEQ ID NO: 15509 - DNA, 934 bp, Zea Mays
atgtattgtatgtgcgactgcacccggacgtgtcttccgaccctgttgcaatgggagacagaccatcagggacagcaggtgaagaacctgatggggagttggacctttttaggtgtcctccttccatgaacctggctggcgatcggtctcccactgcaggaaatgatgaaaccaaggacaacgaaaactagacttgtatggtttagaaactatacctatgtaaaataagtaatgaggtcatgttgtacacttgattctgtatcattacattttggtaatgtaaaatgatggtgtcggcatgttatatttttcccaaatgtttctttgcctcagatgtcgtcacagactcatgcgcatgactgtgtggggacttcccgtggtcgggaagatactcctaatccgccacctataccaccaacactggtcgaggctatctctgcctggttaatgctactgcagataatacccacttcttacgtgagatggcgggtaatcagttccagcaacatggcggaagagctcctccacagggaccgcgtgaaaccacatacctggaattctctaagacgcgtcctccactctttgttaaagcagaagaccttcttgaagctgatgagtggataagggtaatggagcaaaagtttggattagtccgttgcacagaaatacataagtcgttatttgctacccaacaactgagaggccctaccagtacctggtggggaaatgttgtagcagttcaaccagccagacatcaggtcacttgggatgaatttaagctagcattccgtgaacactatgttccagagggggtgcttcacatgaaacaagaggagtttattcgactaaaacaaggagatactgtgatgcagtatctcaacaagtttaatcatttatccaaatatgctattgaccaagtaaacactgacctgaa

SEQ ID NO: 15510 - DNA, 624 bp, Zea Mays
tggttgcctcaatagcatctaaccaatcatcatttggctcgtcgaactgacttctgtagcggaaggtgtatttaagataaaccaaaccaccctggctggagccagcagcagtttccttcggcatctcccactcactcacaagaggccataccttggaagtaatgtgttcttgtaccaaatccctggaaccaatgtaagtacatacggtgttgaaagccattaggcacgcttgcacctcattcccaattgcaattgatggtcttctaatgccgaagcgcgaccatatgggacgttgaatgatgaccctcacatcctccctctaattcagatcattctttacagagaaccattgcttcatccaagagcctggccacttcttccgaaatgttggcacgagataattttcctcagagcagggcacgaagctataacatacgaagttgttatggtattgttcctttccggttgcctttgtctggtagtataactcatgaatattgcagaaacatctatcatccggctctagcccttgactcctcgtagtctatataaaacccccactttaataaaggcttcgggggtaagttgatgaagatatatttcgaatgtcttcagaacttcaac

SEQ ID NO: 15511 - DNA, 358 bp, Zea Mays
gttgaggtaagaaagattatgaccaggaaaagacttcatccaaaatgtttatgtcttgattcatctcgagattcgctttgactgttgtatccttccttgtcgaggttgatctcctcctttctttcggtcttggtgtctccatccgagctagggagatatagttaagatagctggggtatatgggtaggacaaaatcttatttatcaataggtttggatagatggattatgtaacctattgggagtgtatggctgagttgatctaaggcactaacttaggcccaaaacatgtttatagggtctaatctatttcaccagtattaactaacctatttatgtaactcactttagattagatc

SEQ ID NO: 15512 - DNA, 282 bp, Zea Mays
caggagttaatgccttcattgactccatgacagcgtctagcacgctagccattctcctcctcttgggagttgttgcgggagcctttgcaaccttcggcaattctgcttctgccggtgggctcaagatttctggcagcactattgctttttctagctctggctttttggccgcctcttctttggcttcggctggctcggctataggcaccttcggcaattcaatctgtcttgcctcggcaggggaagatgtcccttcaccaagcttcggcactgtgaccgtct

SEQ ID NO: 15513 - DNA, 515 bp, Zea Mays
aaggaatgagtcactggtgtggtgattcgtggccttcaccgtggcggcctcaccggcgacgaaccagtggcttacagtgactcactacgacgtggtgaaacattgaggcatgtagccaggctggataacggcgaacgccggtgatgccaacgcgactaaccatggcgggacacaacggcggtgagaacagtggccggagtttatctctagcgcgatatttcttaccgaggagcgcttatccgagttcggtcgggcgtgaatcgcaacgccggcacagatctaagcgtgagatcatcggcggcgatgtctctgagctggcggcccaatccggtcactgtaccatcgtgaagttcatccagtcggcctgacagaccaagttggggacgaattttctcctgatttcacatggcaactagaccaacattctgcagcaaagttgtagcctaatgatccagctacaaaacttacaatagcaaccatagacaaactctgactggattatagttgaattaaag

SEQ ID NO: 15514 - DNA, 473 bp, Zea Mays
cgtcgcaaattttccttcgcacgaggttgaattgggggaaaacacgcataattcatcggctacaagttgtcacgaccagtcacaacccctttatgggatgccgctagacacataccctgagcaaccacaacctcctacgcacatcagcaataaattagccgatctgcacatatccggaccgtctgcacgtgagcgcggatcatccgagccaacaacggctgggcccatttttactgagttaccaagacatgcgcctgagcaaccacgtaccacacaaaccctaaattacctagtcggaccgtccgcatacaccgacggatggtccacatacaacaatggacggtatgaccacgtggtcggacaatccgcgcataccgccagacgatccgcgtatccaaccggatgggcagaattttttgagcaggattgttacctgaatcctcatccgtcccagcaaaacttcccatcatatc

SEQ ID NO: 15515 - DNA, 465 bp, Zea Mays
ctcggtaacgctgacaggcggggccgagttggcgggatcgtctccctcccgtgatcctcgccaggttgttgcaagtgccgcgcgcaagcgatctcaacgaatctcgcgtgaccccgcataacgccgcttcaccgacacgtgggcccacgtgccagtccctgtcctccgtcttcctcgcgcgctccccgaacggactccgctttgtgcgaggcgattgcagggcggattccgcgccctggcgcgtggtatccggttggggccgcagctccttgggccataaatgacgaccgtcgtgaccccctcatctcatccacctgtgcccacatccgagcacaagcactgtagccgccatcgccgcaagctcggagaagggtgggccgccgccacgggcaattgctttgtgggtcgccgccgaccgcaccatcacagggagggactcagcatcgcgtcgatccgaggtaaacg

SEQ ID NO: 15516 - DNA, 660 bp, Zea Mays
accaccgctcttcattgaagcagaggaacccttagaagccgacgaatgggtgagagtgatggaatagaagtttgggttaattcgatgcacagagacgcaaaagcccatgttcgccgcacaacaagggcctaccagtaccaggtgggcaaatttctcagcaatctagcctgttggacatcagattacctaggaggagttcaagttggcattccgggagcattatgttccagagggagtacttaagatgaaactataagagtttatccggttaaggcaaggaggagatacgatgatgcaatatctcaacaaattcaaccacctctctcagtatgccattaaccaggtggatacagacttgaagaaaaagaattgttttatgagggggcttaatgacaggcttcagcggaaaaaggcaacatgcttggacctcacctacaataaggctgtcagtacagcactggcagtggaagccaaaaatgtgggacatggaaaatcaaaggggtttggaggtgaaaggtcaaatcaagggcctgaaaagagaaccaggttggtgatccgaccttttaatcaaaatcgttcttcgcctcgcccaccttcatatccattcaagcatcccgtctttattcgtcccactactgcccccactcttaccaatcagcc

SEQ ID NO: 15517 - DNA, 1055 bp, Zea Mays
tgataaagtagtggtggcgtgagatatttgtttgaggtgtgcgggtatatgccgtgatatggttatactcgcaacgagaaaagatgtacacattgggtaacacgacgcttaggtcgctgttgtataatcgaataaaggatgtattattgatttggagtcaaaatgtggggtactagtggtacgctaggcaggcggtgttccaaataaataaatcagtggatgtggtagtcgtcgtgcgtgatttatggttagtgagtagttgaattacaagttatgcgagaatcatgttagaaactaatgtgcggcgtgtaactgtgctcgggtggtaaaccataggtcggtaggtattattggtgtcgttggcaaatggggatgattcttgttgtgcgataaaattggaaaggcaaagaacatgggtagtgtgtcgatcaagttaaccgataggttccgtaaacacacttgtggtgcttttatgtgcatgataagatcgatgccttgtcgtcgtagtcttaggaaattttctgaaatgcgctagtgctctactgatgggttgaatgaacttgagatgtactacactagctgtatgtctcgcaggttatccaaaaatggcgaaaggtggtgtaagttgataattgggaaatggccacgtcattagccaactcatgttaagtaggagtcgatggcgtaagtgattgtgatatatatatgtggtgtctcggactgcgataataataggcaagccgacgtgtatgtcgtatggcgggctatgccattcctttggttaatcaacttgttagatggctttggttaagctcgtagttacgatgaattacttgttgtagtctaaatacgtatggttatgatcgcgggtaaaaagtagtagtgctcatgtgatgtctaatttaaaacgcaaattgttgagtgattatcgtgaagaatgcattgttaattggttgtagtaattttagtgcactaaatgacttgaataaaatttgcaagtcgacttgttggttctaattgattgtcttaactcgaataaatagtaaagcgttaga

SEQ ID NO: 15518 - DNA, 470 bp, Zea Mays
tcatgcggtgcatgtccggtgatcaccggagcacctgccacggtgagaggccacctgtgtcatgtgccagagtcctttcttcctctccggccacccgcactgtccgaccaaattgcgcaccaccgcctaagcctcctataaatagccgccaccactcgctccgttaggtaattgcgcaaccagtggagtcattcgagccttgaatcgttccccagagctcttgaatttcgaatttcccccaatctgctcaagaacactgcacagtttagcctcgccgcggccaacgcgattcaggtcagtccatgccttctgcttccccattttagtattctcgtgtgtctgcgatgctcgccgacccaaccaattgaactaggagtccaccaatcgtcgggaatgcgttcatccgaccgcatggtctacggtcactgcggctagagcaaaccaggtagcctctggtgaaattatgttag

SEQ ID NO: 15519 - DNA, 679 bp, Zea Mays
gtggctccaaggtggcatctgtacaagcaaaggctggccgctggcatggcagggatttagggagcgcaggcgtctcaggccctggttgcagacctcaatgcaagaatcccagcggtgacctgaataccaggaaggatagaacagtacgccataccgagtgtatgtccacgacaagctgaagggtgacatagggctcatgatgacgggagacgcctcgtttcacgcgatcgctccgatggactgatccgcgggacccacacacactatcacaaagacatcagcagcatactcgctacagggaccatatggcggatgaacaggatggagtgctataccacgggaacgacaacacacgaccctatggacgacgtcaggagaaccacgcatccagaggcagcgggccaagctctcttccagtagaatacaaattcctattgtaatgtcctcccttgatttataaaatggcatgacagtctcttttctacacacgagcacaccagttgtaacacgcccttagcaatactatgatcagcactacactagactagggcgcaagcctgaaccagtataacccaccgtctcaaatccattgcttgagtcctgacggctcaccattcggagtgagtccgcgctaacttctcctccgaacacaaatcttactgcccctggtttccgaaac

SEQ ID NO: 15520 - DNA, 957 bp, Zea Mays
ggggaaactattattttagttcaacccaaatctgaatttgatataaaacatgaatacatctgggtttgaggtgaacaacggacacgtttaattctagaccaattgccttacatgccatatttgctcaccaaattgtttgtgttgttggtctcacattgtacatgttaaatgggggtcttaattttttggttgaatgttcgctttttactaatcacagtattagagatcaattccatatttcagaggggattgtacattgttagttgcttacctagaaggatacgtctattggctaatagagtttgatcggtattttgtatagttttttactctgtgtattcttttggtaatgttgtccaaatttatttcaggttaactttgattatgatgctacgcttttgataagctggcgggcaacgagaatgcatctcattcaaaatcatgcttgttacctttcctcccctctgtgtattggcagaagaaaaacctactcttttgtacatatcaactgcccgttgttaaaatcttttgccagatcgcatggctacaaaatgtgttctaggtattggtgtggctaaagtattttggcaacccagaaatgcattttattccacaactcatttatatgttaccactgttttatttattggctattgcgacaaattacaactgatatgcctcccattctgtctgtggtgctttggtgctcaacacaagcacttgttttctttgcagggccacttgcaatgtgtgatatttcatttgcagttcctctagagtggtggcccatgtcttagttaattagttactggacctgttgtgtcatggacagctcatgcgtgctttgtaaatatcatgaactctttggacccaaccctgagatgcgatgttggggatgactgatagctgaccacatttgacctatcctttacaaacataagtttggcttgcctacga

SEQ ID NO: 15521 - DNA, 465 bp, Zea Mays
cgctttggcacacagctgctgaagggagaggctcaaatttggtggagaggcgtgcaggcagcgcactcctcctcactaggagtcctgtcttgggatgttttcatcaggcagtttgaaaggagattctacccggtcaccttcctggagaaaatgaagattgacttgtagtcctacaagcaggagaagaagtctgtcacagagtatgatgtgggcttcaacaagatggtccgctttgtccctcatgtggcttataatgagatggagaaggcgagccagttccgtcagggtctgaagccttctatcaggcttgctctgggagcctttccgttggtggacttccgtaccacggtggagcaggcactgggtgtggagatgcaacaccagtataccatggagtcgcagaagtcttcgggtgttgatcagcctcgtggccaggacgcgaggaggggcaacacgggaggtcca

SEQ ID NO: 15522 - DNA, 484 bp, Zea Mays
cgtggcgcacttaagagtacaatcgtggagccattgcgccggtgaacgccacgaattctttgcgccagtgctcttccccctctccgaccgccgcgcgtctccttcaattagccgccaccgctcatgaatcctataaattgagcgtgccatcagctccgctaggtattcaagcatccagcgcacccactcgtgtctcagattgttcaccagagagctccagtttgggatttcccccatatcggccaaagaacaccgtgtgagtgagctcgccgtggccaaagctctacaggtccgttcacccccactgtttcctcatgtcagtacccttatgtgcccttgatgcttctcgacccggccgattaagctagaacccataggatcatcgggaacacttcaagttgtccattgatcgcactttcatcatgggcagagagattaggggctagaatcttgaaattgatcgaggggaaatggttattagggg

SEQ ID NO: 15523 - DNA, 441 bp, Zea Mays
aacggttgggactagtagtgtcggaagatgtttttgacgaaggtgcacctgccgctgagactgaacaggttggtgctgaggaagatgaatctgaagatgattacagtgtcgtgccatctaaacccagccacctggagtttgggaggtccaccattaccggagatgatatgcctaagttgatgaagttaggctatttcagtgaggccaaaaaggagctaattcgctttggcggagaagaaattacttcaaaaccagaaaaggatgaggtggtagcctttaaaagcttcttcaaagcaggattaagatttcctttgaatgagatgattgctgatgttttgaagaagtttgggatttatcttcatcagttaactcataacgccatcattaggcttagcgtctacatatgggcgctccgaagccagggggtagaaccgtttgccg

SEQ ID NO: 15524 - DNA, 587 bp, Zea Mays
gccaggatcatcaccggaaggcgcttgaagggacaatatctggcaacgctcgctccatcggtgttccagcgctgcgggttgatgacattgtcatatcagcaagccagtccgacatggccaattccctgcgggcacatgttgatgcgcaagtggtggagtttgagtcgtccacttgggagtgtatcgatgccacgcgggtggcggctctagagtcggctacaacgtcatttgaaacatggtgaccttccctcgagcattttatgggtggcatttgttcaaccatcgacgacgctctacattccgatgtgtcccgggctgtcgcgtcttctggagcaagagcaacgggacttcttttgtccaggtgcctacgagtcgacggtgcatggaccatcggctgtcacaaacattgatgaccctttgagggcactgtgacttcacttaccgtcgggagggggcctaagtatgtctttactgagttgactcccgcacaatggtatgaacactgctcctactcctttctcatgttccacccgtttgtcgtgatcatgcatagacaattctgcatgacaacattgggggtcaatcac

SEQ ID NO: 15525 - DNA, 687 bp, Zea Mays
ctctggactaggcgcactaatacagagaagttcaggggtctcagtgtaagttttcctaagactcaaaattctctgcagcggaccgcgggttgatttgcactttggtcaggaactttttaacaaaaccgccatcacgaaagggtatcgtgaactcctagccgtccgatcaccagaatgcagttcggattagattgtgaaccggtatcccatctaggcccttggatcagagatccatggcacacgaaacgtccacgcgtttgactaaatcctatccacccgatcagttctgaacgccccggatttaatgaaccgaagcgctaaccacggttctaatcctatccgcctgtgatcgatccaacgacggtcgtgcatcggcaccttacccaccgcgccgagcaacggagccttgccccacggcgacggccatggccggagacggccatctcggtgcgcaacaccctaacccccaattagaacggtgctacacattgagaagggcaaggcgggtgacaaggaggtagtcttaccggcaagggtgtagtggtgggaacggtccacggcgagctgcaaatccgcggccgagtattgctccggcgagcaattcacacgcagtcgatgccccgcagtggaagatggtgccctccccacgctcgggcagtcaagacggtcctccccggcaaccctccg

SEQ ID NO: 15526 - DNA, 411 bp, Zea Mays
ccgtgatccaagagagaagagtaaagaaggtgcttgtggacggtggcagcaacatcaatgtcacattccccaggatgctccaagcccttgggatcccgactacagaccttattatgtcggacactgcattctttaacatcatcccatctgaaggagagttcccactgggccacctctacatgtcgatgaccttcagcaccccagaaactatcgaactgagtttctacgctatgaggtggtttggtttgagtgtggctacaataccatcatcgggaggccagggccggccaagttcaaggccatcccccactacccttatatgatgctcaagatgcccgggccctagggtgtcatcaccatccgagccaacttccaaggagcagcagagtgctaccgggggaccatccaaat

SEQ ID NO: 15527 - DNA, 839 bp, Zea Mays
gaggaattaaggataatgttgttcaattacagggagatgggtatcatcccgaaggttgagccactgtaatatatgatgcccctcgctgattgtatgtaactgtaatttgtacgatgtggctgcacgcctgcgttgatccggctgcacccatgggcgacttttgcgcggagtctctttaaataaaagacttcgattgacgcacttgctgtgctattccggctgcacccttaggcgacttttgcacggagagtcttttggaaaagacttcgattttgcgcacttattgtgctattccggctgcgcccttaagcgacttttgcacggagagtcttttggaaaagtcttcgattttgcgcacttattatgctattccggctgcacccttaggtgactttttcacggtgagtctttaggaaaagacttcgattttgcgcacttattgtgctattccggctgcacccttaggtgacttttgcgcggagtgtcgcacgtgagggtagtctgcgctgcctctcgcgcacacatatcacttgtacttcctggtgatgttgatatgcgtggttgggtgggtgctgggtatgggcgttgttgtatggttggtggtggtgatatgtgtgcgtgacaaccatttgattgtcggctggttgtgcccgagacattctgtctttggtggccttggtttctgggcaatcccttgttgggtgtgcgcagtcttcgccgtgagacaaatagtaaaatctgcgcggcggctgagcccggccccggccccggcctcacgtgccattgccttggccctgggggggatattcttgacgacgaggggcctcgccggtggggtg

SEQ ID NO: 15528 - DNA, 545 bp, Zea Mays
gcgccgtgtaaagaacctatagctaccttcaatactgagaacttcgagagaggcgacgggtgccgggagcggcgcccaactcatccccatatcagttgtcttacacgagcacccaatcgtacccagcatggcccggcgatgctcccgcgcagtggatttggttccttggtgagggctggtgggcaatcggcgttcaaccgcggcggaaatccctcaactctatgacagctcactcgtggttcctcccgttggttgatagcggaataggagaagagaagcgcacggttttatgggcgagattaatggccgagttggccggtccggagatcaagtgggatcccaacaacccagtgcccaggcggcaaattctgttgcgcctggagcttcacgcggcggagaagacggacctgggacctgtgggttatgggcccacctagcggtgattgaggaaggggcgagcggaagagcagagtggctggcgaggggaaaagccgagtccgcgcgggtggcgagaaacacggctgggatccgttcttgccgcgcgc

SEQ ID NO: 15529 - DNA, 421 bp, Zea Mays
ggagggcgatggcgaagcggagagtgagtgaattgtcgcgaagtggtaggcgttattgtagcgagttggagagaggtcgtcttcgcgtggatgggactgggaagcgagaaatgttgtcctcgccgattggggtgagtgtaggtgagggggagctgcgaaatctgttcgagggtgaggaactgaggataatgttgttcaactacaggagatgggtatcatcccgaaggttgagccaatgtaatatgtgatgccctcgctgtgtgtatgtaaccataattttgtgtgatgaagctgcgcgctttcgttgatcaggtcgctcctgtaggtgacttctgtacagagtcttttggaaaagacttcgattttgcgtacctattattccggctgcacccgtaggcgacttttgcgcggagtcttttgg

SEQ ID NO: 15530 - DNA, 784 bp, Zea Mays
gtggcggtggtgtactgtttgagtggcaggctggggactggagtgccgtgtgggggagccgagaggggaggctgaggctggtggcagttagggttacttcgcagtaatatatatgagcgacgggagcagctggcgcgacaacgcgagctctagcggcggtcctcctccgtccgtcgggacgacacgacccatgattgagcccaattttctagtctcagattaagtgcaggctcacctgcgaccatgtcgggtgggtattgtatggcttcttctccagcgtggccaccgccgaggcgaagggctgggcactggcgggtgtgggatgcaaggctgccgcgccctcggatggtcggatacagtcgttgtggcggcggcgaagttggtggccagcgcggtgcgaatgcggcggtgagagaccgggagagctaggtcgctaagcggcgtaggcggaggcggcggagtgagaggctggagggagcggactcaagaaagctcaatgggattcaatgaaaagttcgggtccgtgaaggggctgtgcacctgtgcctttttttttcttccacgtggcggcaccgtataaggcagaaatccgccgattgcggagaggccagcattcccgtgtaacttttaactagaagtaatacttgcctgctaaatggaacactattattagtgtttgaagtcaagtatagtcaatgtatcgaatctgaatcgtcttaaatgttgctcatccctcactttcatagtttaagagaggagacaggctacataaacctcagattcc

SEQ ID NO: 15531 - DNA, 427 bp, Zea Mays
ctccgaccaccgtacctgagctagtctcgattgcttcggatgggttcgccaaagattgtcatctcgcggtcttgcgccacatgcccaggcgccttaccatgtcgcggttagacgtgttaggcatatcgggtgatcctcggagggaccgccacggtgaaagctactaagcgcttgcgccagtaacccgtgttatctccggccgccgcgcgtcgtcatccaattcaccagccaccactcacaggctctataaattgagcgcactgcgagctccgtaggataattacgcatccatagcacccacgcttgcctcgaatcatcccctagaactctccaatttcccattctccccaattcggtttctgccgccgtgaatgcatcctcgccatggccagcttgctccaggttagttcaagcgctttggtcgttt

SEQ ID NO: 15532 - DNA, 445 bp, Zea Mays
gtggttgtggacaagctatccaagtatgctcattttatggttttgaaacaccctttcactgctctgacggtggctaaaatatttttggaccacgtatacagactgcatgggttgccgacagctatgatttcagatcgcgatcctatttttaccagtcgcttgtggcaagaacttttcaggctcactggtactcaattgtgccttagcagctcatatcatccgcagtcggacggacaaacagagagggtcaatcagtgtcttgaaacctatcttcgctgttttgttcactcctgtccacgccaatggcccatgtggttatcgcttgcggagttttggtacaacacctgccatcattcatctcttggcaagtctccatttgaagtgctttacggtcatttgccaacacaagtgggactggtcgctgctgaacaatgtgaagttccgg

SEQ ID NO: 15533 - DNA, 633 bp, Zea Mays
tttcaacatctatttcaaacaccacaaggtctacctccgaagaggatggtcgatcattcaattcctttactgccaggagctccagcatttcggctcaggccctatcgttacaccccgcagcaaaaggatgaaattgagagtcaaatccaagaaatgctaaccagcggcatcatccaacagagttcaagtccgtttgcttcgcctgttctgcttgttaagaagaaagacgacgaatggagattgtgcatggactatcaatggttgaatgcatatactgtgaagaatcgctttcccatgcctatcttcgatgaaatcaccgatgaactaaatggtgcccaggtattttctaagctggaccatagatcggggtatcaccagattcggatcaaagagggtgacgagtataaaacagcatttcagacgcaccatggacattacaaatataaggtcatgtccttcggcctgacgggagcacctgccacatttcaggaattcatgaacaaaatcttagcttcattgttccaaaaatgtgtcatggtttttcttgatgatgtcttggtttacagcaggagcctgaccgagcatgtggatcatctggaccaagtgttcaagctgttggatcagcatcaactg

SEQ ID NO: 15534 - DNA, 701 bp, Zea Mays
cacatattgacctcatatagatgctcattatggctgttgcatgcatgtaaacctggatttctatagaaaaagaccttgtgtgatgaaaatatgggttgcctacctcatacattttttatttttttatcaggcaacattgagcgcagttgctttcacttctgtttcttctagccgattcttaatccaattccccgaggaaagcaaaaagacagttagctaaaaataaatagttgcctacctactaagttctcgattttggttatccaaattctaatcctcctctgctgcagagaaagctcgtggacgggcaacgaaccagcggcgtttccatacgcggaagtaaatcttctcatatcttctacttcaaaatgtcttgcattgtattgcgttgcttgatgacgtgcaacagaggaacaagaggattaacattgtgttttcaaatgtttattacaccagccatcctcttcgttttcggattgcagtacgtgctacaatatcacatatctcgggtttatccgaagaggtaattgggctcttgccttgtcttgtactcaatttctacgccattgtgtccttacatgagattgttcggtgccataccacttcctataaccacaattcattcgtgtggtgtgcctgctacatgctgccttcccctatgcaccaacgcttttatcgatttggttcataaacgtctttta

SEQ ID NO: 15535 - DNA, 732 bp, Zea Mays
gggtattcgaaattcagagcgtccattactcggttcaaccttcgttttggtcgggtaccgaaggctgcagtcatcaattgatgttttttttggtgtaattccacaaaacttcattgcacactgtcttaatcatttccagccactcttggcaaggctccttgaactgtttctcaaatttaaaacgataaggcagtcgcacgagctcaagtgccttctttgttccttttagcttcggcatgctaaattcactcaaggttggagacgttctgttagccaaatattcttgaactagatctctagtgctgatctattcagccaccaccctgaactctgctacagcttgttggcatggcgaccccgacgtcatgcggcacagaggcctagtcagtgcgaagcttagagtcatcggacacataaccatttgcatcagcttctctctcttcttctcatcggccttgaaataaaaccattcactcttccagccggttggccacttggtacaaaaactgaggactggagccttcatatctttgcgatatgcaaaattatagcaaccaaaattttcatggagcccgtcttctctggccttcgtctagtaatgcagctcacgcactcagcaaaagcttcagcatttgggtccatcccttcgcttcgaagggcctagatgaagatgctgagcctaacgatggcgttaggggtcagctgatgaataaaaatctcaaaattatccaa

SEQ ID NO: 15536 - DNA, 772 bp, Zea Mays
ctcggcgggcactgaggacccggcttcggttttagcacgagccgtaacagtttcgacaacctttttcgcaggagcaggagtcaatgcccttgtcttctccatgacagcgtctagcacgctagcgattcttctccacttgggagttgttgcggagcctttgcacccttcggcaattcttcctctactggcgggctcaagattttggcagctttagttctggctctttgatcgccttctctttagtttcggcatcatgttctggcgtggctggaccggctacagtaaccttcggcaatttagttacgtcatccctagggatggtgggagtaggttgctctgcttcggcagcggaagatgtcccttcaccaagcttcagcactgtggccgtctcaatgtatctcggccggtgtgttaagaccttaatctttttgccctttggcacaacagagatggccgaagcgacagttttccttttctttccctgctttcgcgagggatagcaataatcagggtatacgaaaccattgacgtcaaaaactctattcaatgttttcttgcctcggccttcaaaggccgatgccattgcatcatctgtggcccttgtgtaggccccaagcaattcgtcacttgttgcctcaatactgcttaaccattcatcgtttggctcatcaaactcgcctctatatctgaaagtatattttaaatagaccaagccgccctgactagacccggcagcagcctccttcggcatctcccattcattcacaagcgg

SEQ ID NO: 15537 - DNA, 1181 bp, Zea Mays
ccacaaaccacgagacttaaatgatatagtcattcatacatttaaacgtaaggtattgaaaatgtaacatgtatataagaaccatacaaaagatttatcttgctcaatcaggaaggtgagatagtagtcatacaaaagagaaaacaggttattattttgttgatacctattgttaagacctgaaacagaatagaatgacattaaactttgaatggttattattgtattttttgcaagctcggcaccatgaccagtggcgagctaggcgccagcgcagcacagcgtcccatacctcagcgccataagtcacggcactgagccgtgttatctcgacgttgtggcttgagcaaagggtccaaaacgagaataagtcttccactgggccaaaagtaaactttttacgaaaaaagggtaaaattgcaacaacaaaaatgccatcgccgctagtccagtcttgttgtcttgtccatctgatggcaatggcatcacgctcttagcaacttcctgccacttcctgctaactatcgctttagtggcaaggtttactaacgttattcgccttcgtccttgtcgcctacagcgtacgaagctaggtcatccactcccgcgacaccgactagcatgtccgatcagcctcactgtgacatcacccgcttgcctccactgcctaacacgggtcacgaacccttgccctctcaaagggtcacctctgtggtggtgcagccgcctgcaccgcctccacgacctatataaggaacgaggcagttgcctcccctccactaatgggcgctgactcggttacagactggcattgtgcagcctattaactatcgagatctctctaccacgttgacatccacttcctagcaactatcgcaatgtgttggctaaccccaactaatgtgctactatgacagacaagtatcaggagttcatcaactccgacacctgacgcctcgtacctcgcaccatagcaccaacatcgtaatgggcaagtggatattcaaggacaagttccactctgatggctcccttgctgctagaaggctcgataggtttttcgagggttttctcagtagcacgacatcgactacgatgagactttcagtccagttgtcaagtcggcaccatctgtgctatacttaccatttcctccgcacggcagcggcccattcactaac

SEQ ID NO: 15538 - DNA, 696 bp, Zea Mays
actttcctacttaaataccaatttctatattcattctataattccctggaagctcggggtcaaaggtatgaaatccaaggcctacttgcaattgtttttggcttaagatggatggcaggttggtttcaattaaaccgagggtcgcttttgcaaatgctctcggcgaaggggtatccactcaccacaatcgtctgatcactgatcgacagcccagattagaccctgccaccactgcgcaggtacgtaataatagccgcaggatcatagatccatggtccctattctcccatatctaggcaaaacggttgtcaatccctatcgttcatctcggagcctacgattcggatcttacatagtccagacggtatatttcttttaatcccaatcgtttactcccaatccaacggctgtcagcaatcttccccaccactccgctcgccgacggcgctctacgcctctactggtgattggtgaacacgcagaccgcgacggcggcatttgacggaaagcgccaccagccctccctcacctcggcttgccccagccaccgcctcctagccaggacaaagactacggtggtgccgcgccccgtacctcgccctaatggctaatgacacctaccccgggccgtgcatacaacgatgacgaagggacgaaaggtgattccgaggtggttccttaccgactagtttgtcc

SEQ ID NO: 15539 - DNA, 313 bp, Zea Mays
tgcattattagtgtattgcatgtgccattctacttttgagaaagataaattacgttgatgttgtaacatgttgtgtcactattgtttaggtaatctaatatgctactgttttccgttgtctctggttcagtggactacagccctcttgctgtccctggctctagctaatccgccattgtttcagtcaccctaatctagcgtcgtcttttcgttgtgcatggctgtctcattacaagctaatgccaagcacatgctacatgggctgcgacttgcctatggtggatagtccaaatcatggcatcgcacagacaca

SEQ ID NO: 15540 - DNA, 353 bp, Zea Mays
agacttcatttctgggttacctttatcacatcattacaactgtgtcatggtggttgttgacaagctatcgaagtatgcccatttccttgctctggcacatcccttttcagcactatcggttgcaaaactgtacatgaaggagacttatagactgcatggtatgccatcttcgattatctctgaccgagacgccatctttacaagcaagttatggcaagaattgttcaaactatctggtaccaagttatgtctaagcagcgcgtaccatccgcagtcggatggccaaacggaaagagtcaatcagtgtttggaagcatatttgcattgcttcgtccattcttgcccccgacaat

SEQ ID NO: 15541 - DNA, 349 bp, Zea Mays
gtagttctctattttgtaaaccaagtctgtttgtgtttcaaagaggtgtggtgttcagatttgagcgctcagagaggtgtcttccatcttatactcgagcatcgcaagatctgggcgaggctggcgcgtagaatgggaagtactcgagcatcggaagatccgggcggggctggcgcgtagaatgggaagaatgagatggcagggtggtcctgcacttgcgatgggatgcgggccgatggtggtcctgtgcgctggatgacgacgaggggattgggttgtgattccttccatggcggcgaggcatggattgcatttgggcgcgaaggatatgggtggggcatccgcggtg

SEQ ID NO: 15542 - DNA, 513 bp, Zea Mays
cttcgtgccatccttcttctccacaaataacactggcgctgcccaaggcgaggtactcagtctaatataacctttctctcacaattcatcaatctgcttcttgagttccaccaactctggtccggacactcgataggctcttttggaaataggggcggtgcctggaataagctctatggcaaattcaaccttccttttaggtggcatacctggtaactcctcgggaaacacatctgggaaatctgatactacactgatagcctctgatggtttaatctcttcaatatgggcggtgacttggtgacaactccatttccttggtcctgacaagaccaactctactaacacttcttctcctgatagggatactaacttcaccgttctcttatcacaactaaggctggcttgatacttggttaaccaattcatccctaggatgacgtctatagttgtatcctggttactcataactatcaaatcggcggggaactctatcccccttatttgaacctt

SEQ ID NO: 15543 - DNA, 982 bp, Zea Mays
caatttcataattgtggttgcactataactgtagtttttcccctgtttggttgtggaaatctttatgcaggcttaaacaatgttcaaagtactagctagtacattgattaggcgatgtagatttacacaagctgataaacaaaaaaagtggagatattctcatctctttctaccagcaaggttcaagaaagcactaagcgttgagcgagcgttatggtggtgaaaaagcttaagcgtgattaatcgtgcttaagcatttttgttaaaaagagaaaaaaatacatgatattgggccaccctgcagcaacccttaacccccacctcctctcttcatgagtctgcagcccactaggcccacctgccaggaggctcaacgcaaaacccctcttccgtgatgacctagtactctgctacctccttccacgccccgcgccgccgccctgtgctctccgcctccctctcccgaagcctatcctcctccgtgccggacgctctccggctccctctcccgaagcctctcctccctcgtgcgatcttcacctctaccgcgaagccgctccgcctctctctcactaatctactgcctgcaaccatcgtaggtccgtccgctctctctctctctcgtcgatccgtcgatttgcttcctgctggattgaccccggaggtgttcctcctcttcctctccctcctcttctcccttaaacatgccggatgggcacaattaagcagggccagtgcttaattgcccgcttagtaggtaagcgatgcgttgaccctctgctcagcgcttaaccgcgcctaatcgcacgcctaatcgcgctttcttgaaccttgtctactagtactagaaacataagttctctactaaaacatggatgtgactgcatataacacaatgtaaggaaccaaacacaactgtatcagtgcacaatgattacataaatcaatttacaatatctctgataacaacgaatgaataatt

SEQ ID NO: 15544 - DNA, 833 bp, Zea Mays
accgtcgagctcctccgcggcagatctgggccgccgtctgcttactacaccatcgagaagctagcagtagagatctgggccaccatctgcttggtcatgaggtcctccacggcaggggcaggtgagcagcgtgtccacaggtcaccgcctatagatgctatgccgcctttctacgagcaccacactatctgaagacgaagaacacatgggttgcagaggatccacctccctgctccatgggctgcacccttttgtttgatccaaacgtacgtttgggccatgtttggtcacagatccatgctcatccttttattagaatggcccaattcaactctgccctaattagtggaaaacccaaaaaatccaaattgtttagcccatgggtttgaaggccctatgtgcccacgagttcccgctcgcctgatgtgcctcttcatgcaccccctcctgatatcaatgaatggcaccgagaggcatatgatgttccattcatgtctactgtggatgaagacgttgaggaagaattctttgatgatagagatcagtttgccccgcctccccatcagggtgatccgggcccctcatcttcttatcatccccccaggatccatcaggtagcactcctcctcctgctaaccccggggaggaaaactttgctgttaatcttcgtcttggttcttcgatccttctccatcttggtgatttgtgggtgtgtcttctcctgttttttggtgctcgctgccaaaaagggggagaagggttgttgggtagttgttgggttagtagcccaaggggctaaactacttatttatgtaatgaataatgatggcctg

SEQ ID NO: 15545 - DNA, 848 bp, Zea Mays
gcaggattgagaaagaatttgcttaggatttctataacaatattgtagctagatcttagagctaaaactttgctaaagggtgatgatcatgttactgcacaaaattgggagtaaacagtcctgcaaatcactctgtcaggtgactgaatgggctttcccatggtacagtaacctgaaatggatcagatcaagcgctcagctcacccgcgacgatctccaccgcgattcgtgtcatcggcgtctcgattcgtgctcggggtaagtggataacgtctcgggtagaaagatcatcaacgccgttgagctggacaccaatccggctagtcgccgtacctcccccttgttcaccaatcgctcgggtaggatctcaccgccgctgatccctcactgccgtccgccacgtgtccaaacactttaccacgtcgcggctaattgtgctacgcatgttcggtgatcaccggaggagcggccacggtaatagacacgttgcgcggccaccagtgactcacccagttcatacctatcgcaatccgccgcttaaattcgctgtactcgtgatcgatctctataaattaaagccaccataagctctgcaaggtcatcacacacccagccaccaagaatcactagcaatcgttcgtaagagagcttgaattttggttttcccctaaccaagtttccgccaccgcgaagaacacctcgtcgtggccagccacttccaggtttgttcatgccctctactaccttgtttcagcattagtatgcttccttgatgctcatccatccacccaattgagctagaccgccaccaatcaccgggaacgcattgttctgtgggttatccacac

SEQ ID NO: 15546 - DNA, 405 bp, Zea Mays
taagttgcacagataagaccgttcttctcactggccaccaaggaaagtcaatttcatgtaaggcttagccacccgcccaagatccaatggtgtttaatctagcagcagaaagcatatctgtagtagaagaattcatggatgtaatcccaggagaattgccaggaatgccgctagaaagagaagtggagttctaaattgacctaattcccggcaccacaccaattgcaaaaagaccatatcgcatggctcccaccgaattggcagaactaaaactccatatcgcagaacttcaacagaaagggtacattcgtcccagttcatctccttggggagcaccagtcctgttcgtcaccaaaaaggatggaagtatgaggatgcgtattgattaccgatccttgaacgaag

SEQ ID NO: 15547 - DNA, 514 bp, Zea Mays
gtcgcaccactgtagcctctttagtaaatgtgctttgattcaggcacagtgctattgactgtgggagcttcagactcctcccgaaggtcgcgttgctgttgagcatggtgttgcccttctagatgctgactgtgtgctagtggtggtggtggtggcaactaggcccaggaagcttgagaatggcttgccgaagcgatagaagccgtaggctgttggttgcccacataccccaggacataaggagaataacacgaagcagtgtggaggacttgcttcggctgactctaccgcgtttcagcttcagcaatttccttctgcttctgaatggtaacatggcatgtccttgttgtgttgactttgtcctcaccacaaaaaagacggtacagtttcctgggttggttgccaaaccttcctccacttaaacttcttcctcctctacccctcggagctggtggtctgaaagaagtcatgcttgaagactgagaattttgatgactatgcagagcattgctgg

SEQ ID NO: 15548 - DNA, 742 bp, Zea Mays
gtcgcccgccattcccgagctgtcgtgccccatcctcgccccgcatgtcgccatccttgccccgtcgtcaccctttcatccacacgctgcatgtcgcccttccatccatgtgccacatactttgtcaaggcagtctccgcgctgccgagagtcttccccacccgcaccgcgaggagtttgttgcggcgggttgctccaaccttgcagacgttgtcgcatccaatgggggctggatctccctagattggtcctccatcgacgatggttgtgccgcattcatcgggtgggggctaccctgactacccgcccaagacggagccctagacgaccaacgtgacgtcgcctccagtccacaccccttcggccatctgctcgccttctccgggcctccagatgttcgtgcactactagatccgttgctcatgccatccgcactaagcctgctccctcctgctctggccatctgctaccctccaccgccccacacggtgcacgacgtgctgctgcgttactgccagcctgttatcgtctccccaccctagcagcccctagccagcagtacctccacgccccctctgaaggtagcagtatcccccgcttgccccctccattcccctccacaacaaccaccgctggccggaggcgctcgtcgagttcaggtggtgtggtggatgtacgattcaattcttattagtgtttggattttcaatagtaaattgtggtgacaatcttttggaagatg

SEQ ID NO: 15549 - DNA, 305 bp, Zea Mays
aacttgaaatcacagaagaacccaccttgtcatccaagtgggttggagtagacaattctttgatggtctccaactttgaactgtgttgggacccaatattcggacctgctggattccccctcgagttctgaatgtgctggctcttccccacagactgctgcagcaaggaaacaatctgttccatggtactatctggaacaggccagacaacgctaccgttgccaattgatgttgtaattgcctgttggagcaagtccacagcgtttgatacttgaggagtcaccgaagaagcccctgaacctccc

SEQ ID NO: 15550 - DNA, 416 bp, Zea Mays
ccggaatgagctctggatgccggcaccaaccaagaaccctgaaggaggataagttcagacgagcagcagtgtcgggatgaagctccaatgtcgtgcagtgcgctcgcaacaaacttctagcagtttccacactccatgcgtgcaacgggactccctcgaagctcacagacacgaaggaaggcagggaaaccgcttcagcgtgtgcaagccttgaccacttgacgaacttgaaagacccagaaggtgagttgagaacagctccgttgttgaagagacgcaacgatgcttgctcattttgcatgataataacgaaatcttcaggcgccgaacggtggactgaaaaacttgcaggatcaagctcatactccgctgcaatttctgccgccaaaagctcagctgtcaccggcggccgcgaa

SEQ ID NO: 15551 - DNA, 771 bp, Zea Mays
cgtataattagaggcatgaagcggtagagcacacacataggcacaggtgaacggggattggtagcattccatccacgaacataagccacgtacgctagctcgtcgtagcggcggtgtgtagctctccgtatcctaacccacagtcacaagatgctcacctgcagccttactcctgcgttgccaaaaaatttccccttttaaaaatttaaatccgtacacgtgggttctacaagacagtagcctataaatgaaggtgtagaaaatctacgctgcaaaacatctaacttttcgtataagcagcttcttcaataatccatcaacgaccgttaggagcggtgacaatctagctgtctagaaaacgcgaaacttgcaagacccctccgtcgctcgctcccataaaagcctcaatccctccacccacccacctcgcctgcatatcactcgtgtgctcgcaaacaagcgtccgagttggaggcgtggcggcccgttttgcatgccgtagctctcccggtgttcctccccttccgaacccctcgccgcctctccgtctcgtgattcgaatcactgccccattgcgaacgagccgccacagctgctgccagcctcaaggaagggccccggttcccaatcccagacgggccagcggatcgatcgaacaggcggccggccactcgggatcgggtgggtgagtcgttccgcttccgaaaccagcctccctgcgtgatgggcctgcttgggtccgcctgttgccgcctcctcgtcgtcgctcac

SEQ ID NO: 15552 - DNA, 822 bp, Zea Mays
ttgctctcaaattaaaattcttcttctccttggcatcccatgtctcaacacctttttcccaaaggtctttgagctcatcaatcagaggctgcaaatatacatcaatattgtttcctggagagtttttaccgggtatcaacattgacaacatccagaaaggttgtttcaaacacaaccaaggtggcaagttgtaagggattaaaatggcatgccatatagtgtatgcaacattgaccatcccaaatggattgaaaccatcagatgcaagacccaatcgaatgttacgaggattagaagcaaaatatttgtatatgttatctacatgcttccatgccttagagtcagcagggtgcctcattttgttatcttggactaagccctccttgtgccaacgcatatattcagatgtggttggattcatatacaacctttgcaatcgaggaataactgggaaatatcttaggattttccatggggcacgcttgttggttgcctccttgtgatgcccagaaaccattggttgccatctagactcaccacatgttggacatgtatccatggctgcatattctttatgaaacaacaaacaatcattgacacatgcatgtatcttttggtagtaaaggccaaggtcatgaataaccttttgtactttatccaatgtgtccgaaacatagtggccttctgggagaacaagccggaacaactgaagtatggctgctaatgcacttttactaagaccaaacatgcatttaatctgaaagagccttactataaaagataccttagtgacctccttgcatcctggatacaattccttct

SEQ ID NO: 15553 - DNA, 644 bp, Zea Mays
caaagtctaggggttgaactgtaatttaaacaagtttattccgaggcctctagtataaaataggatggcaggttttttttaaaggaaggtggggtttattttgcaaagtggcggtcgaaggggtataggttattcctaaccgtccgatccataatcgatgatcctgattagatcgaagccccgtgaatcggtacgcagcgcgggccgaccgatccagatccgacgaccccgattgaatcgatccagtacattatgtggatcaattcgatgccgcccgatttcagatctacagacgagacgacattgcccctgagatcaaatctcaatcgccccttaacgatctaacgaccacacaccactccctcacaacaacacttacccacggtggcgctgaacagggtctgtggcggctcatgcgctacggtgagcgattccggctatcccagactccaatctctcctgccgaggccatgatcacccttcgaatgacgccatggagcccccagaccaacattcttgctctgaaagttgatgcaagagaggacccgcagcggcgcgtgaatccgcggcgccacattgctctggtgagccattgctggagcttcgaccgcccgttcaccgaattggtggtgggaatagtttcc

SEQ ID NO: 15554 - DNA, 625 bp, Zea Mays
gttggtttggtggtctatttatagctctaagtgaaggattatggggaggctacactagcgcaaaacaaaaatttcgaccccataaaaccaagaagtattgtggttataggtcatggaattaccactagacgcgcatgcagtagaagacgtctcaatgtagacgaacacgtcgagcagcgtcgtgcagtcgccggtgtccttcactttctcacgcggtttgtcctagtgctccagatgcagtacctccgaggtatccacacgtatagggaggaagtgtcacgtacatgctaggttcacgacaacggctaggcatgcagctgctcgttaactggtggcgaatagggtttacttaacgtgcccctgtccctcattatataggcattatggcaggcttctaactccgaagcccatcagtaaccctaaagccctatctaattttggatctaatccgagttaggcttctttccccttaagtgtgtgaccttataggttcacatatagacatggaccaagtactcttacttggcccaataattgatagcggcctctaacaagacatatcaactcctatgcgcatgtaaagatcatatcagacgaaccattgcaacattatgtacatgttgtt

SEQ ID NO: 15555 - DNA, 541 bp, Zea Mays
catcctcaacatcatccaaaagcaagcaagctactaccttcagatcctaagctactaccttcagatcttaaggtctttatttatgtttgtaataagtgcttagatgagaaggtcctaaaggtggagtctcctcagaaaaagactgcaccaaagaagctgtctcccaaaaagaagcagaaaaaacaaaagaaacaatcacgcaagattgagaccaggaggaatcagatagttctgaaatgcaaaaagaaaattggcaaaaagggtaagcgtggccggcccaggaagaacccaacggacctttcgaagaatgaaccatcaaagatccatgaaagtgaaccatcaaatgtttccaaaaataaaccagtgaaacgtatatcaaaacgattacatgataaatacatgaaaagtaactcaaatgtatccgagaatgcagctagctctagcaagaggaagaggactttttcacagtattcatactggttgaatggcctctgatggtcacaaaatccacatgatgaacgagcaagaagtttcaggaaag

SEQ ID NO: 15556 - DNA, 620 bp, Zea Mays
tccagctcaaagaagatgaatttcgggaattaactcaaggagggagatctgtcagtgaatacgtccacaagttcacagaattggcatgatatgtgcctgacgatgtcaacacggaagccaagaagatggctcgtttcttgaaagggctaagaccagaactcaagactatcctcgccagccaagacttcctcagcttctcacacctatcaaataaggccatacaagtggaaagggctagggaagaagaaaagggtcacctcaagaggaagttccaagtcctccgagctcagcagcaggacagacaccagagaattcgatcttttgggtttccacccaagggaccaagcttcaacaagccaggtggatccactctgtcacgtttcagacagcagggtcaaagttccctctaggccccctccgttgcaagcaaccaacctccagccaatgcctgttggcattgcggagaccccagtcattacaagaataattgtcctcagttgaagacatccatgcctacctactccaactcggtgaatggccccaagagtgccccagcacccgcctccaaggcaccatcctccaacagccagctaagcaagacccagtgtcatggaagggca

SEQ ID NO: 15557 - DNA, 1117 bp, Zea Mays
gctcctctcacggccaggaggctaccacttttcaagatgatcgtcaacgctccgtcggaggggactcggctgagcgccctacccccagcgacgaggaggttgcttgctggctcacggaagccatggaaattcacaaaggtgcggatggggctatcgtcacatatgtcttcctaatcctaggtttccctctaatgcgtcccgagccaggttttgtggagtttataagttttcctgattccactctatgttccctcttttttctcatcggtttcacaccatacgactccctccttccttgatctagccctcttctctagtgctgcgggacgaccccactcccctaccgaaaagtggggcggagaaggaggcggctcgcacaagtgtggagggataaaaaagatagggtggacaagaaggtgtggagggccgagtgtcagatgcgtagggaccacggtgctgagaccgacttgaccaatgaagatgagaacgacgacaatgatgcgagtgcgggctctaaccttggggccattccgaattcctcccttgccgtgtcaacagctgactccgtctcggtctttactagcagggcggcaagtgccttctcgatcatggaggagaccgacttcccagaactcctcgccctattctctgggccgatgactttggtggtactcattccctcacccactaagcccccgtccggctgaccacaaaggtctacttgtgtgggaagctcctcttccttgggcccaacaatggtcccaaccggcgcaccttcagggccgtccgttcttgcttccaaggcgggtggtgggaccggcgcgtcgcccgggtgccacggaggcgaggtgcctttcagagggcaacggttcatcgggggcgtggccagtcaggcgagggccttgccggtccatgccatctgattccattttcactgtaacttcctgatattttttgttttccccctaatggctcccctcagtctgttgccttcatgttgtgcgtgaggaaagtggtttccaagaggaggagaatgatgcttatcatcagcgaggaaagtggggcggttgcgctgtcgagttcctccttgccaatactcccgtagggtgccaccgcg

SEQ ID NO: 15558 - DNA, 365 bp, Zea Mays
cgaccacacggattagatctggcatcaattgaaccggtacacagatccaatcgttgatggataaatccgcgcacaggattcaatcactagtgatctaatcacgacattaggatcccaatgaaacgtttgggattcaacatacccacccaagcacttaagacagatcgacggatcaaaaatcgatgaccctagatcgatccaagccgctgatgtctagtgtcctaatcatgaccgttcgataaagaatcgacggccacagtgtatctctctcccatagcccgccggggcacgtcaggaaaccgtggcagcggtggcgccggagtactgccctggcccaaccttgcagctacaagcgtacacgacaa

SEQ ID NO: 15559 - DNA, 386 bp, Zea Mays
tttttggcgagttaattgatgaggtcctccgtgctgaggcgggtgacaacgaagatgcttatggtgtgcagaaaaccacttcaaaatcagatgatattcttccccagacagctggttagtcagtttaatgtctttacgtcaatataaaaaagttatgcgatcatttatcgatatcgttttgatgtcattattttaaacaatgtttttttgtttacatgacacgtacagaaggatgtacgtgtccgccccccaactgtacccgatatgtctactccagtttctcagcaggatacgcagtttacagacacacaggtacatgaattactgttaaggcaacaacatattcgtgtactattagaaagttgccccgatgaagctgatattga

SEQ ID NO: 15560 - DNA, 692 bp, Zea Mays
caggaggccaatctctcagggtaattgcagagaaagaagaagagtgtgaagaaaagctcaacggcggcgatgctaccgccaagataagcagtggtgaaggacccgtgtctcaaggtctcagtgaatctgggagactttgcaagccgaatgaagaaatgacgaggacactctccggccagggcaggagtgtgaggatcaacatcccggtcaccacgccttccaggactgtcaccgccatacgcgaactgctgttcggggacatgccgagccagtccaagaagactggcgcgcatggtaccgacggcagtgagaagctgagcatcaacaagaggaaggtgcaccaggcggagaagatgatcagaggtgctctggttgagctgtacaaaggactgggctacctcaagacgtaccggtatgcgtagttggttctgcctgcgacatggcttcttgtacttgaacgtacgtggatgcattactgacaaggagggcacgctcgttgcaggagcttgaacatgatggcctttgtgaagatcctcaagaaatttgacaaggtttctgctcctatctcttgctctcctttgatggtgccctatctcataagagcaacaatcctgatgacagaagctatatatttttccgtgtttcaggttacaggaaaggaagtgcagcaaatttacctcaaagcagtggag

SEQ ID NO: 15561 - DNA, 537 bp, Zea Mays
caccgccgtgcgctagacctcgttgcgacagtcggcaactcatgtcaatggtggtggaccgccagccaccggatgcctgcaggagcaggagtgccagtgtctggatctgggcggggaacgaacggggagaggaaagagtggagagtggctatcactggtcatcagcttccacatcatcaaccgaattacactcaccagtcatcatcttccaggtcttcaggctcctgcagttctagcagatgcagaccgccttcaagtatatagtttgtaccattatctatcacctcgacaggtttagcatccacatcaacccattcaacagtgcaatgaacttgttaccaagtaatgtcaatccactgccatcatagacaggtttagcatccacatcaacccattgattgttccaatcaaaatcatctaaacacaaacgataaaaagctacctgcccctttctcatgaccctttttgcaaacctcattgccatccttaagttgtacagaacacacgccagatcattcggcctcttgaatggcaaaa

SEQ ID NO: 15562 - DNA, 316 bp, Zea Mays
ctcaattaaccaattcacttatgtaacttgtggggagttagagatcttctttgtcccttgtattccttgcagaataggggtttttaggctttgctcaacttccatgacttgtttcaatatctgaccatcctcaggctgtagctccgaggtcatgtccttgacatgtcctttctttcttccatattaccaagcacattcgcagcctgattttcccttccaaaccctgctgaccatttatcgtattgctcaccccgctctcttgtttttgtttcgtagagttgttgtatgagctaaaacctatatttgcattcatgct

SEQ ID NO: 15563 - DNA, 942 bp, Zea Mays
attaactccgcggtccttcccctaatgaaacagtaaccgtggcggaggggcttaccggcggcgagattgctccggtgaagtggccgagggtgtaggagaggttgtgatggtcacgtcgatgtgcggatcgtctccggggatggtcggagtaggccggtccacgtgtgcaggcgggtgagttcgtcggtggcgagtatttcggcttgctcacagcgcgatagtccaattggttagcttggaaggctttaccaggtgacaaagaggtggtacatggaaggaatttgagaatggcgcagagacttacccgatccacattcgccggtgagcggaagaagtccgacgagggtgaatcggggtctctagtgaggctctgccgggtctgagggcttggggagcttcacgagtctctggcgaagctaactgaactgctggcgcagactggggatggctgctgtgagctggccacggtagtcgaagctcaggtggcttggcgggcggggcgcgtcgtgctcaatgcaaagtccagcgaactctggcttgggcgggactgtgagcgtgcgggggagtacggccgaggccctgtgtaacacctctggtgttactgttactaaaacttgagcataacatcatgagcattgacacatcatgtgtttgttacacctagaatgcattcactaggtaaaatctcaaacaagttgtgatgttatgaattgatgtgtgattaaccctaaggtagagtacttaacccaaaattgggcttatgagtgaaaatggagcccaaataagttaaaacctcaaaactcattagaaatgatcataagatatcatatttgatagactttactgacatcaaaaccctaaaatgctacaaaccctgaaaagacccctgaaaaaacctaaattggaaccctagggggctaagtgtaagttttgtgcactttt

SEQ ID NO: 15564 - DNA, 499 bp, Zea Mays
gcggagggactcgtcattcttgcgcctgacaggtttgaggtcccagggttgtgcaggcttgtcggggagtgataggaagttagcgacgaactggccgtagaagtcagcctagttgtcaacgcactggtgagggagatagcgaagccattagagcgcatcttgcctcagcataatcggaagatacaccgtcatgacggcctctatcacccatgcagcctgtgcagatgtagagtaaatgtccagccaaccacctggatcttgtttggcctcatacttgtcgacgttggagaccttgaaatttggtggccactagaccgcatgcacccggggggtgaaggctgagaccccaaacacgccctaggctctctgtttcttgccccgagcatggtcgcaatgacggtccagcggcagcgactaatgttgtagatcttgtagttgcactcggagcgattgatgtggctccgagctgttcgttaaggcagcagcggagtccactcgg

SEQ ID NO: 15565 - DNA, 541 bp, Zea Mays
cacatggcaaacatgcacacgcaccacaccagcccaagaacactaaacctggtcagcctccatagccaaaatatcatcctttgttcaacaaaacaaataggggagggagccgataaggcctccctcgtggacaggcttaaatggttccaatttgatattctctgctgaagtgaaatcactaatatcctttctgtccaaacttatctcaattccacaaacactagtacactgaaccagtcactactacttcactgcgcaactcagtccatcctgatatttttaggggagatggaagtctctaggccttctattatgcaccacatgcttatcttcatccaaatgcataagtgacaccagtagggaatatgtgatcttctttagtttactcagcccactctgaatccagttccctagtcctgctgccctattcatcaccctcatgttcagtccctgttaactcataattacatatggcaacagacccatctcccttaatacacattactctccacacatagttctattaacttgttttaatcac

SEQ ID NO: 15566 - DNA, 1018 bp, Zea Mays
cggtggagcagttgctccgacgagcttgtaccggccggaacacgcaaaggctaagcttcttacttggtcaaaatcgaattctacctcgggcaaccctaacccctctaccaattgcgaagttctagctcaaaatttctctgcccacggggatggcgcaaaccgaggacaacccgaggtgtttccagtgatctaacatgatctagttcaattggttgggtcgataagcatccatagcacacaagggtgctagaacgaggacaaggagggtatgaatggacatgaaaacggcggtccacgacatggtagctcacggtggcgtggagaactgaattgtggtggctaatcggaggcaagggcaggtgctctggcttcgtgacaacctaacagagctcactggggcattgatttatagtgtccattagcggtggcatccaatttgaaggaagtgtgctggcggccgaagagaggggaaatgtactgacgcgggtgatcgtggatggcaccgtggcaaggcctccggcgatggacgggcttgctacaagggttcactgcgacgtgttaaacctcccaggcacgtggcacacgatcggtaagcggccaacgccggtgaagatcattccggccggccgcagaccaagtgggtacggtgaacccaacagtgaccgagtccaagccaatctgggcactaagatcttttactcccctcagttatccactttgcgctgggcacgaatcgcggcagccggcgcgaatccaggcgggggggttaccggcggcgaggtgcactgcacctgagatattcttcagacactgtaccatcagaactccattcagagcacctgacagagcatattcaggggtgtttttcttcaatttttatgtgataacttgaccagccctctgtaacaaaattgttaatctataatccagctacaattcgactataggaaccctggccatttactgactggattaagttcaaatccactccaaagttcttcagtgttcactgtcagcc

SEQ ID NO: 15567 - DNA, 558 bp, Zea Mays
ctctctgctcaggcggaggcccgatgctgccacgtggcctattgcccgtgacgtaagccagcgggtgaagcctgacgtaaggtctctgggtcgcgctgcctctgcatttattgcggagaagacgcgccgcctgtctatcccactgatagatgatatgctccctcagcatttaatgtgtcctgtccaccccgctggcaggcggcgcccaggccatcctacagatggcatgcctgtccagtccattgtcaaacagtatgcccgtgctgcgaggtgcactgtgtccatcatcacttatatgttaccaggaaagcttcccctacacgccgatactacgcagatctcggatgtcagggcgcaagaagattgctccagcaacggacattagttgcccccaagtattacatccgttatgtttctgggcccacatgtcaaggctcaatacccttgtacgtgcccccttagctataaaaggggaggcatgcaacgatacaacacagactaacttaggcacacttagacccagctcaggctcacaagttcatacaagctcaatacatc

SEQ ID NO: 15568 - DNA, 690 bp, Zea Mays
cactcatagacggatctctttggccctacaagtattcacaagttaaaagacgctaaattgagttcatagatggatctctttgacaaactaagcacgtaccttacgtttgaaccaggaaataaaatcgggcaatccatttctcgcaccctttctaagaagagtgtcatattcctgtggagtggggtcccttgatcgacgccagaattcatgaagaaattgttccatgtatggcatcacctcttcaaggttggtcaatacatatagcatgatatgctgccactcttcatgtgtgagggtcttagtggtcgagccacttgcgcttccgagttggccttaaaatatgctaaggttcgattcattgccgccatcattgtaacgagggggtggattatgcatgctcggcagtttgtcaccataataagttgttgtaaagtttgacatctcctctagaatgtatgcctctgcaatggatgcctcgattttgcatttatttctacatttctttcgaatagtctttagacatctctcgattggatagcaccaacatccctgcacggcccccattcgtgcctcataggggagatgaagaatcaaatgctgcattggattgaagaagccgggtggaaatatcttctcaagcttacacagtaacacgggtgccaatctttccaagtctgcaaccacggtccg

SEQ ID NO: 15569 - DNA, 667 bp, Zea Mays
gcaatatatgtcaatcgtgtaggtagttaggtacctattgaaaattccagtaatgccaaaatttgattgttctgttcgtggaaatttatcattttttagaggtagatacatttcagttcacattgctagagctggtagggtttaaccgtaaaagtgagcaatctgcagaaaatgttagaaatgtatcagcacatgaactccagttttcttcctcaggaccaaaaaaatagactcacagggtatgaattatgatggttttgatacattttgcaggttatagaagtaattttgtgtgtgtgtttttacaatttgacttgcagcatgaacatgtaatgtccaaatgcctcaagagattgtgcacaagatcaagctgcatcataaggtctattcagattgtagagcatgcattttatgtagtggcaacgaatagaagcctaagaaaaaaagacatgctcaggttgttggcatgcatttatcacgaacaaatgctgaaggagttagggttaattttatggcaataactcccttttgcatttgttttattttggtcaagaaaaatgagcttttttcacatagccaattcaggtaaagatggtggcatatactccctctgtctcaaattaaaattcgttttaggtaattaatagatgcatagaatatgtgatgt

SEQ ID NO: 15570 - DNA, 528 bp, Zea Mays
caaacacatatgtagactatatatctctaatacacatccgcagtcacaacaggagggaattggatgcagagaatgggtcggaagccactaaacacctgtacatacagtccctttgtcatgatgtctgcaaatgatgtgcagaggggacatgtaacactcgaacctgccccaaagtaactttcttatggacgaagtggatgttaatctcagtgtgcttcgtgtgacgatgatgaaccaaattgttagtcatatagatagactgcactataactgtcgcaatagacaatggtcactgaaggaatcgagacatgaagcttctgaagcagctgtagcaaccaacaacactcgccaactgtatgtgcaacaattcaatacttagcctctgcacttagggatggcaattttacccgcgggttcgggctcggggtacgaatttgtacccgcgggtcttgcccgtacccgacccgtgataaaatcgggtcgggtacggatattttttgtcgcccgcgggttacccgtggatatccg

SEQ ID NO: 15571 - DNA, 320 bp, Zea Mays
gagagatgcagttggttccacttccaccccgcttctgaaatagtctgatggagacgttatagtaaacatcatgttgtagtagtaactttctgcagttggtctggcatttcaggttgttttcaacagtttacgtgagcgtagcggcacctcccgatccgaatcattacgctttacaagttcttttcctctcttttttcgttgcggcgtgcgtgcacatgaacatggtatttgactgcagccgtattaccatgtgaaattaaaataacctcggattgccgtgaaagtgacaagcgccatgaacggtgccatgccatggctcg

SEQ ID NO: 15572 - DNA, 321 bp, Zea Mays
ccgttcttcgggccttgttctacccaaatcaaagaatgtccgtagacccaagtgcacccatgaacctttccccagcctcaattcggtcatcctcgccgtcgtttgctcggaatgcgttcatcctcttacccatccgctcggtcaccgtggaccgattgattcgtagtcccaaccataaaattgatttgggggaaatgatccgtaggagttcaattgtgttcctgtcgcttgggaacttcagccgtcgcgtcatctggccggtctagctcgtcggagcacggctcccgcgcggttcgccgtcggggacttggtgtggtaaat

SEQ ID NO: 15573 - DNA, 315 bp, Zea Mays
agcactatacagaaggagcgcgacaggagtcctcatgaagtgcattctttcggctaccgggaagcaactactagatgagatccacgccgggcaatgcaggatacacgcagcatccaggactctagttgggaaggtcttcaggtctggtttctactggccaacaacaaagagtgatgcaaccgagctagtccagaggtgtgaagcttgccaatacttatcaaagcagcagcatttaccagcacagcaactgcagaccatacccgtaacatggccatttgcgtgctagggactggacatgattggacccttcaagaa

SEQ ID NO: 15574 - DNA, 432 bp, Zea Mays
cggggaggggtgcctcgtgaccgtgagcgtgtggcggagctcaagcactaggttaattcgaccgaaatttacttgggaggggagaacagggctcaccggagcggcggggaagtgcggcgacgctagctcgattggctcggggagaagcggaggagatggccagagctagtgtggagggaacggggctcgggcggctccttttataggcgcccatgagagggagagggatggaggggacggcgagcgccgacgagctcgccatgatggctggaatggagcaaacgacgattgggacggctcgggcaggcgaggggtgacgggatggctcgggtacagtggcggggtggtcgctgaggccggtgcgagccttaatggcgagccgacggggcgtgaggcgctcggcggtgaacgcgccggtgaggcatgggcggg

SEQ ID NO: 15575 - DNA, 563 bp, Zea Mays
gggaggctcgctcactcgctttgtctcgtacaagggtcggacgtaggttcccaacgcatgcaacacgtcttgcagcaggttggggaagtgccccgtctcgaacattgatgtgtaatgttcggtgacaggaccaaaccccatgaagtagtcctgctggacgtaggtggcctcctcgttgacttgttcctcttcatcctcgtcctcgtcgtcatcctcatcatcgtcgtccctagagtcgtctgggtcatggcctccgggtgcaggagcttgaacggttggtgcaggcgatgccgaggttgatgacctagctgcgaaggctagtgactctgccaacggggtgggtgtcggcagcagttcctccgagttgtcttccattatgactccatgctccactcgaatgcgagggagatccaccggaacttcctcaacttccactgggtagacaggaatttgccgtggtggaggggcgtagctagtgttaacccgggtggtttgaagggtacgaaccatctacaagagaaagtgtcaactcagttgaattttaaagaggtaaggttgataaa

SEQ ID NO: 15576 - DNA, 531 bp, Zea Mays
gtgttctgcagctgttgccggtaggtgtggctgagcgaccacagggtccgacgggcagcatcgctgaccgaggcagcgtaggtggacagtggcgtcagggactcgtgagcagacagagtcttgaatcccctgtcacctgcatccatcaccctgacgtggatgcgagtgatgtagtagcaagcccggggaggctcgctcactcgccttgtttcgtacagggggcagacgtaggtgcctagcgcatgcagcacttcttgcagcaggttggggaagtgccccgtctcgaacattgatgtgtaatgttcgacaacaggaccaaaccccatgaagttgtcctgctgggcgtagttagcttcctcattgacgtgttcgtcttctccatcgtcttcgtcgtcgtcatcctcgccatcgccgtctccggagtcgtcggggtcgtcgcctccaggtgcaggtgcttggaaggctggggcagacggtgatgacgttgatgacccagctgcgaaggccagggactctgccaacggggtgggc

SEQ ID NO: 15577 - DNA, 939 bp, Zea Mays
ggacggcgggaaagagcatctgcggctccattttcaagcccttttttgtagacaactttgtactggagccccaaaagtctagtgaagaccttctgctgccaaggggtgtgcaatttctgctcggacagatgggataggctatgatggtctgtataaatgaggaactcagcatgctggaggtatgaccgccactggtccacaaccatcaggatagcgaggtattccttttcatatgttgaaagacctttgttcttgatgcccaatgctttaatgataaagccgagtgggtgaccttgttggctgagtaccgcaccgattcctgagctggatgcatctgtctcgatggcaaagggcaatgaaaagttaggtagttgcaagacgggcgatgaggccaatgccttcttcagggtctgaaaggaattctcatggtctactgtccaaacaaaaagtgtgtgtttctttaaaagattagtgagtggtttggctatcactgcaaaatgtttcacgaacttacggtaataacctgccagccctagaaatccccttagctctttgcaattagttggtgtcggccaggaagacacttctgtaactttgttgggatcggttgcaactccttgtgctgaaatgacatgccctaggtaggcgatcttctgttgtgcaaaagaacatttgctcagcttaatttgccacttgtctgcgcggaggagatcgaaaaccaatgtcagatggtggatatgttcctcccatgatgcactgtaaaccaatatgtcatcaaaaaacaccagggcacatcggcgaaggagaggagcaagcgtgcgattcatcgctccctggaaggtggctggcgctccggacaacccaaaagccataacattgaactcgaagggccgtggtgggtttgaaaggctgttttgtggcgatctttcggtgccatgc

SEQ ID NO: 15578 - DNA, 436 bp, Zea Mays
gcaactccctggctgctgacaatgctcccggagccgccctcgatggagtccgggatgtctgcgcagttgtatgctgccgtgcagtgtgcacaacagtagtgcccggcactgggcggttgggaacctgtggcgtggaagaatcaacttcttcctccaccaggaaatccgttgaagtctcggcgcggtgctccacgatttgcaccatcatgctgagcgaggaaacaagcaaaaacctaatgcctagacccctacctgggtattcttcatcccgagatcttgccgagggtggcccggacctcacttagaggggtccaggtcccattcgggggaacgcggaggtcccgggtcatgtatgctggggtccgacactttctcacggtggtccaaatccactgacgatatcacggtatatgttacctactctggtcacttggcg

SEQ ID NO: 15579 - DNA, 618 bp, Zea Mays
ccccccttctttatgcaatacatcaatccaatagttccaagaaagaaaagaaggggtcatgttcctgaagatgaagtcattcctctgcttccaaatgcaccagactaccactgccagaatatccatgaagttgtgcccaaaggcaccccttgcagcttcgatcatagggaaaataatccaggttgtggcaccaatgaattccaatgtaattcgagcattctgtactgaaggggaaccaaaaaggtgatatgttgtttcttcatagccttgatcacagaaaacacagttgagatcgctgccctcattcagaaagcatttttttcttaagatgtttttcgagttgattctatcacagaaaaccaaccaaacgaaaacttttgctttcttacagaccttggaccgccagatccagatgaaaggagctgggggttggatggatctgaaagttagcttgtaaaacttggaggagctaaaacactcattacctcacggataaatccaaatgtccttgccagctctggtagcttgcatctgataaaaaatcccgcaaaacaagtggtattcctgagtagcctgagggagcggggagtgtgaaaattgtcttccaaagacattacc

SEQ ID NO: 15580 - DNA, 748 bp, Zea Mays
gacatgtttagacaacaacaagagaaggaagggctttagattaatgggaattgtattctcctcatctatacaaaattgttttagttcttcaattaaagggcgcatgcagatgtttagctttggccctagatgtcgaggcttagaatgacaatgcaagaaacatatattgctctttcatggccaacttaggtagtagattgtacgacatgataaacaccagccaacaatagtatgggttgtgtttgtattataagttgtgaaaccattagtctacaggccaagacgaacacttctatgattgtagcaaattatggatcaaagttgtccaatggcttccaagcatcaccatcagccaaatgcaccattatattgtcatcattttgattattgtgtctaccttccttaagccacttcatatgcatagtcgtttccttatagaggtactattatttaagcctaggagtgataggttggttgcaactttggtttccatcgactctccctcattatttaccactttgatatatctagacttttcataatgcctacaatgcttcatctcttcatcatctttctagaatagcatataattgtttagacatgcatcaatcttcacatatttcaatccaaggccagccaacaaccttttcataaaatacaatttctttggtagcttatgattaggcgggacgaccatgtccattagcttcataaagtcattgaaatgttatgctttgactttgtctcc

SEQ ID NO: 15581 - DNA, 468 bp, Zea Mays
gcagtgggggctcgccggaatgaggggtgcaggcacccctaggggcccaaggcggcggggatggctcggggaggtcagggaagtgcggggaaaatgaaggcgaagataacatcggggtaggggaaccaaagggtgtcggcccacgacgaggtggcttggtcgtggcgccactcaactctagtgagaaattgtgcggaacagagaacaaggaagggaaaaatagagggtaggggaggtttgttacctcaaggggaacctttgggacctctagacggcgtaaggggcacaacgacagctcaggtcgatggcagcgacacttgggctgggcggaggaggtcgggtgtgcgcgggtagggataatcaaaggggggatgaattgaggtgcattttgagatgcggtcgtcaaggcgaagcttaccgtggcaaatggcttggtggggcctcaacgtcggctgcagaacgagctcg

SEQ ID NO: 15582 - DNA, 500 bp, Zea Mays
cgaggaacgagcgaagctgaaggtccatatgacagtgtggtgacattgtaccttgatctggattcttgtttacaaattgctcctggctttctcacttctttggtagagcgttgataacgtgttaccgcaaactgtaaaggtatatatacaaggcctgttttaggtagtagtattgtatattgtgtttgtgggagggctatatgttcccacgtcattgacaatttgacatgcgggcaactgcaattagcaacaactaatctaacaatatctttatggaatattcttaacaattctgggccagggcctataccaataggtggacgctgactcgtctgaggtggttcgtcggtgctcgggcgcaccagagcgacttgtgtttaaaagggacgtggcaatgcatggcgaggccaccaggaccaggcgacgcgacgcgaagggttgtggcattgacttggccacaaccgtgacaataatcttttctttccatcgtgcgcatggtg

SEQ ID NO: 15583 - DNA, 365 bp, Zea Mays
gggggccaaatcagctgagcgaagatgtggtagagatagtgagcatacggtagctatcgccaggcatgtagaccatccagtacggtgtcctcgatctcacagatgaggaaatccacaacatcaaactctaagtgagaaaccagggcaccaaggagccagagctggatatgagtggcagcctccctgtaacccatccatggcagaagcatccgtctcatgagctgatataaaaacttggccgctgtagtgaagtctgccggagaacgtcgcgacccatctgagaagggcggtcggaacaaagccgcgacgtgagctgtaccaggagcagctccgccatgagggcgacaaggaggatcagaggtgcc

SEQ ID NO: 15584 - DNA, 457 bp, Zea Mays
tcatcgttggtgtaggtcagagtaggttgaaaatgtaaaattatgcgacatgttattggtgtttgaagaagagatgtgcaaataatcagtttggtgtttcactcgtctagtcgataaatgttgttataaataattgcgctaaaacttggtcataagagtgcagtgggcacatggtgtaggttggatgtgataagtagattggaagtgtgggtttgttgagcactgtattgttgaaagggtatatcgaagtgcatggtagtggtaattgcatcaagttaatcggtagtgtctcgagtacacgccgccacatggttgtatgcgagacggggaaatataaggtgtgctcgacacgaaagttcggtcggtgtaggtagaaattgtcttggcttaattagagaggtgatgtcatgccgtaagtagtcatcacttcctctacaattataagtcgagtctatac

SEQ ID NO: 15585 - DNA, 427 bp, Zea Mays
gggttttcgaggggtcttttcagggtttttggcactttttagggtttggatgccactcaagtccattaaatgtgatatcttatgatcatttctaatgagttttgaagttttctcatgcttgggctttattgtcactcctaagcctagtttagggttaagtaccctaccctagggtttcacacctaacaagtcacaccaatacatcttatctgaaatttttgcctagtgaatgcactctaagtgtaacaaacacatgatatgctaatgctcatgatgttatgctcatgttttagtgacagtaacaccagggttgttacaccaaccctcctgttcaacacggcagtccgggccacagaatgcgaccctctctagaagatattgaggccttcattactccataccgaaatctccctgaagaagaaagaca

SEQ ID NO: 15586 - DNA, 448 bp, Zea Mays
gctgattcacccacggcttcgttcctataagaaccacccgatcccccatcgtcgatcacatgcatcggcaccctctcccgtgttctccttccttctgcccacgctcaccgtcaccaccgaaccgccattgctcgtggccgagcacccttggcgcttctccgcccacgccaaggctgttgtggtgatacccaaactcactgctggttctccacgtcttccctggctcggtccagccccacgtcattgcttcgacctcacctgagccctgccgaccatcgttccttgtcgccagccgtcctcactatctcaaccccctcagtaaggcatcagtcgcattcgactttatccctagctgctacttgagccatccccgatcaattcagcctctcggagtgctgtatcgaccaaatccggcgagtcaccggccgtgcgccatcgtgcactgtgc

SEQ ID NO: 15587 - DNA, 1589 bp, Zea Mays
ggaaaaaccaaattacctggaggttggagaagaacgaaggaactcccaagtcgtgggaaatcagttgatggctcgatgaaggatcaacacccggagcaacccacaatgcatcagtggggaccaagtcagtatcaacagcagaaatcaaaactctgtcatcaggaacgctggcctctaaggtgacttcatgacctgaagcttgagctgctgccatgcaaccagaatgcggaggagaagaccctacgtgaacatccatggaagtgtgagagggagaaccaactcggacaccctcgggggctgcgtcatagctcgcgctacccatccgagccggattatccccggcgacaccctcgggggctgggtaagcgctagcgccatccttgagggccgagctctctgtaacagccacctctaaggctgaaggaccttcacccacttccatgggagcagaacaatccagaccagcctcctgacccttaagaccgtgctccaaggtcgatgaggcacgagatgccgctcgggataactccagcccggcatcgggcacatcagcacaaatatccatcatcccaccatctgtcagctccgacaacagatcctctgggaccatatcttcgagagtctgatcaaaatttgccagagacaattcttgtagaccaacgagagcagacaaagctggagaagaaacaccactactttccccgctggctatgtagcgccggttgttcttccgaattagagggacttcattctcctcttcctcatcttcatcaataatgcggacggtacacccattgggatcagctgtggtcagattacacccactgggttcagcatcatcaaggtcacacccattgggatcagcatcagtcgggtcacacccattgggattagcttcagcaaaaactggcactggcacttcctcagcagcaggagcagaaggaccggcatcctgatccaagcatgacactcggcgaagacgtctctttttctttttcttccccccagcaggagaagttggttgattggctcggcgaggacgcttcgggcgaacactatcagacctctgaatatccaaagctttgccggcctctgggatgggtgctacagccagtgtttcagcaggggctgcatcagaggaatcttcagccaacatatccagcatggcacttatctctgcatcacttggattcaaaggtacctcgaaatgaacctgcctctcgttgttagggatttcaccaagtgaggcaaccaaagcactaacctcttcgggagagggtcgcactctaaggcccaaaccgctatcaccagaacgaggatttgacacaaaactggtaaaggccttggaaggaggcagattccaggccgagtatgcaacaagagtgccgatgttcgacaccttgcctctgagtatcatctcgagccggctcaccaaatccacagcaggaatccttctgttggtaacccgggttgaatcagcgaggccttgatacagataagctgggtatcctttgtcttttagtggctgaatgttcttgaaaatgaaatcggtgaccacagcttctgcagtgagacccctctctttcaac

SEQ ID NO: 15588 - DNA, 703 bp, Zea Mays
actgaatcgggtgatggatgccctaggctttgagtaccctgactatgaaaaacttgaaaaagccggaggattgaagagaaaaaggttgtaactgtgttgacaaggcaagcgcagaggtgtgttgaagcaggcaagaagaaaaggttgacaaagaagccaaagctgacaccagagccttcgacaccaaagaaaagaaaggctatatcttctcaccacggagaagaagagggaccttctccgccaaagcatttagaaaagaccccttcggtagcttccattggcgtgacataaattctcgaggtaatgactgcacccttacctttcccaatgctaagtcctctaggatcagatctaacaagcttattacagccatagaagaaaaatgttgagggaagtaccgaaacagaggcagataaggatcctttggcacccagctgagggaacactcagaagaagcgtcggatgatgaatgtgatgagggctatccttgacacccctcctccagcaattcgaaaggaggttactcctgctatagctgacgaagtccctaacaagctgaaaatagtggtggtccccttggtacaaccatgtcagaaatcgatagacttattactaacgttgcacctgggaaaagtactggggggcaattgctgcagagacttcagcatcaaaggaaaagagaaccgaggaagcctcttcggaa

SEQ ID NO: 15589 - DNA, 912 bp, Zea Mays
gtggaaaccctccgacatgaggggcaccccaagggaagtcgtcgagcactctctatgggtaaaccctaggtccagacctgtaaagcagtggttgtgctgttttgacaagaaaaacacagggccatcggggaacaggtcgacaagctcctcacatccagattcatcagagagatacaccaccctgagtggttagccaacctggtgatgatccagaaaaacagtggggaatggaggttgtgcgtcgattacaccagcctgaacaaggcgtgcctaaatggtccatttccctcccgcgcatcgaccaggtggtcgattccaccttaggctgcaaggtactgagcttcctcgacgcttagtcatgctttcaccagatcatgaaaaaggaatccgaccaaatggccacctccttcatcacacctttaggctcatactgttacgtgacaatgttgttcggtctgaagaacatgggagaaacataccagcggtgcatgtttaaatgctttggcgacctcatcggaagggtcatggaagcgtatgccaatgacatcatggtcaagaccaggcggtcggagggcctaagtagatgttcaacatgctgaaagctaatggcatcaagctaaatcccgagtaatgcgtcttcagtgtcctagggggcatgttgcttggctttctactctctaagcgaggaatcaagacaaaacctgagaaggtcacaaccatctcaaacatcggacccatataggaacttcaaggagttcaacgagacgcgggattcctggcctccctccgccgcttcatttcacgcctctaagagcgcgaactaccccttacaagctgctatggaagaccaaccacttcgaatggatggcgaagcagcaggaggccctcgacgaccttaagagtccattgacc

SEQ ID NO: 15590 - DNA, 421 bp, Zea Mays
caaaattcagagccaccgctctcggaggctataaattcagtgcatcattcgctctgctaggttgttacgaagctagagcaccagccctcgcctccgattagccaccgtagcgccccaattccgttcttcccccaaatcagtcaaaatcgccgccgttagcatcccatcgtggtcaaccacctccaggtccgttctcgccctcctggtttgtggcactgttgtgtgcatgtgatacttgtcggcttggacaaattggctatatcacgctagaacatcgagaacacgtcgggaaggtcgctagctccgcggtgtacgtggaccaaactctagaatggtgtttaggttaaattagtggctcccagtggatcgccgaggttagaattaggtgtagaccgagttaggacattgattgttgcgtatt

SEQ ID NO: 15591 - DNA, 377 bp, Zea Mays
cgatccggtcttcacatcaacattctggcgcgagctcatgcgcctgacgaagaccaagctccacatgactacgacattccaccctcagtcggatggacagtccgaggcggctaaccgggtcatcattatgtatctccgctgccttactggggacaggccacgacaatggctgcgttggcttccgtgggcggagttcatcttcaatacggcgtaccaaacatccctgcacgacacaccattccgtgtcgtctacggtcgcgatccaccgtcaatccgatcgtacgagccaggcgacacgagggttgctgctgtcgcccggagcatagcagagcgcgacgagttcctcgccgacattcgctctcggctagagcaggcgc

SEQ ID NO: 15592 - DNA, 344 bp, Zea Mays
ttcctaccagatacgtcacaaataaggctgcggtttctgatgccgaagacaattgtccaccaaaatacagcaagagccattcatttaaattggacaggcatggtcgtcctggttctacaactcggaaagactgtccagaactaagtgaacaaatggagggattgtcagtccaagtcaccaagaatgttaatgatgaactgatacatgagaagtatccaaaagttacaacgtctcctgcacctactccgagaagagcttcatcgacaccaagacgacgactagaagcttcaaagacatttcatgctagaacagcacataaggaggtatgaagtacctgaccattt

SEQ ID NO: 15593 - DNA, 570 bp, Zea Mays
cagaggacaccccatcaacggcaaagggaggctcgacaatccaaagctctcttgaagcagtcaccaaggacgtgtccaaacaccaagcagaacaacggtaaacagccacatcctttagctccaaggtgtctggatgaacctgatgaacactagcaaagggactaagcaattgttccacaattttggtttcccaagcatggatggggataccctgaagctctatgtccaacaaggtaggtaacacagcacccctagagttcagaaaacgggaccatttcctgcaggtgatagtgaatgtggccgccctgagaaaaggccaattgcccacaagcatctccaccatgtcacagctaggcagaaataggatgaagcttgactcggaatactgtcgaattatcaaggacctctcttccaactccagcctaggagcaattaactcagcaatctcttcaactgggactctctcacgatcgctgataaaagtaatcaccactgccttctgaagatcatcctctgctctggtcatctgctgagtccgtcgcaagatgcaaggtttatcaccttcaacag

SEQ ID NO: 15594 - DNA, 382 bp, Zea Mays
gaacggttgaagtgcatgctcaatatcatacacgtatttacccaaacgtgtttgttaaaatccttgaacatcgatctcctcgctcaccataggttctactttttatcttaaggatggtgcgtcggaggaacccatcagttgttgaatccaactccgatgagccaacaagtgatgatgatggtggcaaggatgatgagattgacctcccctctaccaactctcccattatccgagggttggtactccaccgggcggaggctcgtcgatctgcgaatgagcctatcacagattttactgccagcggagggtccgctcttctccaggacatccgattccagaaccctacattgcgtattcgtgatgctaggatcgatggtaatcg

SEQ ID NO: 15595 - DNA, 554 bp, Zea Mays
gatttggagagcggtttacgggtaaagaaggggggtcgtgcccacgtcttaaggattggagagtccacgcagcgagagagaggaaagcggaatggtggttaaatccacccgccgaggtgaacgcaaggtcggggcgctcgcggtattctcgagaggttgaagacgagttccacgcgggacaacactgaccaatgggtcccacatcgcggtgacctgccgtgcgcctgcccacggaggtccaccggccagccaagacacgcgcgcacaacggataccgacatgtgggcccgcctgtccggtccggctgaggagcagcgcgcgcgaggcaacaatagtcgggccgcgcggtgtggtttctggctgctaggccgaattgaggttccgaagcccatttaggctaggttgattttattcttttcttttctattctttattctcttttctatacttccaagttcaatttgaattcaaacataaattcaagctcgtgctacattaatcccctttacatttgtgaagttaaaaataccagttttaaaaatataattatatta

SEQ ID NO: 15596 - DNA, 473 bp, Zea Mays
gtttggccgccatgggcaggggcgctccccagctcggctctgttggggggggagacgatcgctcagccattggatggccacggtacgggtgagattaggatgtgttgacccatttagatcccaaccctcggatcttaatcggtcggatcagacgaatctccacgattttaaatctgggccgcttgttccggatcatgcgattggaaatcgggcaggctaggttctaatctgagacgcgcatcgttgatctaacggtcagggtttctggatacccctacggctggtggttttataaaagagaccccatgtaatatagtaatcaacccgcggtcccaccaagtcttagaactatcgcagctgggcccggaagtttgcgtgtgacccctcggacttctctggaattgtggccgccgtcctcgggtttgagaatttcagaaaaataaaatctaaaaggatttttatgacaaaaataa

SEQ ID NO: 15597 - DNA, 664 bp, Zea Mays
gcacctcaagaggaaattccaagttctccgagctcaacagcaagaacgtcaccagagagctcgaccctttgggcttccacccaggggaccaagcttcaataaaccatctggacccaatccatcgcgctacagtcagcagagtcagagctcccttcaggcacccttcgttgcaagcaaccaaccgccagcaaatgcctattggcactgcggagaccccagtcacttcaagaataactgccctcagttgaaggcacccggaccgacctactccaactcggtgaatggccctaagattccctcggcacctacctccaaggcacctccttccaacagccagcagagcaggactcaatactagggcagagcacgagtcaaccatgtcgacgctcaagaagcccagcaagccccgggagtagtgctcggtgagttccttgttgaatttactcccgctactgtgctttttgattcaggagcatcccattcctttatagccactaagtttgtgaaaaagcatggcatcccctctacacccctagctatccctttggtcacccgaaccccgggatcagacctcctatgccaactcaggtgctcccaagtcagaattctcttaagtggggtagtgttcctggcagacttaaccgtcttgccatcccaagggatt

SEQ ID NO: 15598 - DNA, 646 bp, Zea Mays
cacaaaggttgggataacaagtgcaaccaaaaacacggagatgctcatatgaaggatgtttaccaaataaatagaagtgaggtgtggaatagttgagggttttggtgggtaatctttatgagataggtggcagtgccgagagctgcggcccaaaaggcggggggaacactagcatggaaaagaagggaactaacgacattgtttatggatcggataatgcgttcgactttgccattctgggcggaggtgtaggggcatgacatacgaaggtgaatgtcgtgcgaggaaaaaaatgtgccggcgcgtaggttgtcgaactcatggccgttgtcgcactgaataccctggatggtgatcccaaactgggtgcgaacataggcaaagaaagtagcgagggtggaaaaggtgtcggatttgaggcgcaaaaggaatgtccacaaaaaatgggagtaataatctaaaatggcaagatagtatttatgatcagagacactagtcaaaggggaggtccacaaatcacaatgtataactgaaaaatttagtagccctggaggggtggatgtatgaaaagggagacatacatgatgtactaattgacaagcatgacataaaggagcagttgcactcttattccaagaaatgaccg

SEQ ID NO: 15599 - DNA, 779 bp, Zea Mays
ggagcagatatttattcttgattgtcacttgattcaaagcgcgataatccacacataaccgcttgcttttatccttcttctcaacaaacaataccggggaagcccatggagaactgataggcctaatgaaacccttagcatgtagatcatccaattaccacttcaattcaacctgctcctttggggccattcgatacggagccttatgaataggctgtgtacccggaatcagcttaatctcaaaagctgcatcacgctccggaggaatgcctggaagctctgccggaaacacgtcagcaaagtcacacaccaccctcatgtcctgcacccgcaaggcagcctaaccctccaccaccatggagaaaaagattcccaacttccttgactggcgatctggaagcaattgcgcccacaaggataacgtgaactttggggaacatcccaagaataccacctccctacccaacggcgactgcaataacattgtcttccataaacaggatataactgcgcgatactgggataaccaatccatacccaagataacatcgaatgcccctaaggaaatcacaaccagattggccgaaaagacctcatcagcaagaatgacggaacacccctgacaaattgaaaagctactaatggagccattagcagaactaaccaaaattgggtgacccaacctctacaccgaaagaccagcccgcgacacaaaatcctccgaaacaaacaaatagctagcgccagagttaaaaagagcatgggccacaaacgaatca

SEQ ID NO: 15600 - DNA, 574 bp, Zea Mays
gtgacggggcacaatacttcctcaaccctggtggctacaaccatgatgcttcggtccatccccgagcctaacgaactagaggcgaaggcgatataccgaaacctctgcaacctagtggagaaggctacggtatagcaggctgagatcgatcggcaagctcccatcggcgcggatagctacaacacgcgcacgacctcgtcttagagcagggggcacaaccctcccagtccgcaaaatatagcatccccgcgaagaaccatatcggggagatccgcaacgctcgacacctcctcaacaaccaccgctggaagtaggaggaggttgagcaggcccacgagcgaagccctatccctcccgggccagggccacgtgccttcgagcgcgtgatccacaagcacagttccctgtgaaggtgagggcgtcaaagaatatttccaagtacgacgggtccatgaatccgggcgtatggttagaagattaccgcctctcctatcgcatggcgtggatcaaagatgaccacctcatcatccagttcctccccatccaccttgtggaggggcaaggacctagctcg

SEQ ID NO: 15601 - DNA, 353 bp, Zea Mays
tgatgtgttgaagtacatgtggccttgtgcatgggcatgtacagatcgtaggtttgatacactaatggagaaaattgcagcagctagtgctaaagcggttccctttttaaataagcatcacaaactcaaatggagcagatccaaattctccaaagaatgcaaggttgattatgtgaacaacaacatctcataatgcttcaacaattggattaaagattacaaagaccttccggttgctgaattgatggataagattagggagaagatcacggagaagctttacacaaggcaggagatatccaacagaatggaagggcgtatcctagcaagtgtgttgcatgagttgaacatga

SEQ ID NO: 15602 - DNA, 446 bp, Zea Mays
gagcaatctttttatgcatattagcgtctgtgcatgcatgcatgcgaatctctgcggccactgcgcgtaagactagtgggatatatttttttctgccatcgccactcgtcagtaggcagcaaggcctctgcggttgtgggctgtgcccatgactccaggccaacatgtaattatatcgccgtgggtaacgaggtgagcgccggcgacgccgcggagatgctgctcgcctgctccgtatcatcctggctgctggccgagtgaggaggcacgggcgtgcatagaacaaagccacacttcgaatgtcgacgtgcgccgccctgacacagagcgcaaggagtccatcctcgctcccgtgtacgccatctatcttgtggtctgatggcacatcgcgggtactagagtccaccatgcgacaaccgtcgatgttttcttcatcgtgaacaaag

SEQ ID NO: 15603 - DNA, 555 bp, Zea Mays
aaccggtatctgtgttctgatccgagacgttggtttgagatcggacggtgcccgatcgatgaccgccctaactctctctcgtatccttctcacggccaacgcctgcggcgaagcaagtttccccacgacgacgccattgccacccgcacccgaaactaccctccaacgtgtcaaacttcaatacgagcctagctgtgcgtgaagcagatcataacggacatggcagagggtcacataccaacacggcagcagcacaactcccagtccatgagctagagcggctcctccgcgagattatcgctccggcgagcaattctcctccagccgacccatgaagatgctcgggaaggccaagcgcaaacacccgcgaacgcgacgaagctcccgacctatacgcctaggtcataacaccgatggggacgtggcaccacggcggcagcacaacgacggtctcttttttacggtggtgccactcggcgcacgatagggtggcgtttgtggatgtgagggcacgatagaggggaaggatagggcctagtcctcccctatatgcac

SEQ ID NO: 15604 - DNA, 840 bp, Zea Mays
gatggacagggaggtctcctcgccaaaatcgacaggggcccgagtcgactgtacgtgctcgacctcaccatcgcccggccggtctgcctggcagcacatgccggggaggatgcgtggaggtggcacgccagattcggacacgcgaacttcaccgcgctaaggaaaatgaagaaggaaggcctagtgcgggggttacctgcgctgtcgcaagtggagcaactgtgtgaagcctgtctcgccggcaagcaccgtcgggcacctttctccggcaatctccttcggcgttcaactgaacctttggagctgctcccacggtgatctgtgcggtccaattactccaaccacaccgagcgggaatcgatattttctcttgctcgttgatgattacagcaggtacatgtggctgccacttctggcgtccaaggatgcagcacccggcgccatcaagcgtgtacaagcggtggtcgagcgcagcagcggaaggaagttgcgtgccctgcgtaccgatcacggggaagagttcacgacgggtcacttcaacgactattgcgccgagctcggcgtaaggcgtgaaactgaccgcgccatatacaccccagcaaaatggcgtcgtcgagcgtaggaaccagacggtggttggcaccgccaggagcatgctcaaggctagcggcctccccgacacgttttggggggaggcggtctccaccgccgtctacctgctgaactagaccatgacgaagggaaatggcggcaagacgccatatgagctgtggcatgggaggacgccggcagtccatcacctgcgcaccttcggttgtgtggctcatgtcaagagcacag

SEQ ID NO: 15605 - DNA, 609 bp, Zea Mays
cggaaatgggagcgggaggaggagcagtggaagcgggagcggtggaggtggtaggtatggctgaggtggtggagggctcgggagcgactggagctggcgtagtgggaggtggagtgttagctgtggcggtgtagagggaatggaggagcgaggtcgtgacgcgagacgacggacccggtaggcaatctgatctgatgatatctgaagttgtccacctctctttacctgatctgttgctgctactgctgcaagagctgctcgggctgctctatccaaacgtcgcttcttgcagccttcctgctgctctaggtacacggtcttccccttgacctgcctaaaggggcgaggagggtcctcgtcgtctcctccccctggcgctgacacattcttcgtgcgcaccatcctgacctgaagactacataggagagagagaaactaagcacgagaatatagcaggcgataggataacaaaagaatggataactacctggaaatctcacgagagagagagagagagaatccaggcaggacaggagacgggctcacgggcaggcgagatcactgaaatgacagaagaggtgagcacatattagtcacatagtcataagt

SEQ ID NO: 15606 - DNA, 589 bp, Zea Mays
aaacaacgtattgtggaactcgagggcatagcagctaggagacaaagggaggtgaggttattcttaatttttcacttctttttgcctacctttttttatttttccaacttatatttattgttattttgtttgaggatattcatgttgaatgcgaaattagcaccagtagagagcatggcgcccatatggggttcgagatatgcttggggttaaaataaacatgacaacttggacggtgggtatacgaactaatgtacttcattcattcataaaatattttgagatatgcatctaaatcagtgcgttgttaatgctgttaagagcgtgtatgtaagtttactggaatcagtaccctttttgttagtttatttctttgtggttgatggttcaaagattgatttttttagctcatcaccttgtggtaatttagaatgtggtgttctttcctccagctgtagacagaccctagagcatctatcaaaggaaccagacagcgatcatgagtttaggtgtgttcgatttagttatctgggtgctgttacctgattatacctgttagttatggtaataaagctattgcttgcaggag

SEQ ID NO: 15607 - DNA, 672 bp, Zea Mays
cgggattataggacaacaactttgatgcagatggattattgggttgtcacatgaaaattggagaaaactgttcctcaaatcgctctgtcaggcacattgaagaagatcgccatggtacagtgcctgcaaaagatcgcagattcactgaactcgccgccggtgacccttgcgcccggattcacgacgacactgtgattcacgcccggtgacgcgcggataacgacttagggtgaaaagatcttcgccgtggctgaggtcggggcactgtggccgccctgttgtcgtaccaacttgcgttgcaacgtggcctcgcggccgtcgcggtgatgatcgtcgttaacccgagcatgccacgctcctaccttgttaccacgtcgcaataggtcgatatatatggtctgtctatcggctgagtcgttgctccagtgaatgccacagtaactcgcgctagtgacctccctctctctccggccgcccacgtgtcttccccaaactggatgccaccgctgttgatctctataaattgatgccccagtgagctccgttaggttattacgcgcccagtccaccagctctcgcctctgattatccaccctagcgtcccaattttgtttcccccttattctgttttccgcgctgccatgaatatctcgctgtggccaaccatctgca

SEQ ID NO: 15608 - DNA, 635 bp, Zea Mays
gataaatattgcgtaacagagcgtgggccgtcattctgaacgtggcccggtgacgtgtcacccgcatatcatggaattggctcgaaaaagtgtttacgatagcatacgacctaagtcgaacttgcataaattgctgttatgcccacgatcagcgcacccacgatcctataatgtagtagatacacacgcaaacacgccatgaatagcgcccccacgatgatggatatgtgcatgggaaaaggaaagaatccaacgtttctagaaaagttagacaacaagaattgtgcgttagggtgcgactggcagaaggaagtaaccggagctagaaaatggcggcgccatggggtaaagagcccatcagagagtacacaacgccggcaagtgttcatcgatcaaatccatgcttggagatcgtatcaatggtgcaagaagatcaacaaggaggaaaccagtttggctcgtatgtagatgcacatgggcaaacagaaactaccggaggggcaattactccaccagcagcattgaggacgccgggggttgatgatcacagcacaccagatgcgtcgaggatggccataaatcaaggaggacagaagctgactactatgcaaactattggtgagcatgaacaggac

SEQ ID NO: 15609 - DNA, 1221 bp, Zea Mays
cgagactctgttctgatggttcttgtgagtactaggtctccttctttgaattctcttgggacgacattgttgtcatgccatgccttagtctgtgcttgatacttgttcagggcttgcaaggcgaggacacggtctgcgtcgataagatctttggaagttgattcgtcgacgttagggatggctaattggtttgttcatggggattagtgctttaactcttgtggtgtcattgccttggatccgtacatcagatggaagggtgtgaacccagttgctctggactctgttgtgttcaacgcccatatgactttgggtagttgttctgcccatttgccctttttatcgtcgaggagtcttttcttgatagcgctgaagaacttgtcgttggcgcatttgacgacaccattggactgtgggtggtagacagaggtgaacactaccttggtgccgatggagccacagaattctcggaagtcctggttgtcaaactgcttgccattgtcgactgtcaactcggatgggactccgaaccaacagacgatgttttgccagaagaatttgcgcggtctttgctgttattgtggagactgctctgccctcgatccatttggtaaagtattcgacggcgacaaaggtgaattttaggttcccttgtgccgtaggcagtggtccgacgatgtctagcccccatcgctgaagaggccaggtgtgggcgatgagcttggtaagttgcgaaggggcacctgatcgtggagagaatttctggcatgcttcgcatgatctggtgactcggttggctgtacatattattgcgggccaatagaatccctaacgaattaccttggctgcgagggcccttggtcctgagtgtgatccgcaagttccatcgtgtacttcaaggaggatctctaggccttcggtttcagttatgcatttcagcataggctggttgattccctttttgtaaagctagccctcgactattgcgaagtctctactcctgtattgaagccttttggcctcattgtgatctgatggatggtaatggccctggaggtatagtgttattgggtctcaccagtcttcgaccattataaggttgacgattcggtggcagtcggcgtcttgcgttatttgcaagccttcgggattacggatggctggtgtgccgatgacatggtagaacacgtcggagggcagggcctcacctttggttgctgc

SEQ ID NO: 15610 - DNA, 545 bp, Zea Mays
tggggagcccgcacctgcacgctgcactggtgtttttgcgcaaaagcccctgccatccagacaaaaccaacccgagcctgcgccaccctttcttgtgtcattgactattgctcttaggtccttccactttgttccttttgcaaacactcaaccccgaccccgtcgcgctcaacgccggcgacccgacgcttgatcggccatggcggctccatgtcaacgatggtaagggcactgacacattccccgggttatggaaaacacaagcacacactcaattcaatcgtggggctctagaacacagcaacccacgttagcggcggaacagcgggtccagcgagctcgatcccgcgatatctatgtggtagattccaatcaaaggattcaggaagctccaacgactcacctagacttcagtgctcgtgcaagattggccggggacgacgccagacgataggccgacaccgagactgtccttagcgcaagtatgcagccacgcgctactgttccaatcacctgacaatggtagagttaagaactccaacggg

SEQ ID NO: 15611 - DNA, 735 bp, Zea Mays
aacctctaaatagataatgggactgtcagcttcaggaggctctgatagaaggtcctcggggatgatctcttccaacgcctggtcaaaatcagatattgacaacccctggaggctgacaagcgctgacaaggcctgtatgggaatgtcgctgcctctgttgcgacggctattcttgcggatcagcggaatttcttcttcttcctcctcttcctcatcaagcataccgtcggcaacctgaacatcgtcacaaccttcggcattgtcctcgaggatagtgctcgtcaggccatcgctgaggaaaatgtggaggggccagcatcttcctccaagcatgacaaccgctggagtcaccttttcttcttcttctcctcgataggtgcagctggatggttcactcggcgtgaacgcttatggcgagcaccttctggtttctgaatttcctcgtcttcaccaaattcttgtccaatcacaactgccatcggctcagtgcgggtagagtcagatgattcttcggccagcagtctaagaacaacattcatctcagcatcattagtactggacgacatctcaaagtgagtctgcttctcagcctcgggaagattttggaggggagcaattaaggcctcaatgtcctctaaagagggtcacactctatggaccgggctgccatctcgaataggaggattggaaacaaaatcagagaagggactctgcggaggcaggttccatgcaaag

SEQ ID NO: 15612 - DNA, 567 bp, Zea Mays
gaatgttatgcgtagctaaatggacaagttcatggactactctattgaaaggatctacatgactagagagaggtgattgttgccgacttcgaatgggtcaattgtaaggggctcttatgcttgtccccataggagatcacgaagaacaactcatggaatcatgactagttggtgtgcacagtttgagtgattcttgtggcactgttagtcattcaaggttgtcatgcgtattagctcacgaatcattaagtggtgactcaccacaacaaggatataggttgtcggcaagcatgcaactaaagctaggggatacatcttgtgtcatctcttgcttcttctgctttccaatctactcattcttacattcacatccatacttattgtgtagctgtaactagttgtagttactattattagttgtacctattttttctagatggtagctactagcttgtttgtttgtgtggcatagactagagaccaagctactagctttgtgtaggggctttcttttggtgaattacatagagtgcaaagtagaagctattacggcctcatattatacta

SEQ ID NO: 15613 - DNA, 913 bp, Zea Mays
gaagaccaggatgtcgtaggaagcatcctataagatcatgtctttagtctgtttatcctcttccaaacttcctcattgtaactgagagaccagacagttatcagacacttgagtaccactgagctactgaaaataaatgttactattggaaaacaaatcttgaccagaccaccataatccaaatgatacactaaacgttagaggagcacatcatcaagacctaagtacaaaaacattagttaacactccaataatacatgatgacagctatcatcttcccttggtttgtgtacgcttctttctaaccaatttagacctagcaatgaatgtgcctcgattgccttaagaaaaaagtatttagttagcacataatttctagctgggatgaaagaaacccatggccaactcactggtaaaccatagcattgttgtaacatagtcttggctgacgacacatttagtattaaagctcaacaatcacaaacagcggaacaaatcatgcaaaaagatcatacatattccaagtaacaaactgtgtgaaccaaagatgtagtatacatagcccgtccctcacaaatccaggtatctggaacccatcccaacacagacacacgcaccagagtaaaaattcaccaaccacacacggattctgcaccgaatgacagacggtaacacagttcgtgcaaagaacaaacatcctaatgcagacagcacgagggggtctagcagagcaaacgtggacttacggagtcacagacaatgtctacggggcgacgggcagcaggagcagaccacacgctgccatgacgacggtgggtgcccaaaccaaagtggcgaacaactacaaagacgggctagagaagctatcggttccaggacctaataaggcgaacttgaattgaggagagaggga

SEQ ID NO: 15614 - DNA, 493 bp, Zea Mays
attttttcttattgctgatagacgaagcttttcttatttgaatgacatgatgttatgatgtctatgttggagcgaagcccgaattcgacctcgatcgggtcttttcccaaccacacttaaccatgtttggacgcagggcccgcaacacccgaagacatcgtctgaaatcaaagacaagactttgcctggaaccgacagcaaagcctccgacgatgacggcctgcataaagacgggggctcaatggccgctggggcgaagtcaactgcgatcgatgacttgacaccactacaccgtacggggacaaggcgctggtgaaggcacccttggcggacgatgaggagcgaagggtccggtgcacgaacgtaggcttcatacattcgagggacccgtactctctcagttagggcctggacccacttgtaagccccttggaggggtggatttttaggtgtacataggtgtgcgtattttgctattgtgtaatgaccccgt

SEQ ID NO: 15615 - DNA, 626 bp, Zea Mays
cgactatactagagaaagaaaaggggaggtcggatcggatctatgcctcgctcgccctcctgttgctgcgggtgattggtgagggttggatggatggatacggctacgcctacgctagggatgggatggagaactatgaaccggtcgcgttggcgttgcgccaacgacgtgtcgcttctggagcgatcgccataaacgcggtgtgtgtagtgtactactagtttagtttctagataaatcccctccaaacatatataccgtgggcgcagttgtggctctgggcgaattatgcccgctctgatataacgagacatatgatcttttgtaaaagtggtatcttgtgcgtttttgccacagtggatggactagcagcggcaacgggacaagcgacgccaaattgatgatgatatcgcgtcagcgctggcacggaaaccgatggtgacggtaagagcgacaaaaaaggatacggtaataaataaatcaataaatagatagtttacgtcacagctaccctttctatacaaaatcgttttgttaaaaaacaaaaccatccaaaaatcaacccaaacatataaatcggtcgagagtcgtcacgtggtaggaatccatcgttttctacatcttga

SEQ ID NO: 15616 - DNA, 310 bp, Zea Mays
tgattatatttgtcagtgtagttaaagttactagaagatttgctcttcacatccttgattggctagtggtttatttaccagtttgtgacattcaaagattcgtttctgatcatgaaggttatttgtgcattaagaatcttctaaaacttaatacattgattggttgatgagtaactgattcgcaatgcagcgggcacaggacctctctcttagaaaagtaaacttatgctatcttatttgctcagaattgttcctccaaaatctcatggtttcatgctaatttcatctattatgtctttagaaagtttcc

SEQ ID NO: 15617 - DNA, 586 bp, Zea Mays
gtcggaacgtggtgcttcgggctcgtggttacgtgagggagctgctcgccccacttaatttcttgtcgaaccaacggagaaggagagggaggaggaggaagggactcactggagaggagaacgacgccggcgcttcgcgaattgtgctcgggggaggggaggagagggatggccggggctggtgcgaggaaggaggggctcggggcgagccttttataggcgcgcgtgggaagggggagcggtggagcttcttggctccggcgagcttcacagtgcggccattaatgccgcacagcgccgccgaggggacgctacggcggggcggtaccggcgaggacgctggtcaaaggggggaggacgaagcggtgccaaacttccctgtgcggtgagatggcagaggggaggacggaggcgacggccggaggtgacttcggtgaggagacggcggaaggacgatgaagcaactgaccagcggggccatcctgccagagggagcgagcgcgcgagagagagggcggctgatgggtggggacaccttgccagcgagagaggtgcggggcgaggagcgggctggcgcgcgcgcgtg

SEQ ID NO: 15618 - DNA, 486 bp, Zea Mays
gtagtttttggattctagctggatttggacctaaattcctaacgatttgagttcctattccgtggtctaaacaggcactacatttctaagtaagcaattctgatcagggtatcctgtttacccattatcattctactttccagtttttcttcttctttgtcccttttgcggttgatactgatgcgtgtgtagtcctacttatctattctgttaagtaatgttttctaattgcttgaactttcctgtgtctgtgtaacgattcaggtactatttgttttaaatctcttgtaaactggtaggagaaataatccgctcacgtttcatttcaattgaaatcgaaaaaaacacgagttgattctgatgtcatatggtccacgatcaatcataggaactaaatctctgtatccatcttcctcttagtatggactaagtttaccttcatgacaataacatattaccttgtgatgatgagcattgaataacgaa

SEQ ID NO: 15619 - DNA, 741 bp, Zea Mays
ggaggatcgaacgtcggggcacgggaattcgtcgccggagtcccaggatccgccgcgggccgcactgcttgtggtcgggtgctctccacgccacgacaatcggtgagacctccttctttgcgcttgcaatcgccagtacttcgtgtattcgttatcggggtaggaaatagcgcagcgggaccgtggatggcttggctccggcgagtgcgccaccgtgctctgtgggttgcgccgccgtctcgggttaaggtgagagagaggtgcgatggccgtcggatgtggagcggacggtcccgattagatcaggcttacctcttcgtcccagtgaaccctggccgtccatccgcgaacgagcggatacagttcaatgtcagttatttaaaatccgagccgttgatgcgagatcctgcggctgtgtgagcgtaccgattcggtattaagtagatctaatcctggccactgaagtctaatccaacggccagaacggcccgataccccttcgcgggtactctttacaaaagaaaccttatgtttttaggatttagaacccgccgtccctagcgactgtgctctgtgtcttggtgttcttacgcccgagacccctgcacttctcatattttagcgcccagtccagaggagtttaaaaacgaagaaataatatcagaaattcatttttaatacaaaaacaaatctagaaacttgtgaaattcatagaaatcccattcttgatccaaatttaac

SEQ ID NO: 15620 - DNA, 845 bp, Zea Mays
gaagccttttccttagtgtgcttgctgaccgatgggccctaggaaccggcggggctttttctcgggtcaggagacgtctgtccttccacgtttcaagccgttgtggtggctctcccttcgcgaggcatgccatctttgggtgtagtctgtttctacttaaggtggggatgggcacttcttccttctttcaaaaatttaagtgagcattctcctgtcattacctccaagctcttgacccttaggctctcaccttaaatgggatctgccgaagggttgtctattgtcttgttgtggctagagccgttgtcccctctccctctctcctaggcttctcggagagttatggagttttttcgtatggtgtaggaggctgctgaggccgaggccggtctgctctggtctcgacttgccgagttagatggttgtagagccggtaaggcattcaccccttgctttccaacttccttagtggtttcctcgccctcatcgttttctgttctaacagccctagagactgagctagaggagctacgctctcgcttgggtcgggctctagattttgtcggggctcatggctcctctctggtgggacgtttggacgatgtcccgcgttgtgttcggggcgtcgctggtctcggcgctcgctagggtgctaccgtggtgctgctcgttggggagctctagaccggttgtaacctacggggagtcttaggccctttttcagccttacaggacggggtctaaaggaggtgttagagtactatcactacatgacacaagatcattttcggtggccagaagccaccgaaaataggccatataccacagaaaatagtctattttcg

SEQ ID NO: 15621 - DNA, 312 bp, Zea Mays
ctagtacgcccacttacaagtagagagatatcatccacaaactctgcttacactgtcaactgttcagctcacaactgttgtagtatattggcctcaggactgagagataatgtgactgaatgatagccttgggctcaatacttggagtgagtgtaggtgggctgcactagatccgcattgaggtcacactgtacttggttcatatgttatacttgtcttatgatgctaatagaacagtcagtttcaaattaatttaacaggcctgtcccatagtagatatggtggcatgtaactttgtggaaaatgtggcac

SEQ ID NO: 15622 - DNA, 902 bp, Zea Mays
tcgcggtcggacggcccgaaatccctccggtcggtctcgaccagcggcaaatccacaggcatgggagccaacaagtgatgatgacggaggcaaggatgatgaagttgacctcccctctgccaacacacccattatccgggggttggttcttcacagggcagaggctcgtcgatctgcaaatgagcctgtcacaaattttactgccagcggagggtccgctcttctccaggacatccgattccaaaaccctacattgcgtattcatgatgctaggatcgatggtaatcggttctggacccttcagcatgttgatttttataactctttgattcttcccaagaagcatcagcctattctgcatcagagatacatcaactgggaaggatgtgaagctattggagatccagagatgacacaggctttgagggtctgtgagaggaagaaaatgaagaacattatgacattccaatatgattggaatgatgaggtcattgctcagttctattctactctttggatcaagctggccgatgaggaaagtccctataactttccttatctaaatttctatatcgaagacagctggtacaaggtgagctaccggaggtttgctcacattcttggattctctaatgaagacatttttggggacaagattaaaattcatgactttcgtcaacccaccaaagatgaagcccgggatcttcatatatctgagactggtaaattttgggagtccaccaatctgcataagttttacatatatattaactctcttagcagaatgactctcattccaaaaggaggtaaccaaatgaatatcctgggagagagcaaggtcttgctctcatttatgaagccaaatagttcagaaagtatcaatgtttttgacatgatttggc

SEQ ID NO: 15623 - DNA, 344 bp, Zea Mays
ggctgatgccatgtgagagagtctagtccaatgaaaccctagctacagtacaggtaaattagggaacctaatgggccagacccatatacactctaacactatatacatccaaatacgagcaggtccatattcatccaatcaaatcaaaacagcaaaagttcgaatgttcgatccaacactaaaaaacccaaagtccctcaaaaaacccattccctcctggctctgtccaggacaataggaggaaggaggggagcaggtgctaccttcagatgacaagctcatcttgactaagggagtgagggtcactggctcactgctcatctcgactggagacgccgatgcag

SEQ ID NO: 15624 - DNA, 531 bp, Zea Mays
aacgcagggaaggattggagccttatcaccagactattcacaatgcaacttgtcgcgcgattgactgaggtgtcctcgccggagttcgccgtctttcgtagccgcgccacgtacttagaagagctaccatgtcgcagtagataacagtaggtagtctgtccatcgcctgagacgttgccccggtgaacgccacggtagttcgcgccggtgactcacccctctcttcaaccgccagtctccccctttcaaaattcggggccaccaccctcagacactataaattgatggtgctgctagctccgcaaggttgtcacgaagccagagcatccacccctgccctcgattagccaccatagccggagaattttgttcttcccccaaatctgttgtctgtgccaccgtgagacatcgcgtcgtggctagccgtctccaggtccgccctcgctctccttggccatgttttagcacccacacatgcttgtgatactcatcggctcaacgcattgtgcttgaccccactcaatagatcgg

SEQ ID NO: 15625 - DNA, 654 bp, Zea Mays
gtggaaagtcaattgatggcttgatgaaggatcaccaaacagaacaacccgcaatgcatcagtggggaccaagtcagtgtcatcagcagaaatcaaaactctgtcatcaggagtgctggcctctaaggcgacttcctaacccgaagctcgtgctgcttccatgcaatcagaatgcggaggagaagatcctacgtgaacatccatggaagtatgagagggagaaccaactcggacaccctcgggggctgggtcatagctcgcgctacccatccgagccggatcatctccggcaacaccctcgggggctgggtaagcgctagcgccatccttgagggccgagccctctgtaacagccacctctaaggctgaaggaccttcaaccacttccatgggtgcagagcaatccagaccagcctccagacccttaagaccgcgctctaaggttgatgaggcacgagacgccgctcgggacaactccaacccggcatcaggcacatcagcacaaatatccatcatcccaccatctgccagctccaacaacagatcctccgggaccatatcttcaagagtctgatcaaaatttgccagagacaattcttgcagaccaacgagggcagacaaagctggagaaggaacaccactactctccccgct

SEQ ID NO: 15626 - DNA, 433 bp, Zea Mays
agccactgttgagaggaatgatctgtactggaaattggaggaaacaggacgagaagtgtctcagttgaggttggagcagatgggaagagagttgggcgaaacatcgacctctactcaagaacatggtggagatgttcgaaggaatcaacaacagtctcgtggtgatcaggatcgtggtcgtgggaaccaacaacgaggcatgagaggtgatcctcgtcagtctgctgattcaggtaatcaagcaatacccaaactaccctttccaaaattcttggagggcgatcctgttgtatggttggactagtgcagagagtatttcacaatctaccgtgtgcctgagtctatctgggtttctgtggcctctgaatttggaaggcataacacctcagtggtgaaagagttacaaattgagaaacggaattggaggttggca

SEQ ID NO: 15627 - DNA, 809 bp, Zea Mays
cgagcttacccaaggggtcgacgagcgacgccttgacggcaagcaacgccgcggcctcatcgccggcggcattgcacacggcaatgcagcacaggaatgccaaggagaaggagaaggggaagaagaggtgtggagtgctaccaagccttggagtagcacttgtcatgctcggttcttctgctgttcccttctccttcactccttctgccacctcctgctgtcctcagaatggtgttttcattgccttgtttgaagcaatagagaaatggagggaaactcgcaggaaagtatataggggggctcatgtctatgattaggatcagattaatcgaataattttatgcgtttggagatggattggatgataacaaaaatacttcttggtggcatgatactgcgttcggatactgctgcgttgttgtagtgttaggtacatggttcagtagcctctgtggggccttggatagcacatgaacagctaggtatgagagtgtaaaggttgggaggaggcatggacataggctggaaatgcctttggaattattgagagctcggggagacatggcccatgtggtgaatggaatgtgtgaaaggcagactggtcactcgtcattggagagagagagagagagagagagagatttgtcttgttgggttaaacagacggtattgcaatcattgtataaatgcagaacatgggggttccttactggagtttattctgtattgtgttcttgtaggcagggcacatgcatatagtcatttttgagttatgatgaatattggagctgtgtaagtgttgattaagc

SEQ ID NO: 15628 - DNA, 402 bp, Zea Mays
aactaccccttctggccggcccatttatctcctatttcacgccgcgcctgcctttccatcactgttcggtgggaccggtttgtctgtgacacatcggctgccatcgtgggacccacatcccagctgcatcttcgtccttatcgcagcgaacagatgttccccttctctagagtttgttgcgattctccgtgtcccgccgtgcacacaccgcagcttcgcttcgcgctcgcgcgcggactcgggttcacggtggggcccactcgtcaagcttatcccatcctcaacaacccgctcggcgtcccaggatttccgagctccatggctcaaccacccgcgcgaattccgcgctcagctgcaaccactggctgggatttcgatcggaagctgaccatcgcgcacccg

SEQ ID NO: 15629 - DNA, 360 bp, Zea Mays
ttctgaataggtcaagtctggctctaggacaacatccgttacttcaatggttcgatcgggaacccgaaggcacttctttagttgagacacgtggaacacattatgtacaacagacaaggtttcgggtaactgaaattgatacgccactggcccatatctttcaagaataagaaaaggaccaatgtatcgaggtgcgagcttcccttttatcccgaaacgtgttacacctttcattggggagaccttcagatagacataatctccaactggaaagtataagggtatccgtcgtctgtctgcgtaacctttttgacgagcttgagctttcttcaaattacgaattattcgctgaactttttc

SEQ ID NO: 15630 - DNA, 1035 bp, Zea Mays
agaacagcaatcaataaattctagcttctatataattcaagaattaccgcattctagagacttgaatcattctagcactttaccacttcttagagttaaattaattaaatgaggactagcaagtaggcttacaaattttatccaaatcatttagtgcactaaaattactacaaccaattaacaacgcattattcacgacaatcactcaacaatttgcgttttaaattagacatcgcatgagcactactacttttcatccgcgaccataaacatacgcatttagactacaataagcaattcaccgtgattatgagcttaaccaagtcatctaacaattcggttaactagagcaacgacatagccgctaaataacatatacgtcaacttgcccattattgccgcaatccaggacacaacatatactacaacattttcataaacacacagattcaaaagtatattcgcacaccgaccgactcatatgaattgtaaaccacaaatctctaaatcgcaatcaccacgcatttacttcctaaatcatgaacgcatacatgtttatcctacgaaccgagtatttcaataattatcctaaaacaactaactccattacacccttgtatcacaaacctacttgacttacttgaagtgtctactcgaaatcgtgagcataatcatacactatatgcgaagcctaatttaacgagcgcataatacgcatcatcatgactcaacttatgaatatagagaaggcgacgactactttggcatgtcaccacctctctatataagtcaaaacaatttctactatcgactaagagttctaagtattaaacacattattactttccacgcgcaaataaacatcaacttaacatcagtgacaccgatgggtttttactaaacgcatcaggcacacaaccccgtctcgcatgcaaccatattgtggcgtgcactcgagatacttcaatcatcgtagcgtaacactaatatatgaactccgacactcatgtcttaataattcatcctctacgcaac

SEQ ID NO: 15631 - DNA, 523 bp, Zea Mays
agcagtctttgatgaaatttccagacttcccacaattaacgcagccacttgagaaagtggggagggcggggaaatgtgcaccaggggcactcagttgattgttctgggagggggcaggagtgggacggatgaacacgggttgcctgaagagatatgtgggtgggcgaggagaagaacgatttgggttgaagggatggattaccaaccttgtccgctttttagacccctgagatgatccttcacacacatatatcatgatttttccttggcccgaattcttggcttcaactgacagtgttgtgctgacagccctgctataggtgagatccagacacgtggccatcttgcgctggagtctgttattcaaccctctcataaagcaattctttttttaagtctgtgtccacttgatcgatagcatattgggagaggtgattaaacttgttgagatgctgcattatagaatctcccccttgcttcagacatatgaactcctccagcttcatctgtagcacccctttcg

SEQ ID NO: 15632 - DNA, 511 bp, Zea Mays
tttactgtccgctagaatgctattagcactaaggcctgaacctggacactattttgcacctggaactaatctggacacaagataacttgataacaaatttgttacgtagcatgcctttccagttcattttagcaagttccgggtcgaccaaatgacccaaaacaagtggtacttgcatccatacccactgttagacatggccctctgctgactattgagtacctggaactttctgagagggttacctaccaagggccttctagactagtgaagctctgggaaatctatgaagtggttgcaccagttacctttttttcctgaacaatgcaggataggtgtgtgtcatttcgttaaggaaaaaacacaaactgcatacagaaaagggtgaggctaaaagaagcgcctcccagccacaccgatacagatgagactacaaaaagacatgccaaactaagggacataacacggccactaaccagccccacctctaacgaccctcaaggccttagca

SEQ ID NO: 15633 - DNA, 726 bp, Zea Mays
tgcaggtgagggcatgcttgagctgctggttcactggctcgaacgacctcggccggatccaacgcgggctaggcaccgacctgtcttgggaggagctagagctcctagtgaaggggatcactggtgagcccttcgttgctgagtccttgattcctcccgagggcgttcccccgctttgcgacgaccaagggttgagggcagcgatcttgagctagctgtcgacccttgacgagagcggcgtagcggttcgccagaccggcggtcgggacccccatcgcaggatttagatccccggtgtaccggacggaggttctcggcctgccgatgccggctccagagctcccccggcaactctcagcccctctgacaagggcaagggagccgcgagcagttcttccgccccgggtggttccgggaggtcggagggagagaggcggcaccgactgcgtcgtgccgacggatctttcgtcgcggatccgccccttgattcgggcctccctcagaagcgctagaagacagctggcgatgtcagggaggccggctccccagctcagggctcgcagaggcgcgccagtcctccaccagcaccaccattagtccccccgccaccatcatctggcctaccaccgccacgggggtagtagcatcaacaacaacagcagcaagggcagcggacgccccgcttccaaggtcattggaaagtccagggccctaagtaagtgtccc

SEQ ID NO: 15634 - DNA, 1902 bp, Zea Mays
gcccgtcttcggcggcggcgttcctcgtgggcagtggagtggagatccacacgggcgttggttggttttctgtccatttttgttggtaagaaatcctaagctcacttggataggaatactcttgtcataagaattgggttgtctcttattcaaaccaagtagtgatttctatccaccccattcttagttgtggatttgtgtgctgcgcaagtggttgggttagcttatttggttaagttcctattcagcgtatgaggtcgtcattggtttactccataggacttcttggtacatggcagttaaatcgcaggtgcgtttatagtttattttccaacaccaacaccttttggggttcagctgaatccccattccccaaccaagtgcccctgcactggaacaaggtagtatacacagtgacatagagagttctcaacaggaacacatctggaacttccattagtttattttatcctctaaatagcttgtctgcagcaactatatgtccataacaatttggttggggttggtaaggggtgcatgaatgggagagaaggtacaatgttaggatagcttaacatacattcgaagtttcctgttctgtagttggctgatacctaaatgttttatgctgttgtcataatgaaaacaaaccctattgagctggcatggctccatccttgcttagcgctgtgatgacatcctagtggaaaaagtgttggccttgtgacaagcaaggccagttgctatagttgtatccacaatccacttatctcccaagtattctttcactaatctgacctctgctagcaattataatattaaattgataaagtgactaactaaccagacatactgcactccgattttcagtaattataatcacatccttacatgtgacagttaaaatgaccaaccagaatactgcattccaattttcagatatgattgtcacacccttacaccttatagttggttattttgaaatcaatctatttttgcagtgcttttgagatagcacctagaaatcctgtgcagtttgcccaccaacacaaaaaaaatcctgagcagttatatcgacatttcttcattcacatgaaatgtcacttcttagtagattcttctacaagaggcctcctgatggactactggagtttcttgacaggatctatggtatgcatggagaattttactatattgattgccttcttagatcaatgtaacttattttatgacagctcaactaatcacatcttttggcattgtacagtttttgattcatgcttcagcactgaagttttgcctcagggaatgtacccagtgtatttaattgggattcttacagagttgcatgaagagcatgtagaatcctcatttctggcaattaacttcagagatggagataagagaagccagcttgctgatatactacgtgaatacaacattccagtcattgattacccccgtcattttgagggttgtcctgtgcttcctttatctcttattcagcatttccttcgtgtatgtgagcactggttatccagtgggaccaatcagaacattatattactccattgtgaaagaggggcgtggcctttgttggcttttcttttatcttgtcttctcatctacaagaaactgaacagtgctgagcataaaactctggacattatttaccgtgaggcacctaaagggttcctacagcttttttctgcccttaatccaatgccatctcaactccgttacatgcagtatgtagccagaagaaatatatctccacagtggcctccaatggaaagatcactctctttggattgcctgattcttcgagctattccaagttttgattctgataacggatgcaggccattagtccgcatttttggtcgaaatcttcttggcaag

SEQ ID NO: 15635 - DNA, 712 bp, Zea Mays
gttaaagtgctgaaaacctaccaaattttccttcatcagatgacccccgaagccatattgaggatgggagtcttcgtctgggcagtaagaagccaagggatagagccaagcgcgaagtgtttctacagtatgcacgaacttctgtatgagacaaaggccatgggtaaagaacaatatcacaacaacttcggttgttatggatttatcgcccgtcccaatgcaagccaccaagtgccaacacttcagaagagatggcctggaaattggatggaagaatggttttatgtgacgaacgacttgacagcgagggaggacatcaaggaggttatcatgcgccccatatggtctcgcttcggtctccgaaagccgaaggtcgaaattgatgacgccgccgaagtgtgtcagaaggccttcaatactgtctgcttcttcattggtacaagagatttaattcaagagcatatagcattcagagtatggccgcttgcagaaagctgggaaatgccgaaagagaccatcaccaagcctagcgaaggtgaactagtccggctgaagtatacattcaggtatggggataagttcgatgaaccaaatgatgactggctgaaatgcatcgaagctacaagtgatgaactgcttggagcatattccaaggcagaagataatgcactatccgcaaccttcggaggtcggggaaagaagagattgaaca

SEQ ID NO: 15636 - DNA, 632 bp, Zea Mays
cgagcgcaaagtgtttctgcaatatgcacgaactattgtacgagacgaaagctactggcaaagaacagtatcacaataactttggttgttatggatttattggtcgccccaatgcaagctacccagttccaacattctggaagaggtggcccgaggcctggatggaggaatggttttatgttaaaaataatttgattgagagggaggacgttaaggaaattatccaacaccccatctggtctcgcttcgtccttcgaaggccgagggtggtgattgaaaatgatgccgaagtgtgtcaaaaggctttcagcaatgtctatgcttttattggcacaagagacataatccaagagcacatagcctatagagtgtggccagttgttgatagttgggagatgccaaaggagaatgctgctgggtccagcaaaggtggattagttcgattgaaatataccttcagattcatagaaaagttcgccgaaccgaatgatgactggttgaaatgcattgaggctactagcgacgagttgcttggggcatatactagggccgaagatgatgctttgtcctcagcctttaggggtcggagcaagaaaagattgaacatggtttttgatgcaattggcttcata

SEQ ID NO: 15637 - DNA, 528 bp, Zea Mays
tcattggcacaagggatctgattcaagagcatatatccttcagggtatggccacttgtggaaagctgggatatgccgaaggaaagcaccgccgattctagtgagggtggtctggtccgactgaagtatacctttagattcagggaaaactttgatgagccaaatgacgactggctgaagtgcatcgaagctaccagtgatgagctacttggagcatactccaaggccgaagataatgctctgtccgcagcttttggaggtcgagggaagaaaagattaaacacggtatttgatgctattggcttcgtataccctaattaccgctactcgctgcgagggcaagagaaaaagaggaagattgccgcttcggtcaccccagctgagcctgagccgaagagcagaaaggtgaaggttctgacccaccgatcgtgttatattgaaccggccgtagtgcctgaacttggcgcaagatccacttcagcagccgaagcaacaaaaactgctttgattacacagagcgctgaagagc

SEQ ID NO: 15638 - DNA, 399 bp, Zea Mays
gggggggggggtaaagcctggcggagagttcgaggggaggccttgagagctgcacgtgcgaacgatgctttcaagggtgggttctctgtgcgaggtcgcttgctgttgactgctccatcctcgagtgcctcttgagggatctcgccgacaagggccgccttgtctttcttttcggcgagggctgtcttcgtcgtgtcatccagggaggtggtggccttcgaagtcgctttcttgggagccatcacatgattggtttgttgaagcatgaacggtggctgccaaatgttggaaccgactgacacgtggtcgagtaggcccaaacaatgggaagcaggaatgctcaggtgctcaacaaaacaatgggcaaggaacaatagtgtctcgttatgcgtgtcctgt

SEQ ID NO: 15639 - DNA, 497 bp, Zea Mays
gggcggaggaggtctcgctaggttcgccagcgtgggagaccccaacgcgatggccgccgccgggtacaacttgtacctcagtaaaatggcggcgctcgtcgtccttcgcgttgtacctttccccctttcacgagccttcccaggcacacaaggtacactcttcttcctacctgaaatctcccaaccttcacttggagcctctccctccccgctgcctccacctcccttatctatgacacagatgtggtagctgctcccctcctcgggcgtggctgcacaaccaccctccagctcgcctgcggcacgaggtgcctcctgtgcccctggttgtgggcttcatggcagcagtatcagtctggcacacgaccccaaccttgtgccctgcggcaacgatgtggtagacgtggaagccgaggcagaaggtggggacgatggtgggtgaggaagctgcggtccgggtgcatcaccctctgctcagcgcggcgatgattttcgtc

SEQ ID NO: 15640 - DNA, 1388 bp, Zea Mays
ttaatttacttcaaacaacaaagatttattgttaaagattattttttactggtagggtcctcctgttaacttttttacaactaaatgacaagatcgaaattaatttacttcaaacagcataggtccttttgtaccagaaataactcaccgtttgctccctggaagaactacctctagctgcagtctcaccagatttttcttttacactttgcttttcattcagtacagaatttattgtcttcaaacttcgcttcaaactttcaattcctcctttgatgctttggtactcaaaagtgtaattactgactatcaacacatcattgccactgaaagactcattttcaagtttcttgtgtttcatcaaatccaacaatttggtgcaaagttggctggtcttattaagcaatgacaagccttgcacctgcaggttgtccactctagcctgaagctcttggtcaaggcgaattgagaagggtgctccatttccaacaacttgtaaacgatttaagagtgcaatgttctcttgtctgagggacccaacttcaagatgacaagaacgaatttcacatctcaacttttgctccacccctgtcagtctaatcagttccattcgcaatttcctcattttatcactgtcacactcaacaaatttcttgtctaattgagctttgcatccctgtcttagacttgtgattgctctttcctgttcattacatgttgtttgtagtctggcaatcactttgtgcaatgctttgttctctccctccttgtccttcaagtattccctggtgtggtccctttcctcaacaacctcagcaaaacgagcatccttatctactgaggaattatggagcttctcatgctcgtttctaagtttctctagatcgtcatttaatttgttgttttgcaattccaaactagcaactttggttgaagcttcagccttatttgcttcaagaaaggcaacttctctttgaaatgacacattctgctctgcaagttctctcacccgttcatgtagtctctcttcttcagattgaaatcttgatagtttgacagaccaatcatgtgaccttctgtccatctctctctccagtgtagtttgtctttcactcttctccttctccaacctcctagttctggtatctagttctttctttgattgtttgtattgctgtttggcagcagatctttctgcaacgtgtgctcttatatgtgaagacagttcatgcgttaactgtttcctatcttctgtcaactgctggatcaactgaaacatgtcatttgagctcattcgcttatctctgataatgttgaattcatattcatctccacaatgaacaatgaaccttgactcaacttctttagctctttgcagcaacatgtca

SEQ ID NO: 15641 - DNA, 457 bp, Zea Mays
atctgatctacgatgcccgttagagatcctacggctcccaccatcacgacccttcatcaaatcttaaccatttgtcatgagatcgacggctcagggcttgtcttctttcccccgtcggccaatcgcggcggcaccgctcgcagcgcggcgaggataccatcgacacgcaccgatttgccaccctgttatactaaagttcctaccgctaggtgcgacatgtaattaaggacaaaatgaatctggtaaagtactcgcacctgtgtatcgcgcgccgtcgagcttgttcgcccacttgtggtggcccacggcaaagtcgtagcaccgacgagcaataccgccgccacccgacccgtgccaccgcagagcccctccccacaacgcccgtcgagctacaatgggcttcccgaagtgatcctagcgggtggaacgagggcgaagtcgctggtccccggcgacg

SEQ ID NO: 15642 - DNA, 967 bp, Zea Mays
ctcgggtgaagtttacgactagctcgtcgacaacatcaatgatgctccggtccatccccgagcctgatgaatcataggcgagggcgaagtaccagaaccttcacaaccaagtggagaggcctatggtgcagcaggccgagatcaatcgatagacacccatcgacactatttgctacgacgcatgcacggccttgtcttggagcagggggcgcagccctcccaatccacaaaggcccgagttcctgcaaaaaaccatcttgggaaacccacgatgcctagtaaattctcgacaaccggcgtcgagagcaggaggaagtcgagcaaccacgcgaaaggaggtgtaagcgcagccccagcccacttgggtcccatgccttcattcgctccatcaggaaagcatagttcccaccaaaagtacaggcacctgtgaatgtcgctaagtatgatggttcttcaaacccggcgtatggttggaggactatcgcccagccacatggcaggaatcagagatgaccacttcatcatctagtacctccccatccacctcatggagggcacgagggcctggcttgagcgcctgtcaagctgcaccatccatgactgggtggaccataggaaggcctttgtcaagaacttctagggcaccgacaaacaccctcggagctcttggaacctcaaaagatgcacccaaaagagtgcggagagtcttcaggactacatccgaaggttttcatagaaaaagaacaaactctttgatgccactgacgctgacgtggtaagcttcttcaccaatggcatgaccaacgaggcgctcgtccacgagctagggctgggcgactgaagaccaccgccaaactcctagatatagcaaccaagttcactaatggggaagacacggtaggggccatctcccataaagggaagagcccaagcgatgccgacaagcccagcggcgaaaagaaggagc

SEQ ID NO: 15643 - DNA, 1150 bp, Zea Mays
agttttaagtcagttagtttgttaagtcattctgtttgctatccgtttgagctcgatgcatgcccagttcataaagagcggactacgcgctgcgcacgccgtgcgcatgacacgcgtttagtccgccaccacctgttgagtggcgtgagttcagaaggtcatgtttagacttagcatcttttaaatactgcaataaaaaacagaaaagctgcactgtctttcgcagcaccaatccacttccactctccacgttcatgtcttgccagagctcgacattggcgttcactgtgctcagcgccggtttactctcatccatttggtcctcatggtttgggcgtgtttgtaaagccagagttgttgcgtcgttgggatgtgatgtggctcggcaacaatgacacaatatgcctgttcttgctagtgacaatgtggttgctatgggtgagggatcggcaaccttggtttgagctgaggttcatcgttggaagtcagagctgctcttcacttacatgtggagcttggcaacgacgaccggtggactccgttagtgtgaccctgctaaacttggtgtgcatgccggttcgcttttcattaaaattagtactgccagcccctaaccataatatgtgccttgaatggacacaaacatcaattaaaacactaacaatttactgattatttcagtggcgctcttgtacaaatgtcccatatttattttttcttgactgaacgattgttattcttttggaagtttctatgagtcaagtaaaaattaaatatgggacatttgtaccctccgacagaggtatggaataccattagcaattaccctccgacaaggctcccggtccggatggttttaggggtcaatctataaagtttgttggcctattattaaggatgatattatgcctgcagtggctgctatttggaggaaagattttagaaatctcagatttcttaatacagcctttattgctcttttgcctaagcaggatggagctgtttttgctaaggattttagatctattagcctcattcatagttttgccaagctacttaccaaggtgcttgctaacaggctacaaaattacatggagaaactgatatccaaaaaagtgctttcatcaaagggcgcttcatcctagataat

SEQ ID NO: 15644 - DNA, 783 bp, Zea Mays
ttcaaacgagcaacgcccttagcatcaatatcatacatgtattatgaaacgtgagcaaaacgagcagattacctcccaggaaaagctggccacggggaggtgagtgattcggggaacgaagtcaccacgcgcgcccagaactccgcggttcagttaaagcaacggagccaaagggttgagaaaacgtccaggaagtaatttaagtgcagaagaacggtatgatacggtgaggagactatggggacagccgaaacttgagtgagttcaggtgttgaactttaatacactatgagagggcataggagttatcggcttggttgaggcttcctttaggctttcagggggaataaccggtgctaacatgatcataatactatgcatggcgaccacgtagaggtagatgtacagggaaactgcagaggtggtaaattctcccatggacagcaaaccagcacagtacaagcaggtgagtcactgctgtcaggctgcaggttagtctaatccaaaaccttccccctttgggctgtaaaaatcgtccatgtgaccccctctttttaccagaacgaaattcttgttgttttgcacttatccaaagtcatctggaaacagctagtggatgcagatctttttcctaagatattttcagactgcctgatctagttcagtcgacagcagcagccaccttgtcccctccatttctccaatttctttataatgacagagctaactctccacatcaaacttcttccctgaacattggtcttttaatttcttgtagacttc

SEQ ID NO: 15645 - DNA, 509 bp, Zea Mays
gaaatgagaaattagcgagctctgatgacaattgagggcacggcttggtggcttggtgcttgactaccctatggagctcatgggcgtgatcaatttatagagtcagtgagcggtgttgtttaatttgggcgaatcgtgctggcggccgagaggggaatgagtcacagcggcgatctaccgtggcaaccgcagagcgacggaactacggcagtcattggatagtcacttcggctcatactgacgcgataaacctcctaaggcgtggcgtccaccctgtgaacggcgaacacgcccgtgattgccacacggccatgtcgtcggtgtgcactgatgaaccatcacgcacacagtacattccagcccatccgcggcgagatctttcaccctgtgatcgttatccgtgtttaattcagcgtgactcacagcgatagcacgaattcgcgcgcgtggtcgccggcggcgaggtctctgagctggtgatccaatcctgtcactgtaccatcgcgaag

SEQ ID NO: 15646 - DNA, 300 bp, Zea Mays
tttttcataaatagtatgaactatacaagcgattttgtcaccttaaggcattaggagcaagtcttgtggaatctctatccatgttggctcatcttcaccttcttgtgatgtggcatctattttgccttccccaacattgagcatccacttgctaaattgtgatagttcttgtcgttcttcttgtgacaatgatggcattagaagtctcatattctgtgtaagatgcaggatgtgcacatgagaccaaagagaagaattgattattgctgaattaacaatttgtgagcgggtgcctccttc

SEQ ID NO: 15647 - DNA, 409 bp, Zea Mays
cggccacctccgaagtgagaggtgtgttatatgtcttctggttcaacgtctggtctagattcaacgtgatacgatagtcatcaaggttctcaacgtggcccatggtcctaaggtgctcggagtacgggattccacgtagtatgttgactatctgtcgaataacctctttgtctttctgttgatgctcttcgcgacacttacggtaccgatgctcgagtgtgggatcatcatcataaaagtatagctcaaggtgtttatgctctgccccaccttccttaccaaatgactttatattgtggtacatcatgctctgtgctcggaacgtgtatataccagaatcccttacattagttgtcatactatcgaggcaacagtatagggaagtgaaagagaaatggccattaaaaaa

SEQ ID NO: 15648 - DNA, 763 bp, Zea Mays
ccctcctatcctctacccacttatgagccatttgtgcatcctatgggcaaaccatttggagaggagcataatgatccagctctccccataagtgtgggagctcactagcatattgttccaccggtctccccatctgctttattgcatctgccttgctctgaatttccatcatcaccatcacattcccctttcgagagtatatattactcaaggtcttccagatttgtgatgcagtacgcatggcttccacccttcatgctaacagtagaagacatggatgccaataaccatgcaactatcacagagtttgtcgcatgccagattctccattctgcgtcgagcttatcaatcggctcaacacatgtctcctccaaataatgctccactcccttgcctcataggagtacacgcactcttctagaccagcttagataattcttactaacttctaacttcacatcattaggcacaagttccaacttcaactcagatgtacctgtattgtccttagcaccaatcaaccctaaccccatgagctcatggatcatacttctcatttcactcatcatctcactctttgtaatccctcttgaaccactaccatcaatttctgtcttcttcgcagcctcctcagtactcattttcacagaagcacagataagcagcagaagaagctagctccaactcctcaggtggataaatgcagccactccaacttcgatggacaaacagcagaacaagctggatgcagctccagctccga

SEQ ID NO: 15649 - DNA, 725 bp, Zea Mays
tctcgccctatgcccggtatgcaaacagagtcagcaacgcgtagcagccgagcagcgaaaagcgaagtggtttggtgaaaggcagttgaagcatttaccctgaagcttcgatttgaacagtctggctcccattgcatcgatctgctgcagagatttctcgagatttccttggattttacgccaccagtactttggcttgacttcagtccagccatcgtcttccgctcgttgagaaacagccctgcgccgactgatgggaggatggccatcatgatccggcgcgcaaccgctggccacgacgcgccgacgtgatgggtcactatccgcattcaagccccctgcgagctaacgggcgaccggcaagatatccgctgcccctttcatcttctccgagcaaggaaccctctgtcgcgagatctgacccaagctgccttccataaattcccgcgaaggacttacctgacccctggtttttggatccgaaattgactttacagatctgggaggtgacttggtagaaaaggtggaatccagcagatcgatctgagataacgaagaaaccacaccacctggcttgcgcgacgggggaaaacgctcccgagcaacggaaccatcctccccgcaccccttcagttgaagatccccggtccgagagtgaggaatcgcggctagcgacgctggcctgtagggacattgaatttttcgtcatttattcagcatcaaca

SEQ ID NO: 15650 - DNA, 461 bp, Zea Mays
tcaaagccagatactggtggagagggatgaaaaaggagatagcacagtatgtggcccggtgtgacacctgccagcgaacgaaggccgaacaccagaagcctgcaggcctactgcaacccctcccagtgcctgaatggaagtgggaggaaataggcatggattttgtaaccgaactgccctagacgcaaaaagggaatgactctatctgggtaataatcgaccgtctcaccaaggtggcccacttcattccagtaaaaaccacttttagaggagccgcccttgcccgaatatatcttaaagagatagtcaggctccatggtattcctcggaagatagtgtcagatagagggacgcagttcacctcaaaattttggaagagccttcagcaagctatgggcaccaagttagatttcagcaccgcttatcacccccagtcagatggtcaaacggaaagagtcaac

SEQ ID NO: 15651 - DNA, 420 bp, Zea Mays
gacataaacaccgtctaggtatgccttgaatagaggggattataggaaacctggtattacaaaaggtcattagctagcccaataatgtcttcatccactagttgtactctaataccctctcatgcgaatacaatgcccttgacatcagggaaacgtcctttttagtttaaaaggtgatctattggtttgaattctttatattcctacttattagcatctttttggtggaaaaaggtgccttacaaccttaacctatgtttggaaagttctctcgtgcaatttggctaaatttcccatggtctttattttattttgagaaatgatgtggcataatgatgtgtgatgttttacttgagtggacataaacaccatctaggtatgccttgaataaagggattataggaaacctgatatcacaaa

SEQ ID NO: 15652 - DNA, 337 bp, Zea Mays
aaactgtgggcgcagcaagcaaagttgagattgcagaggaaagaattctatttggagcatggattccctcttggtgctggcgaagaggggcctcaagttcccaatcgggcggaaactgttcatggctgcgacaatgccggtgctgctgccaatgtcaatggcagctgtaacggtggtaggcagggataccctgaggttcgctacaagaggaaggtccagaagtacgtggttaagaccaagcagccatcctctggccctgctactgcaggggctgaacacaagcctgaggagaaggtcacttctgatgctagctcagaggccgatcatcacgacgaag

SEQ ID NO: 15653 - DNA, 387 bp, Zea Mays
cttattcattgatcgttttgggcgggagcagcatgagtcgttgattaggcagctatttcacattagacagaatgggtcggttcccgagtatgtagaacagtttgcctcactagtcgatgaattagccgcttatgaatctcacaccgatcctttatattataccacacgtttcattaatggacttagaccttatattaacgctgtcattatggtgcaacgtccttcgaatctcgattctgcctgcgctctcgctcttgtgcaggaagaggcgttggaatcgacaagacgccgtcatgtggagcctattttcaaccggatggcttggccacacgcgactgcagctcctgatcatggtcgtgctgatggggtgtacactgagtccgacaa

SEQ ID NO: 15654 - DNA, 798 bp, Zea Mays
ctcagaaactcctcaagcttcatttgcaaaaccccatcaggaacatgatgagcacggaaagcttctttaaattcaacccaagtaatttggcgatctggaagttgtatggcaacaaagttggaccaccaagtgctggcagctccgcgaagtggttgtgcagcaaatagagacttttatacctcagtgcactgaataaggccaaacttctgctcaatcacctgcaaccactcaattgcgtcaagaggctcttcttctttagcatacactggcggccgagtctccataaattacatgtatgttgcacttctttgctgattttggggaatacgaggcccaccctgattgttttgatgatgagcaatctcatgcaaaaccctagcattatcagcagtggcattcactagggcagcaatggcatctgccagtgtaggtggaactggtggtggtggtgggttgatatcagcttctgcaacaccacgggatgtgccagccccatccgacccacgagtatgcataggcatctggagtaaaacaaactcatgaataaacatccataaccatggaatatattacacgagacaggtacatggagtattattcattacaataccaaaattgacatagcttactatcatatgcctacactagaggtcacgacaccatacacatgccacattaaccttctatatcactagctatcttagaaacatcactacctcctagggactcaacacctggtacaagcataggagttgcttcttcctctaagtctgcatcatgctcacccccatcagctag

SEQ ID NO: 15655 - DNA, 801 bp, Zea Mays
gtcggagttggtagtcgggcgggggcggtggaggggcgctctggcgaggggcaccctcccggaggcaggagtagggacccgcgggacctaccctccggggttggcgctgtagagagctgtcacggcgtgggtggtggtggcggccgcagtcgtgagttcctcgagtaaaagatcatcacgaacccgagcgaaggacgggaacggggtgatccgcgtgagaatggcccgcaggtgcgcgtagcgaggactgagcccgcgcagtaggttgagaacgagtgtctcatccgtgaccggggagccgaggtcacagagtgagtccgccacggtcttcatccgccgacaatactcagtgacgaagagatccccctggacaagctgacaaaaagcggtgtccaggtggagaatccggacctggcagttgccgaggaacatggcctcgataacaacctaggcctatcgagcggttctccctgctcgcgtatgttgtcctgcgtctcgaccgtgagggtgccgaggatccaggtcaggacaacgctgtccatccgggaccaggcgtgcgtcgacaccaccgcgtcggtgaggacgtggtcgtcgagggcgtagcggtggagggtcagcaggacctgattgcaccagcgagtgtactgggccgagtcgggggcgaggacgacagagactagcgcccgaatactgggaagtcccgccgcctgagcatggagactagcgatgatcgacgtgtcgggagcatcgtcatagacatcatgcacggattaggaggcatcgccatggacaccagcgagc

SEQ ID NO: 15656 - DNA, 311 bp, Zea Mays
gtaaggaggtggtattcttgggaagttccccaaagttctcgctatccttgttggcgcaattgcttcctgatcgccgatcaaggaagtcggggatctttttctccatggtggtggagggtgaggctgcctcgcgggtgcaggacatccgagtggtgtgtgactttgctgacgtgtttctggtagagcttccaggcattcctccggagcgcgatgcagcttttgagattaagatgatcccgggtatgcagcctattcataaggccccgtatcgaatggccccaaaggagcagattgaattgaagcggcaattg

SEQ ID NO: 15657 - DNA, 281 bp, Zea Mays
gacaacttcgaatctcggccttactccttcaaaaacacaggcattctgatgcttccaaagttcccaagcaaccaagataattagggaatcaaagccttttttgacttccttagaagccccctttgcagcactaaaccaccagctagaaaatatagttgcatctgggtttggcgcaaggttggccatgctgagtttatgaaaaatcatggtccagacttgccgtgagaaaacacaagagataagcacatgctggattgtttcatcgcttggtcacaaagcgg

SEQ ID NO: 15658 - DNA, 1064 bp, Zea Mays
caagagaggaaaaatcacgggacacattgttatagaactcgcgcccgttgtcacaatggacactccggtggtgcgaccgaactgagtggagacccaagcgaagaagtgagacagggtgggataagtgtccaatttctgacgtaaaggaaaggtccacaaatagtgcgagaagtcatcgagaatgagtaaataatacttatagccagaaatgctgatcacaggggatgtccatacatcacagtgtattagatcaaaagtgcctacgaccctagaagaggacgtagggatgggagcctaacatggcgacctaactgacaagcatgacagaggtgctcaaaagaccccctacaaccagaaatggaggtactactagagagcttggccatcacatcatgcccggggtggccgagacgatgatgccaagtcacagaggaggcagccgctgcaagaacaggtagagcagaggtcgatgtaggggaagcaggtaggcgaagcatttagaggggcccggggctgtcacaccgagcaaaaagggtcctggtggcaagatccttcacagacagaccaaacaggtcaaacttcatagaacaagagttgtcagtagtgaattgacggacggaaagaagattttgaatgatgttgggggtgacaaggacgttggttaaacgaaaaggaccagaaaggaccgtgtcacctactgaggtgacgggtagggcggatccgtttccaacaatgatggaagaaggaagggaagtgtggggggagaggtggaagatagaatacctgcgtccggggtggtgtggtaggaggtgccggagtcagccacccagttagagaccaaggtgggtggggccagcatcatcatggaaaaggagctggcgagagactgcgtgtcccacccattagtccagggccccacactggctgggttggaggccccgggagtggaaggagcccctgctgaggctggagaagagccgagggcacagtttgcgatggaccaccaaagaagacctactgagaggtggtggggcgaggggccacagcacccgcggatgcccggg

SEQ ID NO: 15659 - DNA, 497 bp, Zea Mays
cgggaggtggaacaatggaagctagagtggtggaggtggtgggtatggtgaaagtggtggatgtctctggagcgacaggagctggtgcagtgggaggtggagtagtagttgtggtggaaggtgtagagggagtggaggagcgatgccgagacgcgaggcgacgaaccctgtaggcaatctggtctgaggagatctgcaactagccacctcgctctgcctgctctgtcgctgccgctgctgcaagtgctgctcgggcggctctgtccatatgccgcttcttccagccttcctactgctctagatataatgtcttgcccttgacctgcctgaaggggcgaggagggtcctcgtcgtctcctccccctggcgctgacacattcttcgtgcgcaccatcctgacctaagtgctgcataagtgagtgaaaggctaagcacgagtagataggagctgataagatcataaccgaagcgataagtacctggaaacctcacgagag

SEQ ID NO: 15660 - DNA, 537 bp, Zea Mays
tctgggtataaagcttggttgcggtggctgtttcggtcgttccgccatgcctatctcggtgtccactttgatcctgagcagagaaagaaccgagggagtgagcgactgcgttgagctgggaatagagaaagaagggtggcgccgcacgtggagcttactggcgccggtgattagaggccaatttgtgatgggggcatgtgcaggatcactcgggtccaatcccttaccatctagaactgggtgatgcatcggatggcaggaattgctcgtcggcgtacgcaggcataggtggtcgtcgttgctcaccatggtcggggaactatgtggccgatagccggtaatagctctctctcctgtctcatatagcctcttcttcgctattcgcatgtatgcatgtgaaaccagacgcgtgaacaccggcgattgctcgccgttgccactgtgtcgccgtggaaggaaataacgctgccgtgtacgatctgcggtaaggagaggtgggaggaagacgcggcgacagccgttaatccaggattgggc

SEQ ID NO: 15661 - DNA, 910 bp, Zea Mays
caccgttgttacaagaaacaatgaacacaacgacaaatgaagcgagagatagttgccgagaccagaacccaaaaggagggagaagagttaagagcaagagtaatgtatcacacatggatcctgtccatctagagaaattattacaaatccatagaaataaagaggacatctaaacacaggtgggcgggtcatcggcgagcgatgccaagctccaaggactagtcaggagggtcttcacatcaacccatttggcaagcagtcgagcatgagggtgaacctaatcttcaatggcatctagctcctcgtcactacggcctatggcaaaaaccttctacgatcatggaaacgttgatctcatcaaagtgagtgaccatcttccctagagccaagccgcacctgtggaacgcatacttggagacaacgcggtccatatggcctggtagcgccagtagccgatcgaataagggcaccttgattggaggtggatgagtaaggttggtgcacaccctaccgatgactaggcgaaactcttagaactaggcgctccgcttagagagagcagccgccgcctcaactgtcgcattgacggcatcatcacgagcaagcgaaagctcttgcatactagcctctgtcgttgcttttgcctcctcggctgttcccttggcctcctcagcttgataaacattttcttgagttctaaaaaggggagagagctaaggcggccacaaaagacatagagtaaaaggcataagaatgaggaaaggaacctacctctattggcgtcgcgctctctcgagagctccgcatccaccctctccaaatgaacattggtttcattaaggcatgactcgacctccttagctcgaatactcgcctcacagagggcctcctcctctcggaggtggtcagc

SEQ ID NO: 15662 - DNA, 437 bp, Zea Mays
cccgaacatagttgagtgtgaaaagggttttgaatctaacccgtggggaacccaccggcccgaactacataagaatagtccagaatttcatatacagcctaaaaggcccgtcatttctttatgagatgtcttgctcacgattcaagaagacaagaacctgtatgtgcacttcagctgttccgcacttgtgtttttgaacttgtaagacataacatattgtttgagttgcgagattgaccacagcatgcatgttactgtacctatagtgataatggactctaaattttacgctataaaatttaagattaaatcggattagaatcatactctatgcctaacaaactgtaaacgaacatttagatcgctatccattaccacccttaagattatctccatcagtcactatcacattctctatctcactatctatttcaaac

SEQ ID NO: 15663 - DNA, 891 bp, Zea Mays
acaaggaccccaattacattccagaaatcctgagcaaaggtacaacgaaagaggatgtgtgatgtcaacttcggttccgcagagcaaacttcacaggcggcatcaacgacaatcatcttcctatgtaagttacatgagtctaaagcttgtcccgcgaggccagccaggcaaagaatttgactcagggcagggcactgccatcctagatgaagcccaacaaaggcgaagcctgaccgtacccaagggatagcaatgagtaaagggctttggtttgaagccgcccagagttatcagtagcgaaacagtgcgctcatacggggagtcgttgaggctaatcccagagagtacattctctaggtaggacatgtctgaaattactctgcctgggggagctgaccatgtagagatgacgcaagcccctgctcaggaggtcagagacgctaattgatttgtcctaggcatgctcgaagaggaggggaaaagggtggccaagtcttcgctggcgcaccaggcatcaagtcagaaggaggtgctgcagcagtctcccacatctcaggttgtgatggaatggtagagagggaggactttattgaggctattctagtgatcaccctagagcatgtttgccatgcacgtttgatcccgaacctagatttcccaggaggaggatgttgaggtaaatagtctgtgaagcatcttcaggagcaagtaggagttcgagatcaggatatttttgaccctagactgcctctggctgtagacatcataccaaggaactaagcagttggcgccttttgcttgcttagagccagcccagaggaaccctctccgcttcctttcgatcctgtcaattgcggtaggggtagcctcattgcacctataatgcggttg

SEQ ID NO: 15664 - DNA, 300 bp, Zea Mays
tgttagcgtgccaagcgacatcttcactccgatggctcagtcatccgctttcattaggagtgataccttcacactagggagccacatctccttcaattccctcgacttccttaacaccaccaccagtgaactctatctcaccgactccgacacacctatcacggcaagcacgagatgccccacatgttccaccatcgctaggagcaaggcggataagcgatgccttaagaggcacactgcctcccacaagcgacaccttaacacgctcgccgtcgccattaggcaaaaggcggagggaac

SEQ ID NO: 15665 - DNA, 619 bp, Zea Mays
tttcttaaccatgacataccaaggattagatctatgttgcttgcctctaatattatagcggtagccccgaattctcttcccataattgtcaatgtcaatttatgtgtcatatgatttgcctcaacaggccctttgggtgtaattactatcattggtgttttcataattttcagtggtaactcatttgtgttggcataccgagcagacataaatgaatgtgtagcaccagaatcaaataatattgttgcagtaattgcattaatgtaaaacataccaagtgcgatgtcatccccatcaggagtagcatcaacgctgacttgattaaccctggcaatagagaatcgcttaccagatcccagagtctgctgtttgttctgaactggggtagtagcaatcctctgtgggcaaatatttgcataatgtccagtcttcccacacttgtagcaagtagtgcctgcactctgtcctgaaaatttcgtcggggtgctagtgggggtagcctgacgagtcggtggagtcccctgaggtgagtactaagctgggcgctggcctcctctagtgtgaactggtgtacccttgggtgaaccgtagtgaggacgaacactgttgcttccctatc

SEQ ID NO: 15666 - DNA, 354 bp, Zea Mays
caagacacccacacacaacacccccacaacacacaaaggctacacaccacacacaaagacttgctagggctaaggccgtcaacatggaaaggtctttggcggtttggccccagccacacaccacaaactgaagtcaccctcagccaagcctaacacgctagacaaattaggagcgaccctcttgaaaacacagtcgttgcggtggcgccaaatagcccaagctccaaggatcaccagcgagttgaatccctttctgtgagggccatccacaagatcaaccgaagtcaccaaactgctccaccaatcatccagtttgtcatctgaagggcctggaaaaagggcagccaagccaaa

SEQ ID NO: 15667 - DNA, 563 bp, Zea Mays
agagagttgagcttcttgactggaccggttggtggtgctttcggtgatcaatgtgttctcagatggatagtctcgctcggtgcagttctgattcctccgttctctgttgtatctctgctggctttagcgcatctgggcagtgctataggttctctggcatgcctttgtatctctgtactttcagtttgtcgtttggggccgggcagtgtgttagctcggcgaacccttgtttgaaggtcctagctcctgttagtttggtgcagcagggtctcttgctgatttatgcgtggtggcagcgtactgtatcaagtagagtggatgtttttaccttatgaatccaaaatgtactattttttcttggaatgtacgggggttaagtgaccacgctaagagagaaagcgtaaggcatacaattctgtccaccagtgcttccattgtttgccttcaagagacaaagattttgagttggtcaaatgtagtattaaaggaaactgtaggtgccaagcttgcaaatcaaacttttcacctgccttctctgggtgcctcgggcggcatccttatcg

SEQ ID NO: 15668 - DNA, 420 bp, Zea Mays
tgctttcagtttcacctgaggcggcgccacattccttatctcctttaaatcctcaaaaaactgatcagattctgataggctcataaatgaatagatgtacctatcttcgcatatattagactgcagggtcaaattaaagttttgtgttggtagatacgtcagctccctcattgtgacaacaagagtgtaagtggattttggtggcacaattccacttaggggcatccttacaaagatctgctgccaagactccattccgtcttctatactaagattaaaagccacatgttcatctgttttatttgttaggtgcagcgtgcacgggatcaacttgtgggcatggaagggaaagtggagtgtcagcgggtggacgtcaagcaaaagctcgcttgaccctggggttatcacctgcagaacatt

SEQ ID NO: 15669 - DNA, 591 bp, Zea Mays
aggaccaagtctcccactacaaaggatcggtgtcgtatggctttatcatgatagtgcctcaaggtctgctggtatctggctgactgaattactgtgttcaatcgctcttcctctagcacatcaaaatcctctagcctggtagcttctacttcagctatgttttcgaagaccagcctcggtgccccgaacctgatgtcggcgggtagcactgcctccgaaccatagaccatgaagaacggggtatttccatgtagagctcgactaggttgagttctcaagctccaaaccacatatggcagctctctgatccactttcctgcaaacttttcatttttgtcgaacactttcttcctgagtgcttccagtatcattccattggccctttccacctgaccattggctcttgggtgtgctactgatgcatacttgatctggatactccgttgtttgcagaaatcaaagaatttagagctagtgaagttggatcctaggtccgttatgatgctatttggtatcctggacctgaatattatgtcttgtatgaactccactgccttggctgaggttaaagaagcaatatgcttgtactct

SEQ ID NO: 15670 - DNA, 1102 bp, Zea Mays
ttgaatcttgttatcagtttcattcctgtttcatactcgtacaccaagatgaaaccatcatgtgtcccaaccaaaacccaatgcttccttgtaatgattttgacagaataaacatcatctttggtgctcatcaaatataacgtttcctgatagtaaaatacattaatttcgttatttataatccaatgcaaggaaaacatgacgttatttataaaccattattgtttagcattagcaactgacatgcctgggtgtcaatatcccttataaaaaaatctccattttgatgaaacgtcattatcctgtgtgacaaggatattatttacctataggatcttcgcatgcaaatgatttaactgaacaaaggatcttcacaagcagatgactcaccatgaatctgctgggttaacatctagtaaagatattacatcattatctgtcgtagggtgccacaaaccccttatctgtgttaacgtttgggttacgtcttgtccagtcgatcggttctgcaaattttgacacattatattgaatactttataattcacttttaattaaaccttttcacaaccacaaaaaaattggttatcccaacaggactagctattactgctagtcctacattgtaagggtataaaatcattgaagattaaaaaaccagtagtaattccgattccatctcacctctgacgttgtctcgccttgctgagacaaaacaggttctagcaccacctcatgcaccacattcctggtctctttagcatccttaaaaaattgatcgcattctgattggtctgtgaacctatagatgtatttatccccatatatactgctctgcaagatcagattggacttttgtttatctgtcggcattttaatatcaagagtatatatggatctcgacatcacaatgtcgtggtttagtggtgtcgcttcaaagggctgctcttctgtcgtactgctaagcataaaagcaatgtgtttatcagttttgtttgttaggtgcagtaagcaagggattaagttgtcgtcttgaaaggataagtgggccttcagcgggtggatgtgatgaatctcacttgactcttgggtaatcaactgc

SEQ ID NO: 15671 - DNA, 446 bp, Zea Mays
gacgagactgaccgtaataagtgtgctctacacacgtcgaacatcaccacattgcagaccaagtacgccaccttgctagatgagcgtgacgagttgagatataagtctagcttgttgggtgtgcactgcttgtcctagcttgtagactgagctagcggataagaacattaggatagctttgcttgagaaggctagcttagtgagtgcatttgcacctatgcagtgtgcactctgtaagggtttgcagtctgctattgagtcctatagacacgacaagactaggatgcaggaggaaaacacatatcttctgctgaggacatcactccaatgcatacaacacatggaccaataagacgagcacgtgcatgacagctaaatctccagacacttccgaccaccaaaaatattacaataaacaatcactattcctcacattatctaatcaa

SEQ ID NO: 15672 - DNA, 438 bp, Zea Mays
tagaccaagtgaaagcttgccctctgaggggaatttcttgtaaacccagctgactgattgccgcattaaaattgagcattctgatagggtcaccaccctgcttgttacgattttcagggaacctaatcatgttgaaatcaccaaggaaaatccaaagtttgtcgtcatcagtttcaaggttagaaaaccaggcaagaaaagcttctctaccatgaggagagcaaggggcataaatgttagagagccaccagacttgcccatatagattggattggaaacgaatagtgtgcccaaacgggttttgatcaactatctcagtctcaaagagggagcttttccagatggtgatgaatcctccagaggcaccaatggaagggtcgagggcaaatttatcaaaatggcgattgcagaagagacgaatataagcgtcatcgaagg

SEQ ID NO: 15673 - DNA, 396 bp, Zea Mays
tcaacaattttagatgtcttaggatcccaacttcataaactgcttgccacttgccagcatggtcaatcatctcaaataataatggtgtatggattcagtttgttccaatctgacaaagttgcatcatggactcataatcagatgtcaatggaatcactggtgacagatgagtttgttatatgaatgcaaatgaaccagcagaattcctttcacattttaaattgaccaaatccttctcgaatgaataaggagccattccacaataatagatttaacttgatcatctttggaaataaacaggctactccagttctattcaattggagaagcttgcacttaattgtcagacgaagaaataaacactccatgctcaaactaaacccatttcgattagat

SEQ ID NO: 15674 - DNA, 657 bp, Zea Mays
aattgaaggggctacaattttttactatttagggctgatttggtgacaagagaattagatgagatctatagggagaaatcccttttctattcaattttggatagaatgagaattcctccacatgtattccctctatttctctggtcaccaaatcaacccttaaacttgaaattgaatagcaagggattatagtctccacaaaccaaccacttgcttccaaaaagccctaaggtttaccctagggctcacccatcattggtttatcatactactattacatgttcatgtacgggatcaaataggaaagcagatataacgaagccaagtgaagtgcattttatttttagtttaaggcgtgttgttgaaattatgtccaggttcgtatacggtttgaactggccagtatcctatcccatataagccggtttaaccttagcaagcgactgaatagtacaaagtatgtatagcatttgagtcttttttcacatcgcgtcctactcctaggcacatgcttctagcactgcttcagcctctcaaaaagacctcatctccccaacactctagactgcacacgcaagtaaagctatgcctatcagtggccagtgggcatgccaaggtcgttacgactaccaagcacgtcagaatgggtggtatggg

SEQ ID NO: 15675 - DNA, 427 bp, Zea Mays
gttgtgggggataatgttacatatgaaacattgatcatgatttattattgttagattatttattatgcatgataagatcactttgtttaattggaacacagatgactacccgagaaaatagtgcaacctcaaagatacatggctttcatattgactaattaattggggaagctagtgtgtgagaatcttatctgaaaggggaaagcggggaggagtttctcaagtacagtgtcggactaatcttgctctgatggcttttcaaacccaggaagacctatatcacctttgtctggcctgtagcggattttctcatactagtgggactttgtaaaggcttcagagtgaactctgtccaactccttagaagaggtgtgtgagagtcatgtccccttggcaaatgagtaacggtctgtgggtaagatgtgca

SEQ ID NO: 15676 - DNA, 577 bp, Zea Mays
caaaaatccagagataaagagggaagaaggtagtcggttcagacaagaactgaagatcaagcactgacaaatatctgatgaacgcgataagatcagcggcactgtggaattggatgagctcggatgaatcgatggggaattaatccgggatggataacttcaaacgtggtgcgattccatgaatccagtcgagcgtggccggagttagtcaccggcgtccaccgtgactcagttgattttcggtgcagtgtcatccatgcctcgatctccctcactatgtctctttcctatgtggtaagcatgcgctaacgaagttatccgtggccggagatcgctagccggactatcttggctataaatagcactatgaactacggcgagggatgcacacctccactcagtgagatgatccaagcccaaattcgcagcctctgccccctcctcccaaattgattgcgcacggtgaaactacagtctcttacggccatatagccccaatctccacccccaatttcacccagaatcgccgtgacaccattttctcccttttctctgtcaccagcaagccaaagttcac

SEQ ID NO: 15677 - DNA, 692 bp, Zea Mays
taaaaatctgccctgatcaccaatgctggaagactcacattggttaaggctgtcctcactgccattcctatatatcatcttcttgtccttctatgccctaaatgggttatcaaagccattgacaagattcgcaggggtttcctctagaagggcagaaaagatatcaagggaggccattgtgctattggatggacaagggtgtgtcgaccacttaagtttggtggcttgggtattcacaacctggaaatccttggttgggctcttgatgtgagatggctctggcttagaaaaacacaggtggagaggccatggactgagttcgacataaaagtacatcccaatgatgaagctctcttccaggcctcggttcactcttctgtgggggatggtgctacaaccctcttttggatggatagatggattcaaggacagtctattgcagttcttgccccttacctgatcagccgtattccaaggagggtctggacaggccgtacggtgcaggatgctcttgctgataatagctgggttcaggatatctctgggggtcttactgttgttgtcatcagggagttccttcttgtttgggatctgattcaagatgttcatttatagacaggagttcctgatgtccacatttgggtgccttgcgcttctggcctctattcctctaagacggcttataacagctt

SEQ ID NO: 15678 - DNA, 341 bp, Zea Mays
tgaacttttgcactttactccaaattgttccacaacacatggaaatctccaattaggaacattgttaggctctcaaaactctaccacttcggtatatagactttttgcaaaaagtggttaaaaattgaaattctttacaaggcactatttagggttttggagtccaaactagggttttgagtgcaccaaagtacttcaagtgcttaacctctcatgttcctcaccccttgaggcataatctccacttagcaaaactactctctcacacctaggccatatggtcaacagtttactatctcatggagtgtctcactccccacttgggttaaaccctaacaagc

SEQ ID NO: 15679 - DNA, 1099 bp, Zea Mays
cacgcaacaaccatgcgtgcatgtcgcgaccaacctagaaatcggcctgttggcgcaaacagactcctatctggccggccgccatccaccccgcgcctatatagccttcatagatcccatatacacaagccttagcactcaaaatcaagccaccatcaccgagaagggaagaagaggggagctgtgggccaccgtcgtggtcccttgccttcactagcattcgagtgctcagcgtggtcgttggtgttcgccggtgcatgggggagctttcggatgggtcgtcgtgggaaatccctaccccattcctagcaaattgctcaccagagggcaaacatcaccgtggatccgcaagaaactgtggccaagtctgtcgtcgcctagattcacggtaaaaagctccatgattcgattcgccttgacctactctatgttccagtctagttgtgcattgccctacttgcttggggcgctagattttgtgtgtcggtgacatcaccggcgtgggttaggcccggtgccgctcgggcgcagccaagggatgaagatgtgtccctagccatcgaacggctaatggatggcctggattagatccgtgcttacccccttcgcggagtttgatctgtgccgttggatttgtggcgaacgaccatgattagaagataaagtaatgtttcggctagatcttatatccatcattgatttttgtgttgatggtcatgattagacgacttcatacccccttcgcgcattcgatctggaccaatggattgtgatcgggtggttctgatgcggccgcaagcgtacccctttggtcgttgcatccgcacccttggatcttgataagacgatttggatcacgcaccatttcggctggggagtaatctaatctagacccttgatctcagatcgcagccaaaaacagcccataccccttcggccagtcagtcttacatatgagcccctgtgttttatcagaataaacccgcagtccagctcagttcaacataaactataaccaggccctgaaatttacaagttagaccccggatttcaaagaaatagtgtccccgacccatgagtctttgtatattaatgaaac

SEQ ID NO: 15680 - DNA, 823 bp, Zea Mays
cctcaagggcctgatcaaaatctgttatggataaatcttgaaggctaacaagagcagacagagctggagaaggaatatcactatcccccctactacctctgtaacgccgactattcttgcgaattagcggaacttcttcttcctcttcttcgtcctcgtcacaaatgcggataatagatggtgcaggatcacacccattggggtcagcttcaacaggatcacacccattgggatcagctggcgcacggatacactcgttggggtcagttggtgcaagattacacccattgggttcagtttcaacaggatcacacccattggggtcagctggtgcacggtcacacccattggggtcagcttcagcaggcacaccactagtggggtcaacttcagtaaaaacctctgttggtacttcttcgcaaataggagcagaaggtccagcatcctggtccaagcatgatagccgtcgaagccgtttctttttcttcttctcctcagcaggcgcagttgggcggctgacttggcgaagacgctttaggcaagtacccacaagcttttgggtgtccactgtgttgacagtctctggtataaccacaacagccatttgtttgagcaggggccgagtcagaagattctccagccaacatatcaagtacaacatttatttctgcatcatctggactcgctggcatctcaaaatgaacttgcctctcatcattgggaagatcacaaagagaagcaaccaacacttcaatatcttcaggagagggtcgcactctaagacccagaccactatcaccagcgggaggattggacacgaaac

SEQ ID NO: 15681 - DNA, 961 bp, Zea Mays
aaaagaaaaaggaaagctatgaatagtgctgggctgattctagcccaggcggcccaaacccaggcagaaacgcgcgcgcccgcgcccacggtggagactttgcagaaaggccctcgcagctttggatatccgttaagaacccctggctactgttcaacgtttcactaacatctacaaaaacaaccccgcgcttctatcctttctccgttcgaagtccacggcggcgaaccgcgcagggacgtactccggcgagcacctggaccggccggagggagccaagactggcggccctgagtggcgaacaccgaattggatctcccccgatcaattcccctaacttaatttcatggttggtaaactatcaagctctgtccacgcggaccgcggacgatgaggacaattgcacgcgttcccagcgactagtgggctcctagttcaattcggtggtttggcaagcatcacggggttatgagaatactcaaacgagggagcagaaggtgtgggctgacctgaatcgcgctagccgcggcgagctgttcttcgcggtgtattcgaaccggtttggggagaatctgaaattagcgctctctggtggggggtttgggatgcaggtgggtgcagtagttgctggaatacatggcgaagccgaggggggctcaatttatagatcccatcgacagtggtgtccaatttcgcaaggttgtgatggcggccggaaggaacagggatactggagcaggggatgggtggctttcaccgtggcgcttcctccggtgatcaccggttgaggagctacgacggttaccagtgagctggtgcggctagggacgacgtggtggaaggcttggagcgtggcacagccgcagtaaagtacggcaactccggtgacggccatgaggccccgtcgccggtgaaaaggggcaggggacagcgaggccacagtagctcatgcacatccgcg

SEQ ID NO: 15682 - DNA, 954 bp, Zea Mays
tttaccactttaatgggggaacacttcaccatgcatgtgtcacatccaccttacatgggggacacttcaccatgacacatcaccataattctagagaggtccaaaaatatataggcttcgtgacttaccatgattagtgtagggaattctagaaggctatgtacatcatggttatccatggttgttcctagaaagttgtcttgcttatgattaaggtttatcatgaatattgtataatcttctagaaacttggttatgcttattatatgacaattgtttaagcgaggttttccttgcatattttcaatgggcaaatgatggccatgggaaaagctgtcttaattgatgctaaggtcataacttctatagtttaagaacgacttcggggggaggaagaggtcgaagatcatggcatgctcacctatggctcaaatcgacgatgagggcttgtcctctggtttgaagagtaaggcacgcgttgttcggatgtgagggtgacaatgagatggtgactggactgtgaggttccgtggcaagggcatcagtatttataggcggaggaacgacaatttataatggagggagtctcgaccggcgtactgtgattggcgacgttgccacagtgcaatcgcaacatcccgaggttggcagggtaacttggctcatggtgggtcattcatttagttgtgattgtgacaagtgactggcgtgtgctcaggcgggtgcatgaggtcttgttggagtgactttctgcactgaggtatcacttcaaggtctgcaacccgaccctttaatatagcagtttggcatgcatgacaaggctgtctcagggcagagggtgtaggtggggcttgctaggacgcacaaatgccaaggcatgtagaggtaggcttacgatttatttacgcatgtgttttgccacaagtggttgtgggctccctctgtctattgtgg

SEQ ID NO: 15683 - DNA, 642 bp, Zea Mays
acataactcaatcaaagtatggcctgggttatagtcatgatgactcaagtgaaaatgaagatgatgaagtcaatgacccacgacgagtgacatgtcgtatgaccttcgagggtgcttcctcttatgaagaacaagataaggcttataaaaagccatactggtcccgatcaattcacacaatagcaaatgcttgtcaaggaatgggaaatgagcagtatgtcttatcacgagttgaagaagttctcactataggagagcagggagaagtcgtcgatgctgcccctgcccctcaacaattagaagatggtgttcaactcactattgatgaattagttgagatcaacctaggggctgaggatgatccacgccccacgtttgtaagcgcaagccttacacctgaggagcgagaaagttaccgagaattccttatggaatttcgtgattgttttgcttggtcatataaagaaatgcccgggcttgaccctcgagtcgccacacacaagctttctattgatcctatgtttcgaccagtgaagcaacaaccacgtcgctttcgccctgagctgcaggacaatatcattgcagaagtagaaaagttgatcactatcgggtttatcaaagaagtgcaatacccacgatggc

SEQ ID NO: 15684 - DNA, 277 bp, Zea Mays
attgtcagcttcacctcgttccacgaatggggctttgtggtttcggtgaaccgcttcatgtgggccctgccatactactacggggcggagctgaaaaaacttcaaccctaactccattgcgcaggcggccatcttctccaccgtctacaaggggttcctggggattgagttccactgggattgagcccttttccctcgcaagcgaggtgaggaaggtacgccatgtcgtccgcgttggcagttgcacactccagctacgtttggaccgagcggcgat

SEQ ID NO: 15685 - DNA, 346 bp, Zea Mays
gacagccactctcccatcctccttagggcctgttcggttagaccctccccggccgggatcacagcccgatccccgtggatcaccccctcctggaaacaatcctggcccataaaaaaatggtgttcggttaagctctgttgccctcggcctggaatgggtccatgattttttcgttgcccctggcatggaacggcgcccgttctctcagcggtggaaaatatccccacgcgaagcagccgcaaggcaacaggcgtaaagcaggcagcgacgactaggcttggacgcgagattcctctccccggcgtcgatctcctccgacagtcgccttctcacctgtactcttctt

SEQ ID NO: 15686 - DNA, 991 bp, Zea Mays
caacgatgcgtgatacactgctcgggatacctctaatcccacgtatggaatttcaaagcaaacatccatcatatcgctagcagtcggctccgacagcatatcttcaggaacgacatcctcaaggtctcgatcaaaatatgttatggacaattcttgaaggctgacaagagcagacagagctggagaaggaatatcactatcccccctattacctctgtaacaccggctattcttacgaattagcggaacttcttcttcctcttcttcgtcctcataaaaaatacggacaatagccggtgcacggtcacacccattggggtcaacttctgcacggtcacacccattaggattatcttctacacggtcacacccattggggtcagcttctgcatggttacacccattggggtcaacttcaacaaggtcacacccattgggatcagctggtgcatggtcacacccattggggtcagcttcaacgtgtacaccaccattgggatcaacctcagtaaggacctctgctggtacttcttcacaaacaggagcagaagggccagcatcctggtccaagcatgacagtcgccgaagccgcctcttctttttcttcttctcctcaacaggcgcagttggatggctaacttggcgagcacactttgggcgagtaccctcaggctttcgggtgtccactgttttgttaagctcttgtccaaccgtaacagccatcggttcagcatgggccgagtcagaagattctccagccaacatattgagtacaacatctatttctgcatcatccggacttgccggcatcgaaaagtgaacttgcctctcatcattgggaagatcacgaagaggagcaaccagagcttcaatgtctttaggagagggtcgcactctaagacctagaccactatcaatagcaggagggttggacacgaaattgaaaaatgacctaggagatggcagattccaagcagaataagcaacagga

SEQ ID NO: 15687 - DNA, 561 bp, Zea Mays
aattcagtctactcaagagtgctttagtgtcgacataccccgtgttccggcggaaactgttagacacaaaacaaggcaggctgctgatgaggacgatgactttatgccattatcgaagaagcgtaactttgatgacagtcctccaaaagtcttgaagaagatagttacaaagcagaggaaagtagtggaccccccccccgacaggttagaatttatggtcaatggcaatatatcattttctgtgtgaaattatgttgtgttgaggtttgatttaaacattgagttgcaattatgcagatgtaaatgtttacgctattcattgtatacatttttcagcagaggcttaatgtgagatgcaatccccaagacgtattagtatgcatccagatattaaatgacagacagcgccaagctattgcacggagggggttctccagtattcttgatatgagagttgacacactcggcagtagatctcatttagcttggctgatggaaaagcttgaccataatgacatgacaattcgagccggcccagggaaggagctcaaaattacaaag

SEQ ID NO: 15688 - DNA, 358 bp, Zea Mays
tatggaatgactgttgtttgtatttctgttatcttgacgtttttaaccatgctggacagtcatctacagttgaacggcctatcctcacacgttttgactgggctggcccattcccgttcttcttccagaacggatcgagctcacgtgctcctcgacggcaatgcatccgccgtcggacccgaagctgatcatccctctcgatgagatcgtcagcgacttcgagggtgtgctcgcggcagactcttgcctcactgccccagcccccagcacaaggtgtgccaactcgaacttttccctcaccattgcagatgtggacaactcctggttggattcaccactagagcccgaggtactcccg

SEQ ID NO: 15689 - DNA, 591 bp, Zea Mays
tttcatatacttatgacaatgtgactaatacgtgctcacctcttatatcatttcagtgtacctatgtgcccgcttgcgagactcccctcctacctggtttttctcttgagagacatgccgaggtagcaaatatttcctatttctatacttatctactgctttgctgctcttgcttatcttttctaattctcgtgcagcgtttcagttgccagtgcaggatggtgcggacaaataatgtcaccccatcaggaggaggagatgaccatgaccctcttcgccccttcagacatgacaagggcaaggatgtgtaccttgagcagcatggaggcaagaagaagcagaagttggatagagctactcaagtagtagtagcagcagcagcagctgatccggcagagtaaggaggttagccgaggatagcttctgatcatattgccttctaggtctgtcgcctcttgtctcggactcgctccactcctgctcagttcgacccctcagcaccagtcaccactaccagtccaccttcctccactatgccagcttctgccactcttgagcctaccaccacacctcctacaacctccaccacac

SEQ ID NO: 15690 - DNA, 685 bp, Zea Mays
ataataatatgatggaatggagtacatagtgattaattaaggaatgttcgagacttaccattgcagtctgtagggcgagggatgatgacattccactgcagcacattacttgagtctttaccaccgcatgagacgtaagacgtaggcagatcaaaggtagtgttccttgaaaccatgtacacatataggcatcaaagacctttttctaattcatgaattggccagatgtcgatggaatagaggagggcgttgcagcatgaggcagtagcattttgtggtgccgtctcctggcaggagtgcagcgccacgctagtaaagtcaaggccgcaactcagcgaggagcaagcaggtgatgacgactgcagcagcagcatgatggtgacgagcagtgaaacggaggaggaggccatcggctgctctagtatgtactagtgggtaggatagtggcgattgtgacccggccgtccctatcgattgaggtgctagtccattttatagcccatgcaaacaaccgggcgctgctgcatctgtgtgggccatccctctctcgtttgatcggggacacaaagcagagcagagcaacacggagcagagcagctagctagcgtcactctcatcactagtagtactatcctataaccagcccagcagcagcagactctcatcattatcataccactaccag

SEQ ID NO: 15691 - DNA, 514 bp, Zea Mays
gataagaagtaccagccggcagaccctatgggcgcactactaaaaataccttgccaagactgtgtgcaggtcaagtcccagttgggagctccccttgagggtcacgacatcagttgccaattacgaatcctggtatccagccccgacgcgtcgaggccatatcccagggggggccaagtaccaaggaagaagttggtaacggtgcacgtagcaaaggaaaagtggtgtgcagataagttgtaatattgcccagtaagtagtacctgaagagtaccttgcgaaatcaatggtatattacaacccgctccccagcggaaccctcgttttctccacgcaggcctagctactcatcgccagtaggatcccgctgaaagcgctcggccaccacgtccacaacgtcctgcacgccctcacgagcagcatcttcagcgttggccaccagacctgcgatgactggccccaaagagatagccggatcgtggctccggaagcatgtcaagacgtattcgattgc

SEQ ID NO: 15692 - DNA, 803 bp, Zea Mays
atcaaacatacagcacggggaaatcactgcgtgcaggcagaaacagcaattaatcagtttcagcttctatacaattcaagaattgacatgttctagagactgggattaatctaacactttaccatttgttagagttaaattatcaaatgaggactaacaagtagacttactaatttttatccatgtcatttcgtgcactagaattaccacacacgtttaacaaatgcattcaccataaccatgcgcatttaaaccataacaagcaatccaccgtgattacgagcttaaccacacgcctagataagcatgatttgaaatcaaattgcccatattttaaatctcggcataagcttggctattggctaacgacgtgacccttttctaattaccaacatacaccacctttcaccatttttggatacttgcacgtcccaccgctattgtaatacctaacaagtacattcaacccctcagtaaagcactagcacatttcagaaaatttcctgagactacgacgacaaggcatcgatcttatcatgtacataaaagcatcacaagcatatttttggaacctatcggttaacttgatcgacacactacacatgttcttcgcccttcaaaatttatcgcacaaccgaaatcatcccacttgccaatgacacctacaaatacctactgatatatcattcacatcacgagcacagttgcacgccgtatactagtttctaacataatcctcatatagctcgtaattcaaactactcactaacaataaatcacgcatgacaactactacatcgacc

SEQ ID NO: 15693 - DNA, 433 bp, Zea Mays
cttcgttccctcaaccgatccccctgctgcgcccctggaagcaacgccaccaaccttcttgcgccccaagcagccgcccctgcctgcactagctcctgcggcatctgcacagatcttgctgccccgcatcttcctactccctgcggccatcaatggatccgaggcaagcccctaaggttcgcaggtcctcgctcaaggctgcaattggtgtgattccaggaggccgacctagtttttgccaaacatcacgtggaaacaccgtagatggcagcaccatgtcacaacctgtgcccgttacagcacctgcatctacaaatcattcgacccccggcattgttgatcctgactggatgttacctgattataggtatgcattgactgaattcttacatatgttcaatgacgatgattgtgtttgcaccacctggatggg

SEQ ID NO: 15694 - DNA, 465 bp, Zea Mays
agaaaatagatcgtcgcggcgtggcgtgacaatggcgagccactgtgtgcgcaacaacagcgagcagaacacgcgagcagcggagatggcacgagcaaagaaataaatatggtgccgcgatagcgttccataagtagagcagtaaatcgtcgatggtggggttgctacgcgagctccacacggggttggggattcggcaaacggcggcacgcacaactcaacagcagatgcgcgatgcagacgtaggctagcagcagaggagcagggcgtgtcgagactgagcagagggaggagaactcgtggctgtggctcttataggcgagggagagagtgaatcaggttggaattacgtgccttgaaggctatttgcagctcgacgttggtggctcaagaaactgacgttgtaattctccattaataacgccatgaagctgtgcacagtaactgaagagaaaactgcggcag

SEQ ID NO: 15695 - DNA, 794 bp, Zea Mays
ccccttgcctggcggccaactcctcccttttataggcaaagtgagaggttggtcagcaatggcttccacagaaaggagccataaggaaaaaggtaaaaccaaatgttctactcggggtaaagccacacgtgcttgtgggccccagggtcgcctccctgtctcgtatttattatggaggacggcgcggacagcgtggtctcaggtgccatcattcaagctatgtcgactcctgaccttcgtagcctggggcttggcatggctcgtcgtgttgcgccctgccagcggtctgcacacgtaggcctagtcacgatatataggttatgagtgcaccgcaggacgagggacacagggccataaatgtgccacagtccgagaggtctgtaggtcatgagtgctatgcggctcgagaggttcctaggtcatgagtgggaagcgaatcgatgcctctaatgcggctcgacgccaggcgtagttaatacggttgatcacttatgacgggtcagtctcgggtcaggcacgggatccactcaagtagtttccctccgacacgtccggccccctgtcaggttctgccacgcgcgaccccaagatcggtgccacggggttcgaatgggggatggttcttccagggtagaagatatccatctcttcctgctgaccagtgggccccagtcgccagaggcctttccccagtgcgctcgctgatcgatgggccccagggaccggggacaatatccccaacattagccccctgaacccctatggaagtgtatcctttcggaggcttttctttt

SEQ ID NO: 15696 - DNA, 461 bp, Zea Mays
gatctgggacaagatatatgcctggcttgcggctgttttggagcctcgtggggtatgtgaaaattttatatcggtgacagagtggtggaatgaggttgtacactcaaaactcaaaagggtgtcctagaaaggcattttgttcgatcccaattctgtaacctgggaaatctcgaaggagcgaaatgcaagaatttcaatcggagacactctttggcaatctatcttgtgacaaagataaaggagcaggccacgacttggggcagtgcaggtgcaagacaccttaaggagatcctacagagcacttagctttttgctgtaaattcttgttagtctttccttcctctcgtatttatgcatgtttaacaatgtatacagttgttggcttaagcctcttcccctatttttaaataaatggcagatcctgcctgtctacgttcaaaaaatatatatttacacttcat

SEQ ID NO: 15697 - DNA, 307 bp, Zea Mays
attaaggctctaagggtagcctgccgttctgccttcgttcgatctggatcgtccatcgctgttgttcaatctggatcgtcgatcgccacactaacctgctagccgtgccctcctcaccccgccccatccgcgcacaaaaaatctacacaagctgataataccaagagctgattacacaaactgactacttcctctgtagcagcatggtttataagttgctaccgcaatctttggctgagcgatatggtacattatatttgtgccacggtagcctgcttggttgcgttatttagttaacgtacgcggc

SEQ ID NO: 15698 - DNA, 684 bp, Zea Mays
attcatttaagaccctcttcatgtacttaattgcattattgtttgcactagcattatcaactgttattgtcaaaaccttatcaattccccattctgctaggcaactctctaaggattttccaatgtctccgcccctatgtccttttaccaagaaaaaaaacaatgattttcttgtggaacttccattggttatcaataaaatgtgccgttacacacatgtaatttaggttggtattagatgtccatgtgtcagtggtgaggcttacgcgctcacaatgttcacctaaaaacttcttaagcttctctttgtggacatcatatactttcacaactgctctagtagttgttcttctagagggcaaaatgaaacgtgggcatgctttggccaaaaattttctaagcccaggacgctcaggcaaaacaaaaggttgttcatcttcaataatcatttcagcaaaactattccttagatcatcagcatcaaatttccaagttgaaacagtaccaacactactgtttccttgactaggttgcagttgcaaagttccttgattatcaactacctttttgtttggattctttttgcagattttcaaatgagatttcatggaggacgtaccatttatttttgggtcacagcgaaacagttttgcacaatacttgcacttgactctttcatcccca

SEQ ID NO: 15699 - DNA, 1181 bp, Zea Mays
ccggaatcagcttaatttcgaaagccacatcgcgctctggtggaatgcctggtagctctgctgggaacacgtcggcataatcacacaccacacggatgtcctacactcgtaaggcagcctcactctccaccatcatagaaaaaagaattcctgacttccttgtccgacgatccagaagtaattgggacaacaaggaaagagtgtactttggagtgcttcccaagaataccacctccctacccgacgacccctgcaaagacactgtcttccaaaaacaggatttgattgcgcgatattgagttaaccaatctgtaccccaaataacatcaaatgactcaagggaaatcaccacgagattagccgaaaaggtctcatcagcaagaacgatggagcgacccgggcagactgaacaactacttatggagcccttagtagaactaaccacaattgggtgacccatcctttgtatcgaaagatcggcacatggcacaaaattctccgaaacaaacgaaaaactagcactagagtcaaaaatagcatgtgcatcaaacgaatcaactaagaccgtacctgtcaccacatctccatgatctctgtcatccgtagagggtagcacatatgctctaggaacacccgcagaagaggaagcacctggagtgaaattaatagaagaggaaccccaaggagtcacaggctgaggcagacgaggagctccaaactgaggtggtcaaggagcggtcggtgcaggagtaggcactaccaagtattgaggaaaacctggaataggcaagtactgaggagtcccgggtatataaaattgctgctgaggggtggtacagaaaattgttgctcagtggttgccatcatgttgacagtgccctacgaagaggaagaagtcactggctcccatttaagtttcccatttggattcctcctacacaccacatccttgttatcttggttgcaaatagagcacatgccactccagtgacactcagcatgacaatccgcttcaccgcaacgaaaacataccaaccccaacccaggcttaggtacagcccgatacctctgagtactcccacctgaagtacccgattcagaggacttgccacgataggggtggtggcactggtgtggaaactttcccttctagtgggctaaaccctcaaggtagcccctcc

SEQ ID NO: 15700 - DNA, 355 bp, Zea Mays
tgggaatgttttggtaaagatgtaggtgaattgtgaacgagtcatttaacgtattaggcatgtcgtgtagtggtggtatgaaaaatgggttaggaatcgatcggctaaatgccaagttcggttagagttattttgttacttgggattgtagggtgaagtgatggcatgactacgtagccgtcaagtcatctatcatgtgactatgcttaagtgtgccttgctataagttagaataagtcgagtctctagaacgcggcaatttttgaagtaaatagaagctgaattttaataattgttgttttgggctgcacacgctgtttttgtcgtgctgtatgtttgatgaactaaattgtat

SEQ ID NO: 15701 - DNA, 434 bp, Zea Mays
gggcaacattgatacgcagaattctgtcagcacgactattgcttctcatacataagtggcaaataacaagcaaaatttgatgaacagaccggtcaagcattgtagaaatgacaataattctgcaaaaagatatcaggacgacgtaccaaccaaaatgactccatctttgttcgattgatcctgccattgtttctgtttgcttgaagagccctacaaaagtttggtaaagaaaaaaactattttaactagcgacacaaggaaaaaagtgaactacatagcaaacaggtatgtatttgttggaatgaaaggatacatatttcttaacttaaaagataaacgtaagggccaaaagggggtattccaaattgtaagtcgttttggcttttctagataattagcttctctatagacctagataggcttgcaagtgggtc

SEQ ID NO: 15702 - DNA, 601 bp, Zea Mays
gtggaggtggttacaaagtggagtcctagctaagtcttgtcttggcggtggggctctggcctctgggttctcctcctaatcatcggtccttctgggcgtttcctcgtctagggtctgtccttatgggtgcgtccgaggaaaaagaaccaacccccaacctggggtcaaacccctctcttttataggctgggagaggggtcggtcaacgatggcttccccagaaaggagccatcatgcaaagataaaaccaatcgttcaacccggggtaaagccacgcgtgctcgtgggcaccagggttgcctgactgtctcgtattctttatggcggacatgcgaacagtgtaggtcccaagcaccaacatttgggctatgtcgacccctggccttcgtagccttgggctcgacgtggcttgtcgtgttgcgccctgccagaggtctgcgcacttagatctagtcctggtaggtcatgagtgcgccataggtcgagggatgcacgggccataaatgtgccacactccgagggcttcgtagccatgagtactctatggtctgggggttgtaggtcattagtgggaggcggaccggtgccgccgctgtggctc

SEQ ID NO: 15703 - DNA, 306 bp, Zea Mays
gtcaaaaagaaggcagatggtattctggatagatacaaggctagattagtcgctaaaggcttcaagcaaaggtatgggattgactatgaggacacattcagtccagtagttaaggcagccactattcgggtcattctctctctagttctttcacaagggtggtcactacgacaacttgatgttcagaatgcgtttcttcatgcattcttgaggaggatgtatatatgaagcaaccaccaggttacgaagacaagctgcagccacaccacatttgcaaacttgacaaggccatttatggtctgaagc

SEQ ID NO: 15704 - DNA, 498 bp, Zea Mays
ggcttcctggtcaagctagctagctagctagagagagtgtgtcatgattcagtcaggaccagccgctgtctgtccgttgctactaggccaattccatccttgagctaacatgcgatgcgagactgcaaccgagagatggatggcagtgcatcgtgggggtgcaaagggcaaaaggaaaaggaaaaggtggggaaataaagaaacaactgctttgcgcgctgattgctggagtggaggcaaagggaggagcctcctgctgcgtctgcgtgcgtgcgtgcctcgctcgctcaccacatgcttcgttgccagggttgcatcacagctgcagagtgcagaagcaggtactgtactccatcggccgcatgctcagatctagccgtcgcctttctttttttgggagcctggcctccatcggcctggtccaactctctggctctgtctctgcttctgatccctcctccttcctccccgcatgccatgagacatcagacagtagag

SEQ ID NO: 15705 - DNA, 375 bp, Zea Mays
accgcgtatatattctcaagggaaggacccaggccggtgcagtccaagactctgggatatacccaccactacggcgaatatggcgctccggttgcgacgggttcgcgtagatttgttgaggacgattctgacaagtccgtcccacacggcagtaccacaaatgcgcatgagcgaatgacagctcgggtccaccaaacagcgacgggaggaaaaacgtggaaaccagtacatgactgccaggtgggtccgtgaaagcagcgatccgatcccacgtccgagcggtgccggacgactgaccagcatggcccacacgccagggaccgctggaagcacacgcgcctggcgaacagaagcaaaggagtggagttgggctgg

SEQ ID NO: 15706 - DNA, 468 bp, Zea Mays
catacaaagccttaatccacttttaaataaattaaatttatttaatagacactaattacatgttaatttgtcattaggaaagactaatggttgcaccggcagagcctggctctggagaaacggtcaattcctacgtatctcgagtgtcaggcccaagaggaatctttgcatcctgcgagccaggctgaagaggttgatcagacaaccaaacagaagaaagttgtatctcatgagcctggccagaccatatgcaggtaaccaaacgcacccgttgttcccttcaatattccacccaccacctgcggaaagctgaggctttgctcacagtttccggtgctaaaacgaagataaaaccatcattaaccgcattattctatgcgtagagatgggcccgcccctaagataagaataccgtgacacgccgccgctacacaccctgacacccgatctgactgccgtttgaccggg

SEQ ID NO: 15707 - DNA, 995 bp, Zea Mays
ccggagcgtaataccctactccactgtgtgatgtattgagagcttgtatgaacttgtgagcctgagctgggactaagcgagcttgagtcctccctcgtaacgctgcatgcctccccttttatagctaaggggggcatgtacaagggtactgagccccaacatgtgggcctaggaacataacggatgtagtacttggagctactaatgtccgctgctggagcaatcttctcgcgccctgatatccaagatctgcatagcatcagtgtgcaggggaagcttcccgtataagggatgatgagcacagtgcgccgcgcagcacgggcgcactgtttgacaggataggtgcgccgtctacaggatggccctggcgtcgcctgctagcggagtggacaggacacattaaatgctgaaggggcacatcgcctgtcagcagggtgggaaggcggcgcgtcctctccgcaatgaatgcagagaccgcgtggcttacgttaggctccgcccgctggcttatgtcacaggctacaagccacgcggcagcaacgggtctctgcctgggcggggagcgcaagcgcacaggataaggcctgacacgtgttagtaccggacccttgcttatgccagggcatctcctgtcccgagaccttgttgtggcctggaccttatttggagggatctggacccctgttcaagggacccggtatgcttactttggagtcccggaccgtatcgagggtccgcggttgtacgcacaggggtgtggtgctctcttgcggaggtctggtctaactgacacatcctgggatgtatcaccttttctcgccacgtggtgccccttgagccgtccacgcggtggggccaggtgctgttcaccgtgcggctagagatcgtcgtacgggcaccgcgcctccatactgtagtagggggtacccctgattcagggtaccgacagcgatggagatggctggctctggacaatcgccgatgatggtaggaga

SEQ ID NO: 15708 - DNA, 919 bp, Zea Mays
gtcgtggtcgtggtcgtggtcgtggtcgtggtcgtggtcgtggtcgaggtcgtggtcgtgggatgggagctcgactggcccatggtattgcagccttcttttccatgtgcaggaacatatcttccgatgtgcatgagctggcgaggcatcagtgggagactaacaacaaccttcatcgtcaagcctcttccatgggtatgccatttgctccccgctcgcctgatgtgtctcttcatcctcctccaccagaaatcaatgaatgacaccagcaggcctatggggtgcccttcatgatagctgaagatgatgaagaagaggaaggatattttgatgatcgtgagcagtatgccccgcctccccaccaagggaaccgggtcaatcctcttcatatcctccaccccatgatccatcgggcagctatccccccagctcagcctggggaagaaaactttgcggctaacttggcgactcaattctttgatccgactcctcctcagtggtgatttgtggttgatggttctctccatttttggtgctagtttccaaaaagggggagaaggtttgtcagcttggcagcttggcttggtagccctcaggggcttttaatttttgtaatgaacatctggtctgtaataacgttattcgcctgactattgtgatgcatgcggtgatggcctagagccattaacattttaatgatgtgatgacctttattgtaatagtcagtaccatttcatatcttatgctatacaatgatggatttgttagagtaatgccatttttatatcatcacatcttatataattctgttgcatccctcagtgtttgtgtattgtgttgttttttcactctctccaaatatgttgcaaattgacatatcaagtcaatatgaatatcacaaaactcatgcacatatttg

SEQ ID NO: 15709 - DNA, 549 bp, Zea Mays
gtcatcaaggaaaggccgcaccatgacggcggggagcgcggcggctgccgaaagagagagtgagaaagcgaggcggcgcagcgcggtgggaattggatgggacttaggagagggaggtgctttggagtgagcaagacgggagagaggttcgggaggggagtgagagggataggatacgactttgctcacagatgcatttgacgaaggggcggggcttcgcttgccgaggtcctagctcgccaggtggccacgtgctacggctccgctcgctgggccttcgctctgcttgcttcttacgactggacgtaggcagtggggaaagagagaggatgtgtgcgaatgagtcgattgagagtgctgctttaatgatacaagagagagaatgttcagtggagcggagagagaaaagcaaagcagtggtgtggtgtctcagtgcgacgtgcgagaacaccagtagcacgggccacgcattggccgggcggagagcgtgcgaccgtgaagcacggagggagcttcaattcccagtgtcttttaagactttagatgtac

SEQ ID NO: 15710 - DNA, 379 bp, Zea Mays
gaaatgactaggggcttcagggaaaggtttaatccaaggcatgccaggactatccacaacccacctcaaaacaaagacaaaaccaactagactcaggggcaacataatcaatcgtaaggctttaggacccagcaataaccctctcaaaacaacttccatccgccagcctcaagaggaggcaggggaggatgaagcttcaaggaaggtttaattcccagccaaggaagttgttctgtcttatccgtggagaagacaaggggtacaccataaggacatgctaggtaacaatccaaaagcagaaggaagttgctgaagcacaatagaatgaaccaaagcaagtcctccacacttcctcatactactccccatacatcctaga

SEQ ID NO: 15711 - DNA, 746 bp, Zea Mays
cgcccgcggatctcggcggccagtacggcgaagttgttcccaggcgaggaaagaagttctacagaggttgggggtttggctgatgaagtggtcccacctatatagctgtcgaggcctagtccacgcgcgtcctaggggatgccgccatggccgcgcgcgaagactgggtttgccgacgaatgcgcccgcaacttcggtcatagtggttgaaaccgacggcctggtcttcgggtcccacatggcggacgacttgcggataggagtacgcgcgcgttgttgcgagatggggcggcacataaatcgagagatatggtgatcgagaggtcaaacgacgcgaaaacggcgtttgaacgtgaaatagtgccacatgaggtttgaaattgaaaatgaggcatgaaatgatttggaattgagccgatacttcacgaataggtttatatggataaatatgagtgaagtgtgcgcttggtttgatttgaggcgaagaaaatggaatttgggcactcggctcggaatcgatcgctaaaaacggggatttgtgtaaaattgaagcatgggatatcggattggcgtgagattttgcgactatgttactagaggtattttgaaggtgcctcacaaatttgggatcgattggagcatttttggctggtttgggcatttcatcgagcacgtggcgtgcggtgttctagggtttggatgaaatgtctattttaggttgtgaaaccctcccaaagggagctcaa

SEQ ID NO: 15712 - DNA, 294 bp, Zea Mays
gtggagatcaccgttcaccgcgattgtgccacgccgtagttgattaaccacgtcgtcgcaagctgtaaggacttgatagtgaccgccgtagatagttagcctgtgagcgccacattagcagcctccggtgactcctcccccttctcaccgcgagcgcttccccatcccaattggccctcctcgcagccatcctctataaattgatgcctcgacttgttccgtctacttgttatgaactccgagcatcagccctcgcctctgatcatccaccatagcgccccaatttcgtttccc

SEQ ID NO: 15713 - DNA, 1106 bp, Zea Mays
cgtggatgctttcgaaagagaattgttcacattgtccaggtggaattttggcagatgatcaggttacttctcacttttcctaccatattcagatagcttttgattcttcttcctaccaggttcctttatgtttagcaattgacttcttgtgatacagggtcttgggaagacaatttcaacgattgcccttatacagaaggagatggttaagcagtctaggttcatgactgctggttcatacagtacaaagtttgtcccaaacagtgattatgacaatgacagtgatgttgtgattgacatggacaagaaagaaccgaaagatgaacccttgaatgagctagatggttctgcacgattgcatgtcgccagcagtcttaagctctgtgatagtaagccaaacactgctactgataaagctgaacctaagaagaaggccagagtgaggtactctgcatcaaacttgaggtcgaagactaggccagctgcaggaacattggtcgtctgccctgctagtgttcttaggcagtgggctaatgagctctctgtgaaggttatggaagacaataaattgtcagtcttggtttatcatggaagttcaaggactagagatcctaatgagttggcaacatatgatgttgttgtcaccacgtatatgactgtggcaaacgaagtacctaaagaaaattctaatgatgagcgaaagaaatgtgaaatggacggaatatgtccagaaatttccatcggcagcaaaaggaaaaagcagagcaagccaaagaagaaaaacaaacctagcaattcagaaggtggcccacttgccagggtacgatggttcagagttgtgcttgatgaagctcaaacaataaaaaattaccggactcaagtgtctagagcttgttgtggactgagggcacaaaggagatggtgcttatcaggaacacctatacaaaacaaaattgatgatctgtatagctacttctgtttcttgaagtatgaaccttactcaaaatttagtaatttcaaatatatgatcaagcaccaaattactagagattcagttcgtggctataagaaacttcaagctatcttgaggataattctactgcggc

SEQ ID NO: 15714 - DNA, 375 bp, Zea Mays
gacgatatgatccaggccaagtgacttctgctactatgaatggtccttcccatagtggtgacagtttgtgccgtccctcccccgttagaattcagcggaggacgaggtctcctactgcgaaggatcgatgccgtatggccttgtcatgatagcgcctcagagtttgctgataccgggctgactgaatcaccgtattcaatcgttcttcttctagtatatcaacatcctccagtctagtagcctcagcttctgctatgttttcaaagatcaacctcggtgccccaaacttgagatcagcgggtagcactgcctccgaaccatagaccataaagaaaggagtgtttccatgcagagctcggctaggttgagttctca

SEQ ID NO: 15715 - DNA, 610 bp, Zea Mays
tcgaaggagacatcacttggtgaaacaagtacgatgccaattccttgcccttcattgcaaaccgatccatcaaaatataaagtccaaggggtaatagtgagatatgacatgtctagtttatgaatatcattaatccgatgttctacgataaaatccgctacgacctggcctttcatagatttcaatggttcataggccaaatcatattctataagtgcataagcccacttaccaatcctaccactcataattgggttatgcaacatgtatttgattacatcggcttgaccagaaacagtgcaatgactagacagtaaataacatctacatttggtgcatgcataaaacaagcataagcataatttctcaataaaagtgtaccttgtttcagcatccaccaacctcctgcttaggtatgtcaccacatgttcctttccctcagtttcttgtgtcagaacagccccaatgaccttttcttcagctgcaatgtacaatcggaatggtactcctgcacgtggtgcttttaatacaggagccgaagacaagtattttttaatgagatcaaatgcttcttgctgctctgccccccaagtgaattcggcatctgttg

SEQ ID NO: 15716 - DNA, 1027 bp, Zea Mays
gaggggaagaaaaagaagaagagacgtcttcgtcgagtgtcaagcttggatcgggatgctggcccttctgctcctgctgctgagggagtgcccgtgccagttttttttgcagctgaccccaatgggtgtgacccaactgatgctgaccccaatgggtgtgacctagatgatgctaaccccaatgggtgtgatctggccaaagctgaccccaatgggtgtaccgtctgcattatagatgaagatgaggaagaggaggatgaaatccctctagttcggaagaacaaccgacgctacatagtcagcgaggaaagtagtggtgttccttctccagctttgtctgccctcattggttgcaagaattatctctggcaaactttgatcagactcttgaagacatggtcccagaagatctgttatcggagccggtagatggtggaatgatggatatttgtgctgatgtgcctgatgccgggctagagttatctcgagcagcgtctcaggcctcatcgaccttagagcgcggtcttaagggtcaggaggctggtctggattattctgctgccatggaagtgggtgaaggtccttcagccttaaaggtggctgttatagagagctcggccctcaaggatggcgctagcgcttacccagcccccgagggtgttgccagggatgatccggctcggatgggtagcgcgagctatgacccagcccccgagggtgtccgagttggttctccctctcacacttccatggatgttcacgtagggtcttctcctctgcattctggttgcatggcaacagctcaagcttcgggtcaggaagtcgccttacaagccggcgctcctgatgacagagttttgatttctgccgttgacactgacttggtcgccactgatgcgttgcgggttgctccgggtgttgatccttcatcgagccatcaactgatttcccacgacttgggagttccttcgttcttctccaacctccaggtaacttggtttttcctgatctggctgtaccccgggtg

SEQ ID NO: 15717 - DNA, 579 bp, Zea Mays
ggtggggctaaggagcccgaaccctgggtccaggacgggcagaggggtgtgagccctccgccgccaccatcttcagatcacataccaccaccaccgccgcttgtgtcagaccgaccgccatcaccacgggggcagtggcagcagcaggggtagcagcagcaacgacaacgtgtgcctcgcttccaaggccactggaaggttcatggtcccaagtaagcttaggccctcccaatgttcgctcgagcgtagcttttatgtcgacaggttttaatccaccctttgcctgtcagggcctcctcttcttcggcatccatggacgttccttccccaccggccgcaatgcccgccggggggtctggttcccatcggcatacgcctgctggggacgtcgccgacgatccgtcagcggctaccatggatgctccttcctcgtcggccgccatgcccgccggcgggtctggttcccatcagcatacatctgctgggaatgtcgctagcgatccgtcaatggctaccgcagccccatcagcgtcggcaccaagcccaccatcggcggcagccgaggaggtttccgttgcg

SEQ ID NO: 15718 - DNA, 982 bp, Zea Mays
tatttaatcttttgggctgcggccacaaatctccggaagcccagggtcgaatctgcaaattctaggacccgctggtaattattttaataccgacctgtactgcgggttgattgcttaaaacagtaggggctcttttgaaagatggccaggccaaaggggtacgcgtcaatctgtgccatccaatcaagtgtgggcggcccagataagatccccatataagtgaatcggtgcgcgacacagaccgttggatcaaaaggctacggtcacgatttaaaacactagcgatggaatctcatacgcccggtcccaatccaacggcttagcctcgatggagcgaaagggtaaactaagatctaatcctagccacctatcttgaaatcaacggccacagacccgtcttctctcccacggccgagtcacagcggcgccgcccagaccatgcgacggcgccatcgccggtgcacgcgatacatcaccccggcgcgctattcttcaatccaatgtgattattacgaagtggaagcgatggcgaacacaatggaagtggtcttaccggcgctggtgcggtggtgaggccggtcggcggacccaggcggaggggtgattactggcgcacgattctagcagcacagggcgcaattccggacaggcgaagctcaatagtattccctgtggcatggcgagcttcaccggcccgattccgactactcgacatcgccggaggcttcgaatccaccacggcggcacctgctctactacttcgcctcgccgtgatgcgattgatgagctggggcgagcactggggttatatagtgtggggcacgtgggcaggcagagtccacacggtggaggactttatccccggaatcaggtgacaacaacccacccgaatccaaggggaagactccgagtcggcatcttcgtagtttctgttggcgctccttgattctcttggggaggttgacgacgcccgacaggtggg

SEQ ID NO: 15719 - DNA, 750 bp, Zea Mays
gtgctagaggaggaacgactaaacatggtaatccagttggccaggtaccaggagactttgaggcgctaccatgacaaagctgtgcgacaccgatcctttgcagtgggagacttggtcctctgccgagtactaacgggggaggggcggcacaagctatcgccatgatgggaagggtccttcgttgtggcagaggtcacaaggccaggatcctatcggcttactcagatggatggcactgaggtggggaactcatgaaatgtcgagcacctcaggaagttctacccttagtgatacctcaaaagtctcgagggaagttgtactctataaccaagaaggtttcgtcatcaataaagctttcatcttccaaaggcattcaaactcttgattgacaactgccttagattgggctcgactcgaaatcgacatgacatgacttagggatcactatgccctactaacggagcaatcggcttaagtcagaaatgccttaagtcagtgcgacatgctcatgcttacatgacttagggtgatcaatatgccctactaacggagcaattggcttaagtcgaaaaagccttaagtcggtgcgacatgctcatgcttacatgacttagggtgatcactatgcctactaacagagcaatcggctgaagtcagaaatgccttaagtcggtgcgacatgctcacgcttacatgacttagggtgatcactatgccctactaacggagcaatcggcttaagtcggaaac

SEQ ID NO: 15720 - DNA, 601 bp, Zea Mays
gagagaggatgagcacaggaaaatgagacgagggtgcggattattcgtcgtcgaagcatgggggaaaggcccgcgacgtctccctattcagagtggagggaatcgtccatgacatcatggagacgaagaagtagaacctcgccggcggttataaaggtgcaccgtcgctctgccgccctatgtctcaatcaccggtaagagcaagttcctgtagttcgcttcgctaagcgcagtttctgctcacgtcggcggtagcagaggagaacaataaagctgggcgatgacccgcctgcttcgttgggtggagggcttcgctggagcaggcaccgcgcgaggtgagagaggggaagaatggctggagcgcgtgagagggaagatgatgcgcaccgtccgatttagaatgagtggatgggattagatctggggaagcaatcaccgtggaccgttgatcgggtatccaacgcctggggtttgatctcgtgtaaattgaatccgagccattggtcacaaatccatcggcggaaatcgtgtaccccttcggcttctaatctcgacccttgaaacttgatcggacggttgtggcttggctgtaccccttcgg

SEQ ID NO: 15721 - DNA, 578 bp, Zea Mays
cgaggacgagaggcgaggtgacgaactcgataggcaatctgatcggaaggaatctgcaactgagctcctcgttctgcctgctcagtggctgctgctgctatcgctactcgggctgctatgtccagacgttgcttcttgcggccttcctgctgctccaaataaacggtctttcccttgacctgcctgaaggggcgaggaggatcctcgtcatctcctccccctagcgtcgacacattttcgtgcgcggcatcctaacctaatgactgcaaatgagggagagaagctaagcacatgtcgataacatccaatagaatatcaaaagagtggatgtctacctggaaagctcacacgagaggtgaaaatctaggcaggacaggagacggctcacgggcaggcaaggtcactgaaatcacagaagaggtgagcacgtattagtcacatagtcataagtatatgaaatgtgaataaatacatacacagagaattatggcacagaaaacgagagatatggcaatcgagaggtcaaacgacgcaaaaacggcgtttgaacgagaaatagtgccataggaggtttgaaa

SEQ ID NO: 15722 - DNA, 340 bp, Zea Mays
tgcacattcgaagcttcccattcgccttggggacgatgactgggttggccagccacacgaggtgatggacctcttcgataaagctgacgtcaagcagcttccggacctcctgacagatgaagtccttccgctcaacggactgtcttcgaggcttctggctcaccggcctggcgtcggggtggatcttcagatgatgctcaatcacctccctagggatcctaggcatcagtgacggttcccaagcgaaaacgtcgacatttgtccggaggaaggtgacgagcgtgagttcctatttctctcccagattgctcgtgatgcgggtggtctgggaggattccgc

SEQ ID NO: 15723 - DNA, 478 bp, Zea Mays
attttctatataagagtatgaagaagagcaccactaccttgaacataacgtttctgtaaataaaaccacatagcttttgcagtctttaatgaagaaagactcataatcatggatggcatgacactgttaacaatagcagccatcacttttccatcattaattgtccaagtcttgatttcaaaagcattactgtaatatgcagtaggcgcaggtggatcatcaatcaaatgaaaagcaagaccatgacctcgcaaagcagtttctacatagaaggaccattcacagtaattttgaccatccaaaattatgttgataataattgcaatagtttgcgacatggtatactagcactgaaggttgttccaatcaaaattgtaaggaaggaaaacccagcagtatccaaactgaccagaggagcagacttgatgcagagaggggccaactagcttgatgtagacaggagccatcggtggatctt

SEQ ID NO: 15724 - DNA, 803 bp, Zea Mays
ggagaataaggcatttcattcagctctgtcaggcgctctgaatgggatcccaatggtacagtgcctgacaaagatcacagattcagctcccctcgccgccggtgacccgcacgctcgtatccgcgtcggcgctgcgattcatgccctctatggcatggattatgatcgaccatggaaaaatcttcatcttggatgggcttagaatcctgtagccgctctgtcacgccgtttgccatgaccatttcaccacctcactgctagccgtaacaactcaccagtgactgtcgtagctcctcaaccagtgattgccacggtagatcgccgcggtgactcctcccctctatccggccgccagcgcacctttgtgaaattggacaccaccgctcaaaaactctataaattgagcatgcagtgagcttcgctaggtaatcacaaagccagcacacccgctcctgtctccgattagccaccatagctctctaattcctctttctccccaaatcggttttccgcacccgtgaacacctcgtcgtggccagacgttcacatgttagcccctctcaagtcccctgatactcatagaccctttgaattgaattagatcgccctgggtagccctgaacacgtcggtgtgttctcagtttccgccgttgccatggacagtgaattcccaacccggaattgtgcaattgattaaggggtaatgatcgtaaggggttgaattaaatgtcaaccgagttaggggtccgattgttgcttattttggtcggtataggatcatcggagtgcgtgttcatcggcgt

SEQ ID NO: 15725 - DNA, 439 bp, Zea Mays
agcttacatggggccgtgaacttcctagtggccttggaagcgggcgcccgttgccgttgctgctgctgcccctgcggtgatgacgattggtccgtcatgggcggtggtggtggtggagtcaaatccgaaggaggtagcgttggagggctcacgcccctctgcccgtcctaggcctgaggttcggcctccatagccccaccaaccgttttctggcgcttctgggaggagcccgaatcaaggggtgggtccgagacaaaagacccatcggcgcgacgcagtcgatgtcgtctttcttcccccgacctcctggcagccgaatcaaggggtgggtccgaaacaaaggacccatcggcgcgacgcagtcgaggttgcccctcttcccccggccttccgatgacgtccggggtagaggagctacatgcaggttccttgcctttgc

SEQ ID NO: 15726 - DNA, 335 bp, Zea Mays
tgttggatttgatggtgtagtggaagatgaaaacctagatgaaggagcatggatgggaggaaggcacatgaaagaggtggagcctgggaaaaagaagatgaatatgtgagggagttataaaagaaaggccaattttcattaaaactcacatgacgagaaataggaatgtgatgggctaaagggtcataacatcgataacctttatgctctggactgtatccaagaaaaacacactcaatagattgagcagtcaatttagtccgttcacgaggtgctaattgtaagtaaagggactactctcatcaagaggatgacactatgtgatactatcaaaa

SEQ ID NO: 15727 - DNA, 624 bp, Zea Mays
cattgttgtgctgttgaaaaatttaaccatagccgaagcttattcactgcattctcgaacaaagcatcatcttgatttagcttcgacaaaagaaaaaagcttcgtcaaaacggtaaaagtcaccagcttcgtaaaaaccgcaaaaaactcagcatcagatggccagggtacgctcaactgcaagggtgacccgcgaaggagaggaagccgaagccaccgagacagccccaatttccgaagttatgaggcaagcgagattggttgtaacagaggaagttattgatgaaggtccacctactgccgaagttgaacaagctgacatcgaagaagaaaatgctgatgaagaagaggaagactacaacactctgaccccatcaaaacccagccacttggactttgaaaaatctactgtgtctaaggctgatgtactcatgatgatgaagctgggttacttcggagaagctgagaagaaacttatttgttttgccggagaagaaaccactccagagcccaaaaatggcgtagtggttttcaagagccttttcagagcgggactgcggtttcccttgaacgagatgattggggaagttttggataattatgatatctatcttcatcagctga

SEQ ID NO: 15728 - DNA, 417 bp, Zea Mays
gggtaaaattacctagacacagctttaaccctatatggacggcgggttgatttggaataagataaggggctcttttagactttgccactgccgaaggggtatggatggatatctgccgtcggatctgagatggaaggcgtagattaaatctattttcgacgcgaatcggtatgttattatggccgtcagattggagatccatggcccatattaaaatacccgatcatcccatccggtccatccatagaaaatccaacggcacggattcgatcaccaaagggtatgcacgcagtctaatctggatcgcttgttctgaaatcaacggtcatcagttcagcaatcgagatccgtccgatcccggatcaatggtcacgcgcccttcttcatcccccaaccccagccacggtgatagagaaa

SEQ ID NO: 15729 - DNA, 617 bp, Zea Mays
gacttgtgcacttgatctagcgcgtttactgtgttggtccggttgcacccgtagtcggtttttgcacggagggtccggctgcacccttaggtgacttttgcacggatagtcttttgaggaagacttcgattttgcgcacttgttgtgctagttcggctgcacccttgggcgacttttgcacggagtgtcacacgcgagggtagctagcattgcccctcgcggtgacttcgttgtggtcgaatgccaaagaccgtcgatgcggtcttttttgacgttgctttaattttttgcgtgggatttttttgcgtgtatattacatggctccgcctcattaaaaacctcacctcccgggaggaaaagagtgcgggccggaataaaactgtttggggaattacaagggcgagttggccttgaggagtcaaacaaaaaatttgcgaagattgtctatgttccaggaatgttccaggtcttcgccagattgtgttgttaatctatacgcgctgggagacgacttcgtcttgacgataaatggtccttcccacttcggttccagcttaccccgtgactctgtccgagttgtgcggacaagtacgaggtccccttcgttgaattctctt

SEQ ID NO: 15730 - DNA, 588 bp, Zea Mays
gatcaaccggagggatatcgagcatggtgaccccctgtttcctcttcctaggctccatctcaattcttcaagcaagaaggctcaggaacaacacaagaacgagtgggagtttgagacgctagagtgcggcagaggagaaacagagttagggttcaagcaccaagaaactattgacaaagatatatgtgcacacactaagtcgggggtagcgtagcaggcaaataactcggactggtcattggcacaacagagcaaagcgaatggaccaacgtttccaaccaggccttcccgagttttttcaagaaccaaaatcacaagagtcgatgggattttacaggggtcgagtcatcgaataaattaggagagcaaaagtataaaaatcagttctcattcattaaggggaagagcattacaaaggaaacagggccgactcattatgagtggaccctggtatcctagtcctcctattactactactactatgattacaacaacacctactaatactactgctacaactacaactacactatactactatgtacactggtggcatcttgccactggcgttatcgccgtcaccgtcgc

SEQ ID NO: 15731 - DNA, 690 bp, Zea Mays
tttccccaagtttctgagagcatgcatagttcgcctcagaatcagaagccagccagagtatgatggtcgtgaattcgtcgagcatgacacagagaagtgtgtcgtgactgtatacattggatccagtccacaccatgtggaatggagtgtcactgctgctgggcacagattcaaagacacctgtcaagtcgtcgctcgcaaggcattgagggccctgtgtcaaatttatgaagaagaagtggctgacaccccgctcagattctttccgccctttcagagagaccgtcccgcttggatggccaggatgcatgcattggaagagctgcagctgcttgaggatgaccccacagtcgtgtacctcactgcatacctgctcaccctggatgcgcagtatgatttcttggctcggcaccaccgtcagatgattgcccgagcagaagatgcagagaagctcaaccgtcagctccatgtggatctcaccacagctcaagcccatgtagctgccttggaaagtcatgaagtcattgttgttgaagccctgaagcaagccaaggatgagcatgtccagaagttgatggaggcctacttggtaacccataaccaacgtagagccctgcggatccaagagcccgcttcatccaacccagttcaacccaggagagttgaagatccccagattcttgaaggtca

SEQ ID NO: 15732 - DNA, 818 bp, Zea Mays
gggaaattctcgtcggagagccacgcgagagcaggaatcgcgatgcaccgtggacgacctcgccgctaccgcttcatcattgaggttaggcttatcctattcgccaaagttatccgtattgtttttgtctatcttttgctgcgaactgcggggctggagtccgttcggagtacacaggagtgagcgccgccgtggacttcatcacgccaccgcggctgtgctggggaaggaagacgacgttggggccgttggatctgtttaggatggtcaggattagactgtggagcaaagtcgtgtagaccgtagatatcggtgtgcgcggcggtgattaggtcaggcgtaccggttgggggcagtttgatccgcgccattagatggagatcggacgcgtacacataggcctcggtcattttgaatcatgaccattgatgtgtgaaccaagggctagcagtgcgtaccagttcgggcggggtccgatttaatctgggttgtccacgttggatcggtcggctgatatacattcatacctcatcggttgaccgcttttacatatgagcccctctgttttcggtaaatcaacccgccatccacctagagacatagaataatacgtataggtcccaaaatttacaccagaccccatagaaaactctgaaataatgtccttagatcaggaatcattgtgtattaataaaacttgtttgaaaattgattttattgccaaaataattctaaaaccttagaaaatgcataactaattcatcttaattcctttttgacccattccagttgaattaaattaataataatattgttta

SEQ ID NO: 15733 - DNA, 462 bp, Zea Mays
cttgccttcgcctcagtataccacccgcaatccaacggagttgtggaacgcgcaaatggcaaaattttcacagctgtcaagaagatgctcctcgacgataaaaagggcaagtgggccgatttgttacctgaagcggtctgggcattaaacacgactgagtgcagggcgactgggttcacccctttccgcctcctatatggatcggaggccatgacaccgcaagaaataaaacatgggtcaccacggacagtctcgtcagccgtccccgacgtggacgagcccacttcgaaggacctcatcgatggagaccgcgtcttcgccctacaggctttaaacaaataccaagcccaaacaaaagcatggcgcgaccacatagtcatcccgagggaattcagcgaaggagacctcgtactcgtccggacagctcggacagagtccaggggcaagctggagcccaagtgg

SEQ ID NO: 15734 - DNA, 556 bp, Zea Mays
ccaagggagacgtccacaggcgaggtcgtgaccccaccctcgtcctcctcgcatcctcccgtcctcgacatccccgtcatacgcgcccacttccatcctcctccccatgtcgtcatctgctcatcccttccatcctcgctcgtgcttcatccacgctcacccgtgctctctgcatgtcgcgaccgaacgcgctattcgcatgtcgctctcgccatccccacttacctgtgatccgcgcatgcgcgcatgctatgcccgtatgccacacccaccattcacaccccgtcaaagaagctctgcatgccgcgctcaccaactgcgctccgaatgtcgtgcctgccatctgtgcccgcctgcgcaccagacatcatgaccaccgctctcgatataagaaggttaccactcccaacattctatttgttgataccctctgatccacacaaactgttcagtgagtctcgctcgttctttaacctaagttaatctggtgcctgctaatgttttttatcccaccaatcagtggtgccttcgcttacaagttgcatgtatgcaggat

SEQ ID NO: 15735 - DNA, 945 bp, Zea Mays
cagggcccatataacttcaggtaattggtcagtccatttgccctttttgtcgtcaagaagccttttcttgatggcactaaaaatcttgccattggcgcgctcaacaatgccgttggattgtgggtggtacacagaggcgaagacaggcttggtgccgatggaaaagcagaaatccctgaagtcttggctgtcgaactgtttgctgttgtcgactgtgagttcggacgggactccgaagcgacagacaatattttgccagaagaatttttgagtggtcttcgatgttattgtgcatactgtcctggcctcaatccactttgtgaaatattcgacagcgacgaaggtgaacttgaggttcccttgagctctaggcagtggtcaaacaatgtccagcccccagcgttgaagtggccatgtatgggcgatgagcttggtgaattgcgaagggctgcctaagcgaggagagaacttttggcatgcttcgcatgaccttgtgactcgattggtagtgcaaattaatgcgggccagtaaaatccctgacgaatcaccttggcagcgagggccctgggtcctgagtgggagccacaagttccgctgtggacttcttggaggatttttatgccttcggttttagttatgcacttcagcattggctggctgatcccctttttgtacagctgaccctcgactaatgtgaagtccctgcttctgtgctttagtcgtttggcctcattacgatcggttggatgatagtggccttggaggtaaagtgttattggggcccgccagtcttcggccatgatgatgtttacgatgcggtggcctttggtgtcctgagttatttgcagcccttcggggtcgcggacagctggcgtgccgatgatgtggtagaacacgtccgagggcaaggtctcgcccttggccgctgctttggccaacgcgtc

SEQ ID NO: 15736 - DNA, 646 bp, Zea Mays
cactgacgctaaccccaatgggtgtgctccagctgctgctgatcccaatgggtgtgatgcttatgttgttgatgaaaatgacagggaggaagaagacaaggtccctctgacccggaagaacagtcggcagtatattgccagtggggagagcagtggagttccttctcctgctttgtcagccctcgttggcctacaggagttatctctggcaaactttgatcagaccctggaggatatggttccagaggaccttttgttagagccagcggatgatggtgtgatggaggtttgtgctgatgtgcttgatgctgggttgaggtcatcccgcgcctcatcgaccttagagcgcggtcctgagggccaggagactggtttggatcatctcggtcccatgaaagcaactgaagggccctcagccttagaggtggccactgcagaggactcggctctcaaggatggtgttgacgcttacccagcccccgagggtgttgccgaaggtgactcggctcgggtgggaagcgcaagccactgcccagcccccgagggtgctgccggagatgatccggctcacgtgggtagcgtaaactatgacccagcccccgagagtgtccgagaggggcccccctcttgtacctccatggacgtt

SEQ ID NO: 15737 - DNA, 996 bp, Zea Mays
gagggggccaagaccggcgctcccgagcggcggacacaaccttggatctaccccgaccgtttccccaaagcgaattgcacgggtggcgacccacaccgccctgcccacgggaacagcggaggcatcggataaaactgcgtgttcccagagattggtggcggtataattcaattgggtgggtcggtgagcttaaggaggatccaagaatgctagaacaagcagcaaagggacttgagctcacctaaaccgagctggccacggtgaggtcttctttgcggtggcagaaagttgatttgggggaaaacaacgattctccggctaggggggctaatcgagggggagagtgggtgctatggcttcgtggtaacttggcgcaacagccccggccatcaatttataggaaggtaaagcggtggccagtgattttggggaggacgcgcggcggccggaaatgaagaagaaggctctggcgcatgacacaggtggccattcaccgtggcaggtgctccggtggtcaccggacatgcaccacatgattcaccgtgacgagagccagcgctaaggcacgtggggcgcaacggtgacaacacgacggcggcgaggatatccaaccgacgatgagctgggggatgaagtacggcatgcttagccgcaaccgagctcgagtggatcagacgccaagatctttactggactgtgcttatccatggccacggcgcacgaatcacggcaagcacgatcaacggcgacggtccaccggtgacgagcaggggggtggaatcgggatcttattcagtttaacattcactgtaccatggcaattgcaggcagccggtctgacagagcactttggagcccgattttctcttaatttcaaatggcaacataagtcaagctctgcaacaaaccggtagagcattataccatctacaatgttgccatatgattctgccacaaaaacccattggagcatgcttaaatttaggcttaaagttg

SEQ ID NO: 15738 - DNA, 662 bp, Zea Mays
cgaagttcatcgagttggggaggccatagttgatcgaccatcaaccctttgggggatcctgagcctggcctcgtgcgggaccacgctctgttgtgccattggtggggtttttgttggcgcggttcgtggttttgccgcagcttcctttggtgatcctgagggagatgtcctctcgggtgaagtcgctatgcgatgcagaatcccctctacatctaccatgcaggagatggttccgaagtagaagactgctcctgggctgaaggtgatcatgcccttgaaaacaacgaccatggagtcagtgttgattgatgacgcacctctacttggcatatcagctgtcagtgtttgttgtacgaccgcacacccggggttaccttgtggttcttttgagtaggacgacgtcgtagattgtgactcgatggttcgtgcggtagcacgatgagggaaacacgcaggcttgagcaggttcatgccgctttgagaggcgtaacaccctacttcctatggtggtcttctgtattgtggtgagtttacaagctgtgactacgagaatggtgggctatggatgagatgaaaatggtaggggtggctcctggctttatatacacaaccagagagagctccccgcatagttgttgattacgactgaaagttgcctagag

SEQ ID NO: 15739 - DNA, 394 bp, Zea Mays
ggtcccttcaccaaattcaggcactacggccgtttcaatatatcgaggccggtgggtcaaaacctttattttcttgcccttcagcacaacaatggtggccaaagtggcagttttcctcttttttccttgccttctcaaggggtagtagtaatcaggatatatgaagccaattgcatcaaaaaccctgttcaatcttttcttgccctgacccccgaaggctgaggacaaggcatcatcttgtgccctggtatatgtcccaagcaactcgtcgctagtagcctcaatacatttcaaccagtcatcatttggttcatcaaacttctctctatatctgaaggtatatttcaatcgaactaatccaccttcgctggattcagcagtagtctccttcgac

SEQ ID NO: 15740 - DNA, 820 bp, Zea Mays
accttgtggagctcacggcgggctcaatttataggaagcgaccgcgagcacaacgaatttgagcggcggatcgtgatcggtaagaacaaggtgagtcactggtggccggttaacgtggcttttaccgtggcggcacctccgccgatcaccggacatgcaaagcacggttagccatgacgtggtaaagcttctggacatgcggcgaacgacggttatggttcaacggcggtgagaatcttatccgagggatcggtgagcaagggggaaggtacggcggctagccggagtggtgtccagctcaacggcggtgctgatccttctacccgagatgttacccacttgccgcgagcacgaatctagacgccggcgacatgaatcgcggcggagatatcgtcggcagtgagatctctacactggcagcctgatccaattcaggttactgtaccattgcatcccacatcagttagcctgacagagcaactttagggcaaaatctctctagatttcgcatgacaactttatgatccctctgcactacagttgtagagctacaaaccagctataatttttccatagcagcagtagccaaattcctattgaatcaagcttgaattcatgcccaaagtctttgtggttgcactgtcagtctgaaattcagacttcaacagcctgacagcccatctttgggtataattttctccaaatccttctcaacaactatgcttactctcttaagcaaagtggttcacctttgataggtttacaaatttgatgtggtgacctagggtaaattctcactattttggaagatatagagctc

SEQ ID NO: 15741 - DNA, 434 bp, Zea Mays
tcccaactgtatagtgcatgttttgtgttctctgtagaccagtagggctcacgtcgtttggttcttggactctaccggggtgtgtgatctagaacggagtcacgtcatcgtggaactagcgctgcgggcagcctcaccgtggaccgatcgactggagtcatccctggtcaatctcgcgcacgcaccgagactttggaaggtcagtgaagctctctatgccattaatttgaactcgaccacgagattaggatagtcagagcaactgtccgccgccgctgacagtagagtggttccaaagtctctgcgggtaaattgggtgcacgaccgagtttaccgtagcctggagacttggttggtaccgtcaccgtcgtctgcgatgtgtgatcatggcggatccggtgccggttcaccggagaactgtgcggcggtgtcgg

SEQ ID NO: 15742 - DNA, 594 bp, Zea Mays
gcgattgcggggttctagtcgtgttgattggaagccggatcgtctgtgtgacatctccaccaaatcgatagttaccttcacctgatggaagatcgggcacccccgttcctatcaagtggtattcaaagactcaggttttaccgtcaggattaccctagtttagtttatgtttttcttcctataactccagaaaattgccatacaaaaaaaattccgctgtcctagaaccctgtttagccttacaatttcgtttcagaatgctttgttgagtttgtgtccgtgttcgagtcttgttgctggtttaggtcgtgtcgtcatcgtagttcaaccgctccgtcgctgttatttgtttccgccgctatcccatccacctttcccagattacaagtcgagacaccacattactcgatttgccctcgctagccgccttgtgtgaactctcgccacgctagccctagattaggttgcaagccgccttgcatcgtagcccctccttgtctcatcatctggcgcttacctattgcttataccagggaggtttgtgcccctgtgctccatagctgccgctacggttcctgccaatttgtgcctttg

SEQ ID NO: 15743 - DNA, 582 bp, Zea Mays
atgacgctgcgccttcttgtttttttgctgcaactttgagaaagatagatccatctgcatgcttttttccgctgctatggtgtatggttgtgtgctgcagattttggatctgacttgtgagaaccgtcgacggacccctgcacacagtacgtgagacgatcgaggaggatggaggcacgcagtacgttttgttctcgatctctgctacagcatgtcatcttaattaagcctactggttgcatgcatgggtgaggattattcatcgctaagtttccatgtacgtagcatactatcacatgtacaatgaaataggcaaatagcctagacgttcttctcatgacgaccatgtctgccaattaaatatattgcaggtagtaaacctcaagtactgatagccattaattcttggttggagttcgacagagaagatcgaaaagacatgtatagaatactgatcgtctgatcatatcgtccctacctatctgtctgtctctaccaaagtgggctacagtacgttagctagctgtctcttcgaagacactgataggatgtttgattacaagtccaacggaaccacttgac

SEQ ID NO: 15744 - DNA, 656 bp, Zea Mays
gtcaaatgttggtgccctagtggcattctcagcctggaacttgcctcctcccagagccttcactctttttgtgtcgaatcctcctgtcactgatggcagtttgggccttagagtgcggccctctgctgaagaagttagtgccttggttgcctcgctcggggagattcctgatgatgaacggcaagtccattttgaggtgcccctgaaccctagtgatgcagagataagcgctatgcttgatttgctggctgaggactcttctgacgctgctcctgctggggcattggtagtggcgcccctcctagaggctgatacaactttggatactcagaagtctgccagtactcgcccgaggcgcccttgccgagccaatcagcctgatccttctgctgatgagcagaaaaagaaaaggagacgcctccggtgagtatccagtttggatcgggacgctggtacttcggttcctgctgctgaagaaatgcctgtaactgaatttattgacactgaccccaatgggtgtacccaatctgctgctgatcccaatgtgggtgctccttctgttgctgatcccaatgggtgtgccccttctgttgctgatcccaatgtgggtgctccatctgttgttgatcccaatgggggtgctgcctgtgttgcta

SEQ ID NO: 15745 - DNA, 340 bp, Zea Mays
agatgtggctgcacacgtggctaagtgtgatgtgtgtcaaagagtcaaggccgaacatcaaagaccagctggactattgcacccgcttaagatacctgagtggaactgggaagaaattggcatggatttcattgttggactaccccgcactcctgcagggtatgactctatttgggtgattgtggacagactgacgaaagtggctcacttcatacccgtgaggactaattacactggagccaagctagcagaattgtatatgactcggatagtttgtctacacggggtgcctaagaagattgtgtcagaccgaggatcacagtttacttctcggttttgg

SEQ ID NO: 15746 - DNA, 554 bp, Zea Mays
cgcactctaagacccagaccaccatcactagtacgagggttggacacaaattcagaaaatgacctatgaggtggcagattccaagcagaataggcaacaggagcaccaacatttgacactctgcccctcagaatcatgtccagtccgctcaccagatcctcagtaggaattctcttgttggtgacccgggtagagtcgttgataccgctgtacaaataagctgggtacgccctatctttcaaaggctgaatatttttgaagacgaagtcagcgaccacagcttcagcagtcaaacctctatctttcaatgagcagatctcggcaagcaacaccttcgcctctgttacctccgaagaggtcggagattctacctagctcggagtatggacatctggctgcctccccgaccgagggggaagggacttgcagtgattctccatgataaaccactctaggcgccaccctttgatgctatccttcagagggatatcgaggcactctgacttcctcccgcgacacagttccagactggcaccgccaacaagttggtgctg

SEQ ID NO: 15747 - DNA, 635 bp, Zea Mays
tcgatgagctacgtcgtcgccgacttcactcgccgcatcccgctctatctcattgccatccgcatttctctcgcaccttccacctaacacgccccatccacatttctctcgccgacccgtaaaccctaaccatcgctggatttgggtcatcgcagacgaccttgatggcttcagactttaggggcccctcggaggatctttgcgtcaacccaactctcgatcgacagggcatgagggtgcaccttctctttgatattgtccaactcctcgtcgtttcggctgatggcgaaaccctccacaatcacggcaacatcgatctcatcaaagtgggagaccatatgccctaagaacatgctgctcccatggtatgccccttcgaggaccacatgctccacatgtttgggcaacgtctgcagtcagtcaatcaagggcaccatggtcggtagcggaggagagaggtgatcgaacaccacacctgcggctaggcaaaactctagcagctcgatgccatgctgcctgtgcgaagtctccgcctgaacctacacgacaaagcaccatcccaggcgagcaagagcttacgcacctcgtcttttgtcgccttcctcgcctccttagctgccttcatggtgtctcgg

SEQ ID NO: 15748 - DNA, 501 bp, Zea Mays
cacaatccggccaccctctcctcccaagcccaaaattaagcagcgctaaatgttgagaaggacgtggcgaggataatgaaggtgggtattaccgtggttgagagctgggaaggagttggccacggcgcagagcggggagacggcggtgatgtcgcaccggcaagaaattccgatggagttggcggcaatcctcgagtggcttgccacgactactttcctttggtcccgaaggagctcccgagtccaggtccaaggccagatgacggccaggatggagtctccccaacgtcggcacccacgtctctcccctcggcgccacaacttgtgatacagtggtttcaagagatctggagaagaggagggagaggggaacccgcggtcgtgggctcccatatatttgtgaagctaaccaaggcgccacaacggaccgcgaaactacggcggggcgccccaccatgcgcggaggttcggttggaacacgacggtgcgactgcgcgtccg

SEQ ID NO: 15749 - DNA, 708 bp, Zea Mays
gtgatcatggtgctcggatatttggtggatagagcactaaaatgtgctcctggcactgacaactgtaacatttgtttctgttgtcaggatgtaataattatcttgaatgattgcggaagtgaatgtgacgtgttggtttttgatattttcccgacttatgtcaattgcttggctggtaaggagtagtggttgccctaagatgagtagacgtgagcatgtcgcactgccttaagtcgttgccgacttaagccgattgctccgttagtagggtatagtagtcaccctaagtcgagtgagcgtgagcatgttgcaccgtcttaagtcattgtcgacttaagccgattgctccgttagtagggtatagtggtcaccctaagtcgagtaagcgcgagcatgttgcaccgtcttaagccattgctgacttaagccgattgctccgttagtagggtatagtggtcaccctaagtcgagtaagcgcgagcatgttgcaccgtcttaagtcattgccgacttaagccgattgttccgttagtagggtatagtggtcaccctaagttgagtaagcgcgagcatgttgcaccgtcttaagtcattgccgacttaagccgattgctccgttagtagggtatagtggtcaccctaagtcgagtaagcgcgagcatgttgcaccgtcttaagtcattgccgacttaagccgattgctccgtt

SEQ ID NO: 15750 - DNA, 755 bp, Zea Mays
agcagccatccaacgttagtgaagttcgaagctttctgggaatggcagggtattaccgacgttttatcaaaggattctccagcataaccaaaccaatgaccgagctcctcaagaaagacaataagtttgtgtggaccccaaagtgtgaagaaagcttccaaatcataaagaagaagctcacaaccgcacccgttttgacattgccagacatcctcagggttttgtcgtcttttgtgatgcttcaaggcaaggcttagggtgtgtacttatgcaaaatgagaaagtcattgcatatgcatcacgcttactaaagctgcacgagcagaattatcccacacacgacatggaattagcagccatagtgcatgccctaaaaatatggaggcactacctaattgggaacaaatgtcacatcttcaccgatcacaagagtctaaagtatatcttcactcagccagacctcaacctccgtcagcgaagatggctggaattgattaaagattatgaccttgagatccactaccacctcgggaaggccaacgtggtagtagacgccctcaactgaaaacctttcgggaagaaaggaaccaacttcttagaagattggaagaaagaatcagcttagttgaatgcatgtctgggagacaatggcagcctagaagtcaagccaatgctagaagacctcatatgcaaggctcaacgcctggacactgagacagcaggtcttatggaaaaggctcgcaaggaaccacttc

SEQ ID NO: 15751 - DNA, 390 bp, Zea Mays
caaccataaagtgttgaagtagacatctgggtcgtgccttggggccaccaaaaagggcttagtctcatgtctccacaccaatgtgaatgtgtaagcaggtgtcatagtaggtgattgtcattggaattagtggaggtattgctgatgatgcgacctttggcgatgcttcccaattgggtgaaggttgtgttgatgatgttatgtatgtcgatgttgatgaggtagtggtcatatggtgctggtggagatgcaacaccatgttgctcaagtggtattaatgagggagcgtaggatgctagcgtcaatccaggttagttgcataggccaagggggtttattgaagctttgtacctgtagcccgttgcttggtttcatgtagtatggtagttt

SEQ ID NO: 15752 - DNA, 920 bp, Zea Mays
gtatctgtaaggtcacagggacttcgatgtaagaatacccaaccatcgagggatggtgagtttattataataaaaccgaggggctcatatgcaaacatttaggccgaagaggtatggatgaacgagagccgttggatttaaaggctacggcctagattagatctagcacaagcccgaatttgtaggagatgatgagcacacgatcaaggatcttcagttccaatttcattagcacaagattgcattgggtccatccacccgaggatccatggtcataatccatcagggtgaagcggtatccagccttcaatcctaccccttcgatcgagaatctatggctatttcttggttcggccgaaacactacgaccactcgttcaccaacgttgatccacgaacacacgaccacaacacatctcccccaaccctggtggtccagaacgacagcacacgcatgcccggcgacgccatcgctgggaaactcgaattgatgcatgggcacaatacttccctaacccaagctagctacacgacgctacgaactccacgaatcttataaaggacttaccagagcgggagatgacccatagacgagtgcccacgacggacagaggattcacagcatgggtcgatgcccgacgaggaattttattggctccaaccaattacgcccgcctatccttctctatcgcaagcagcagcggccgaagaacccaacgacgaaggcactcgtggtctggcccctagcgcaacggtgcggcacacactctcttccacccaacgccggagctcccgacgcggaattcgctcggctcaatggaaggatggagaagggggtggtcggggatttatatatcccagtaggcggctccacggttaagcgcaaccaactgaaacagagaaaagcacggcggcggttgt

SEQ ID NO: 15753 - DNA, 433 bp, Zea Mays
ctttccaccgcaccgccgcgacttaccctcgctctccgtggctcaccggagtaactgccacggcagtagacaccaagccgctgcgccagtgttcttcttcctctccggccgccgcgcgtcttgctcaaaattcgcggccaccgcccgctcgcactataaattgacctcgcccgtagctgcgccatgtcgtcgtgaagctgtagcacccactcccaccctcgatcgtccaccagcacgcacgaatttccaattccccccaaatccactctccaccaccgtgaaacgagcttcaccgtcgccagccctttttttccggtcagtccaaccctccctctccctcgtttaagctctctcacatgtctgcgatgcttactggaccgtccaattggactaggggtcctctggtcgccgggaacacggcagtatagccgcg

SEQ ID NO: 15754 - DNA, 406 bp, Zea Mays
gatgtatttaaatatcggcaataacaaatgccatggctgattacttttctgtacgagaaaatgactagcatgatgggatgttataagtttataacagaactatcagagtgtttaaagcgcaaccgccaaatgaaccttcccattttgagggtgtttttcaagaccacgatgagtgccgccgatagagagaataaaccaacggtgtcaattagggtccctggtcccggtcccaaaccaagagtttgcgtcagttctatcagatgcgcctgttttgccgttggttgcagcgacactggtggtagcagaactggtaccgctatcttaatccaccagtttggtagcaacgcgaggaccagcttcaattatttcagagatttgctagccattcaatatctctggaccattt

SEQ ID NO: 15755 - DNA, 362 bp, Zea Mays
gtctaaataagcttcagcatcataagaactcatgaatggtggaatagagaacttaatcttagcaaatggatcatagtctggttcaggattatgatgacgacgtctaccattacctcccataccttgtcgattacgtgcgaggcgttgtcgcagcggtgcatacacatcgtcgtcatcgtcgtcgttgtccacaggagagtgagctggggctagagttggtggggggatgagcctccagtacatccatgcgtgtaacaagttcatcaactcgtcgatcaagctgctcataggatgtcgccgcagagtcctggtattttttaaaagcttcagtcatcgcgcgcatcatctccttcaattccatc

SEQ ID NO: 15756 - DNA, 1791 bp, Zea Mays
gaaaattcaaattgcacaaaagctgatgcaaatgtactttctgttttgcagataagaatcaaaattaacattggaggacacatactgatctcttgtttggtcattccagtcattccatccttcagaagctatgatgtctgacattgatgtgtaggcaaagatgacccgagaatatggtctccatgctcgtccaagccatatggaaccggtgccacctatgctacaattgacaaatgagtagccagtgttgtcatcttctgattcccgggcatgtgcagtgactgaaccagtaattgatctttgccctgaaggcactggatctgcaatggatatcaatctgcaattctggagggcaaaaaggtaaaagagcagttggtaacttcaatacattattttgcaatcctttcaagtatttattttcactcacttcatagagtgacctagcatctccaaagataaagtcaatggagccctggatgaaacattccttgaagtaatgtcggcctctgtcgtcatggagtgtgtcttgcgctccaaagaagccacaaccccagaatgctgcttggtcaccattgatcctgattgccactgcctgtgcatcgacagcaccgggcctcggaatcggtgctacattctggtgccaaacgatcaggaaaagtattaatgtaacccatggtgaagcctgcaacctagctgaatatgttgtgcagcatcgaggcagttacaatgaagcttatgttcttgccgatgaatcctgatgcgaaaacagagactgaggcgctgtagaatgtcccgttcgcggacttggcagtatcgttccacgcgatcgctgtcaggtggaacccctgcccctggaatgtgatgttgggcttggatgccgggactgtcaccttctcactgcaacaacactgcagcttcagtaggtagcagtacactcagtaacagagcaatgatgaattctgggaagtatctctatctaaactcctgaacaaggagaactgcttacaagtagatgcccctgttgatccacacaacattcctcttgctgctgtggttcgggaccgcattgactgccgcctgcacggtcgtgaagtcacagcagccattggggtcgacgcagaagatcgacagtgctggcgtgtcggccggggggaaatccggtgggaagtcatcgcacagcgggttgtatctacagccatactgatgatggatagaggtggaatcagccgaaagtgggtacaatgggggaggcattgtgagatcaaagagggttccagccaacggagtggttgaggagtagagatgagcagcggttgggaagtagaggtgagtatagaaaagaaatgcagcagctgctgctgccacaatggtcttggcgctcatctgcatacatgaactgagctcactatttggtcgttggatttgggggtattttaacatgatgaaatgcaccgcgccaagcagcttgaattgcattgccttgcaaacaatctatctcttttcttcaaggttaagacgccgctcaacgcagcctgcacaaccacagcatttcatagttggaaaatccttttcaggtcgttgtcagaatctatgcgtgatctgaccaagctgttgcttccaaggagcaagttccagcagcaacaactcttcatagggtataccccagaacagaaggaataattaaagtacacttaagatcgagcagccgttctaaattcacattttgatgcatttgaaggtcattaacatgcaaacttgccttggttccagtaaaaagcacataaatagggc

SEQ ID NO: 15757 - DNA, 729 bp, Zea Mays
gtcggggagcatcacgtctacgcgtggttcgtgtcttgggtcactgctgagtgcgggaggcccgggttgttgggcgatttcttgccggagacgaagctccactgcgactccgttcccttccacgggccggcaacatcgcagcgacaccacaggtgataaactgccctcctaggttaaactagatcgctgacacgatatacactagtccatgctagcgtggggggctcgagatggccggatggagcaacgctggcgatgtcctccgccgcgggtagcgcacgcgccgccgtctgtgcggggtcggataggggattaatcgggggctgttggatggttgatctgcggctccgattaggtgcgggatactcccttcgcgtaattaaatcaggaccgttggtctcctgatggacgtatctgagtagttatcgagtgttgaggggctgagatctaatcacaaccgtgggattctgatcgggtggttcaaagtgtatacctgaccgctgatccaacggtccacatgtcatcatagcccttcggtcgcgctaaagtgcagatgagcccttgggtttcagaaaaaccaacctgcagtccacccgagttaatctcgagtcttaggaacttttgcgagttagcccctatatctctctgttattagcgcccagtccagagcttaaggaaaatcagataaatgaatttagaaattgattttcaatacacaaataattccag

SEQ ID NO: 15758 - DNA, 636 bp, Zea Mays
gaccgagttacggtgggtcgtgccggtatcttttagatgtattcagccgagtgattaatggcaacatcggtgtttttagaggtaacagccgagtgacttacggtggcatcggcgttttagaggtaacagccgagtgactgacggtggcgtcggcgttttagaggtaacaaccgagtgattaatggcaacatcggcgttttagaagtaacagccgagtgactgacggtgacgtcggcgttttagaggtaacggctgagttagaacgggccgcgtcggccgttttggaaataacggccgatcgatgacatggcacgacagcgtttttagaaataaccgctgggtgatgattggacgctttttggaaacagtatctggccaggaaaaaccccatatgtactgcatcgttgcgcgcttctgcttttcgtgccctaattcttgcttttctgcatccaagctttccttgcgctcgtgcgatactgccttcgtcctgctcgccggcgagattgagatggcgcccaagcggaaaacatcaggttcatccgctgctgtcattcctcccatcgatcccaacagccagttgcctttcgcaggtaaccatatgtcagttgtttctgagtctgatcttctccacctcac

SEQ ID NO: 15759 - DNA, 615 bp, Zea Mays
ctgcgggccccgctcgtcatctgtcgcgcccactgtttcgctgagatgtggggcctgcacgtcaacccctcccctctcctcccgtaaccgctcctccgcacgcggacttcggtaactgcccgcaccagtctctaccattcaaacactcagccccgctttcccctccctcgaccccgtagaatgcagcaaccgcctgtgcctcgccttgtctcgcagtagcatctcgccgcagcgctcgcacaaccgctcgtgcctcgccatcgctgtgtgctcagcgcgtctatagtcgtgcttcacctggcggattgcttgcaatcacagcgcacactgtcgtccactgcgtttgtgacctccgtcgagcgtccatgcctcgccgtcgtttcttccggcaagcctttcactggtgatcccctctcctgtcccctctctttccccttccctgcacaacgcctaccctctgcggccgacgtccattgccagcagcgcgcgcctagctcttgctccctggtcggtggcccctgcggtcgagtgctagacgctcgcatcccctggccggcttcgcgctccctggccgcgactagccctggcagagcaaccacgaagtcttcagaccgg

SEQ ID NO: 15760 - DNA, 579 bp, Zea Mays
ggcggtggcgggatcccaaaatcatcatcatcatcatcagcggtgccctaggtctcaaactatctgaatgcctcatcctcagcctgagtgtctggcactggatctggtactggcactaggtcctcaagggttggacaataagatccaaactagaggcatgaggcctcgagggtgccctggaactgaggcagccggatcagctgcacaaagatgaaacaaagatagtgcgtatacggcagctgtcggcgagcacgaagaccatctaacaccgtgtcctcaatctcacaaataagaaaatcaaccacctcaaattcttagtgtgagatcaaggcaccaagtagctagagctgaatgtgtgtggtggcctctctataacccatccggggcagtagtgtccatctcatcacctgatagagatactttgctgctagagtaaaatctgctagagagcatcgcaacccatctgtgaaaggtggtctaaacagggccgcgacgtgagcactggctggagcgactccgtcgtgagggcgtcgaggaggatctgatgtaccatagcacagactgtgaaggcgagtcgat

SEQ ID NO: 15761 - DNA, 418 bp, Zea Mays
cttgtattgattaacaattatatgaattatttgagattttttacttgtatggttattctaaataatgtccctagtcagagtcgttgactagcacatgtattagttgatgactacatttcacaagtcatggatgaagatgttaaactaataatgttggcgcatgtatgatatgaggctggaccgacccaacgtgagctattgtaatatatttctctttttgcaacatgtataatgtgtccttatacctgagatcgtcgcatgttctcaagatgtgaattgacttacttagggactttcaaacgctactccgtaactgggtagttataaagttagttttgggtttgtcaggaagcatgttgtgaggcatggtcagtcaagatggaatttgtccctctcttcttgagagagatatctctgg

SEQ ID NO: 15762 - DNA, 1039 bp, Zea Mays
aagttcattacaacattcaattatcataagttcattacacacgagtgctatctagggtactcccgaactccttctctaaagtgtccccaaattccttgagaaggtcatcaaggctggctagggacatttcctcggtgtcggacgagttccctattctggtaggaggtagggctagagggtcttcttccttctgctcggtctggcatccttggcttttggtcttcttgcggatttttcttgcgggggcgagcttctttagcttcttgtcgtaatccatcttcagagtgcggtaggcctcacgggtgttggttcctcgccttccgctatctcgagactctcttgaagggacgccttttcccttgtaagctccctgacttgttgctccaagctttccacccgggagtttaggtgagtgcagtgggaggcaaggtcatcatattagttatcgagagtgtggaggtatccagccatgtagacgatggtggggtcatcctcggtagggtctctccctgacagggcctgaagtcttttcctccaggcgggggtatttttgttgctgggtggaaagtagcgaaggggggtttcaaagattactttgttgtagttctggcatagttgtcggagggctttttgggcaacattttggcaagtatctgggaagcggtatctggtgaaagtgacttggaaaggagaatggttcgggtagtttcggctttctcctaggtagactgccatagagcacttctccattccattctcgagatattccttccagacatattctggcttcttgcggattcccatgcgaagcgcacaactttgcaatagatgtgggaacccctccacctctgagcagtaggatgtcctaatgaccagagagtcttccatctggaataggaaaagaagggtctgttaatatcgggggaaaggagagaagatttttcttggggtaagaggtattttcttataaggcaacttttaaggtcagggctgcgacctatggccagtcctatggctctgataccacctgaagcgtctc

SEQ ID NO: 15763 - DNA, 489 bp, Zea Mays
aacccattgtcgcctgatctatagcgaggtcggcccgccacggttccctcgaacacaccagaacgttgtgaccgccatggcacccctaagtaaagtccctaagttggaaactttgagccaattagagacccatcgagaaatctgaggcctactcaacctcatcgtgcgacaacgagccaaaggttctgtaccacgacactgggaactaggggctaactagagcaccacgtctacaccaacgacaccttgatgaggtgaatactcaggcctgaggaaggactggaacagaccccatcccgctgatgcctggggacagatgggacaacgtggagcatgcctgatccagggagcagcaggaaaatacagatggagccagacgatgaccattgatacagccgacgtcgtgggggtcgatttaacaccgatgaggacgaaagttcaagccccccaccgccggtaccctgggctttcggccgtcacatcctaccg

SEQ ID NO: 15764 - DNA, 490 bp, Zea Mays
aggggctcttataaaagatttccagccgaaggggtatcgagcgggccagagccgtccgatcacacccgatcggacgagattagaacacggcgcagtaatatgttgcaacccgccctgaccatcagatccaatatcaacggttaagggacgaccacgtcctggctcgatctaaaccccacacctgcgatccaacggctaggcttcaattgggcgaaggggtgtctatcttctaatcctggccgtcagttacgcgatcgacgacacaggttctttcgtcgacctcctggtgagccgcgacgacgctggctacgcacggcggcgaccgcgccggcgagcgccctagccgagcacaatcccccaaattagggcgcgctaaacattgtctagaatagtatgggtactagggaagattgcataccgagtttaatgcggagcagagcgctaatcgcgaaagcttggggcgtgcggcgatcctggtgctccgtcgtca

SEQ ID NO: 15765 - DNA, 308 bp, Zea Mays
ctctggtgaatgatttgagacacgagtgggtgcgctgggtgcttgaatacctagcgaagctgagagcacgctcaatttataggattcgagggcggtggcttgtgaattggacgtagtgcgctggcggccggagaggcagaagaacactggtggctttaatcgtggcgttcaccggtgcaacggctcaacgattgcgatcctaagtgtgccacggttactaccgcacagtaacgagccacggcgtggcatacccgaggagaacggcgatagtcgcgtcaatggctgttcggccacgtcgccggcgcagg

SEQ ID NO: 15766 - DNA, 328 bp, Zea Mays
gcctcctcgtgtcgtggagacaatcactcctccactgctggccgagccctgaggagtcttcactcctgtccttggtgtatatggctcgcgtggggttgtgataaggctgatcccatctgtactcactctccattgattttgtctatttggggctgaacgtgatgtggagaaatgagtggagatgggtgcaggctatgcacacccaaagtttctacctagatctgctgctgctgttgtgtatctttccctttttcccgattagagatcgggtttgcgtcgaccaccgccagtcgactcgcacgtcctcgacatcggcttcaacaacacc

SEQ ID NO: 15767 - DNA, 427 bp, Zea Mays
ccatgattcatggcgccaagctcccatctttggtcgtagccaaattgaatcccacgctgcaagtacgtgcgggcgcaacccaccattatttcctcggttgtatcgctcggtgctacccgcggtgttcgcaacgcacgtagcgtgcccgtgaccgcagcaaagcctatgtcgccgaccctgccaccaagactagtgtagtgtagtgaagcaacacaataggtaaagagggatggaatgcgagggaggagagacctttgctccgctctagtgaagttgttgtggtggtttgttttgctggtaggaattcgatacgtgttctgatgtgagcactgagccgggaccttagcatgtgcaaaccagatcactatatgtgtcggagtaacttttctacaaaaacagaaagtgtcatgtaccaccttgtctccgg

SEQ ID NO: 15768 - DNA, 426 bp, Zea Mays
cctggattgaggaatggttttatgtcaagaatgatctgattgagagggaggacattaaggagattatccaacgtcccatctggtctcgcttcgaccttcgaaagccgaggtagcaattgaaaatgatgacgaaacgtgtcaaaaggctttcagcaatgtatgtgctttcattggcagaagagacataatccaagagcacatagcctacagagtgtggccacttatggatagctgggagatgccgaaggagactgctgttgggtccagcgaaggtggattagttcgattgaaatataccttcagatacagagaaaggttcgacgaaccgaatgacgactggttcaaatgcattgaggctactagcgacgagtttcttggggcatatacgagggccgaaaatgatgctttctcctcaaccttcggggg

SEQ ID NO: 15769 - DNA, 544 bp, Zea Mays
ttggcaccatgaccatcttcaaggagctaatcaaatcaatccaatagcaagctcaattaaaatctgttaggatgtaacaatgacatcaagaatcaggaacatagaggggagtgaggacgcacctgcagacctgcttcagagttccctgatctgggtggcttgaattcgttgatgatgtaattctaggataggaaaggctggacaaaagaagggatctaacctttgaagctctacgcgttctgaagtgccaaagatgtcatcttagagaggggaacaaagtaagtgtggccaggacagatggaagggcattgattaccatggaagcgagtccagcgatgatatgaatccgatggaggcgcccaagctggtgtgcgacggcaccttgaaaagagtcctgcacacaactataaggtcctgactctccactcctgtagaggtgcagtctggttcccgcgcaccgatgcacgtcccccgtcccagcctcccgcagtgcttcctattgcaacgcatgtcgcacggctccatcacgcccatgcctcgttca

SEQ ID NO: 15770 - DNA, 833 bp, Zea Mays
ccttttcggacctatgcaccatcttacgtgagaggtgcggtatgtgtgacaccttgaatgtgtcggtagaagaaaaggttgctatctttttgcttgtagtgggtcatggcactaagatgaggatgattcgtagctcatacgggtggtcgcttgaaccaattagctgctatttcaatgaggtgttgagaggtgttctatcattatgtcatgattttatcaatcttcctaaccctttagctttaaacctaaagattctaagtggaggtggtttgaagattgccttggagcgctagatggtacacacgttgatgtttttgtacctttggctgatcaagggaggtataggaataggaagcaacaaatcaccaccaatgttttgggtatttgtgatcgacacatgaagtttgtttatgttctagctagatgggaagggtcagcttcagattcacgtgtgctacgtgatgccatgtctcgggacgatgcatttgctattccaagtggaaaatattacctagtagatgctggatacactaatggaccaggctttcttgctccatatcgatccactcgctaccacttgaatgagtgggctgcccaagggaataacccatccaatgccaaggaattgttcaatttgcgccattcaacagctagaaatgtgatagagagaacgtttggctattgaaaatgaggtggacaatattaaggaaaaactcatattttgacttacaaaatcagattagggtcatcaatgcttgttgcatattgcacaactttgtaagggataggcaaagagatatggatgatttacttttaggccaagttgatcaagt

SEQ ID NO: 15771 - DNA, 485 bp, Zea Mays
ctcggcgtcagtctcgtgctgcgtggtccgtcccgatggggacgctgctgaggagatgctctgtgtcgggagttccgtgtcgcccctggactgccgcgagctgctccggtcgtgtgcagccctcgtggagaaattgggggattgtggcggtgagatttttgttaccggtctctcttccgacacattgcaatcgggcatgtctaatgtcacaggaagtgcccatcgatttccgtggtcagatgatgtgacattcataatgtttaggagtatctgtgagccgtttcacagctgataaatcagcttataaatgatatgttctccctgtaggttgtttatctgtttttttcttaatgttgacacttttatttcttcagtgtagatagaaggcattcctacgatctgttgtatgctgttgtgaaaactatcctgctatcccctcactaccagtgtctttccccgttaccatattataaggaagaggaaga

SEQ ID NO: 15772 - DNA, 481 bp, Zea Mays
ggtcattccactcttgatgatcttagacatcttttagctaaggggaaggagggggatttcatggtatgatagggagtataaattttatatattggaagtggaggaagtatcacattgaataaaaagtgcagtttactagggaacgttggatcccctaccaacatgctcaaggtggttgagtcatatgagttgttgatttttcatgtttttagggtagctaggttgaacaatgacatcaatttgttcaactaattattgttgttcactaacatgcttaagggagaagcattaatgagaacttcacgttgaatgaacatgactacaaccaaagatactatctcgctaatggcatctacccttggtgagccgttgtttgtcgagatcattcctctcccatagactctaaagtaatggatgtttgttgtatgccaagaggacgagcgaaaggacgtagaagagcatttaaggccctcaaggctct

SEQ ID NO: 15773 - DNA, 497 bp, Zea Mays
tggctagggtggcgctagagctccgataagcgtgttccgagcaacaaaatgcgatagcatttaaactgaagctagggtgagtttcactgacttaccagaggtcgggtacacgtgtgaatttggacggagcgggcatgggagagtgggtcgatgtgagtgctctctcgaaagtgttctgtgacggcgaggtgatgttctcgatgccctgtcgcggtagtgttcaatcggttgagacgacgagcttcgttaacattcaagaatgctaaaacaaggcatagagaggtatgaacagacctaggaacggttgatcatggcaggatgtctcacggcggcgtgagtgacccgatttgggggaaatctggtgactaggggctacggtgcacgagagagactaactgagggtggtatgagcgcgtaacagagatgcagagcgagggtagtgctcaatttaaaggagccggctacgtgcttcgccaatttgagacgaaggcgatcac

SEQ ID NO: 15774 - DNA, 1333 bp, Zea Mays
gcaaactgaatatcatgcaccttatctgatctatcatattgttatcaggttttttgagctttaactaaaggcgaaaaggcgagcttctatatgtgcataatgtgaagaagatttccctagagtggcgaggtgcagatgcagcaacatgtgtactatttgaatggcagctatgtgtaaatgcagatgataaaatcacaacattacctagttgagtacattactatttgaatgtgaacttgaactctgtcgtgggggtgggtggggggtggagtagcatgatgtataggtaggtggagcaacaggaagcttgtctctgttcacatgaattggtgtaaatatagctgggtttgaaaggaaatgatgattagtctctcttgaggctattcccaaacagatgcacctctaaaaatagaattttaaagttttacgcgttgcattaagtttagtccaccttttggaggtgatatgatgtgcattagttaagtgatttcgaggtctggcaaatgctacatccttatcttgactgcaaggggggactaatggatggaataattttgtctgtgctatcacaatatccaacacttccttttgctactgtcaggttcagtttatggcgagcagcgcaagcacagatctgacggggttttaaatttcgaattgaaaagcctgaagatttgctacaggagagaaaagcctgaagatttaattcagcgaagtagtgtgaaaattcgtatccaagcgaagaaatctgcactgaaacaaacccaaaatcagaagtccagcactgtcccctacctgacccatagaaagcgatatgagccaccactcacctcggctccacacacgagggaattttcaactgtcgaagaaaatagcgcttgatggcgcaataacgaactcgtggagaacgacagcaggtgcaagaacctaatctcccaaatactttagatccacgaagagatgcaagaaccaagaccctaaacatagacgcaagaaccaagaaccctaaacgccctaggtgcgatagaaccagatagggaggaagaagaataccagtgagaagatgaccgccagaggagatccacgccggagaggaatcccgtgtcttagccactgtcgctgtcaccgtcgccgcttgccttgggttgggatggtcggttttgagcggtagagaggggagtgggaaggcacacccggtgggtgctcgtagccggcgaagaccacggctgcaagacggaggtggcggacgcggcggcgaactcggatttgacgttgctgtggcaggggaggcggtggtggtcgccgaggctggggaaggacaccgatgcgttgg

SEQ ID NO: 15775 - DNA, 471 bp, Zea Mays
tacaaccgtatgtatagagcctctatcaggggcggatccagagggggtaaagtgggccatgaccccctctcaattatgtacaatcttttaaatataatgaccggttaatgttaagttaagtttagaaaaaaccaaagttttgatgtgatatagtgctattctaaacctctaaactaaataggtagcgactaaaattagccgaaaaatttagaatgggtcaactaatttttagctatacctttcaaataatcattaattgttacctcaacctagctaaaaccagttaacaattagctttagaggcttagatcagggcataaaacaaccctgtcatgagcctcctcgtcagatccttcccgacctagtcctcgcatccatcaggctgaccctaatcttttcaacgccacctaaactagtttgcctcgatgccccatttcgaccattgcctccttcctgacgcgacgctgccca

SEQ ID NO: 15776 - DNA, 459 bp, Zea Mays
cgcgcgtgcgccgcagcggagctccgaattcgtcgcgtgcatccatgatcgggtgggggtttccgggtctacggggcctatatctatgcacgtcctccttggattcactactcgccctatcattcacgcataagtcttccacctgtggcgtcgcgcagagtgtggtgaggaaccggagccgccacagagaagctgttgtttgtcgtcgactcaatgccagcagtggtgtccttggactaattctggccttggggtgaagcagtggtggtcgggccgcttggattccaccgtcaacagctccagggttgcccgccatcgactgggagtccattaccgaccgcaagccccgcgattcggcctgccagtgcgtcgttcagtggtgagacaccttcctcgtaccccgtcgtaccctactccatattttgaggccgctagcgcgagtaaataggcacgaattgg

SEQ ID NO: 15777 - DNA, 1850 bp, Zea Mays
tcgcaggcaaagcgagcggaggggctattggaccttgtccatgacgacttgtgcggccccatcacgccgacgacactcgacgacaagtagtactttcttctcttggttgaagaccggagcgggtatatgtgtgcggcgttgcttgccgctgtcaaaaagttctaggtgaaggtggaggcaagccaacgtgctgcacactgataataggggtgagttcatttctgttgagtttggatagtactgcgttgaacacaacatcaagtggtagcacacaatgttgtacatgcaatagaacaacatcgtcgagcggtgaaaccatattgtcgtcaccatggcgtgtagtctgctgaagagacaaaacataccaatgatgttctgtggaaaggcggttgccaccgcggtctgggtgctcaccagggtcatctacaacatgacgtcatatgagtcctgacatgggtgcatgtcggatgtccacttcatgcgcatgttcgggcgcgtggtgtacatcaagatgacgaagccacatttgacgaagctagacgattgtgacaccctagttgtcttcctcggctacgagccaggcgctaatgtgtggcgcttctacgacccgacgtcacatcgcaccattgtgtagagacatagtcttcggcgagccaacaccctggagctagaacgacaagtatggggacctagaggtcgacatagacctcatcatggtgtaccactcaatggagcaaggcgtcgggcctgtcgacgccgacaccactacgggctcattagagcccctgatgactctagcctctacaacaagcaccgatgcttccaaggtgggcacatcaatgatgtcgctcacgtcttcgacccctcctcccacgattccatcaacgacaccgactcctcctgcatctcgagtacaggcatcaacttcactgccctagccggagttcgtctcatcgcctccaaacgagaggaatactaggatgccactgacgacgacgttgtgacgaggtaacacatcgtcggagtagcgtcaccacctggcttcgctttgcaataggtagctactaagcttcatctgcagattgaggagctgccaccttcgccaaggtcgagaagcaacagtcgtggcgacacaccatgattgaggagatagactccatcgagagcaaccaaacatggagtctggtgcccttttcacccgtccaacatttgattggattgaagtgggtgtataagatgaagaacaacaccgacgatgaggtgatcaagcacaaggtgtggctcgtcgcaaagggctttgttcaacagccagtcgtggacttcgataaggtcttcgcgcttgttgcctgcattgagtcggtgcggggaggtgtggctggtgcaccacatggacatcaagttcgcattcctcggtgaggaacttgttgaggaggtctatgccaggcagcctctcgtctttcgtcattagcaacgaggacaagataatgcgcctagataaggcactttacggacttcgtcaggcatcacacacgtggaatgccaagcttgacgaaacgctgatggcgctcggcttcagccacaacatgttggagcatgttgcctatgctcatggcaagagtgcttctcgaccactggtgggattctacgtcgacgacctcatcatcatcaggaatgaaaccaactagatcacaaagttcaagcgaaagatgagtgccaggttcaagatggattatttgggctttactctgtttctatcttggtgcgtcagggggacgacgacatcaaattttcctaggcggcatacacacgcaaaatcctggagcatgcagatatggcaaattgcaatccat

SEQ ID NO: 15778 - DNA, 345 bp, Zea Mays
gcatcgccagcacctccatcgatcccggctaactaccgcagtggcctggccgatgccaactcgcgtgtagtcatgaccgatgaattcaaggctcttgtcgacaaccacacatggcgccccgtccctcggtcccttggcgccaatgttgtgacatgcaagtggatcttcaagcataagttccactccgacgacactctttctcgtcacatggcacattgggtggtctgcggcttctcccagcgccatgacatcgactacggcgagacgttcaacccggttgtcaaaccggcaaccattcggatggttctcagtgtcgccacctctagcgcctggtcgaccaaccaa

SEQ ID NO: 15779 - DNA, 515 bp, Zea Mays
gcagcacaatacttgctcatgacctccatggaataatcccaatctttgttgacctaacttatcgctaatagagaatccccatataccatcacccgcttgtccctgcaagttctcgttcttgtcaaaaaccttcttactcgatgcctccaagatcatgccattatcttcctccacttgaccattgaccctcgggtgagctactgaagcgtacttgaggaggatacacttctgctcacagaaatcaaagaactatgcccttgtaaagttaaaccctaggtctgtgataatgttattaggtatcccaaacctagatataatttcttgaaggaactctattacctttgttgttgtcagcaatgcgatcagcttgtatttgatccacttcgtgaacttatcgatggccaccaacatgtgtgtgtaccatccttgagccttcttgaattgtccaatcatttacaatccccagcatgcaaagggtcaggagacggatagtttgtgactgttgtgtggacaag

SEQ ID NO: 15780 - DNA, 542 bp, Zea Mays
aatgagcatagggcagctatcggcgagcatgaagaccatccaatatcgtaacctcgatctcacatataaggaaatcaaccacatcaaactctgaatgagagatcaaggcaccaagtagccagagctggatgtgagtgttggcctctctataacccatccagggcaggagcgtccgtctcatgatctgatagagatacttggccactggaatgaaatctgctggagagcgtcgcgacccatctataaaagccggtcgaaataaggccatgacatgagctgtggccggagcgactccgccgtgagggcgtcgaggacgatcagaagtgccatagcacaagctgtgaaggcgagtcgacgactcgggaaatccaaacagctggcgaatctggctggcatgaatagtgacatcctctcgctcaaaatagaacctcatccattggtggtcggggtcgatccatactgaagcatagaacactcggacccactcctcaacatatctgctgctagtagtcagaagagtgagaagtctaggcaaatatgag

SEQ ID NO: 15781 - DNA, 456 bp, Zea Mays
gtaaggatctaattacttctcttgtccagaaaagacttgccaacatttcatttttatcaaagacagcaggaaaacctttctatcaggtcaatccctgcaatgtgactgaatactccaaatgtgcccaaataggacctttaactaacaaaattgatgatatttaaacaggaaagagttcgatgacaatgaccaatggggttagcaagatgtgtaccttgcatatcctgatcactgagggccttaccacgtgcggcggacggaggtcgccgaggcctgccaatgggcatgacgacggggtgacaaggaccgacggtgagggttagggtttgagagcagtcatgtgcggaaggacggacgggcggtggggggctaggtctgaaccgaatagggtcgagtagtgttcgatcggggccatgagacggcggaggatctcctctgcaaacacgcacggtggga

SEQ ID NO: 15782 - DNA, 720 bp, Zea Mays
agagaatatttgccacccttcttcaaccaaatgaatctaagagcttccttgcaaactaggcatgggaacttactatgaatacaccagacgcagaatagcccatacgtcggtaagtcatgcatggagtactgatacctaaacatgcattttgaagtttgtctttgtagctcggtaatatgtttatacccattactcccaagcacagaccaattcattaatcaaaggctccatgtacatacccattttaattcccgggtgtggaggaattatgaacaacacgactatgttctatctttgaaagcatacaccggggggagattgatggggataacaaacatgggcccacatgtgtacggggcaacaatcattccatagggattgaacccatctatggccagcgcaacacgtacattacaagcctattcaactttctcatggtgaatgacttcaaagtgtttccatgcttcatcatcgtatgcatgcaccatcttgtcaggattgtattgtttgccatttttgtgacatgtcatctatttcgcagattcctcgttcatgtatagacgctggattctcggtatgaacgagaggtggcgtaggattgtcacggggatgtcgagctgcctcttatgtccatcaccagtgtctatctccatgaacctagacgtttacacttcagacaatagtttgcctctacgtattctttcctaaatagcatgcagc

SEQ ID NO: 15783 - DNA, 372 bp, Zea Mays
gacggagaagaggctcccaagtctctcgttgtggaggaggtagagctaaggactaaagagtggagtcctaactaagtcttggcttggcggcgggctctagactcgacatccttataggtgtgtcctacttcctcccgtcgtctttgcctctaggcatccgtctgagcgtctctgttcgtcctggggctgacctcctcctttcataggccgatgagagcgtcgaccgatgatcgcttccttaagaaggagtcactgagtgatggtaagaccaactgttctactccagtgaaatcacgtgcatccgtgagcctcggggttgcctagttgtctcatattatttatggcggatggcacaggaagtgtgggcccgag

SEQ ID NO: 15784 - DNA, 733 bp, Zea Mays
cctgcaagctaaggtacgaactatgtctgcacgattataactatcaatagtggatttaattctatgtatgaagtggtaactatatcctcccctgcatgattgaccaaccaataattgattacaaggaccagccaaacagccctcgcagtcagttccagttcataggcagttcagacttcagactacctctgatctgctaatgccttcccgtcataagagttcagagcaacgtaataatgtacccttaagactgatggtgaagaataacaagaacatgttatcaagaagcactttttatgtttgacgacacccgtaaaacaacacgttgcgccggagaaagtcggcattgaccatcaacggattaccaatgcgcctgcctagttgctaaatttctgatgctgctgctactaggagtaggacatgcatgcaactcatgatggatgtacacgtattccggtcgtgtacctacgacctacgtaggagtacgatctagcatgctctggagcaagaattggttggtgaggaataaacactagtacctaccaaggcagcaagaggaccaggaatgatatgatatacggaccgtgtgtgtgtgacctgtgatgtgatgtcatagggggtcggcattcgcatacaccagcgctacaaaggcgcgaaacgatccaattcattcccgctacagagatgaaacgattaccccctatccttgctcggaattaatcacgcggcaaaa

SEQ ID NO: 15785 - DNA, 547 bp, Zea Mays
tgcgttctcttttgtttcaggccagtctaccttcggcttattgggttgaagcccttcacactgcgacatatcttgtgaatcggctccccactaaaacccttgctttctccacaccacatagtgccctcttttcctcccaaccctcctatgatcatcttaaagtttttgggtgtgcctgttatcctaacatgtcctccacagcacctcacaaacttgccccccgctcctccttatgcgtttttctcgactattcctcggaacacaaaggctatcggtgtctccagcttgagtcgaactgcattcttatttctagacatgtcgtttttgacgagtccttcttccctttcgcagccatgtctaccactcccatggcatcctccgccttggattttcttcttgatgaacatgatctaaccgctcctattcctggagcaagacttgtgcatgcaggtacacctcacgtcgcccatgggcgtgtagaggcacccacgcctcctcccactggattggggacgcctagtccctccgccacgtcgaccggcgctgc

SEQ ID NO: 15786 - DNA, 765 bp, Zea Mays
gtctccactgctttgtcaagctcttgtccagccgtgatagccatcagctcagcatgggtcgaatcagaagatttcccagctaacatactaagtacaacatctatctctgcatcatctggactagctagcatctcaaagtgaatttgcttctcattattgggaagattccgaagaggagcaatcagagcctcaatgtcctcgagagagggtcgcacactaagacccagaccaccatcactagtaggagggttggacacaaaatcagaaaatgacctataaggtggcagattccaagcagaataggtaacaggagcaccaacatttgacactctgcccctcaaaatcatgtccagtcggctcaccagatcctcagtaggaattctcttgttggtgacccgagtagagtcattgataccactgtacaaataagccggatacgccctatctttcaaaggctgaatattcttgaagacgaagtcagcgaccacagcttcagcagtcagacctctctccttcagtagacagatctcaacaagcagaactctggcctccgttacctccaagggagttggagactcaacccagctcggagtacgtacatttggctgcctccccgaccgagggggtagggactcacagtggttttccacaattaaccactcaaggcgccaccctttaatgctatccttgagaggaatgtcgaggtattttgtcttcctcccgcgacgcatctccaaacttgcaccaccaacgagctggtgctgc

SEQ ID NO: 15787 - DNA, 457 bp, Zea Mays
cctaacgggcagacatagagtcggggagccggcgaaattccgagtgcagtagaggcggcccggcgttcactctgtttctctcgtacggctttggtggtgaatgggagggaggaggggaggagcaggccttcatatcccaccgaggaggcatgcaacgcgggcattttgcctagctgttacgcccgctgaagtagcacaggcgaccgttacagcaccggcgattccagcggcatgaccacacgcacgcggagaaggtttacggggcgagaaaggtgcctgctgacgcgagggccccgcaggtcagtgcgatgggtctatgggccaaaggtctatcgcacaggaccaccagtcattggaccaaatgggcgcggttggaacctggcgtccgggcccacacgtcatacaccacacacgcgccatcacacgctctagccacgcaaggaaccgcgcaatgggc

SEQ ID NO: 15788 - DNA, 656 bp, Zea Mays
gctttatctcatgtgaccttccttatagacaggacaacggataggtgtcgactgtcgttgaacggcccgagctctccgatgggtggggtggggtggggtgaggggtgcttggacaaccgcatgccgtagagggccatagctagcttttctctgcctcctgtgaggtgcatgtgcaggtacccatttgggagacggtaggtttccactggatgtctgtagagctctcggcccctgctgttacctcagccacaggccagggcgtggccagccatagtgtatgtatgctcgagagatctctgggtgggtagctagggtgggcggtaggcctaggtggtttgtgccccctggtccatagtgtctgggccccatatatccactgtatgcatgctattgctgtagcaggcaggcatggtactacaaccacgtactaggaaggagtacgttcacactgcctagcacggtggctactgggctggctacagtggcgagcgtattcatcctctatggtccagagcacaaataaataaaacgggtgtctcgcaagtggcaaatacggctttcccaagtgggctctgtccttgcggccggctcccagcagctctgctcttgcagccccgtcgctcccggtcccggtcctggtcccgttccattgtgtg

SEQ ID NO: 15789 - DNA, 1103 bp, Zea Mays
gcaagatctcttagactcagtgaatagttactctctggatggcgggtttagttcctgaaaacagggggtcttatgtgcaaatttgacccacgaaggggtatcgttgcttcacagccatcagatcttaacttgacggcacagattaaaagggatgaagggttactctaagttctaatccgcaccgcacataagcgatctaacggtcacgataaacatttccccacccccaatcttagccgcacaaacgatatcctacggttcggcaacacaccagaaacagctgaccactgaccattagattatcctgcaacggcccaaatccgaacacccgaaagggtattcactgctctaatcctcgccgttggcaacctgatccacggataccgcatctccctcctatctgagcgcgccgccaaggaaccatacccaatctaagccgtaggtcaacccgccaacggtccagaccccttcttcctcagctctcccccgccgatctcccaggttgcccagcctagctccggcgcgacgacattcctcaacccaaaccccgatctctcaccacgcaacccgaccatcgagtggccaatacggtagcctcccagacacagatcgctccaccactacagcggtgcgcccaaccccggaagcatccacaagcaatgaagagggtacacagaggaagcgatggctcaccgacggtgatggcggggcaaagcgctgtgcgatccgaggtcgtatccaatcgccacacgaacacaccggcttgctaacggcgtgaacctgggaataaccgcaagcggcccgccgcatttccccgtcagcaatggcgattccaaggagccaagggcaaatgggatgggggaaggtcgccgtccatacatatataggcatccatgcggtacccaaaccctaaggagtccttctgttaggattcggcgccagggaaatctaccagtcccgcgaaggttgcggcaatggcgcagggaacgcggcctgaccctgtgggtccacaaaccggtgactaaaagcgcaaccgagattcaggattttgtttcattgcgagctgacacccgggcccacgtggcggtagagtctatggcgcg

SEQ ID NO: 15790 - DNA, 812 bp, Zea Mays
agccaggggcgattccaaaagatctacaagactcagccccgacccgaggtggacatcgggttgaataaatgaaaaggtaggggctctttaagaaaataggcgcgacgaaggggtatggatgaatatctaccgtccgatcttcaatctgcggctgtgactagattttgtataatccgaacgggtatgcaatatggacgatctgatcccgatcagacagttgcggcatgttgcgcgaaagggtatctcccggatgtaatcagagccgcacgattccgatctaatggctacgacttaatgggacgcgatctgctttgagccataggatgccaatccaacgataccaatccaaacaccccaagtggtaagctaatcctggccacccattaatggatccgctgccccacgttgttcttcttcgacccgatcatcagagcggcggtgcgcgcacaacagacagtggagccgccccggcaaacaccgacccaggcgagcccgtgcacggaaacgagcacaaagagttgctacacaatgcgacatcatagagaaaacagatccagggattcctaccgggtcttgatgcagcggtggatctggccacagtgcaaggtggattcatgacgctccttaactccgatgagcaattctaattgcccctggccgtgatctcccccgaatacgcgacacgcggcactcacggttgtcgatgaagcccccaatccaaacaccaggaacgaaacgatgtcgaagatgaagcaccccaacggcggcaattcttcctccctcggcctctctgtaccccagatggatcgtga

SEQ ID NO: 15791 - DNA, 319 bp, Zea Mays
atagtatacacgcacataggagtagggatggcaatggatgtgatttatctgcgtacacgcggataaaaaatctgttggacacggttttgggtacgagtctatactcatggatacgaatacgggtagcacttgatatccgtggatatttttaaaacgggtacgaaaaatcagtatccatacccaaatactcgaatatccgttaaaatatctcgtaatcccgtcccacaggcccacgggccatggcccacaaggccacaagcctaggttacaggcttccagcgaagccctcgctcggtcgctctcgctccagaccctctcc

SEQ ID NO: 15792 - DNA, 668 bp, Zea Mays
aaaaagtacacccaatccgaagagctccaccaaagaaaaatcgagtcacagcgaaagcccaaggacactccgcagtctagcaggacatgggtcaggcctgcataatcgaactcagaccgacaacaccgtaaccaatcccaagtgcacaccatcgctaatcagcagcagactagaaacactgctcgtcgccacgaataccctgcgcaacagggatgcggcggaaacaccagaggcagaggccgagtccacaacagcgaaggttctattgtcttttccatggagaagactcggcacatcccaccaaggactgccctgaaaccaaggccacaaaggacataatggctagaaaccaatcggctgacaaccaaagagttgtcgcccacacctaccatccccaacaatataaccagcgccaattccacaatgagcattatcatccccaccaccaaaaccacaacatatactagaaacaccaagaaatactagctctaccgcctccactaccaccacatcaccaaaatcaaccgcctccaccaccagcaccgaaacaagaggacttcgccgatcaaccttttcgaggggtcattcatatgattaccggaggatcaagctccgagttcgacacaaaatggcagaagaaagaccactatcaaagggtcaatcacgta

SEQ ID NO: 15793 - DNA, 351 bp, Zea Mays
gcggatgggacagtacgccgtgatgggagtacgattatgaatgaccctatggcagcataagaggaaccacactacccgagggccatcggtcgagctccctccagcagaatacaagtcaccattgtaaagtccagcccttgaactataaaagggaaggaccccctcttttctgaacacacgagcgcactagttgtaacacgctctcagcaatactacgatcaacactacattggactagggcacaagcctaaaccagtataaacccaccgtctcaaatccatcaccttggtcccgacgactcaccattcagagtgagtccgtgctagcatctccaccgaacacaaatcttat

SEQ ID NO: 15794 - DNA, 702 bp, Zea Mays
gtgatttagttctagaactactagttttgtatttcttgattgctccaggtattgatgcccttgcagttgcttgtaggaggtggatgggatattctacacagtctggtggggagtaatgaatggttcatggcacagcctgctatctcagtttctgatagtagggccattctgctgctatgtctacatgttttttttatgtgtcttcatgtgctgggaagatgaattggtaggagactgacttgttttcatgaactaggaagttggacaagtagtaggccgacatgcctttatccaaagatcttttgtctttcatttgtgttagaaactagctacatggtcgttgcttgagatgttaatattactagcatgtcacacaatgttcataatggatatctcgatcaatcgtatgtttatcttttacagtttgtgtgcctcgatcagggactgacgacagttgtttgaagccataattgtctgtttatagtttctagcaaggtccaaaaatttacccctgttctatgattcagacttcagaggctggcgtagccatggcacacttaaattcctggactaccgtgtatacatgtttttttctcacttcctcctgtgctggttcgtagcatttttacttggaaacgttttctaggatccagattatcgtagctagttagctttagttgtttcaattattttcagttcaat

SEQ ID NO: 15795 - DNA, 982 bp, Zea Mays
gtcgctccaatcgtcgatgcagtgccggggtagatgtcggagccactgcaacgcgtctttccctaggacaatgggcaagtaccccgtcattacgtcctctattgccccggcgatctgggcggcagtcgtgtagatggccagccagccgcccgggtcctgcttgggctcgtacttgtcgacgttggagaccttgaagttgggaggccactggatggctcggagacgcagagtaagcacggagactccacacgtgtcctcctgtcggtgttcatgttgtcagtcctagggaggggtcggtagtttgtcgtctcgaccgtcgccggaatggcccactagttgaggctgcagccgactcaacacgggtggtgcgaattcgtgctgggacgtcgtgatcccggtcatactcctcccggcgccttatctcattttcgtgccaccggtcgcgcgaagcgtttatggagctccacgcgtctcggcggctattgatggcatgacgtaggttgttcgcaggatgagcgaggggtagaaggtgattagctgcctgagtaagcagccgccggtagccttctgtgtctggggttcgcgggagaccgtcagctatctgagccagtacccctccgacttcactcgacgtattcattgcacgagcaaagtaggggtacatgttccaagcgaagagagggttctctcggcgcagccttgcgccttgctcggcttgctctcgttctcggtcctgagcttgtcggcgatcgcgacagcgagagtttcgcctttctcgatgtgcccgctcgttgagagtttctcccacttctgaggcttcgtctcaggatatgggctgcgccggatcctgttccccaactttgtgatgtcgtcatatgttccagcgtctgttcctccgtcgccgcgcttcacgctggggaggttcttccccttgcatggtaggctcatcatcggaggtgggtgctgactccaatccccctcg

SEQ ID NO: 15796 - DNA, 611 bp, Zea Mays
cttagagtctagggaagggggccctcggctacataggtcgtaccctcggtccgtcttctctagtgaggttttacccctcttctgaaggcttgagagtggtagggatgagggaggagataaatgcgttattgcttatttctcacaggagccggctaccaggatttatagcctgagttgcaacagaaaggggaaactaatctcctatgatttaggatctccactaaagggaaactaatctctataatttaggatttctactaatctctttcctcttctagccgtccttccttctctagaggtggcggctgcatgccctgtgattccttccttcttctagccactgattttctggctttccttttctagtgctggcgtggccctagctgctgctcgctctgcagcgtgcctcacgtctctcgcgcacctccgacggttataggggagaccccacatgatagagtagttactccccttatgtatgtctccaaggaacatgtcgaccagatgagctctttgaatggtttggtgtactctcaggtgtggcacttgacttctttattgttgcacttctttatcctctttgtcttgttcatctttatatctcccttgat

SEQ ID NO: 15797 - DNA, 867 bp, Zea Mays
aaagctacggtgaattggtaccaagcaatgggagcattttcagggtaagtggtgcagtagtgagaccaccacatccctgcaggtccatgcaattggtgcgctgcatactctgtcttgagatcatctaaaagtctcaatagacagaacttttgttccatcgtgttgatccattcatctgcctccatgggttctgctgcttccttgaatatcggcggcctggtatccatgaaatccttgaagttgctatactggttgactccatgagccccctgaggctgcccatggcgggtcttgttagcaatgttgcgaagttctgcctccatgttcctctacaagttctccatgttcctctgagctccaagaaattaggcgaagaactactctggtgtgaatggcggaggtggaggaagtggtgcttcttggtcaccctcctagttaccactacccgaagctctagtggcccccgagttaatgcggcgagtagtcaccatctgcacatttttactacgagtaagcggcgagtcacgttgcacatatgtgaaataaggaaatcatgacgtacaacatatcatagaagaaaacttcatgtgaaaaattgtaaggcaagaatcacatcccaacatgcacaacaacaacaacacatacttcataatatataaatgcacatacaagcaaattgttcctctcacatcccaaccaaccaaaagagtgtttttcccacacacgcacacctgcgtcagaagccatcattacatttgccttactccatgagtcctgctcctactcctaggaacactatccaaaagggttagcctatcttctagcgacagctaacaactacatctgaatgttgtcggtctcggagac

SEQ ID NO: 15798 - DNA, 635 bp, Zea Mays
cggatgcaaagagaaggatgtgagaaatggtatatcctgttttcctgatattctgatactctcaaaaagactgaaaatacagatttcgccgaacaagtgtgtatttctctaggaataagcatggaatgtatgtgaccgtgatgtcataacataataatagaagaagaatcatctaacattgcatatgaaagattggattctgaacgaggatgtgagctcttaaaggcagggaacctcacaggggggaaaagagagagagagagcaaaatgataaatgatctgtggcctaggaggtaaagaatgatgcccaggcccagataagatgtgatgaatgaaaccaccgtgggaggaggcgatgatgaaacaacaggcagaaaaaggaataagatccggccgatcttgggaacccgatgttccactcacagaacgcaagtggagccaacttttgcagacaggaaactggcacatggcttggacaacgacgccggaatgaggcgacgctgttacagccttgttcactccgtgcgaatcctcagatgcgaacttagtacatttgtagaaagtttgcaagatcagccaccaagagctagctattcaccgtcatggacgccaagatcagccgtgatgtactcatg

SEQ ID NO: 15799 - DNA, 527 bp, Zea Mays
gccatctttcttctccacgaacaagacaggggcggcccaaggcgaggtgcttggccggatgtaacctttctctgacagctcatcaatttgctttttgagttcaaccaactctggtccggatactctgtaagctctcttaaagatgggcggtgccaggaagaagctctatggcaaattcaactttccgctctggtggcatacccggtaggtcctttggaaacacatctggaaactcggacaccaacttgattgtcctcttatctcaattgggtctgcttcactgctatcgatagccatctgataacaacttcctttctttggctcagacgggactgactcggtcaccacttcctctcctagtggggacaccaacttgattgtcctcttaccacaactgataactgtttgatacttatctagccaattcatccctaggatgacatctattccttgagtacccattactatgaggttagcgggaaacgctatcccccttatttccacacttacattcaagcaaatgctat

SEQ ID NO: 15800 - DNA, 410 bp, Zea Mays
ctgtgattaatccatgatgatccttggaaatggagatgacaggagtagcatgcatgcggccttgtcttgcctctctatgtatctgttggaacgactctgagggagggagaaagaaaaggagcatcagctgaggtggtagtcaggaagtgtgtgcagggagtgtgtggaggtgagtgaagaggcgcttttggggatgagctgtcagcagcattagatgctccccgccgctctgacaccccgcacctgcgatgtctcccctcgttccgctgccccgctcccgtctacccaccaacgaaacacatccatcccatgccacggagctcatcagtagaccatcaaattgaagaagccaaatatgagatggttctggcggtggtggacactggccatagagctcctccttctagcct

SEQ ID NO: 15801 - DNA, 597 bp, Zea Mays
cttagttcgttggcaagtgtcgcaccaggccacatactgtgctatctctttcttcatccctctccaccagtatctggttttgaggtctaggtacatcttggtggtccatgggtggatggagtaggctgagttgtgagcttcgtcaagcagaacttctcgtgcctctccttttggtacacacagacggttcttgaaccaaaggattccttcctcatctgtcctgaagtccagaagttgttccttgcgagctttttccataagacctgttgtctcaatgtctaagcattgagccttgcatatgaggtcttctagcattggcttgacttctaggctgccattgtctcccagacatgcattcagctgagctgattctttcttccaatcttctaagaagttggttcctttcttcccaaaaggttttcggctgagtgtgtctgctactacgttggccttcccggggtggtagtggatctcaaggtcataatctttgatcaattccagccatcttcgctaatagaggttgaggtctggctgagtgaaaatatacttcagactcttgtgatcggtgaagatatgacatttgttcctaatcaggta

SEQ ID NO: 15802 - DNA, 636 bp, Zea Mays
atgggtgtaaccttgttgaagctgagcccaatgggtgtgatcctgttgaagctgaccccaatgggtgtgatcctgcaccatctattgtccgcatttttgacaaggacgaagaagaggaagaagaagttctgctaattcataagaatagccggcgttacagaggtagtaggggggatagtgatattccttctccagctctgtctgctcttgttatccttcaagatttatccataacagatcttgatcaggcccttgaggatgtcattcctgaagatatgctgttggaaccgactattgatgatatgatgaatgtttgctctgacgctccagacgcgggattagaggtatcccgggcggtatctcgcgcatcgtcgactttggaaggtagtcttcggtgtcaagaagttggtcaggattgcctgactcccatggaggtgactgaggatccttcagccttagaggtggctgttgcagaaaacccagcccctaagggtgatgctggcggttacctagcccccgagggtgtcgccagtaatgatccggctctggtgggtagcgcaagctgcaacccagcccccaagggtgttgccggtagtgatccagctccgatgggtagtgcgagctgcaacccagccc

SEQ ID NO: 15803 - DNA, 701 bp, Zea Mays
caggggattttgctttttctgccatgtcttgctctgtcgtcttgccgatatatgaaatttgctgactcaccttatcttcaggcgcggcggccttcgtctcagtgggcgctgaaggcccagcttcggcctcttcttggattttggcagcttcggcagctttcttggtaggagcaggagttaaggccttcatagtctctataacagcgtctagcacgctggccatcctcctcctcttgggagttgcaacaggagttttttgcatcttcggcaaatctgcctcagccggtgggctcaggatttctggcacttttatcactttttccacctgtggctcttcggccttatcatctttagctttggttggcccgactgtaggcatcttcggcactacaatcggctcttcagcactctgcacaatcggagcagtttgttttgcttcggcagctgaagaggccccttcaccgaattcaggtactatggccggttcaatgtaacacggccagtgggtcagaaccttcacctttttgctcttcggctcagctggggtggccgaaacggcagtctttctctttttcccttgccctcgtagcgggtagtggtaatcagggtatacgaagccaatcacatcaaataccctgttcaatcttttcttgccctgacccccgaaagctacggacaaagcattatcttcggccttggag

SEQ ID NO: 15804 - DNA, 691 bp, Zea Mays
gtcgggttttatatctatctaagctttcatcaagatttcttttaatttataaacatatttacatcctatcacattcgtgccttttgtcggtggaactagctgccacgtcttattattcaagagagtcgtgtattccagatccatagcattttctagttggaattactaagcgcttcctcaagacactgggttcaccagaggatgtaaaacagctatacctgatcgtaccaccggtgtatactttctccttccggatgccgctcctcagtcttgtgtgaggatgcagagcagccacatgaactggttcaacaattgcttcctctgacgcctcttgtatggtcaaatcaggtggaggcacctcagtagatgtcgtaggctgcttagggggtggtgcatggaatccctcaggtatcatgtgttgctcgtcggtcatagtagcgtgtacaatagcggcaggctccctatgctgatcatcggccatagtagcaggcactatagcaacttggcgcacatgcccatgtgaatggtcagagagtggttctccctccccttgcggcatgcttgcaacattcggtagagatgtgtcattttggtgaacagtacctcctacatattgatgatgttgtactgcaatattctcattaggcatgttagtatcaacagggaaaaagtcagggacaacaggatcaca

SEQ ID NO: 15805 - DNA, 439 bp, Zea Mays
aagcactcaatttaaagagatggggtgcgacttggtccaattttgggcgagagtgaaacctattgccacggtggaatgattaccgggacctaccgtggagctcatgcactcaccggtcgacggggcactacccagagagtgccatggtcacgagactatggtgaatcagacagctacgtggcatttacagagaacaacggcgaggtccgcagtgacatctacttaggcaaatgggtacgatgaaccgaccggtgacatggcccgagttcatcttgaagtcgagatcttttaccctttggtattatccacttcatcccacgcacgattcttaccggtgacgcggatcatggcacggggatcaccgcggtgggtgcacaacacctgagatcttcttcagatacggttcattctgaatagctcattcaccagcttgacaggg

SEQ ID NO: 15806 - DNA, 701 bp, Zea Mays
cgcgtgtcggtatgacgtgtgaagatcaacgatgttgataaccgctagcttgtaatggggaatttctcgtcgttgttggattggacagagccgccgcgaggcgtttgggcaagcttcaaccacaacttcaacggccggtaagttggctactaacctgctcatcatgtcgtcgtcaaatcatgtagcagattcgcttagttctaggccactaggttggctcagtaccgtgctccggcggggcatagtggccgaacaatgagcgctgccgtagtttgggtcggctgggtagctgggaaaggagatgtgcccggtgccattggatctcggagggatggctcggatttgaatgtatgggcaccggttctgtgggtggatctgtgccgttgggtccgaatgagcggacgagattagaactcagtcgtgtaaaacccgggctattggatctagatccgagggcccctatggcgtaccggttcgcaatcacaccgatctaatctgagccactaaaatttgatcggttggctcacaacagaagttaccctttcgtcctggtaaaattgttaaataaaccctcgggtttttattattcaacccgtagtccccgcgggagtagtctgagtctggtagacttttgtaagtttaaccccgggcttctctgaattagtgtgcttagtccagtgacttaagaaaataggaaaaac

SEQ ID NO: 15807 - DNA, 354 bp, Zea Mays
ctcgtctagttttcctttcacctttgtctgcctgagtgcctgccacatttcccttgccttgagatgtgcttccagaagcttttgaaagttggatttattttgctttggatagggacaatccttgatgaaattcctaaacttcccacagttgaagcagctgttaaatgaactgggtaaggccgagaaacgagtaccatgggcactcgactgattgttttgagcaggggcagtaatgggacagatgaaaactaattgattgaaaggataagcgggtgaacgaggaaaagagcgatttgggttaaagggacggatcaccaaccttgaccgcttcttggatccttgagaggatccttc

SEQ ID NO: 15808 - DNA, 613 bp, Zea Mays
aagattttggcgtagagatgagcacgggtcctgttactactcagttcaccgtacccacttgcacggcgacgtggccgggcgaccatcaccgtggtggccgccgtccttcgtggttgcgccacaccgtgaccttttcaccatgtagctataaccgtggcaagcaaggagttactgcccttgaaccgttgtaccgacaggcgccacgatgaactcgtccaatggaatatctcaccaccgtcgtgatcgcctttgtctcaaattggcgaagcacgtagccggcacctttaaattgagcactacactcgctccgcctctctgttacacgctcataccaccctcagttagtctctctcatgcattgtagcccctagtcgctggattgccccgaaatcgggtcactcacgccgccatgagacaccctgccgtgaccagccgttcccaggtccgttcatacctctctatgccatgttttagcattcttgaatgttcacgaagctcatcggctcaaccaattgaacactacggcgacagggcatcgagaacatcacctcgccgccacggaacacttctgagagtgcactcacgtcgacatactctccccgtccgcttcatc

SEQ ID NO: 15809 - DNA, 351 bp, Zea Mays
gtcgggcggaaggtgctacgattctgtaagatacagagcgtcttgtaaaaagcacacgaagcaagcagggcaaattaaccacccggcaccacaaccggcatgcaacatggtacgtgggatgtgtcacatcccgtcaaagccgcccacgcgaagagagatcatggtggccagaccttccactacgctgccccggtaagccacattacgtcaagctaggtaaaaaaccaaaacacgccccagcctcccacctagagagaggggtggactgagcaagctcctagagagccacaagctaggtgaccggcctataggtcacttgttgagctccacgtccaaggtcgtacctcacat

SEQ ID NO: 15810 - DNA, 406 bp, Zea Mays
attgacaatgcacaatactttatcagtccagggcaaaacatggtcgcggtagccatgatactctgatccatctcggagcccaatgaaccggaggtaagggtaaatactttgtcatgaatttctagggcacctacaagcgataagaaagctcctaggacctgaacaggtacacccagaagagtggagaaattctccgggactacatctgaaggttttctcagaaaagaaacgagctcccagacaccaccaacgccgacatagtgagtgccttcacctatggcaccacaaatgaggcactcgtccatgagctcgggcgggggagaccgaagacaaaccgcggacctcctcgacatagcaaccaagttcgctgacggggaggatacagtaggtgctatttttcgtaacg

SEQ ID NO: 15811 - DNA, 409 bp, Zea Mays
gctaggttgagttcttaggctccagacgacatagggcaattcgcgtatccactttcctgcgaacttttcattcttttcgaagacccttttcctgagtgcctccagtatcatcccgttagctcgctcaacctgcccattggccctcgggtgtgctaccgaagcgtacttgatttgaatgcccttttgctcgcagaagtcgaagaattctgaacttgtaaagttggatcccaagtcagttatgatattgtttggtattccgaatctgaatattatgtcttgtatgaattccacgaccttggctgaggttaaggaagcaatgggtttgaattctatccatttggtgaacttgtcgattgctaccagtacatgagtgtatcctccttgagccttcttaaaaggtccaatcata

SEQ ID NO: 15812 - DNA, 612 bp, Zea Mays
ctcgcgtgtcgaatatatcacaagtccagaggctctggggggcaggctcaatcgggaagccaagcaaagctccctgactcaagcatcacggacagtttgacacctgcgcgtggacggtccggtgctcaaacagatggtctggctgactcagccggacagttcgcccataactaggggtgtcgacctctacacaaacaaaaaaggggacataggggtaaagcacacataacgcacatggttggctggttaaagtcggtcctacttttgatcaatttctctccaaatatgctagcaagaaggtcgttctacgtgatcggccaacaaagaaacactggcacccgctaaaacaaaacggcacaaaaagcgaagcagcaagcatcacctagtcatccagtgatgccagaatgatttcacccggctattcatcattgatatattatcctattcaaatgtggaacggtacgacgttgaacccatggtacatgcatagttcctttgcctctttaggctagggacacctccattctataccttttgatctattcatgagatggtcatagccaagaaagatgcaatctgaaactgcctttatgcattggagctcaattgaac

SEQ ID NO: 15813 - DNA, 869 bp, Zea Mays
ctcgggtcgcaatggtgttggatgagcttggtccagggaggcgaagacccgacgtctgagttatgcacaacaggagcattgatgcccgcgcagggaggttgcgcacacctgaagagctagatactcaaagataactcagatgaagagtggccgatctctagataagaaggaatgcatgccacattaaaagatagattcaaatagagttatatagtcatcacgacttgtaaagggataaccttttggtcatctatataaggtcgagggggtatccctatgaaatcatctcatcttgttacatcccatcaccacctcatagcatagctcactagccctctcgtagcaactatgccaccattagattgataggataactcactttccaccacccatagctcatatgtaacctatgtacaccaacaatactcaagtactcatcctcgataggacatagggtgttacacattctagcggctcgaacctgtataaactctcgtgtgatctgacgtgcacccatgcgtaccatcgagtcgcaatcaatgatgttgtcctgctcaaaagcatcatgatgactccatggctatcatcttcaacaccccgatcgctttcaacaccggggagatgttctgctttggatccctctcctacatcgcgaatcgagaaggtgtcctgcaccgcatcgcggatccatctcagaagagatcttctctgatggcactgattgcggaggcagtctcaccccacctgacctcagcgagaactgctccgaagaactccaaggcgcgaatacctcaatcaacttccgccctgcgcaggattgcgccagcattgggcaggcctaggaccatagcaacacctgtggcccgacc

SEQ ID NO: 15814 - DNA, 439 bp, Zea Mays
cacgtattgttctagtagccctgcgtgcctatgaagctcatcgtggcaactatttgaccaattcgggcgtaatcttgtgggaatgcgggctcgacatcgcggtttccgtcgtgcgcgtgggtagagcgttcttggagtgtgccagccaaattgatgtccataacagtttaagatagggtagaatttggtggggcacggagcaacgggtgctcgggtatcccatggtcgtggtgcgatgaaggggtgtttgtcctcgtcgccgtccggggtcaaggttctagttttaaaagacaaagaacttggaaggggcagggtgtaatgtgtcagtgacacgttaaagtcagatgaggacttcgtttcagattttcaaactagcgagggtctttgtgcaaatacgacggcgcggccgcaggcgcgcctttattctgtataggtctgg

SEQ ID NO: 15815 - DNA, 1178 bp, Zea Mays
tcgaggagcacactatgggcaaggacaaggtaggtagagtggcaggggtcgtgagcatcggtcgatcgatgggacaaagaacaccgaccaatctccttgtgaccatcgagtggatgtggcaagggtcatggtggatggcgacatgataatacacttgttgcttgtcacaatagtggcctaaggcactaggctgcacatgttgctggtagatgcgtatggggtcgacgaagcgagccagaggagccaataaggacagatcagtgtgtgtgccgcggtcggagcttacagggccacacatggcacagtcaaaggcaatggagccacatgtggcgtgggtggtgtcagcgggacgctaggactataggtggcatggtgggagatggtctagcaggtaaaagaagaggagggacgtccatagggtcagcatccaagatggtgtcaaggttagggggcgacgagctggcaagaagatagatgaccatgtgaaacaccacatggtgggatatgatcacatgttgagtcgtgagatcgaggcatcaatacccattatgatcggaggagtacctgaggaaaagacagcgagtggagtggggtgttatcttatggggagcggtggcatatatgttggaatagtaggcacacacgaagacatgaaagtactcgtaggtgggggttatgccaattgccgaagaggacgaataagggaatggcgtggctgactgccttggagggaagccaattgaagaggttggtgacagtgtttagtgcctcaacctagtagcgtgcgagaaaggaggcctataacaggaggcaacatagcatgttagtggtggtacgaatcatgcactctggctctacccgacctttctgcggagatgtgtagggacacaatagccacaaatgaacaccatgacagaggaggaaggaacaggaggagtgatcaaactcgtgaccattgtcacactaaacaacatggattatatgatcgatctgggtggagatccaagcaaagaagtgtgagaacgtggcgaatgtatcagacttcgtacgcaaagggaaagtccaaagaaaaaatgagaggtcatccagaattagcaagtaacacataccctgagatactgaaaacaagtgatctccacatatcatagtgtacaatatcaaaagcctaatagccctag

SEQ ID NO: 15816 - DNA, 372 bp, Zea Mays
accacaaaatccatggtggtatgctcccatttccactttggaatttccaatggcttcagtaaacctgcagggtgcttatgctcggccttcacgcactgacatacttcacaggtgaccacatacttagaaacatcaaccttcaaccgcttccactagaagttttgcttcaaatctcggtacatgttggtttcgccagggtgaacggtgtaaggcgttttatgagcttctctcaagatatccatcttcacctctgatttctgaggcacacaaagacggcccctgaaacgaaccaaatcattctcatcaatggtgaactcccggggtttaccatcaccaaccctctttcgagcttcctgcaatagacgatcctgc

SEQ ID NO: 15817 - DNA, 549 bp, Zea Mays
gggagcaccccaacagacatcataggaactaccaccccgcatgcaccgaggaaggaggagtcgctgccatggaccgaccacctaggccaccggtgaagaacaacaacgaccatttttagaagttgatggattcaccgtgtaagaatctccttcgtccgccacaaacttcggaagtgcgaactcctaaagagattcatctccaagccatcagccaagaaggcgaagcagaagagccaacaaagctggcagaacaagagacccccactaaagacttccccaaaaccacgggatgcctcatgatcttcggcgagggagaagcgtacgatgacaaatgccaccacaaggcggcccgacgagaagtgttcgcagtgaggtctgtcgtcccgtgatacgtctggtggtcaaaattctcgatcgtcttcgaccgccgcgaccaccccgacgtgatcccgcatctcgagacctaccccctcatcgtcgagccaatcgtaggctcaaagcacctcaccaaggttttgatggacgggggaaccgtctcgatatcatgta

SEQ ID NO: 15818 - DNA, 700 bp, Zea Mays
ctttgcgccgtgatttgcgccgtcgccgcgattcgtgttctctggtgaggggataatcacggcggagtaaagatcttggcaccagataggctcgggctcagtcgcagatgagtttcaccgtacccacttgctcgtcgatcgaccgagatagacctcgctgccgttggccacttaccgttgtgcgccacgtgctcaagcgttgtacaacgtcatagtgaatcgcgtcttgcatgcccggtgatcgccagagagccgccacggtgaaagccactaagcttgcgcgccagtaaccttctttctctccagctgccagcatgtcttcgcgaaattggatgccaccgctgagggagcctctaaattgccgcccccgcctgctctgctaagtaattgtgcacccagtaaaccaaccctcacctcagatcgtccaccagagctccccaatttgggatttcccccaaatcaaccaagaacaccgtgcggtttgacctcaccgtggccaaagtgtttcaggtccgttcatgtccactgtcctcttgtttcagcacccttacttgctcctgatactcgttgacccatccgatttagctaggcggtcctagatcatcgggaacgcgtttactcatccgatggtccgcgctgtttctgtggaccggatgatttggagctccgttagtaaaattgagtgaggggaatggttagg

SEQ ID NO: 15819 - DNA, 485 bp, Zea Mays
gccaacccgaggcagcgccgccgcaagccttggcggagccatgccggcgatgcgcccatcgtgaccacccgaggatcctaccctgcccatgactcgcctacgcgtagagatgacttaggtgaattcaatggcggcctccttaccttcaatcggtgattgcgtgatgcgggccacacggcgatgcggacgcctgcgccgagctacttaccggcgagcaatccaccacccagccgatccaatctccacccgccgaggtcctgagaaggtgcatcgtgatccgaagctccaagcccagctacgcctccccaatttgagagtagaccgaattttttttctcggcggcgacgtgagttttctggtccacggcggcgctcgcgattcgctgatctacgggtgaacgaaaccacaggacgccgcccgatatatatatacaccaggagggtccaacgatggccgagcaaccggagatcgttgcggagtttgtt

SEQ ID NO: 15820 - DNA, 558 bp, Zea Mays
tacgaatctggtgcttctactaagccttgggcgttgtggtgattcgctccttagctttggccttcgtagtcttctggatcttctagtgtgatcgtctatgcgtctcatgtgcgtgtttgttgcgtacttcctcctcttttgtcttctggtcgatctctctcctttttataggcaaggtggggttggctatcggtagcttctcaagaaaggagctatgacgccatggtaaaacaagatgttctaccctggtaaagtcatgcttgtccgcatgtatctctgtcgtatggactatcctggtcgcactctttatggctagcgacgtgggtgacaaagagctccagtatcatcattactgtgtctgcgccacatagacccctgactttcgtagcctcggtcttgacgcgacttatcgtgccgcgagccctttatacggtcagtgcactcaagcctaaggctgataagtcatgagtgggccgcaagcctaaggaccgtaggtcatgagtggaaggaggaccaactctcccactgtgctcggtgccaggtaggcctgggcattcg

SEQ ID NO: 15821 - DNA, 2172 bp, Zea Mays
accaaatctctcacatctacagaggtttcgtgctggattttgaccggggaaagacagacggcagtgattagatcaaagtatgttcaagtcctcttaaaccaggacatgagtttctttgatacatacggcaacaacggtgatattgtcagtcaagtactgagtgatgtcttgctcattcagtcagctctgagtgagaaagttagttcttgtgccaaaccttccatgctcatttgtgtctgtcacatatatatggttactgagtgatttgtcgtttttaggttggaaactacattcacaacatggctacatttttcggtggtcttgtcattggtctggtcaactgttggcaaatagctttattgacattagcaactgggcccttcatcgttgctgcaggaggaatatcaaatatatttctccataggcttgcagaaaatattcaggatgcttatggtgacgcagcaagcattgctgaacaggtgtgtggcatactgattttgcaatttgagtaccttttctttcttttgacttcctcaaaacaaacaatatttacacaatcaagcttgaaactctgaatggtaatttcacaggaaaaatgttttcaatgctgggtcattaaacaaggataaactattaagatggattgaaaatatttctcaaaactgtcattatttttcaatgaagagcatgtttggactgaagatatttctttctgctatctacattttctccatgatactagttatggttgtgacacaatattggcaagttaaaatttatttttaaaaagcaagctttattcagttaacatgatgttgcacaatcaggttcgaagattggacaaaatgaagattttatctaatgtctattattaaatcatccaccaaactgcacctatatgtatggtcgcataataagactcaaggatctgttgaacttgcttgtaggggtgcatcattaggctaggtttctcacaagattgcctcttgaattttgaaagcgccacaagacaagggtaacagaaacaaataagcacacgcccgcccgcacacgcacacacacacacagagatgtatataggataatgtctgcatggagcacctaggccttgaaaactgcagagtgcagacttgttttaagtcaggcaacgacttggtgcattattttagctaggaaaatccactgtttctgttctactggtttactggaagctcaaaaataaactaagcatcaatgcttattttgcaggcaatcttgtacattaggaccttgtattccttcacaaatgagacccttgcaaaatattcttatgctacttcacttcaagcaacactgcgctatggaatccttataagtttggtgcaaggtcttggtcttggatttacatatggccttgccatatgttcttgtgccttacaactttgggttgggaggttcctgatctctcatggaagagctaatggtggtgaagttgtagtagcactgtttgctattatcttgagtggactgtaagaatgtagattttaagagtttgtttttagtttaatttaaaaatgtaccctaatattcatcaaagcttttaactcattgtagtggacttaatcaagcagcaacaaacttctattcctttgagcaaggacgtatagctgcatacagactatatgaaatgataagccgttcaacatctactgtgaaccaggatggtagtaccttgtcttcagttcaaggcaacatcgagttccgcaatgtctacttcagctacttgtcccgccctgaaatccccatcttaagtggattctacctcactgtacctgctagaaaaactgttgctcttgttggcagaaatggttcaggaaaaagcagcataattcctctaatggaacgcttctatgacccaaccttaggtattatcgttggcatctattagtacctaatattttatttttttacatcaattatggcttatgtttacctgtgggactatacttatatgttacaggtgaagtgcttttggatggggagaacataaagaatttgaagctagagtggttaagaagccaaataggacttgtgactcaagaaccagctttgttgagcttgagcatcatggaaaatattgcatatggtagatgtgccacaactgaccaaattgaagaggcagctaaaacagct

SEQ ID NO: 15822 - DNA, 689 bp, Zea Mays
cgacgccgcccgcgtagacaccatgcgtcaggccgaggaggctcgcctccgcactgctgctctcgatgcctacgagaaggcccacgaatctctctaggcgcaggccaccgccgtcgtcaatgtcaaggccctcatccccgtcgtcctcgacaaggccacggacacctacaccaagtggtgtggcatcttcctcaccgtgcttggcaaatatgccttagcacgccatgtcctcgacgacgaatccttccccacacgctcggcctgggtccaggcggactgctacgtgctgacatggatttacggcaccgtctccggcgacttacaacagtccctgatgatgcgcccaggtccagcgcgccatgcatggtgctacctcgaggatgaattcctcggccagaaggagtctcgcactcttctcctcgagacgcagttccgcacctttcgtcaggaatctctgaacatcaacgactattgccgccgcctcgagtccatggcagcgtccctcgccgagttcggcgaccccattggtgatcgccagatggtgctcacgctcctccgcggcctcagcggcaagttccgccacatggtgtccatactaaagatgcaccagccgttctcgacgttcgcggaagcccggacacacctcctgctggaggaactggagatcgacgcacgccctccatccccgc

SEQ ID NO: 15823 - DNA, 281 bp, Zea Mays
ttgtctgccggctatgctgctgctgcattcctacatgcttgagcaagttgtagctgtagggagggggaatcgcatcacaagagagctgaggtggagcgccgagacgagaggatatgtggcatctccatttcacatgttctgatttaattagtatgcgcgcggttgtaataataattaattaattcagaaattgaggggtggacctgctggatgctacctcgcgctttggccgatggactacaaaaccaggagtagtagacacaccatccgagaaagcctgc

SEQ ID NO: 15824 - DNA, 589 bp, Zea Mays
gatgcatttggattttccatgtctatatcacccttgtatatccttcctgcattactaatgtcatgaattggggcgctctatgaagtagtaggtgctgatgtaggtttcctctggggaatgctttttaatgatttgtgcagttcatgctacaatacttaacagaaacattggaatagtcttttagatgcattgaatcccaaatttgtagctgaattcgaatttcatatctattgttctgtaatttaaaagcttcaaatactctataaacaactttgtgcttcaaatgtgcagagactccatgtggagctccacattgaacatcacaatgcatcaagatgattgggtccctgcatttgaacgggggatgggtccttgagacccctgtgtatcaaagcacgtggcatgctgaattattttctcggctataatgacatcatatattggctaaaatggacaataaatttaagtgttttacaagggaaaaagattttgttgtatctcatattgaaatctaacatgcacctcttgtagaattgattatggataccctagatctaacttgcacctctcgtaatatatagaaaccgta

SEQ ID NO: 15825 - DNA, 404 bp, Zea Mays
gctttgggccattcctaatgccccttggatgtgtcaatgactaattttgtttcaacttttcctggcatggtggggggtgtctttcctgtcgtggaggaggctgacttcccggaactcttcgccttgttcctcggggtgatggctttggtggcactcaccctccatccaccaagcccccagccagatggccgctgggggctacttgtgtgggaagctcttctacctcgggctcattagggatcccggatagcataccttcggggttgcccgtgctcacctctaaagtgggtggtggggctagcgctccaccccggtgccacagaggcgaggtgcctctcgaagggcaaaggtctgttagggcgcgactagtcgggcaggggccttgtcggtccccaccatgtgat

SEQ ID NO: 15826 - DNA, 461 bp, Zea Mays
ctggaggtggtggctgtaaaccaggatgggactcagctctggcaaagtccgagtggatggagacgttgcagtccgttggtgaaggcgcaatgggggtctgcaggtcgggacctatgcggacgcctgttcatagtcagcttcatcctcctcctttgaccacttcttctaggagtaaggtgaagccatggcagggcaagttgccgttgccacggtgttcgtccaagctcacacttggagatgtcctatcaatggcgcaagagcgctggaaaccaagttacgaagatgggcgtcgtgttcaggggatgaagaaggcggaacgtacgactgtgttagtggggtcaccggaggcagtttcaaatttgcttccttgtttatttggaaaggctggagatcgagcaaatctgcaggaatcgctcacatcttcatttctggatacaaggagccatagtccgtatgtgtat

SEQ ID NO: 15827 - DNA, 571 bp, Zea Mays
tgtgcttagtgagcgcaagatttatactgcttatggcaaaacgtccctacatccaatctttggtggcttacgctaccggcaccttgttgctcaatgctcgtagtaggggttacaagcgagcgagagagggaggaggctctcaagtttcttatgcgtggtgtggcctaaggactacgaatctggtgctcgctacctagctaagccttggttgtcgtggcggtgtgctccttggcttcgacctccgtagtcattcgtgtgctttggcgtggtcgtctgtggtctgcatgagtgttctccttgttctcggccgatcctctcctttttataggctaaggtgggtgtcggttaccggtagcttctcaggaaaggagctactgcgtcgtggcaaaacgagtcgttctaccttggtaaagtcgtacttgtcggcattcgtctcggtcgtcttctctggccttgctctttaagactagctgcgcgtgaatggcgaagagctccagcaccatcattactatctctgcgacacgccgaccctagcctttgttgcatgggtctcaacgtagctcattttgtt

SEQ ID NO: 15828 - DNA, 513 bp, Zea Mays
caagtgtatagaggatagaggtgtggggagtgttcgtgtgttcggcagccatggcgctgccgcttggatgtgtgcgccgccgtgggtgtccgttgggaggaggaagaggcatccgtggccgtcgatctggtagcgggcgggcgagatcggttcaccgaatacgccttcggtagatcaaatcatatccgttcgatcttgatcgaagaggctacatcgggtctcggggtgatttgatctaggtcactgatcatttaatggatggccgagaatgctgggtagcgtagtgatccatctggccgtaaacctagaatctaacggtcgctgcttgatcctggatattttgaggtgggatctaatccgagccctcgattgatgatccgacggctcaagatcttgcataccccttcggccgtgtaaattttcgaacgagaccctggctttaattgaaactcacccgccgtccaccttcatttataaactgtttcgattaagtcctttttctttcggttaggc

SEQ ID NO: 15829 - DNA, 463 bp, Zea Mays
tacaagatcgctcaagaaacagttagtctcaaaggacacaagttatgtgtgctccccctcaagttgtgcatcaagtatttgaatgacttgcactttgcacattctagcttctttagggctagaggggatcacaacataccttggtcagggcatactttatcactttcatcacacaaggatgccaatttgaatatcaaatgaaacgccacttaacaccatttcaaggctaaatgaaaggttgactaaatacggcaatgcacgcctcagtgatacttaatccaattgaatactcacggaagtctaacatttactcaacctgtacatgcttcatatttaactatcattgcatataccaattgaagatcaacacaatcatgtatataaagcgaaatatctaagcatgtcatgattaagaaggtttcatagatgcacaaaagaaacaacattttgaggcataaattac

SEQ ID NO: 15830 - DNA, 416 bp, Zea Mays
aaacaaaagtccgatgttcagcatgctttttctttatttcaaacccatgtagaacgtcttcttgatacaaaaatccaaactgtccagtcagattgggggggagaatatcgccccctttctcgctatctcagaagtcaaggtattcatcatcgtattacctgtcctcacacgtcccagcaaaacggcattgccgagcgcaaacataggcacctcgtcgaaaccggcattgctcttcttgcccactcctcccttcccatgcgtttttgggatgaagcctttctcactgcctgttacttaatcaatcgcatgcccactcgaacactacatcactcctctcctttggaatcacttttccataccaaacccgattatatcttccttcgtgcttttggttgtgcctgctacccaaatcttcg

SEQ ID NO: 15831 - DNA, 641 bp, Zea Mays
gagcgacttcgtgcctccgttcgggggatttttgggtgccgattctcactatttgagcataatctttttctttttaaagtcattccctcgtaaatggaacgaatccaaacaataataaattggaaggtggacatccgactattagttgctaaaaaaattgggcccatgtagtcaaatagttagagttcactgagttctgttcctccacatccaccaccactagaccatcgttcaataagggccgacagcgcactcgacacctactctacaccggcagtgtgttcacgacgttgcctcgtcctccactggcatcccccaagttgtcgacgccgaggaacacccatggcctaggccaagctccactccatcgccacatcccaacgttggaagtccatcgagccactggcgccgtcgtgccgaggtacgcccactgaccaggtgattggttgaccatctctattgctcttcctcctctccaattatacgttggaagtccgtcagccgccagtgtcgtcgcgccgaggtacccctcgaccctggtgattgattgggcgtcgctactgctcctcctcctctccgtttctacccaaggggagcgaggagacaaacgtgtggcctaccccagcgaggcggtggggatc

SEQ ID NO: 15832 - DNA, 582 bp, Zea Mays
gcccaatctatgccatcgctaaaaccctacgatccagatccaatggccgtattaaatgaaacgaagaggtacacggtttttaatctaggccgcccattattgatccgagtaccataatatcatctccttcacttgctagcaaacctggtggcgccgcccaccaccgtatacggacagcggcggtgatgcaggccccaacggtggcgccatcaccaggctcccgcaacccatgacctgtcagcatactgtcatgtggggcctcgacaggttggcaatgggtcacctccagctacaaaagagggagttgtacagggaaacaggcatcgaataatcattttgagaacctagactctatcttccaactactgctcatcttcttcctcccttctctcatgtacccggattctcttccttctagaacacgacagctattgtgcttctccattctacttctcttgctgttaccctccctaaactcctctctgattgtaccagattatatgcttagcgttttcatgttattgagttgagttcgtcagattagtgttgttaacaattggtatcagattcgttcgatcctcg

SEQ ID NO: 15833 - DNA, 793 bp, Zea Mays
ctggtagattgggaaggcatgaggatatcatccccatatatgtcatcccatgcctctgtagccttacctgccgccgcccgctggacccccaattcctctgcgactccgattcctcaacgacgagcgcagcaccaacctaatcgatcggcgaccttagcagaaaacaagagaggattagagagggattagtggattagagagggattagagaagaagatggagaatacctgcgcagccagagcaccggagaagagaggaagatggagatccaccgacgacggttatggttagggacttagggttagggctagcagatccaccgacgacgattagctgttagggacttagggttagggttagctgcttggggttgggagtagacagtagagttagatagatccaccgacgacggttagctgttagggacttagggttagggttagctgcttgagagaagaggtagatccacaaccacaagacatgccgggagcacaccgatgatggagctgagtcgagaagaccaccagcgatgcgacgacgacgacatagctacaagcacgggaagtcgggaagggagaaggagagagctagtccataccgacgtggatgacaggagggagatactgtgagccgacagtgatagatccacaccgacgaggcgacgacgacgactgagctgcgagcgagatgcggcgggaggcggcgggattgggggctagggtttacggattcgagtcatcgagagatggagagagggaccgagtgagggggataaggcctgaggggcgccgtg

SEQ ID NO: 15834 - DNA, 413 bp, Zea Mays
atttatcccctccaaatcctacaaatctctattccgatttcctggcgcgcgtaggcatcggcgtgttccacccgtgaaatctgccgcgattatggcgttccggtcatcctctcgggatatatattggcggggttgtatacctccttccctcttcctgtaggagctagcaccgccttgcatcaacaaatcgccgagctccatcaccatgcacagagagaaaataaagcggggccgccatgatgaaatcggagttcggtcgtcgtgaggacctccaagctttgccgggaagcttcgccatggcgcagggaacgtttccgtggccccttctggcggattgggctgttcgtggctccggaatcgcacactggagcaaccccaacgccgcagatctgccacgacagtggatgggtccc

SEQ ID NO: 15835 - DNA, 504 bp, Zea Mays
cgttccccaaacacccgccgaatgcggcggcgcagggaccttacctgcggtggcgccatggctggcggagttcgtgcaagcatccaagagtccgaatccaaaattaactaggtgcatcgccaagggaagaacgattcggacaagcggaaagggagactcaccggaaatacgtagcgggattctctgcccacggaggagggcgagttcgcggtggagctcaaccttcggcgagggatctctagaactacagccgccctccacgcaattggccacgcccaagacttcgacgcataccagcaatactccggagacccgtagcggatgctgaggcgccacccagcgcgctatccatagcgacggcgcaacacactctttctcctctcggttcctcacctctctctatctctgctcgccgatgcagcggggtggtggtgttgtgcttctcatccatagtcgaagggggtttcggctgggtaaataggggcgctggtgcgagatcgaggc

SEQ ID NO: 15836 - DNA, 689 bp, Zea Mays
ctataccctactaacggagcaatcggcttaagtcggaaatgccttaagtcagtgcgacatgctcacgcttacacgacttagggtgatcactataccctactaacggagcaatcgacttaagttggaaatgccttaagtcggtgcgacatgctcatgcttacacaacttagggtgatcactatactctactaacggagcaatcggcttaagtcggaaacacttttagtcggtgcgacatgctcatgcttgcacgacttagggtgatcactataccctactaacggagcaatcgacttaagtcggaaatgccttaagtcggtgcaacatgctcacacttacacaacttagggtgatcactataccctactaacggagcaatcagcttgggtcggatatgcctcaagtcggtgcgacacgctcatgtttacatgactaggggtgatttctataccctactaacaaaacagttagctcaagtcaggaacgccccaagcaatacaacatgcttacatattcgagggtgacctcaacaccctgctaatggaacaatcggtccaagtatagcgtgatcacacgcacatgaatttcatgatacactgtctcgctaagaatactaactcaatggaaaatatttgttgtctgaacaaatcactatgcaggagcatctttgcaaggaacctcgccggtag

SEQ ID NO: 15837 - DNA, 576 bp, Zea Mays
ataggatatctgacggatattcaaactcacaggtaaaattgtcatccctatgtggtcgtggtaggaggttgtgttcgtagcatgcccttcgtagaagctcatggcagcaatcaccagcggtgaggaggatgcttagggttcaggcgcgcgagagtatgggtgagccacgaccagtaggaccggtgataatgcgggagcataggggaggagggacccacgggttagggtttgggagctgccatgtggcagacaaattagggagggaagttgggtccaaaccgaattgggtcgaggggcagtctctagtgagggctcgtggtcaggagagaaattgaagacacaaaaagaaaatgataaataatttttcacatgtcagcacgatgtggtgtcgtcgtacgcgccaaacgttaacgtggagggaggagggttcaggttttaaaaaacctgatgagatatatcatcaaactaagttgaattcattatttactacattttttcacaatatgtctaattagaaatatcatatgaagacagtttcatatttagaagtgtctagtatacccactaacatctaag

SEQ ID NO: 15838 - DNA, 772 bp, Zea Mays
ctgggcacaagataaccagagaacacagggtcctcggggaaagattcccaagacacagcgtaccagcgctaggacggcgggttggttttggaaaagtggagggtctcttgtgctattctaccacggcgaaggggtacggggccatctgagcccttggatcttgttccaaccgcccaaatccgatacggctgttataagccgataggagatcatgaccattggatcgaagatctagggttctcaacctctctcaactctatacgcccctagccgttcaaaccgagatcgacgatcaacccccctgtcttcttctcacgatggttagcaggcggcggcgcttctatccccgcggtggatgacccgccggagttggccaagccgccaccccagagccatgcccccctaatccgattagtcctacacggtctacagagggagacaaatcaattgagaagatccctaccaggtttcgtgaagcagatacgggtgaccacgtcgatgtacgaggccgcgatgatgtgtctgtcctccgagcaattcatggcgccccatggttcctccttcccacgtgacgctagaaaccctccaggagatcaggagaaacacccagagccaaaggcgagccctcgaagacggcgcaggcgcatatccatgacattgacttcatcatcgacggcggatccccttttctccctctctgctgtttctccctatctggtgcttctttgtcgaaggtgttgcaagtcaagtcgatgggtcgaggcggcctatg

SEQ ID NO: 15839 - DNA, 434 bp, Zea Mays
gtccgatccaagatcaacgaccgcgatataattttgctagatctaatctcgtccatcagatcacgatcgacggtccggatctaaagcgcgaaggggtaagctaggatctaatctcggccgtacatcaggaggttgacggcacatgcttcttcttcctcacaacgacacaggcacgatgatgaacaggcagccgtggcggcgcggcacatcagcaaagccaaattcaatggcgatctcgaccccgcagctacccctgcagcactactaatcgattctactcgtgtactaaaccgatgcaaagtctcggagaggtctctcacctagattcatgcaacagaggacaccgatcacgaccctggtggcattgcggcggcgcaggtgcaccgacggcgattccggccgtcccggcatcaatctcccctgctgcagctgca

SEQ ID NO: 15840 - DNA, 616 bp, Zea Mays
ggaagaccagccagagccatgggagtccacactgtcgtttaggctacaatgcggaactactgcctggcgtggtcagcatcgtctacaccgtgatcacgagtaagaaattgccccattaatttgccactggattagggttgtttagcgcctagtcgctcagttgtttagactccagaatgcgcaaccgagttgcgtagcaatggcgccgccgtgggcgtagccttgccggcgccgccagtgagttgagcggggacgatgcccatcagccgtagatcggggtatgggcgatggtgatttagtgcagagccaatgggaatcgtggtctgttgatctccttggctgcggctaggattagaagtcattacatcccttcgcgtgattcgatccagaccatcggatcgtgatcgtgcggatccagcgcgatctggaacattttgaatcggcaccgtcgatctttgatctaacggctagagcgccgcacaagtctattataacgctgttttaatccggggcgtcggcacttgatcggacgatcgagtttgctcggtacaccctttcacggcacattttgcacaatacccctcaagaattgtagatttgaacccgcagttctgcg

SEQ ID NO: 15841 - DNA, 692 bp, Zea Mays
aaattcatacccaggtactcccttttggaagttagttctgaagcagtttgatgatttactcgtcaaaatattgatagcagctgctgtgatctcgttccttttggcccggatgaatggtgaaactggattatcagcatttttggaaccttcggtaaattggatacatcctattggttgaaaattacctgcaagaaacaaatgacctggtgctttgatgtttgcaatgcaggttatctttatgatactggcagcaaatgcagctgtgggtgtgattacagaaacgaatgctgaaaaagctcttgaggttctcacttctaaacaatgccctaatgttgtgtttagctctgaggatattgttcctgctgtatgattgtttatttcctggcacatgttacaagatattttgtacaaatgagattgatcagtggattaatctttggcctcccatgtgtcttcatatcagcataaacatagctatattaaatataggtggaactatgaggtgatctataacctttttctggccaccgggggtgtgtttttattgtttttttggcactgggaactataggcagaacaatttgtccctaattattaatgtcctatgcttattaccgcataactgattcttttatgaatgctgtatctcaacgtcacatgctacaatttgtaaatcaccttccatagcattc

SEQ ID NO: 15842 - DNA, 2580 bp, Zea Mays
aggtcacatttagctgttggtgattatcgagtagtcgttactgatttgtcgtttattatcctagaagtgcgattgctggcattccggcatgtatgtgaaaatgtctgaagtggtacattgatgcaaataatatcagtcatcgagggagattgggctgttaaattcgcacacattggaatgccttgacttgcatttggtgtagaggagtttgtggcgcactcgtccaatgttaactgcctcaagattgggaggaagacctcgcgggttcttgtcacaggaggagaggaccataaggtcaatctttgggctattgggaagcccaattcaatactggtaagactgtttttctagttctgtttctacgtatggactgattgtaaactgcggctccacagttgggtaggaaaacaaaactcttaactcacttgaaaaactattggctgacctaagtggttacaagatgagaacttcaccttttcaaccgctaacagatttttatgtagcacagttctccttatgccagtattcaattaatagaaagatacttttaagttagttatatcaacctaccgcacagcaatgcgttttgaggatggttcgtttatatagttaaaataggtgtcatgaataatgtttcttaaggacggagtactttatttaatccactttaactttttggtggccgtacagagcttatcaggtcacacaagtgctgtggagtcggttggttttgattccacggaagtgtttgtggctgcaggagcagccagtggaacaataaagctatgggatttggaggaggcaaagagtatgcagatatgaatatttaacttactatatgtgtatatgtatgaatcgttcagtaattgcatctcttggctcattttctatgcagttgtccgcactcttactggacatagatcaaactgcatgtcagttgattttcatccgtttggggaattctttgcctctgggtcactggacactaatctgaagatatgggatataagaaggaagaattgcatccatacatacaaaggtcacacacgaggggtgaacactattagatttacacccgatgggcggtgggttgtgtctggtggcgaagataatatagtaaaggtaagaatttgccaataactctatgctgtgtgtgttcaattgctagttcttctgctggaatttgatttttcttttgccttaatatttctaatgaaaaaaatcctttttttcccgaacatattacaatatgtttttctttggcagctctgggatctgacagctggaaagttattacatgaattcaagtgtcatgagggtcagatccagtgcatagatttccacccccacgagttccttctggcaacaggttagattcagaatttacaatgcttatctgtttcttgactgttatcttttctttgtcccttttggttgtacaatgtagtatgtacttgtttatggtaaaatatcagacttctgtcttggtatttgcttgaagaaaaaactcttctattcgttgagctagtaaattaatttaagtatttaggtgctctctaaaaccaagcttggcatttgtccgttaagtggagaagctgtttaaatatgatttcctaactagacctgaaccaaactgtaatggctgttcctttgatgttttaagtggtaaagtgtaatggatcatactatcgctgtaattgttgtctgccccaccgcacctcataataactttttgattgtttaccaaaaaaattcctagtagtcatatcttggcatagttcagcttgctgtaagtaaatcactatacatgtattgtgtaaaattttcgttatgagatatcatgcttgttttcgttggtgacatctgtaagagatgcattgaaattttgtacgatacgttctatataaactttctttccatgtcatcaattaacacatttcattttttgttttgttgtgagacacattctctcctgtcaggcagtgaagaatgtattcatatgtttgtgtgggagctcagaagactgtattccttttgaaactatatctctcttatgtaaaacttgttgcttcattcaggttcagctgataaaactgtcaaattctgggatttggagacatttgaattgattggatctacaggacctgaggtacatcggtatttggagctgatagttcacaattgtttatttcctttgcatttgtaatcctcagaatttaagcattatttccttaataagtagcttgggtggggatcccatctctaatgttacatcgaaaaagaaatggaaaatgaacataaacttagatgtccctgtttgatgcttctttatacaacaaacagtcatatgctaatgttttgcagcataattcagttcaatttgggcacctatttaattcatttggatacctcttttgtttccatcatttaattcatttgaatcacttcttggaatcacttcttgtgtttccataaaaaatactagacaacaggtgtccgatccatgacattcaatcctgatggaagatctttgttatgtgggctgcacgaaagcttaaaggtagggctattgtttttcca

SEQ ID NO: 15843 - DNA, 627 bp, Zea Mays
ggtgtatatatgtatgtccactttattatgtaggatagaagatgcctttaaagcatagacaggtttgggtaaaaaagtgtagggtaaggaaagactccatccaagatttgtggatcttgattcatctgatgatctagcttgatctttgaaggcttgagttggggctgaagaccagatttggcttgactcttatccttccttaacacggttgatcctttcttccttcctttggtcttggtatgatcatccgagttagggatatgtagttaagataattgtgggtaggatatatttcatggggtaggttggttagaatctctgttttgttgttaggttgatacagagggtttatgcaaccatttgacgggtaaggtagttacatatggtcaggtagttgtatatggccaagttagtctggggcacctatttaggttaagtcatgtttatagaaatagggtctaatctatatcaccagggttaactaacctgttaagtaattcaatatagattgggtcatattatattagttgggttctggattagcttggtatggcaagattagactagataagctctaatatttttttgtgggttagatcgtagttgttactatagaatgggataaat

SEQ ID NO: 15844 - DNA, 529 bp, Zea Mays
gtcattttggcggcaagaaaacagagcaagtgcttgctgatcatttattttggcctaaaatgagaagggatgtggagcgacatgtccttcgatgcgaatcatgtcataaagctaagtctcgtttaaaccctcatggcttatacactccactacctattcctagtgtgccttgggaagacatattcatggattttgttcttggtttaccacgaacaaagcagggaagggattccattattgttgtggttgatcaatttagcaaaatggcacattttattccatgccacaagagtgatgatgcttcacatattgctgaattgtttttcaaagaagttgttcgtttacatggaattccatgaaccattgtttctgatcgtgatactaaatttttgagttacttttggaaaactttgtggggaaaacttggaacacaacttctattctctacaacatgtcatccacaaacagatggacagactgaagttgtaaaccgaacattatcaatgctgctgcgagctatcctcaagaa

SEQ ID NO: 15845 - DNA, 368 bp, Zea Mays
gagagaagggtgaaaaagggagagggaagggagctgtgagagagaagggtgttttctgattttctcccagccgtgtcagggaacctgaaaagacaggtagagctgggggcggctacctctattaatcatgggccagtccagtcaaacagactgttggactacccgagcacagactggactgttggggccagtctagactgttggactacctctattaatcgcgactgatcggctcctaggcgattaatcgttccatatcgtcgcttaatcggacgatatggacgatcagtaacactaatcgagtcgaacaccctaatcgagcacaaagaaacgatcagcccgactaatcgcgattagtcggacgatct

SEQ ID NO: 15846 - DNA, 969 bp, Zea Mays
tctaactccaccgaattcccccgcgcgctgctctgtcacatagggcccacatgtcgtaccgcggatcacgcctatcactgtccccgtgaccccacctgtcatctcgggcgtgcgccaaccgcccgcgtggatcgcacggcggacctccccgttgatatccgctcggccccaaccgacccacctaggccgttaaagggagctcggtcgcggtcctcctctcccctttttccgcgctcgcacccatcaacggcctcacaacgacggaatttctcgtcggagcagtaccgaaccatctttccgccttgcgccgtgaacacacacgtctacgccctactgtgaggtaataaccttttccctggaatcgcattcatctccgcatcgtgttaaacctcggggtcagggagttcatgcactaacgccatagattgcattggcgccgatggggggtttgccgtggttcaagcgccaccgtggatccgctccactccgtggccagggtggtaacatcagtcgaacattaaattggggggctctatcgggttcgccctacctttggcttagtgtggcttggttggattggaaactcaggcgggtttgtggccgatttgatggttctccggcgagcgggtcaccgtgggagcgggcgccgtcgcgctcggcaaccagaggagaagaaggtttacgcgccgttgatctcccagggaacggctgcgattagaagtagcgtaccccttcgccactttggtcgggtaccgttgatctcgaatctaacggtagtggttagatctggtttcataaactcagggtgcgttgatttgggatccaacggctgcagtcgcgtaccggttcgggaaaggctagatctaatctcgcgcgtccacacctaatcgaacggttcagattagatgataccccttcggcttgcacatttcgctaaagagaccccgactaaaacgaaaattaacccgc

SEQ ID NO: 15847 - DNA, 414 bp, Zea Mays
ccaataagcatctatagcatacaggggtattgaaacgagagcaaggagggcgtgaacggacctgtagagagctgggccacggcgagttcactcacggcggagttctaactgatttggggaaacttcaaaattggagcgctctggtggacaatcccaagcataggcgggtgcgttgggtgtgtgattacttagcggagctcactgaggcgacaatttataggtgccatcggcggtggcggctaaatttgagaagacgcacggcagtcggagagagggactgagtcactagcgcggtgactgtggctgttaccgtggcaaggccttaggtgatagatgggctgtgtattgggatcaattgcgacgtggtaagatggctgacggcgtggcataactgcgaggaatggtggcacgacg

SEQ ID NO: 15848 - DNA, 1895 bp, Zea Mays
ctcatgctcagcctcgatctttgaataaattagaatgtcatccaggaacacgaccacaaagtcgtccaagaactcatgcaacatcctattcattgcttccataaaagcagcaggggcattagttaagccaaaagacatgactatgaactcataatgcccatatctggtgccaaaagcggtcttcccagtatcctcctcacgaatcctcaattgatgataaccagagttcaaatcaattttggagaacacctgggaacccctcaactgttcaaagagaacctcaatacgggggagtgcatatttattcttgattgtcacttgattcaaagcgcgataatccacacatagccgcttgcttttatccttcttctcaacaaacaatactagggaagcccatggagacctgataggcctaatgaaacccttagccagcagatcatccaattgccacatcaattcaacctgctcctttggggccattcgatacggggccttatgaatgggctgcgtacccggaattagcttaatctcaaaagctgcatcgcgctctggaggaatgcctggaatctctgccggaaacacgtcagcaaagtcacacaccacccggatgtcctgcacccgcaaggcagcctcaccctccaccaccatggagaaaaagattcccgacttccttgactggtgatccagaagcaattgcgccaacaaggataacgtgaactttggggaacttcccaagaataccacctccctacccgacggtgcctgcaataacactgtcttccaaaaacaggatataactgcgtgatactgggataaccaatccatacccaagataacattgaatgcccccaaggaaatcacaaccagattggctgaaaagacctcatcagcaagaatgacggaacatccctgacaagctgaacagctactaatggagccattagcagaactaaccaaaattgggtgacccaacctctgcaccgaaagaccagcccgcgacacaaaatcctccaaaacaaacgaatagctagcgccagagtcaaaaagagcatgggccacaaacaaatcaactgaaatcgtacctgtcaccacgtctccttgctctctgccatccgcagtgggtagcacataagcttcggaaatacccgcagaagaggaagatcccggagtgaaattaacagaagaaccccactgagtcgtcgggtgaggcagacgcggagctccaaactgatatggcataggagtagtcggtgcaggagtaggcgcagccagatattgaggaaaaccctgcaccggcacgaattgagaagtcctaggcacataaaactgctgcggaggaagtggaactgaaaattgctgctcagtgcttgacatcatgttgatagtgccctaagaagaggaagaagtcactggctcccatctgagcttcccattgggattcctcctacacaccacatccttgtggtcttgactgcagattgaacacctgccgttccactggcactctgcacggcgatgcgcatcaccacaacggaaacacaccagccctagcccgggcttaggaacagcctgaaacctctgagtacttcctcccgaagtacccgagtcagaggatttgccacgatagggatggtggtgctgatgctgagacttgcccctcttgtgggctggacctccagtgttgcccctcctcgcgtcctggccacgaggctgatcaacacccgaagacttctgcgactccatggtatactggtgttgcatctccacacccagtgcttgctccactgtagtacggaagtccaccaacggaaaggctcccagggcatgcctgatggaaggtttcatgccctgacggaactggctcgccttctccatctcattctaagccacatgag

SEQ ID NO: 15849 - DNA, 588 bp, Zea Mays
gtaggatctagatcttgcggctgagattaaatcatttcggcgcttaaagccgcttcactcggagccattggatccccgatccaaggacgtgcactcgccacgcgcctgttctgatccgcccgttagattaacgatcaacagccccgactaataagtgatcgcgattgatcctcaagcgtaggattggaatcggacggaccagattacccgaacgaattgctaccctagaatctaatctgcatcgttcactcattaatacatggtcagaagaccatcgtcttccccccggcgcgccaagtggtggcgaggtgcattgggtgcgcacgattctaatcatcgaatgtgagcgcagcatcgcatagcagggacgaaggtaaatcttgcggagggggctcaccggcagaggtgtcgcatggaggtcggaccacggtgggtagcttcacggcgcgatctcccggatccggtgaacaattctcgtcgcactatggctccgcaggcgccaatccagtctccgcagggatccgcgtactcgtccgaacgcccgggaccaggttacaggagcagagcagcggtgatcttgcggttcga

SEQ ID NO: 15850 - DNA, 341 bp, Zea Mays
tcgccgtcgagggccctctccgacaaacctgggtacaccaacgtgacccccgagaccacctcccaacgtttccccgctcaatcggcctcaagcgctcgagatcatttctagccacggcggtggtgaaaaccgaaacttcgacgagctgttcccacctcttccactcggtagcattcaaacggaaagcacagagagtatcagtgaccatgctaagttacggtgctcaccaaaatcttcttgaatgaactacagttgggtcagacgacgttggccctgtccatgggggtgttcaccgtctgtcaaggcggcgttccaggcagctctgtgcggtacaaatcaat

SEQ ID NO: 15851 - DNA, 790 bp, Zea Mays
gtcgtagcacaggtccactagtcgaagcagggctttccgtttcttccactgggtctcttgatgatctttctccatcactgttgacacaatagcaccaatgtttcttctgtaaggaaatattttcaactcacgagccaaacgggacataaaatagtcatcgcaggtggcccgagaaatagggtccttcctatgccatcgacgaccctctgtaaccttcaacatacgcgaagatgtttcccggagctcgagcgaagtcataacctcaccaggcctggcgcacatccccatcaactcctcaacaaaaagccgagaggccttcggccccatcttttccccctccgtaccttgcacatctattttcctctttcgagttgctacgaccacaacctttcccattgaggtgccccctttagactgggtcttcacctgttttcctcggtcgtcctcggcattagtagagtccccctccaggtaaggatcgtagcgcaagctattcaattcaaaaactcggttcaacctaacgttggaaccatggatatcccagctcctcaacatctccgtcttcggcacatattttccaacaatattaatcacctccgactccacctcccgaacgaaggtggctgtgtcccgccctcgcaaatcgatggcaaaggtagggctccacaccatcttggtcacccaaagatgacatcgagcgaagcctgacttcgcccagaccccactcgtgagccaacggccacacactgtaggcaacaaactcttcaactaaatcacggtcgctgctcaa

SEQ ID NO: 15852 - DNA, 508 bp, Zea Mays
cgcgtcatgcttcggaggccgcgaagggattaaggaggatgactgcaacctggggatcgtgtgcgcaatgtcgtcatctacggaggggcatccgacatcggggaattgctcgctgaagcaggatccccaccgcagaaccgtgcctcgccgtggtcgatgtcctctactgtaaaatcgtcagtaaaactcataccatgaagttcaccttggcctcctctttgtgtatacgccatcagttctcgcatccgggttcgtggggtcagggttggtccgcgccgacgggttgggccaccgcggagagctctactctaccgtgcttcagcagcataggagaagcgtgcgacggtcgttgatctagtgagaaacggttgtgattaagagcagaggataccccttcgatgcttaagatctgtgtcgttgaaatcgtcagggacaatagagatcagatgtttgttgttttgaatcatggttgttagattgagatgagcggctgaggtcataacacgcg

SEQ ID NO: 15853 - DNA, 422 bp, Zea Mays
caggcttggttccagaaaccattatctaaggaggcaggggcagctttggaagccctattcaacattcatatgccggacactgaacacattgacaaggcactgatggggattgcaggtgaagctatagaagaaacacaggatgagatggacaatctgcaagcggaagcaaggagcaatgctgcagcacatctggtggttgtctgattccttgctagccggtgtgggtgtattttggtttcgatgttgtactgcaactcagttttagtcccttttgcaatctgctgcgctgagctactggttatgggttttattttggttgagatgttgtactgcatcttagtttcaacttcaattgcgaacagctccagatatgttgcgctgctgctagtttccagccttgttgcagactactattccaaggc

SEQ ID NO: 15854 - DNA, 459 bp, Zea Mays
cgggaccatcgcggtggtggttaggcgtactgttttcagcggccgtatatatatgcgcggggcagtacagattcgaggccgtgtcgtcgtcgtcgtcatccccatcgcatgatgaaccagcgcgcatcgacacacgcagggaccgtgcctcctcctcgcagtccggaaactggtttcagatgaccacaccgttgctgtttcccatgtggatgtggccctgtgatccgcaccaatttgggtaatgaacagcagcgtcaggtccagatgccgagctcaaagctagctgtcagccagatggaccttggtttgatttcgcaagtcagagccgcgagcatgcccgaaatgcttggtttacgtacgaagaaaccttacgggtcaatgcaccgtcagtatccgtctatacgacgataggaatacgaatcatatggtagcttcgtctggagctttataccatttccc

SEQ ID NO: 15855 - DNA, 491 bp, Zea Mays
ggataaaccgataagaacgccggtaccatgttcactgcggtggaaaccgataagaacgccggtgactgccgtcgcacggccttgcgccacgtgcctgagtacctccgcatcgccgtaagccttagtgactctccgttgatcgccgggatgaccgccatggtagaggccacgaatccactgcgccagtgctcttcctttcctccgaccgccgcgcgtcgtcatccaaattcccggccgccgctcttgcttactataaattgagccctccgtcagctctgcaacatcaccactcactcagccacccagcattgcccccagccgatcaccagcgagctcgaattttgggttttccccaattcggtttccgccaccgcgaagaacacctcgccgcggccagcgcaaatcaggtccgatcctgtcgtccttagttttgttctagcatccacatgtgtctgtgatgctcaccgacccacccaattgaattagactgc

SEQ ID NO: 15856 - DNA, 429 bp, Zea Mays
agcaccgattgctcggattcaggtgggggagcctgatatggttcgtcggagacttgaggtcgggtttgggagctccgtctggttcctgtgaagaagtttgtggctagccgggggtgatgggttgaattcgcaatggagtcgacatcgcgtgtatccgctccgtgtcatggccggatcacgccaggtccccaaacgtctcaggtgagtccgtaatgggttcgctttcctccccgctgctcgtaacttcatccgattcgatggtgtatgtccagcgtggtgggtcggtggttgtcgcaatggcgccaccgcgtcctgcttgcttgcgccgccgctctggtggtcgaaaggaagaagaacgccgtggtccgttggattgggatggacggctaagattagatgatgcggataccccttctcattttgagtccc

SEQ ID NO: 15857 - DNA, 423 bp, Zea Mays
agcgggagtaaattcaacgaggaactcaccgagcactactcccggggcttgctgggcttcctgagcgtcgacgtggttgacccgggccctgccctggtactgagtcctgctctgctggctgttggaaggaagcgccttggaggttggtgctgatggaatcttggggccattcaccgagttggagtaggttggtcctggtgccttcaactgggggcagttgtttttgaaatgactggggtccccgcagtgccaacaggcgtttgctggcggctggttgcttgccacggagggtgcctgatgggagctctgactctactgactgtagcgtgatggagagggtccagattgtttattgaagcttggacccctgggtgggagcccaaagggtcgagctctctggtgacgctcttgctgttgcgctcg

SEQ ID NO: 15858 - DNA, 501 bp, Zea Mays
gagggggggctctcatccaccggatcgagatcaatggcccaaactcggctcccctttgagctcccgaccccagcggaaaaaatgccaaaagatctattgttttttgaggaatgcctcctgaaactccaaaccccaatgccacagagcatgaaagaaaagagaaaaagaagtgaaaattggggtatcacactctaccctccttaaaaagaattcgtcctcgaattcaaccactccaacaaaacatccaaggtaccccatatagcagcaccatgcaaaacatgggtccattattggtcttaattaacacaagaacttctacatcgactaattgtctaaggaaactacaccacctgacatcaagcatgaaccaacatgtaatgaagctcaaaccaagtcatagatgcaatcaacactacgatttcacaacatcgaatttggatgcagccatacatcagctcaatgtcttaaaacgacactcttttataaaggggtaatacgcac

SEQ ID NO: 15859 - DNA, 554 bp, Zea Mays
ccgtcttaagtcgttgccaacttaagccgattgctttgttagcagggcatagtggtcaccccgagttgagtaagcgcgagcatgttgcaccgtcttaagttgttgccgacttaagccgattgctccgttagcatggcatagtggtcaccccgagttgagtaagcgcgagcatgttgcaccgtcttaagtcgttgtcgacttaagccgattgctccgttagcagggcatagtggtcaccccgagttgagtaagcgcgagcatgttgcaccgtcttaagtcattgccaacttaagtcgattgctccgttagcagggcatagtggtcaccccaagttgagtaagcgcgagcatgttgcaccgtcttaagtcgttgccgacttaagccgattgctccgttagcatggcatagtggtcaccccgagttgagtaagcgcgagcatgttgcaccgtcttaagtcgttgccgacttaagccgattgctccgttagcagggcatagtggtcaccccgagttaagtaagaatgtaggtcgatcatgaacaaactgagtattctt

SEQ ID NO: 15860 - DNA, 500 bp, Zea Mays
aggcgggatgatagtggggcgagtggattgagtcaatggccgagtcctttatgagcccctggttgcttcaacccggtaccaaggtggccgcacggcggatcgatgcgtagcggaaatcgcggcggtgaagcggagatggttagcgaggtgggcgacgagctgggagtgcggctagacgcgactggaaggtttcctcccgtcctacaagcgcgcagcaaggtaggtcggtcaaggggtgttccgtactggccgccggagtcttcgcgcatgatgttgatcctccgtgcggcgcggcagtgcagaagatagcgctgacagcctggacccacaaggcagacagaacacacccacacccgatgcagactgaactgagcaaaggggcccgtcaatcagagattgcaacagagcgagagtggttgacggcgcgggacccacctgtcggcgccgagacgcgggatggctgtgcgggtgtttagggtaaatgggccgaccgatttgaa

SEQ ID NO: 15861 - DNA, 310 bp, Zea Mays
aaacaataccgttattaaccttaattcgatttcagtatggaatcacctgatgaacaatgttggaaatacattcccgtgatttgttttcatgtgaatcagatagatgaaaagtacttgtgctgtgatttggtagctgcaataggtgcactgctctatttgtactacatgcctgcttcaactaaggacctgtttggatcacttggactaactagtagctagaaaacaatcctagttcgaacaagcatgtagagtaatgggtggattaaacttttagtccagccctcaactaataactagtccattaactgag

SEQ ID NO: 15862 - DNA, 900 bp, Zea Mays
gtcattttgtgtactagaactaccacacacgtttaacaaatgcattcaccacaatactcagacccggtatatatgtatatcgatgcgctcttcacacactagttttcattttaacttagacatcacatgagcactacaaatttttacccgcgaccataaccatgcgcatttagaccataacaagcaattcatcgtgaccacgagcttaaccaaaaccatctaacaagactgctaacccattattatcgcaacctgagacacaatatgtatataacaattacttaacgcaatcgactcctacttaacatgagttggctaatgacgtgactatttcccaattaccaacatacaccacctttcgccatttttggataacctgcacgatacacaactattctaatacatctcaagttcattcaaccccatcagtagagcactagcacatttcagaaaatttcctgagactacgacgataaggcatcaatcttatcatgcacataaaagcatcacaagcatatttacggaacctatctgttaacttgatcgacacactacacatgttcttcacctttcaaaatttatctcacaaccgaaatcatcccacttgctaatgacaccaacaatacctaatgatctattattcacaacacgaacacagttacacgccgcatacttgtttctaacataatcctcacataactcgtaattcaactactcactaacaataaatcacgcacgacagctaccacatcaacctgttaattaatttggaacgccgctcgcctagcgtaccactagtatatgaactccgacactcatgtcttaataatacatcctccacgcaaactagcattttctaaactactcgtcacatgaataaatataccccctatataatca

SEQ ID NO: 15863 - DNA, 305 bp, Zea Mays
ctttgcatatgaggtcttctagcattggcttgacttctaggctgccgttgcttcccagacatgcattcagctaagctaattccttcttccaatcttctaaaatgttggttccctttatcccgaaaggttttcggctgagggcgtctgctaccacgttggcctttccggggtggtaatggatctcaaggtcataatctttgatcagttccagccatcttctctgacggaggttgagatctggctgagtgaagatatacttcaaactcttgtgatcggtgaagatgtggcatttgttcccaattagc

SEQ ID NO: 15864 - DNA, 549 bp, Zea Mays
catgttcagatagagtctgatcaaaatatgggccactgtcggggagatctgtttgtgccgccgggtggacacttacgggacactataacaattatggtagaaatggattagatgtttagtacactactaattatataaaaaacaacgagggggagtaatgatacatttatttgcggtgtcgcaccaaatatcgacaagcaagattccgtatgtggtatgttgaatgtgcattctggtgttgcttgaggagtgatgtttgtgttgctcggcatgttcttgccagcgtcaccgtgttgaccctgagaaaaatgtaatgggttatatgctatttaaagaaaacaatgaataaaaaccttcaaggaaaatataagtaattaaaaaaactattaccactggggttgtaggtgttttggtttgtttcgttatatttgtatgcaccaatggatcaatgtcaacttcattagggctactttgtaatagtacacgaatatgttgttgccttaacagtaattcatgtacctgtgtgtctgtcaattgcgtctcatgctg

SEQ ID NO: 15865 - DNA, 473 bp, Zea Mays
gtcagaaatgtctagtttagagcaacccaacgaactcaccttggtcaagctctcgttagatttagatatatctttgatatagataatctagtagctctgggaccccaacaacctatgggattcacatttactgttataaagcataatgaggcttggaatcagagggctccaaactttaatcatgaatgttggattatgctactgggtttttccctggatttctaggcacacgatcacatccaaaacgccatcgattcatttggaagagtcatcatgtgggaccagcagatccgtctaatgtaacaaggcttctagagatcccacagtttattgtgtttttttggtggctgagggattcaatggggtatcatggatagtatagtgtgaaattattcagtaggccatgcttggagctttacctcaagatgaggaccctgtcccaccctaccctgtggatggccagcaacttctag

SEQ ID NO: 15866 - DNA, 547 bp, Zea Mays
atttttaacagcaatcaccaataatttctcagaggatcagacaattggccgtggtgggtttgctgtggtttacaaggtttgactcactctcaaatttccccagtatgtcatcatcatctatatattgctgacaaggcaaatgctctgactttcaactgcagggactgctgcgaaatggactatccgttgcggtaaagaagttctatgataccattgaactatctgatgaaatgtaccgtaaagaggttcaatccatgatgaggttgaaacatgcaaatatagtacgtttttttggatactgtgctgacacacagtggaaaatgttcaaacacgatggaagacatgtgattgcagaagcacgccaacgattgctttgctttgaatttgtgcctaatggaagtcttgataaatatatatctggtatgactgttgaaaggaatgtttttcatcttcattttttcgctgaatattatctgttccaagtatctcataggtatgatacagtgactttacaatttttcaaatgtgtggaaatatgtcttactga

SEQ ID NO: 15867 - DNA, 485 bp, Zea Mays
ctctgtctacctcggtaccggcagcgcagaatccgcgcggatcgaacgaactcagccaggaagggcgcggttcgcccgccagcccttgcggaacccacgacactataaatctatcgcgcccctgcttccgccctctgcccgaccgtgcaccgtggtgaactgagctttcgctgcgccccgccaaggacaaagaaatgagagaggtgctgtcgtggtggatttgaagcctacggcgttgtcgtgtggtcagaatcgggccggtgaagctcgccatgccacagggaatactattgtagctttgcctatccggaattgcgctctgcgctgctggaatcatgcgccggtaatcatccctccgcctaggtccgtcgaccggcctcgtcaccgcaccagcgccggtatgaacccctctattgagttctccatcatctcctctctgtgtagcatctgtctaatcgaagttcgggcatcggggtcgtacctcg

SEQ ID NO: 15868 - DNA, 498 bp, Zea Mays
gcccgatcttgcttactctggtatatgtgagtcattttatggaggcacccagagaagaacacttagttgcagtgaaacacatcttgcggcatgtggctggaactgtgaactggacgtcaggtatggcgcagggagaggaaaacagaggccggagcttattggatacattgacagcgatatagctggagatgttgaagaccacaagagcaccagcagcatggtttactagtcaaccaagctaagggtagtggctctgtcttcatgtgtagcagagtacattgctgcttccatggcagcaactcaaggtgtttggctagcaaggctgatggaggagctgcttgggaaagagggtgttccacctctgctgttggtagataataaaactacgatctgatcaagaatccagttttacatgacaggagtaagcacattgagattagattccattacatccaggagtgtgcagaccatggtttgatcagagtcgactacatccga

SEQ ID NO: 15869 - DNA, 911 bp, Zea Mays
gtttatttatgtactaaaaagtatttactatattatttttactattttcttggttcactggaccgggcgtcaaattccagaaaggttaggggctaagatataaattttcccagacacagctttaacccgcggtggacggcgggtttatttttcaaaaaccagagggctctttagcaattaggccacgacgaaggggtatcttcgatcgccagccatccgataccgatccaaaggctcagaatagatcgtgaagcgatacacggcaggcaccacaggatccaagatccatagtccaaaatctctcccttgcattaaaccgttctagcctttggattttcaatctacggccgatacaacccctcttacctcaatccttcatcgcggatccaacggtcctccaccatcttcttcacgcgaggcatcaggcaactgcgttgtggctgttcctagcccgcgacggtgtctgccggccaggagtccgagcagcacctgcgccagagcccctagccgatcgttgactccacggcaaagtcttcccccgtcgatcaacgaaccgaggccaaccatgtcacgctcgttgaggatccgcacatgcgcacattatctctctccaccacggcgcctggatctttggattactattaccagcgttggatgcacctaggaatggtgggtgaacggtggccaaccaacccatactccagtccatggcggcaacccacaaccgagctcaatggtggcggcagatcccgcggtagagtaggtacttcggcgagcagttctgtgatctcccaccgtcgaagccacccacagagatctcggtcatcccccaggcgccacagggagcacttctagttgccgtaggggtcatgccgtcagagtacgcgcacgccaacggcggcggatttctc

SEQ ID NO: 15870 - DNA, 596 bp, Zea Mays
ccgaagtaaagcagcccgaagccattggatagggttcagaccccaccaagtgagctccagaccgcccataacaaggtcccgggaaagggatgtcataacctaggcctaggtccagcattgacgcgtgtcctggctctatccgtagcgcctccaccccccccgctcggtcaagggtctaatgcagccacatggcttattgtccgtgacgtaggccagcgggcggagcatgacgtaagggctctaagccgcgtagcctccgcatttattgcggagaggacacgccacctgtccacccttctgacagatgatgtgcccccacggcatttattgcgtcctgtccatttcgctggcagacggcaccagggccaccctgcagacggcgcacatgtccagtctgttgtcgaaacagtgtgcccgtgctgcgcggtgcactgtattcatcccttatacgagaagcttcccccagcgcgccgaggcgacgcagatcacgggtgtcagggcgcacggagattacacgggcatgacaagcagtagttctatccttccatttgtccctgggcccacgtgtcggggctcagaacccttgtacctgtccc

SEQ ID NO: 15871 - DNA, 414 bp, Zea Mays
gcttgttcaaggtggcgaaaaactgatttgggggaactgagcgattcaggggctctggtgagtaattggaggcacgagtgggtgtgttgagtgcacaagtacatagctgagtcgagggtgtgctcattttatagggcccttgagcggtggcccgtgaatttgtgattgcgcgttggcgatcggagggaaggggatgcactagcgcaagcgattagtggctttcaccgtggcgagctcaccggcgatcaccggatatgcataacgcgagctactgcgacgtggtaagatgccagggcacgtggcgcaagttcgcgaggtggctaactccggcgaacctatccacagcggctgtgactcaggcgggtacggcggccggagtagaaaagtggccggagttcatccatggcgcaatat

SEQ ID NO: 15872 - DNA, 629 bp, Zea Mays
gaaatacccgcagaaggagccctcggagtgaagttaacagaagaaccccactgagccaccaggtgaggcagacgcggagctccaaactgagacgacatgggagtagtcggtgcaggagtaggcgcagccagatactgaggaaaaccctgcatcgctacgaactgagaagtccccggcacatagaactgctatggagggagtggaactgcaacttgctgctcagcgcttgacatcatgttgacagtgccctgagaagaggaggaagtcactggctcccatctgagcttcccattgggattcctcctacacaccacatccttgtgatcctgactgcagatagaacacctgccactccactaacactcagcacggtgatgtgcatcaccacaatgaaaacacaccagccccagcccgggcttaggaacagcccgatacctctaagtacttcctcccgaagcacccgatttagaggatttgccacgataggggcggtggcgctggtgatgagacttgcccctcttgtgggctggacctccagagttgcccctcctcgcgtcctggccacgaggctgatcaacccccaaggtcttctgtgactccatggtatactggtgttgcatctccacacc

SEQ ID NO: 15873 - DNA, 2476 bp, Zea Mays
aacagatgaagtaaatgtccaaagtgaacggaagtcggggcacacacaaactgtctcaaaatatggattgcatgagcaatgttaggtagagtaacagtgggatagacaaggcttccgactatatgccaatatcgagaggaatctttaagaggtgtaccatcagtgggacacactcttaagtcgtataccatcagtgggacacactcttaagttgtataccatcagtgggacacaattgcaaatgaagatccataggtgtggcagccatgcgattacagtaatgcatggacgagcaataagatcatgtatgtatttggactgagagagataatattccttaggtgagtgcaaaacctcaacccctaagaaaaaactgagggcccaaatcagacatctgaaaattgctcactaagttgcaacttcacatgagtaatgctctatatcatctccactaatcaacatatcatcaacataaagaagcgaagtacgtccacttggagagagatgaataaataaggcatggtcatgagcactaggtaaaaaacaagcaacctttatcatagagcaaagcactcaaaccaagcacgaggagcttgtttaagaccatacaaagcacgacaatgtttaagaccacacaaagaacgatgaatacgatagacataacctgaaggagcatcaacactgggaggtggttgcatatgaacttcatgtaaatcaccatgaaggcatttttaacatccatctgagagatagtccacaaagaagtagcaactattgcaatcaaagtacgaacaatagtcatatgtgcaacaagggcaaatgtgtcattataatcttgcattcttgtccttggctctgctgaatacctctggtgacaagacgagctttacatatcacaatggaaccatctcaatggaactatgtaacttggtcttaattttgaaaccccacttagatgtgatatgcattgtgtgtgacggtaatggaacaagataccaagttcatgtacgatcaagagcaacaggctccttagacatagccaactaccattctggaatgctagaggcttccttataagtggatggctcatcaacaacattcactttaggaaagccatacctgtcatcaggacgaatagtgctacaatctcgaagattatacggtggaccaacttgtggctcatcagaaatagtaggtggcttatcagtaatattatttgaagcatcaccattgggctcattaggattggctaatgtgggagggctaaatggaaggtcaccggtggttttgggactacgatggaagacacacacacacgtgataggtggtttggaaaacgagtgaggtggcagaggtagaggtgaaggtggcatggtggaagtagggccatgaatcacaggagtggacggaggtgtggtgacaccaacattggtttaaaaaggatgccggcacatagtgaggtggcagaggtagagatgaaggtggcatggtggaagtagggccatgaatcacaggagtggacggaggtgtggtgacatcagcgttggtttaaaaaggatgaaggcacaaaaaggatgtgggctccataggttagtatgggggcttagtagaggggttataaaagaaaggaaaatccttaggtcacatcatgcgaaatacatattcgacgagatagttgaggcattagacaaactagatagcacaacataggcagagtggcatcacgctgatgccagatagctagacatggcagaagaccttgagaggtgcagtgtagagtgggctagagctattggatctgatgaccacgttccaggaagcgagatccttcacagaaacatcgaaagggttaaactccattgaacacgaattgtcagtagtaaagcggtcaaccgaaaggagattttgaatcatattaggtgtcaaaaaaatattgtttgggtagaatggtctggaaagaaccgagtcacctactgaggtgacggggaggatggagccattaccgacaacaatagatagattagttgaatgggagggcagaagagggggatgttgccgtcgttgttagtagtgtggttggaggcgctggagtcgaccacccagtcggtaaccacatcgggtggattcaaagccatagtgttaaacgggttagcaagagactgctaatcagaagtgagattagacccatgaaaccaagttaaagatgctattgccacaaaattagattgtattgcattgagccccatgcgctgattgcttattatatacagtgcgtaggactaacattctatgttaccaggcaatacgatacaattcatatctacatatatatgcggtgttgggcgcactcagtccaactacagttattaggcccaatagggctatacggctaattctaacaaggaggtttagattaggctaatcctaactctaaaccatggctttggtaccatgttactaaacttggggataagag

SEQ ID NO: 15874 - DNA, 521 bp, Zea Mays
gcacttctttagctgagacacatggaatacctcatgtacatctgacaggtgatcgggtagctctagttgatatgcaacttctcccactcgctttaaagatcaagaaaggtccaatgaagcgaggggacaactttcatttaactttaaatctcctcataccccggagtggtgacaccttcaaatagacatgatcaccctccttaaactccagtagtcttctcctattatcagcatagctcttttgcctggattgtgcaattctcaaattttctcttatcattcgcacttgttcttctgcctcttgaataagtttaggcccaaagaactgtctttctccagtctgatcccaatacaggggagtcctgcattttctaccatacagagcttcaaatggtgacatcttcaaactggcctgatagctattattataagaaaactcagcatatggtaaactcttctcccaactgccaccatgtttaagagcacaagctcttaacatatcctccagtacttgatttgtc

SEQ ID NO: 15875 - DNA, 340 bp, Zea Mays
aaccgatgcaggtagcgcactccatacatgcctccatgacctatacactgtacacatgtgtctcgtcagtccttgactgtgtcggtggcgcaatccgctccgccatatcctcatgcctatcacatatattcactagttcctccagtctcttggccaaatctcagcgcaccggtctaggttcatcgataggaatccgtatgaccctatcttcaccgaactgtctttgcactccacacatacgtatcacaggtcaatagacacgttgcatgtactcacggtctgattagttcacctatctgaaccaaaaatattacttcgtagactattacttatcacaaac

SEQ ID NO: 15876 - DNA, 597 bp, Zea Mays
cgaggagggcgtgatcggacctgtggagagctggccacggtgagctcacacacggcaaagttcttgactgatttggaggaaatcccaaattggggagttgtgagggacgattggaggtgagggctagttcactgggtgcacaattacttagcggagcaggatggggcatcaatttatagtttccaagggcggtggctccaaattttggcatggcatgctggcggccggagaggaagaaggtcactggtggctaagtcatggcgttcaccggtgcaagggttcttagatggtaagcccaggcgtgccacggttactattgcgtagtaaagagccatggcgtggcataattgaggtcgccggagtttccacgacgacaccggcggtccggccacgtcgcacggctacaggcgcggttgataagcttcaccccgcgaccaaatccgctccccctccgatcttttcacccgcccggtattatcctgcccgagtcctgcacgaatcgccacgatcagcgcgaatccttgcgcagaggtcaccggcagcgagggggggctgaacctaagatctttctgtgtactgtaccatcagaaaccttat

SEQ ID NO: 15877 - DNA, 407 bp, Zea Mays
aaacaagactgtacaactcgcagtaatccaaaactaaaaagtaacatcccaactgaaactacttgcaatgcaagctggtagcatggaaaagtattgctcagtctaaattggtttccgaggtatgttcaatggccgtagttgcagcacaaatatagggcaaatcagcatgggtgttcatcccaattgggatcctcttgaatcgagctgctactttgcaaatcggaaccaaccatcattgaagctgatgctcgtgtcctcacttgtgcaagaaagaagggctaaggggcagcaaaaccaaacatcagagagtaaaattaccctaactggtagtgcataagagacaatcagcatcttcctcaccgcatcgggctggtattcaccataatcgtcatctccaattctctatc

SEQ ID NO: 15878 - DNA, 525 bp, Zea Mays
cggatgggcaagcgatgccatgctttatgtaagcgcgatctttcaactgcattgccggccatttgcagttttagtggcactgctttggattaggataataatagacgtggatggcaaatgtttgatggaaatgacatgtgtaactgatagaattgggtgtggttaactgttcaggtggacgtggagctcgtggacgcgaacacacgcccggacgtcgatagggcagtctcgttcagggagaagccgagaacgtacatggcgcctccgccgacaatgcgaggtagccgcaagagcttggagtcagcgacgtgccatgatgtccttgacctgaagcagctgcttgatctggctgagaaggaaggccgggtggccgtgtatggcaacataaggagctccgacaccagcagcgtgagcagcactagcagcagcagcagcacgattagcgtcagcagtgctagcaccagcggcggcgcgagcccggaaccggcctcgacgtcgaagcgccggttcctgccatggacgagg

SEQ ID NO: 15879 - DNA, 888 bp, Zea Mays
gggcgtttcgctcgtgtcggggctacgtcaaagcgggagagatagaactcggtcagcgcgtcgtcacttgcactaacacccgtttaatcgtcgtccctacatacccaccaaaatggtcatcgtttttttttttggtttgttccggttaaagcaaggaatcaggcgcgctagcactagcactagcactagcacgtcgggaccacatccactgacagtgcggaatgaatgtgacaatcacagtagtacagtgcgcattaatcacagtagtacatcgtacgggcctggcaccttcagctagtttccattgagctacttccacgtgtctgcgcgtgcaggaactatacctgcttcttcgcttcacgtgtgctgctgctcggccatgccggttgcctgtaacggcgaattcggaccagtgtccatctcaacctcggggagaaacagaagaagaaccggacgggatgcccacggggtcctgggaaattcgaacacgtctccacgagccgcgcagtgcgccaaatgattgcgtcctccgatcgggtccctcggcttcgctgctctacaccacccgcgcacgcgcccgtcacagcccgcgataaacgaaagagatcctggacagggaaagcgagcccgtgcggtgtggtcgagccagccagccagcgaacatggcacagtggaggtggcaacgacaccggtgaggcgagcctggttcctgaagaactcgctcgcctgctctgcctccctccctctcacaaaatcaccaggggttgcgggctgtggccctggagggcagggcatgcacgcgcgcgcacgaccgacgaccccctcgtgcaagctgcaaaccaccaccccacctcgcccccacgttcccttacgtgccctcccgtccag

SEQ ID NO: 15880 - DNA, 527 bp, Zea Mays
tacggtttgaaaagagatgtggatactcatgttgcactatgtgacatgtgccaatgagttaaagctgaacaccaaagaccagcaggattgctacaacttctcacggtaccggaatagaaatgggaagaaatcagtatggatttcatagttggactaccccgtactcaggatggctatgattcaatatgggttatagtggacaggttgactaaagtggcacactttatacctatgaagacaacttactaaggagcccagttagcagagttatacatgtcaaggattgtttgtctgcatggagtaccaaagaagatcgtatcgcatcgaggaacccaatttacctcacgcttttggaaaagaccacatgagtccatggataccaagctaaacttcaattcagcttattatctgcaaacgaaatggcaaactgaaagaacaaaccaagtgttggaagatatgttaagagcttgcgctctaaagcatggtagaagctgggataaaagtttgccttatgcagaattctcgta

SEQ ID NO: 15881 - DNA, 302 bp, Zea Mays
gcaactggttagcaactaggatgtgctttggtgtgtcgacttgctagctttgcttgattgtgaccatgcaacagagccatcctgttcctgcccactacctctgcgttttccttttcccttttcaccatgttcttcaatcaactctaaaagtgtggtggaggcattacacaacatgcgaataatatcttaatttggattagaattaacctatacaactataaagtataataaataagatgaagccatggttacctttttctaattcagccaattgctccatgtcctcctggatattaattgga

SEQ ID NO: 15882 - DNA, 858 bp, Zea Mays
gaaacctgagttaaatgccctcaaacattcactgccaactggtgttgtgaactgcaagtgattcaaaagctaaaaacgaatttcagtaaattgtgaccaactccggagtatcataacttgtgattcttgtgtgattggaccaagaagtttgtagtaaagttggagaccgtatatcaatgaacaaattttattatgaaggtttggcttgacaccatgttggtttgggagaaaagggaggctcaaactgcctcaagcagaaaagaaggaggagggggtgatctgaactcgaaattcagaccagcagcaagttgctaataaaatttggttgatttctggacaccgtaactttggaactgtgaagtttgagtcccagaaccctatagtgactttgaagatctttgattagtgaacaagttttgttaatagagactgatatgttcttaatcaaggtaaagagaaaagagtggctgaacagggaggagtcagtcgagtgttgtagatcctattgatcagaaatatctaccactgattttcttctccttgccgtatcttattttggtttgaagtggagatagagatgggatgaattgcaggggtgtttaggactttagccaacactgaaatatcccaggtgaactggagagcatctatctagacagccttatctatatcccttgtgtggtaaaaatctgccttggtcattgctttgttgtacttcagagttgggcgtggatccttgaaacttcgccacgcactcacgcccatgcagttgcccacatctcctaagtatccttcgctgtttattccctgaaaccagccactgctggagcttttctgtgtccatataaagagcagccg

SEQ ID NO: 15883 - DNA, 507 bp, Zea Mays
ttaccaagcaagcagtttgcgaatgtggcagtagatttattgaggagaagggaaaaaacatttctacatcaagaaatggaagcttcacgtgcatctaagccagaggaaaaaatcgctatagcgttgtggagggtgccaccatttctaggcttgagattgggaaagaaaagaaggggcagtggcggcatgacaagagtcggcactgaataggagcatggaacagaaaagagaaggctaaatgaaatccaacgacccaaaaccattcagtttgatacaatcgcaccaatgtccaaataatgcatattagtagtcaaacggattcctttcaacaagttctacacagctatggtctttgatcgaccatacgattcaaaaggtaaaaaaatccttctctctttagtacaatcggtcaactcactaattatataaaaaataaaggtattacagtgtccttccgttaaatatgtagtggagcaggaaggagaattcaggtgcaacatgttctca

SEQ ID NO: 15884 - DNA, 403 bp, Zea Mays
ctgagactgttccgatttccgaagcgatgaagcggtctgggctggtaacatcggaggatgtccctgccgctgaagcagagcaggctgatgttgaagagactgaatctgaagatgattatagcagtgcggtgccaagtaaacctagccatctggatttcggaaagtccaccatctccgaaggtgacttgcctaagatgttgaatttgggctatttaagtgaagcaaagaaagagctggttcgttttggtggagaagaaactactccgaagccaggaaaagatgaagtagtgatctttaagagtttctttaaagctggtttaagattccctttgaacaagatgattgctgatgtgctgaagaagtttgggatctaccttcatcagctaactcctaacgctatcgt

SEQ ID NO: 15885 - DNA, 304 bp, Zea Mays
tctagtgccgaacttccgtatctattcccaggactcatatcatggtgttgtatttcaatttcatcacaatttgacagtttatgctgttcatgctaccttgcttcttggtgacaatgtgtcctcaaacctagatcctctctggtcccttccatttgccccactcaatatccctcttgggcagcttacaccttacagcagaattaccgcaaacccaaccagcactacaatatgtcaaccccttgggggcttgttcggttaggataattccttgctagtcaaaattaaatagaaagagatttagtcc

SEQ ID NO: 15886 - DNA, 544 bp, Zea Mays
ggaatttgggcactcggctcggaaacgatcgctctaaacgggaattttggtgaaatttaagcctggaatctcggattggcgtgaaatttggcaagtaggttactggaagtgtggtgaaggtgtctgaaaaatttgggttcaagtggagcattttttgctggtttgggcattttaccgaacacgtggtgggcgtgatattagggtttcggagaaatggccatatgaggagtgaaaaccctcccgaaggagccaagaacctgcagggatacacactagggacaattgaacacatttcaccaactggattcacaagatttgacaagaaattgagagatggacaaggggtggagacttgagtgccacacagcctttcaaaccgagagggggaaggactgctcaccggagagggaagggatcacgagagcaccaggtcgccggagagacgccggtggggggaagatcgccggagagagggagacgccagagacagtgagcacggctggtggggaagaaagactgagcctctggctcggatgcgggctgg

SEQ ID NO: 15887 - DNA, 548 bp, Zea Mays
ggcgatggtacaatgactgaaatagattgcagatgcatcccccttgccgccggtgatctttacaccgtgatttgcgccatcgccgcgattcatgctcactggtgataggataaccacgacgaagtaaaaatcttggcaccggatcagctcgggcgcggatgagattcaccgtacccacttgctcgtcgtgcggccgggatagacttcgccgccgttgatcgctcaccgttttgcgccacgtgcttaagcgctagcccacgtcacggtaaatcatggtatgcatgtccggtgatcaccggaggactgccacggtgaaagccactcatcccgagcgctagtaccccttttcccctccggccgccagcacatcctcgtgaaattggacgccaccaccgttggaggctataaattgccgcccccgtccgctccgctaggtaattgcgcaaccagtgaagcaacccgtgcctcaaatcctcccctagaactccccaatttgggatttcccccaaatccctcaagaacaacgagcagtttgacctcgatgtggc

SEQ ID NO: 15888 - DNA, 861 bp, Zea Mays
atcagaataaagaggtaggaggccaaggtctgtaccaagcacatagatcgggtcgtagtgagttctatctctggtcgctatgacggcgagagacgctgcgaggaggcctagggtgacgacacggaggactagggttattgccacggccagagctcgagctcgaggggagaccttggccatttgtgtacgcgtggcttggatgattgagatgctatcccagtaatgcactctcttgcattgcaatggcgtggctgtcgtgaagatttatacaaatccttaattggttggaagtaacgagagaagttaagttcaaggagagtacaactacaaggacgacgacacgtacggtagctaggttaatttggaagaaacctatcatcgcttccttgtttaggtcgccctagctatgtcgttcaagcatttttgaatctagtcatcctatgactgacactcaaaatagtggagtcgttactagggcaacctacatagaaggacatgaagcctgctattatggaaagatcaaaaatataatcgagattacatttactggaaataagcctttagcgctagttttcttcgagtgtaaatggtatgacccaaagtattataggaccgatttgggatgacacagatccaacctgaaaaattgcttcaaggacacgacacatatatccttgcccatcaagtagaccaagtttatttctcgacatatccatgcaaaaagttgtctacatggagggttgtgtacaatgtaaatccccgcgaacgcctatacactcctggtgaggatgaatatcaatatgggcaccttgagtaggttgatgaggtgtttcaagaagaagatttgccaactagttttca

SEQ ID NO: 15889 - DNA, 1143 bp, Zea Mays
gcacgacatcacccacagggtgcgaagtctttactataagacacgtccgagcaaaaagccgcctaagggtgcagccgggcatgcacaataagtgcgcgacatcacccacagggtgtgaagtctttactacaagacacgtccaagcaaaagccacctaagggtgcagccgggcatgcaccagaagcgcacgacatcacccgcagttaacgaagtcctcatcccacccaactgctgcgccaacacaattacaaattgaaacaatctcacaataaatgcagcacgcgatatgccatcatagtttacatacataaaacgaaaggcccgtcggccacatcgcataaataatacaaatcatattttgccgccctccctctctattgcgaagcaggggagggcagagttttcactcactattgcaacacgagagcgaggacaacaaaatgtcacatcggctctgccttcggaataagacccgcctcccagaaattaaacaatatcatcctcaactctttgccctcaaatagattccgcaagtccccctccccaatacacgtcctggacgtcaagcacagtagatcgcgttggctaccccgatttagtcgaagacgggatcgctccatacccatccggcgacatctcccacttcgtgacatcccaccaacactctgcttcgacaccactttttgtctgtggtggtcttcggccattgccctggctgggggaacagactcttcgcgcacatcagattgcggcaggactctgatgcgaccaaatccaacacagcaaagtagtctaaatcttcatcagaggactcctcaatccacaaaagagggctcccaaaatcatcctcgtccgaggaccacgactcagtttcagaaccctcatacacatttccattaaagggcattgcattcgcagccgccaaaatactagtatcaacatcaggggggttgcttgtgcaggcctagacgtcggaacctgcgcagcaatcgaccttcagtatcacaaaaagaaacccaaaacctaacaaccctaatgcgaccctgccacctacgcccgagcagccgccgctatagagttttcgtcagggccggcttgaggcactgagtgcccttcaacccccgtctccacgccctctgtctg

SEQ ID NO: 15890 - DNA, 1254 bp, Zea Mays
tccgcgatggtggtcggcgacgagcacatctccggtgagccaatactggccggaatatgccaagaccggacccctaacttagctggcaccgaattctaccctcggcgacactaacccttcaatcaattgcactaatccgggccggagcacgcctgttcacgacgacggcaaaacccgagaagaagttacagtgtttcgggcaattcagtacaatatagttcaatcaatcgagcctacaagcaacaggagatccaagagatgctagaacattcaatagagggttatgaatcaacctgaagcaggctggccacagtgagctcacatcgcacggtgttcttggttgatttgggggaaatcccaaattgaagttctctagtggataatttgaggcacgagttggtgtatgggttgcttgactaccttgcggagccgacaacacactcaatttataggctccgggggcggtggcacgtgaattggagatggcgcggtggcggtcggagagaaggagatgtactgtcgcgagagcttggtggctttcatcgtggcgagctcaccgacgatgaacggacatgccaaggcgagttacagagatgtggtaatagggttatggcgtggcgcgaccggggaaaacggcgatggccgcggtaatggtcgtgcggccacgtcgccggcgcaagtgggcaagagacagagcgaccatggtgccttgtgttcattcgcgatgagatcttttcaccgttgagcgtaatccactcgcccgaggcacgaatcacgacgaccggcggtgcgaatccggacgcgcagatcaccggcggcgaggtaccctaaacctgttgatatttgcgtggcactgtaccattggaaacgatcatcagagtgcctgacaaagcaacttgcaatgctaagatctcggatttttgtgccagaacatgccaatctgtctgcagcaaacttgtagccctatgatctagctacaaatcgactatggcaactatcctcaatcgagcaacagatcttactcaaaatcaagccctaagttcatccaacttcactatcactgaaagttcagatccaaggctaactgacagcacaactttgggcttatttttctccaaattttgtatgtaaacaaagtttacttacttaagcaaaattgttctcctattatagctctataatcttgatgtattgacctagggcaaattattcatggattaaaagatataaggttccaaagatgccctaagttca

SEQ ID NO: 15891 - DNA, 583 bp, Zea Mays
ggagttcatcatcggcgacgtgcggaaggccggtgaaaataataaaaactctagcaggaaagtggtgacagagaggactcctgatggggggggagactctgaaggttaccatcactacctccaatgctgggggcaggcatggaagcctatcctggacatcgcgggcggtccgacatacagacgtggatggtccgagacatcaccagacagtccggattattccagcggacggtccgacaatgctcaggagcccaagacgaccacacacattcaaaccacgacgaccagaaataggtacgtggaaaactaacacgttcaaggcagcatggcgactggtcaaatctggcccgacctttgattaattgttgtctaaatatgtgaaaaggaaggccagcccaagtgaccggccaccaaagcgacctcgctcgcccactcaagagcgacagcaggtaagaccgattggaccaccttaccaatcggaaggaacgataggtcataatgtccaattacgacctaacgtacctacatggacacctccacctccaaacgcgctcgtgccatatcattatgcgtacatacccca

SEQ ID NO: 15892 - DNA, 586 bp, Zea Mays
cgcaaagatgtggcataagtagtgagcatatggcaattgccgacgagcacgaatcccatccaaaacggtgtcctcgatctcacaaataaggaagtccatgacatcaaactcagagtgagagaccagggcaccaaggagccagagctggatatgtgtggtaccctccctgtatcccatcctcggcagaagagtccgtctgatgagctcatataaatacttggctgttgtagtaaaatctgccggtgaacgtcgcgacccatctgagaagggcgggcagaacagagccgcgacgtgagctgtacccagagccacaccgccgtgagggcgacgaggagggtcagaggtgccgtagcagaggctgtgaagatgagtcgtcgactcgagaaatccaaagagctggcggatctgactggcagtaatggtgacatcctctcgctcaaaacgaaacctcatccagtgatgatccgggtcaatccatacagaggcgtagaagactcgtacccactcctcaacatacctgccgctggtagtcaaaagggtcagaaggccagacagatatgtgaggtgcgcctcagagtcagcaccg

SEQ ID NO: 15893 - DNA, 601 bp, Zea Mays
cgcagctgagaacagatcgaggtcgtaggagagcgatcaaacctgagaagagggagaccacacagctttggttcactcgcagcttagaaccgatcgaggtcataggagagcgatccttgcgaagcaaatgaaatcaaatgagaagacaaagcagatgaaagtagatgagcagccaagaaaagggctaacctctcgtcgccgacagcgaagcagatgaacccgagaggcgagagcgaagcagatcgacagagaagcagatcgagctcgtccgcgggcatggtgtcgtcaccacgggtcgagagagatgacggcggcgagggagcacggtggctgtgagtgaacccgagaggcgagagcgagtgaacccgagaggagagagcgagagcgagagccgcggcggcggcgagtcgcgagaggagagactacaaaccctagactgcggcggccaggctcaatcgcgaagggagatatctgcgttccaatcaggcctagccacaatattgcgttgggctcatctcagccaggcccccaagctgggccaggcaaccaaacatggcgctgttgattcaaatgggcctgaccgtgcactgggccagggaac

SEQ ID NO: 15894 - DNA, 445 bp, Zea Mays
aacaatcacctcttcagttcaaccataatcaaataccgttcaaccataattaaataccacactgcggtactaggcaccaaagagcagttgcgattggaacgggccctagttaaccgttctttactgatctgctctgatttatccactcggttctttactgatattaactcgttctttaatgatgagcagtaattcatctgttaaaactgccgcttcaaagccaatgtcatgcgacacgtaatgtttagtatagttcatcatgtttgattttaactaggatggaaaaaagaccaaaaaccaaattggatcacagataagagaccatgtagcagattgttcgaggccgtcacaaaacagagaaatctgagcggcacggagaactgcagttcgttgtggccaaccttcaatgcaaagatcgccacttatctggcccctttgctctgca

SEQ ID NO: 15895 - DNA, 503 bp, Zea Mays
cacaaccacaacccacaagccaaagaatcatcacgacgcaagcatgctgaacacgtggtagcagagtgaagtggggcgtggcacgcggtgaggagctggagcggtggccgattcagataaaagaggaagaacggtcaagagataagatgcatattcgcaacatcactaaaacgatgttacatgtcggtcacgtaggcgagaagctgtgcgctaccacacaagtttgcacccgccacgcgtcacgaagcacgaccaccgagggacgtgtgcatcacaagattgagtggattcgagatgaaatttaaagaacccaattcgacttcaaagactaggatttaggcaaggtataaacgatcgaaccaaaccgatagcgaccatgatagtttggactgcatgatttagttgaaagtcagccaaaattttatccgctaacatacactcgatttcgttgccaaaacaacttgaagaaacaatctaaattattaaccttgcgcacgatttac

SEQ ID NO: 15896 - DNA, 296 bp, Zea Mays
ctaacatctcgactcgaaacatgacaaaacatatgatttgctctaaaaatgatgccattcgctccttgctcttttaggtttccattctaccttacaagattgaggccttgcaccatgccacctacctccacaacatcctaccactaagacactcaatgactccacgctccaccaaggcctcgtcagctctgcgcctgcattcgatcatcttcgtgtttttggttgcgcttgctatcccaacctttctgccagtaccgcccacaagttggctctgtgttccgcattgcacatcttcc

SEQ ID NO: 15897 - DNA, 861 bp, Zea Mays
caaagcgtcagaagagcctcttcatgggcacaccgatgtgaccattcttgaattcgtgacacgactaatgtcaatcaagtccaagtttgcattctctattaattgttacaaagatctcgaggatttgcttagcgaggttcttcctactggtcacaagatgcccaaagacatgtaccagtccaagaaattgcttgaaggtcttggtatggagtatgagaagaatgatgtttgccaagacaactgcatgctttttggaaggaacatggcagagagcagaaatgcttaaaatgtgggaagtcgaggtacatggagttgtaaatgaagaaggggagaaggtggtgacaaaggttgcacataaatagcttcgatacatgcctctcactcctagagtgaaacgtttgtttctctcgaggaagaccgctatgcacatgaggtggcataaagaatgtacagacagacaagatgggttaatggtgcacccatcagatggtgatgcatggaaggctcttgacaactttgatccagagtttgccagcgatgcaagaaacatttgtatcggcttggcaactgatggtttcacgcctttcaatatgactgttgcgtcgtattcatgttggcctgtcattgtcataccgtacaaccttccacctgctctttgcatgaaatatgagtttatgttcctatgtcttgttatacctgggcctgagcatcctggcgtacgcctcaatgtgatgcttcaaccactgattgaagaattaaagaagctatggcaaggagtggaagcctatgactacttcaagaagcagaaattcaatcttcgtgttgcgtatctgttctcggttcatgattttatggcgtatg

SEQ ID NO: 15898 - DNA, 398 bp, Zea Mays
gcgagaaggggcgggcgatcaagtccctgccgagcaagtctgcgaggcggaatggacgaccaggcccccgcccaagccggtccaagttctgaagccgcgagcacacctcgccacagcaggacacgtcactaggaacccacgcgattgccgtcaacatgactgaacgcatcatactaatataagcataacacatggtctaatgggaccaagcggcgtcggtcagaggcgaccttggcactagagtctccacaacagacagtatgttggagccataccgggtagaagaatctgtacacacagaaggatggcgaagggccaagacgacaggagaaagtcgtgccatatgaatcaagccctgaggctgaaccatcagactcgtcgcatgtcaccccacggac

SEQ ID NO: 15899 - DNA, 668 bp, Zea Mays
aagaattctctgtgacttacgagtccttgccctagaaggacctgtttcttctgccatcaaatctatggcgagactagctacttcatggagccctaaatcctcagatatagtaaattctctattttctgactgatcgccttcttgataaatattaacagaatcatcatcttcgttatttgtgttgtaataatcatatcgtaacggatggacttcaggattaattttgtatactacccaacaagacttcaagttttcacgaggatatgtcagatagtacacctgttatgcttgatgtgcaagcacaacattgctataatcgctgcctttaaaccgtgattcatgctttacctccacaattccaaattcatcctctcgcgtttgttgaggatcaaaccattcacaatcaaataacacaaacatgaactctttggccccaccaagagtgtactctgttatatcttgaagaacaccataatagtcatgagtgcctctgtctgcatttgtggcagttgctactactccactgtttgtcgtggctgcctgtgggtggattttttctaatgttcgaaaacggtatccattaatatcatagcggctatattttcttgctttcaactgaccatgtgatatctgtcgcaaatcatccgagactagagagtcaagtttct

SEQ ID NO: 15900 - DNA, 681 bp, Zea Mays
ggtgaggtgagtatgatggaaatccataaaaattaaaaagatgctcggagagctatggagattggacaacaatgttcttggaagatttagagaagaggataggcgaggtaaagagggagctagaaaattgtaggaggagaagaagcatatgtcaggaacaggtgaacccagagaacatgtcaggaacaggtgagtccgtacctcatggctgaccaaaagagggctggaacacgttcttccatgcgtatgcttcagacaggaaaaggaaggaatcatgtgaggaaattgattgatgataacagatggtgaatctcttgaagctggggacagggaactttgcaccgggtttcaggtgctccgcaagctggaaaccttggctgtccaaatgagtctggaatgggaggtgcaacttggcatgccaagaacaagtttggagacagatgcaatgcaacaaccctgggactggctgctcgatggagatgtggaccgaagcccaaatggttgctcgtttatgttactatctaattctatgcattgttcagtctatctgcaatagattgtgtaatagggtagcttagcaggcagcttagctgcccatggggcttgtaacttgcagtctgattcacatgtctacttaagccagcccccagacttttgtaatgtctcgatggtaatgcattg

SEQ ID NO: 15901 - DNA, 745 bp, Zea Mays
caaaagttccgacatgcctattgatcttgtgcttgagtacgatattgtggagctcacaatcggtcttgcactggtttggatggcctatcaaatactaaagcctgtggtgcccccaagttgggtgataaggaaatctatagggatattttggttgtgatggtggccctccctacatgggtgggcaagcaagcgggtagaatggtggatacgtaggtcgatacataggtggatatgcaggtggtggacatgtatgtggtggacatgcatgtggtgaataatcaaaaggtgttgtccatggtgcccgtggtgtaggtggaactagctgtactaccttttgggctagtttggtcggtcgtgtttctttttcctgtctttctaaagttggtggatgaggtcgctttgttggacgatctataggagtggtcttcttattgacatatttagaaagaagctaatcaaaaataggacaagtactaataatctgactagatgctttggatgtgttttgtttccccgtacctatttctgatcatcgcagcctaaaggtctagtgtcactagtgcctctggtcatccatggaccattcgggcgttgtagtcagaccatccatgtggggtccaaaccatgcatccttaggtcctaggctatttgacgtgcgctggataggtggtcagattgagtatctgatcctacatgcccctggtgctattgacctaatggtgacctttaaagtctacttcccatc

SEQ ID NO: 15902 - DNA, 550 bp, Zea Mays
tcctcttacgatccccgatggccctcgatttgggcaaggcttcgacaattcccataggggcagtggtttcggtcaccccggtgccgaatcccacttcccggtcacgggtacgtggaatcactaaccatccccatcatttgccttctctcctcgcagtagtggtccatgtgattttgatttgtgtgggttttcacctcatcaaatgggtagtctcctgaagttgaacttccctatcttcgatggaactaaccctaaactctggcaaaagtagtgtgagaactactttgagatgtatggtactgaggaaatcatgtaggtaaaagttgccatgatgcattttgatggggttgctggacgctggctgcagtccattgaaccccggatttcctatatgtcttggcgatagttttgtcacgctatacacgagagatttggccgtgagcaacacgaattggtgattcgtaaattgtttgacattaagcaaacaaccactgtccaggattatgtagatcgcttttctgaactagttgacttacttgttacatatgag

SEQ ID NO: 15903 - DNA, 364 bp, Zea Mays
tgaccactgccccctactcttggggctccatgataattcatttgggaaaaacggttccactttgaagcattttggccaaaaattgatgggtttcttgatactgtacagtctgcctgggactctgtgggtagttcgccttgcccctttgtgaccttggatagaaagctcaaagagacctcaagaaggctgcacagctggagtgataagaaagtgggtcatgttgcctctcagttggcacttgcaaaggagctcctccataaatttgaaactgcccaagatcacataatgctttcaccggctgagaattggctcaaaaataagctcaagatgcaatccttgctgctggcctcctttaaaagaacta

SEQ ID NO: 15904 - DNA, 493 bp, Zea Mays
ttggttcgatatggtggacagttaggaagtgcaacccttggaatgagatcaatttgatgctcaatcccacgaattagggtattccatccggtgtttcttgtggaaacacatcttcatagtcctacaaaagatcagccacaacactaggaagagatgttacgtcgttaggagaaatcaaaacatctttgctcacaagtataatgagcaccagatatgggttgttcctcacttctctcagctcagattttgtcgctagcataactagatgttctccctcttctttctttttatctcttgaatttggcttgtagcactcactcaccgaattgtggatggcactcaatttattttgctcttctcctcctctacttgctacactaatttcagttttcttttgtaagtgttcaaccatgatttgttgaggggccataggctgagtacaaactttctcccttttagatctagcgtatactgatttgttcttccacaatgc

SEQ ID NO: 15905 - DNA, 293 bp, Zea Mays
ctagtcgtacgttatcggcgttcatcattaacaccactaaaagatgacaacatgttatttatttacgcaacacaactatgacattacaggtacgcgcattttatttgtttggatacggcttttcattagttctcctattgatcgcgcacaagcatcatcgacaacacaaatccaatagaggacataagcgtcaatgtctaaggaactcctatatcgcgccactagataaaggaacatataaaacaagacacacatgtcatctctagcttagccatggcaagtctacattactt

SEQ ID NO: 15906 - DNA, 1238 bp, Zea Mays
gcgcgagcttggagatgcgtcgcggaaggaagactgattatttcgatatccccctcaaggacaacatcaaaggatggcgcttggagtggtttatcattgagaatcacggaaattctctccccccacggtcagggagacagccgaatgttcgcactccgagctggaccgaatcccccacagaccaggatgtggctgaggcaggggttctgctagctgaagttggattgttgaaggagaggggtctgactgcagaggctatggttgctgactttgtcttcaagaatattcagccattgaaggacagggcatacccggcctatctgtaccgaggcctagctgactccacccgggtcaccaacagaagaattcctgctgtggacttggtgagccggctcgaaatgatactcagaggcaaggtatcaaatgttggtgcccctgttgcatactcggcctggaacctgcctccttccaaggcctttactcatttcgtgtcaaatcctcctgctggtgatggcggattgggccttagagtgcgaccctctgccgaagaagttagtgctttggttgcttcgcttgaagagattcctgatgatgaacggcaggttcactttgaggtgcttttagatcccagtgatgcagagataagtgccatgcttgatatgttagccaaggattcttctgatgccgctcctgctggaacattggtggtgacgcctctcccagaagctagtaaagccttggatattcagaggcctgacaatgttcgcccgaagcgcccttgtcgagccaatcagcctgcttctcctgctaatgggcagaaaaagaagaagagacgtcttcggcgagtgtctagcttggatcgggatgctggtccttctgctcctgctgctgaggaagtgcccgtgcctgaatttaccgacgctgatcccaatgggtgtgacccgtctgacgctgaccccaatgggtgtgctgtccgtgttgttgatgaggatgatgaagaagaggacgaaattcctctgattcggaagaacaaccggcattacgtagctagtggggaaagtagtggtgttccttctcctgccttgtctgccctcattggtctgcaagaattatctctagcgaactttgatcaaactcttgaagacatggttctagaagatctgttatcagagccggcagatggtggcgcgatggatgtttatgttgatgtgctcgacgccgggttggggtcatctcgg

SEQ ID NO: 15907 - DNA, 499 bp, Zea Mays
attgagatatcctcctatgaagagcttctcgccaactggcacactactaaccatgtcctccagaccttcccataactccctctttgagttctcattaaggcctacttgaggagcatacgcgctgataacattgagaaccaagtccccaatgaccagtttgactaggatgattctatctcctagcctcttaacatctactactccatctttaaggctcttgtcgatcaagacgcctactccattcttgtttgttgcagtccccgtgtaccacaacttgaagcctgtaccttccacttccttcgccttctgtcctttccacttggtctcttgaacgcataaaatatttacccgtctcctcaccacaacgtcgactagttctcgtaacttacctgttaaggaacctacgttccaactacctacacagaccctagttggctcgactagcttccttacccttcgcacccgccgaggaagatgcaaagacccttgctcattttcc

SEQ ID NO: 15908 - DNA, 442 bp, Zea Mays
gaggagcatacgacagcggcggtgtgggggcggcgtaaggagttccacggcgtgccctgttaatagaaggttactgtggcttgggaaggaccagggacacagagaagtaggggcgacgggtgcggatggctaaggtcgtcgccattgacggagaagagaacaccgcatccgtaattccctttttggtctgtgtctgctcgactctctggaaatatctcgtgtggaggtgaatttctcgatgtatatttattttcctctcgaagattctagcggctgatagagaacacgaaggacactctcatgagcgctttctttagcttcacatgaccgcttcatatgaccgctctgacgtctgatattaaagacgacgacatggacatcctggtaacgcggttttgtgccgcgctctatcttcatctattttaactacgtgagtgcctgt

SEQ ID NO: 15909 - DNA, 403 bp, Zea Mays
tgggtcgacgagcatcacgggtatgtgagatcactcaaacgagagagcagaggggacgagctaacctgtatcgcgctggccacggcgaggtgttcttgcgacgttcttcgaccgatttgggggtaatcccaaattggggagctgtggggaacgatcggagctgatagtgggtttactggatgcacaattacctagcggaacatgttgaggcttcaatttataggatgctcaagcggtggtgatcaatttgggcaagttgtgctggcggctggaggggaaaaggagttctgtgctaggaacaggtggccttcaccgtggcaatcactccggcggtcaccggacatgcaccccatggttcaccacgatgcagctaaagcttaagcacgtggcgcgcaacggtgac

SEQ ID NO: 15910 - DNA, 575 bp, Zea Mays
gggggctccaagccgttcaggtttgaacttagctggttcgctcgtgaggacttcttcgaaaaggtggttgatatgtggaataaaccagtaaaaggcaataactctgtacaacgttggaaccgtaagcttggcgcccttcgaagctttcttcgagggtggtcacgacatgacagaggtatatacaagcaccataaaaatgagctccagataacgataaatgatttggatgtaactgctgagggtagggacctatatgaggaagagcaagagcaacttgctcgtgccagggaggacctatctaaacttcttcgggaagaggaaataaaatattaccagagggcaaaggcgaaggacattatcctaagggacaacaatactaggtactttcagatgattgctaatggcaaacatagaaagaaactaattcgttccttagaccacgaagggggaaaaattgaaggtcaaacaaacctcaagaactatataactgagttctataagggcctctttggtgatcctttggataacaatatctcccttgatgaggaaatcattcaggatattacacaagtctc

SEQ ID NO: 15911 - DNA, 571 bp, Zea Mays
cagagctggtcagggttgttagggtctggtcctttgtggccctcctggtagacctcaatgtcactaggcttttggccacgcgtagcttcctgtataaacaaaaaacatccataagcaatcgtactatttggtgatcgacatagctagatcaaacttaccattcttttagcttttcggagcatgtcgtcaccgccaaacttgtggttaggattggtttctcgacattgcctgtgatgcgctgacgctttctggaagccttcggaagaccaatgtcgacaccaagcatagtacgcatcaggcacgggcgccatccatggaacgatcacctgcacacacaatgttacatattatatcaatcacaacaattaataaaaagggaaaaacaaattgaatactaacctcacgatattgatcctcagtcaaatatatctttgatgacacttcctttttgttcaaggggcctgcttcttccggaagattttgaaaatacagatttgtagcccaaattcttgcatagtatatggcatccttcactagcttctttgcattgttttggaacacacattcagcg

SEQ ID NO: 15912 - DNA, 677 bp, Zea Mays
tgcggtgactcacgacggcgcggagaactgatttgggggaaatcgcgattgctcgggctatggtgagtaatcggaggcgaggagcgatgcactgggtgcgtaacaagctaacggaccacgctgagccctcaatttatagagagcgaccgcgagtacgatgaatttggacggagaagagcttgcggtgacaaaggagaggagtcaccggaggccgctcaacgtggcattcactgggctaagtcaccagcgacagagggcctatctacaatgatctattgcgacgtggtaacaaggccagtaccgtggcgtgcccaggggtaatgacgatcatcacggcgatggccgcgtggccacgtcaccgggcaagtgggtacggcgaagctagttctatccattcccccgctgatcttttcactcccgcggtgatatccgctacacactgagcacgaatcgcaacgctggcgcgaatccagccacggggatcaccggcggcgaagtgcggtgtatctgctgatctttatcaggctactgtaccatcacaaccttcatcagtctgtccgatagagcatcttcagaggtgttttcacaaatttttatgtggcaactccctaatccgtctttaacaaagttaatctcctatataccaactccaattcgaccataggaaccagggtcat

SEQ ID NO: 15913 - DNA, 572 bp, Zea Mays
caaaattacagtcctgcaaagtgaactgcccaaactgctaataaatactctattttctcttcatgagttgttcaagctcatggacagggatgcaagaataatgttatttgcatgttcacggacaaccacccatcttacatccaatcacatgagcttgaggccttgagcatgaatggagaggaggccaatgtgatgtaaaatgtaagaagaggagaacatgttgatatttcattaccaaccaaagtagtaaagctaataccttcgtcattaagaatccatctcgcttaggcttaggagggacatggcctactatggcccccactaacctccaccagtcgttactatattacacactttttgcatggataattctccacctaggtaatatatttcctctcgtgatagcttttaccatgatgaacttcaaatcccccccatcatatgccccatcaacattaacttttagccagcttggtttatgtcgcttctatagatagcttaagtaaaagcaattgcactccctcattgttaagtgcctacaatgttatgtagagtagtaaaagcaatttgca

SEQ ID NO: 15914 - DNA, 461 bp, Zea Mays
ctcagggcctgcccggtgctttgtgatgatggacagggaaggggtggtcgtgacccttatacccgaggtcagatcatatcaacctcggctagattcacgcagcacttcgcggcggccggtacggaggttcggtgcgcccaacagaaaggcggacaagggaggaagaggcggttcctgacgcccggggcccaccaggcagagaggctaccacgctggaccaacatgtcagtgccagagcatgacgcgtgcgcgtggagattggttggacgactgacgagtgggccagcacggcagagaaacgcgcgtgtggtttgtgggcgctgtcgtcgcggacccacatgtcagcgccggttggctgttgggctagtgggagagaaaatgtggaggtgggccgaatagaatggaatcagcccatgaagcctttttatcttttctattttattttcttttctcccttaccc

SEQ ID NO: 15915 - DNA, 346 bp, Zea Mays
tagctaatgccgaggacgatgctgtcaaaccgccgtggacgaggcgtgctctaggtttgctacgcctggaaacgcgtcgtagacgaatgcacgtgttggtgttgccagtaccgcacgtactaggtagaaggctccaaccaagtgtcagtgtctgaagggaccaacagagaagacctccacgacggttgtggtgcagcatgtcgggagtgctgttgcagctcacgattgtcagagtggagtagacgaagtagttgaggatgagatggcgacgctggcaacaaggttgtgctggaagaaggtgaagaggtaggcatggcgacgcatcgaggattctggagtcgcggcg

SEQ ID NO: 15916 - DNA, 436 bp, Zea Mays
gcgacatagcctattctctcaggacgaccattcgctttgggagtctagacttcatcatcaatggagaaggagagatgacgagggcctcagaaaccccatctcccttggcaagtgacttgccccatgtagccgggagtctcagtgaccgccgactcgacccaccttaggggaaccatgggccgcaaggctcgccgcgaccagatcgtgccgaggttctggggggtactggaccatgttcgggactcattcttggaaatcctcttgtcggggacggaagacggacttacatctccgcctagcgaggcaagctgcaaccctggtcaggagtgcctcgcagccaacaccacatgaggtcatttcctcgatgcggggaacccaggtgaggcatcgcccaatatcatggtgtgcagtgcggtgttcaccctgcctcagctca

SEQ ID NO: 15917 - DNA, 329 bp, Zea Mays
gagcaatccagtgagtcattctctgattccttgcacacacaccttccttgatctttggtgaagtgcactaacccatttgattgaccaatcgtgccctggttaggccggactcctcgccaccgacgagctcccccgccaacacacgtggaccggctgactccgaccatccccgatggcgacccgcacatcgccgtgaccatcgagacctcccctacaccctcgacgacctcaccagagtagtctcgccgccggtaagcccctcctccctttcctccaccgtgggtactgtttaattgggggaaggacctcgggttagatttagtaaaatc

SEQ ID NO: 15918 - DNA, 485 bp, Zea Mays
ttgtgcgccaccgtatgagtcagggtagttcaatgtatgtaggcttgattatagcagtgagctcaacagtgtaaaccctaactccgtcgagtatataaggcggagtatgaactacaaaacgattggatcctctgataggctagctagagcatagacttcatacactttgtaatctcgaactcaagagcaatttctttatagccacatataggacgtagggtattacatatcctcgtagcttgaatctatataaatctctgtgtttccatagtgctcaggcacgaaccatcgagcaactcgtagatctcgccaacccacgaacaaaagcactgtgtggaataccagttagggcactaccgttgctagacatcgatagctagtgtgctaggtagaagaggcgatgtcgacactagttagctccatggccatcacctttttcaacattgtttagttcactccaggtgagatgttccacttcagatcca

SEQ ID NO: 15919 - DNA, 686 bp, Zea Mays
ggacggacaggggttgcggtgggaggaggaagggagagagagaggtggagccatgggagggcgacacttgcaaccacgggagagcgacataagcaacaatcaaagcgcacgctgcagccatgacgaaatcgatgggagacaaatcgattttggctagggaagaggcggagagagcgaggaggatgagaaacgtcacagcacgggtgaagagagacgaggagggagaaagcgtcggtcagagagctgaaaaggagagaaggaggcgaggagacacgaacgtgagccgttggttggagatcgagcgagggggagtatttggctgacgtggacatcgcgagagaggctgttttggaccgcgtttcatatataggaagcatgcaagatatcacacatagatatgttagagaaaaataaaacccatggtcaaagccaaatagataaaagtaccacgccaattttattgttcaagttaatcaaagaaaccatccctgacaatgcaagcaacaaaggaatgaatacataattccacaagcattaagaaataaagtcgtagctacctgaacacaacaacagactatttgatatggaaacttcgacgaacaaacaaaatggttgtcatctttaatagaagaaagctgcaagtagagagtcttgctcacgcataaatcagcattatggtacataat

SEQ ID NO: 15920 - DNA, 1240 bp, Zea Mays
cctaatcatatataccagactgtttaaagtataaagaagacattattacaaacactcaagaaaatcatcatgatacaggtatcatcatatagagcggcaagtttttttggatggagcaatttggactattttttcttcttctaaatattaattctaaagtgttgtatttatgtaacgattcagtgtattattaatcacaaggatccaaaaaagaataaaccaggtcctgcaaaaataaaaagaaataacaaaaagttgggaggggaggaagtaaacacagccacatgcatagaagggggaaaaggcgagaacaacggggagtctgcaaaggcaagtgatggtactgcagacctgggtttacgaagccgctcacaatgcgtaggtcgtggcgggcaacagcagcacaccaaatgctcccatggcgacggtgggtggcaaaaccgaagtgatgagcagcgaggaagacgaagtcgacaaactctcagtgcagggctaaataagatggccaggagccagggagaggaaatattaaagtgatgaaagtactcaccgtcgtaccgcacagagcgtggcgctgtttcggccatgcctggaactgctgacgcataggaacgatggagacgaatgacagcgtgtggacgacggctacgcgcccatccgctcctctccctacagcggctgcacgtggacccgcgcggcggcagggaccacccagtagtgtcatccaacccgtggctgctgtaatccaagagactgcatcctgatttcactccaaaacgcgccagacaatgcgatagataggatagaggctatgcaaaatcgaaatgggcaccacaccttattatattactcttgagcgcctgggtgaattggtggcacgggacgccaccgcacctcctttggctgccctcgatgcattgcgtccgctgcctgccggcgacgatgaagtggtggagcgagacggggtcctcgaatcagagaggaagagcggcgcctccaatcagtgaggaagagcggcgacgcgaatcagagaggaagagcggcgccgcgacggcagatctaggaggaagagcggcgcctcgaatcagagaggaagagcggcaccgcgacggcagctcaccccgcctgctcccaccccgcgcgtgcctccaacggatctaaggacctaacggagaacaggaagtcgtcggggtggctgcgattgggaagaggaagacgcctggttgcgagcggaacagga

SEQ ID NO: 15921 - DNA, 1271 bp, Zea Mays
aagcaattgcgccaacaaggataacgtgtactttggggaacttcccaagaataccacattcctacccaacagtgcctgcaataacactatcttccaaaaataggatataactgcgcgatactgagataaccaatccatacccaagataacatcaaatgctcccaaggaaatcacaacaagattggccgaaaagacctcatcagcaagaatgacggaacacccctgacaaactgaacagctactaatggagccattagcagaactaaccaaaattgggtgacccaacctctgcatcgaaagaccagcccgcgacacaaaattctccgaaacaaacgaatagctagcgccagagtcaaaaagagcatgggccacaaacgaataaactgaaaccgtacctgtcaccacgtctccttgctctctggcatccgcagcgggtagcacataagctccggaaatacctgcagaagaggaagctcccagagtgaaattaatagaagaaccccactgagccgctgggtgaggcagacgcggagctccaaactgagacggcatagcgcaaccagaaactgaggaaaaccctgcatcggcacgaactgagaagtcccaggcacataaaactgctgcggagggagtggaactgaaaattgctgctcagcgcttgacatcatattgacagtgccctgagaagaggaggaagtcactggctcccatctgagctttccattgggattcctcctacacaccacatccttgtggtcttgactgcagattgaacacctgccattccactagcactctgcacggcgatgcgcatcaccacaacagaaacacaccagccccagcccgggcttaggaacagcccgaaacctctgagtacttcctcccgaagtacccgagtcagaagatttgccacggtaaggatggtgacgctgatgttgagacttgtccctcttgtgggctggacctcccgtgttgcccctccttgcgtcctagccacgaggctgatcaacacccaaagacttctgcgactccatggtatactggtgttgcatctccacacccagtgcctgctccactatagtacggaagtccaccaacggaaaggctcccagtgcatgcctgatagaaggtttcagaccctgacggaactggctcgccttctccatctcattataagccacatgagggacaaaacggaccatcttgttgaagcccacttcatactctgtgacagacttcttctcttgcttgtaggactgcaaatcaatctt

SEQ ID NO: 15922 - DNA, 468 bp, Zea Mays
ggcgggtggttcttaattaacatcaaatctaggagaattagtatataacacagtaaactctggccaatttgtttggtctataattgataataaaataagaaccttattccaggtgtcccatgaggtgctcctgcaataggatttgtgtgtgaaattgataaggatgcttttgtgggaaaggtctatcagaggcgcaggaagataagggcatgatccttagtttgtttcagtttaaactgttagcattttcagttgcagaggatatttgttaagtttagatctattagattggatctgttatccatttagattggatctgttaacagatcctgagaacctctcggtctatataagagacgctggcagattcatcaaaatgtcagcagctctccggtgatcttcctccttcctacccataccagcttcgttctcttcctcaatccgcttgtgttttgcactctccctggc

SEQ ID NO: 15923 - DNA, 1367 bp, Zea Mays
tctctgaattacagctgcagcagtctgaacagctgtcttaaagccgcagcgaacaggctagttgaggcctggtgatgagatctccctctgctgctattgctgcatggctgtgatgacaaaaaggttatttggttgattatgattacttaatgccatataaggatcaaaacgtgatgaccttatttgtgcgtgtctgagccgatgcaatgcagagtccatgtttactatttttcctgctgacattatcaccttcgatttttattcctgctgattactttttggcagtgatggtttctagtctgatccttgtgttcctgacactttttgtctactaagggttttgcactattgtttatttattctggtcatgggatggtaattaattcagggtacaaatatccttttatctatagctgacactttgacaggataatatccggatggcctgggacagaaacatatgtatgacctggctgggatgacaaaaacatacgttgtcgattggatttctttgtagtgtcttcgtatggcctggctgggatgacagaaacatacgtttctcgatcctgatacttgattttttttcaaggaccaaactttgatgacctttgtgcgtgtctgagccagtacaaatgagtatgttttcctttttttttaacttgaagttttccttatttattgttacaaggttatggccctttgacctttgtggctatgatgataaaatgtttgtttctcgatgctgagacttgaattattcaaggactatattttgatgagctctgtgtgtgtctgagccagcaccttcacctttgcttgaaaactatgaacctcttttgatgcccatggtatatttgaattctcttggcctgaagtgttggtattggctgtttgtctactgttatatttggagactttgcagattggaacaggttgctcgtgtccgaatcatgaaattgactgtgttgcggtgttagaaataataaccactattttctggatgagatataagcattacctattctttgtacgtaaagtatgcctttttttctgttgtccatggcttatttgagttccgtttagcacatttttgctttctttattcatttattgagttatggtgacaataatatccaaaatgatgctactggttacttgtctgttgtgatttttggcgagttctcaagttggatagattgctggcactgcttcagtcttgtgcattctaaaatgtcatcatagcttttctggatgatcatatctgtattaggggtcatgggtcctcttttatcgagtttaatacatgaacatggattctttgtggtcatcagattgtcatacatgacttgtggctacgtggctgctgt

SEQ ID NO: 15924 - DNA, 382 bp, Zea Mays
tagctgggcagtccctaccacggtcatgcaagttcaaagctttctcgggcttgctgggttctatcgtcgatttgtgaaagatttcaataccattgcagggccgctacacgagcttacaaagaagcgtgctccatttgcttggggcaaggcgcaagaggttgcatttgagactttgaaggataagttaactcatacaccccttctccaattacctgatttcagtcagacttctgaattggaatgtgatgctagtggtattggtttgggtggtgtcttgttgcaagaagggaagcttgttgcttattttagtgagaaactgaatggacctagtttgaactattccacttatgataaagaattatatgctttagttcgaactttg

SEQ ID NO: 15925 - DNA, 910 bp, Zea Mays
cagacctggaattcgctggccacagtgagagttctaccacggtggcggaaacagaattgggggaaaagaggaattggaaggctctggtggataatctgaggcaaggatcggtgcgttggatgcataattacctagcggagccgcgggtgcgcttaatttataggctccgggggcggcggtgcatgaatttggtttggcgcggtggcgttcggagatgaaaaggggtcactagcgcatgagcttagtggctttcaccgtggcggctctccggcgatcatcgggcatgcaagacgcgattcactgcgatgtggtcaagcgctttagcacgtggcgtacaacggtaagcggccaacgacggtgaggtctatctcggctgatcggcgagcaagtgggtacggtgaaactcatccgcgaccgagcccaagcctatcttgtgccaagattcttactccgtcatgattatcccctcaccagagagcatgaatcgcgacgacggcgcaaatcacggcgcaaaggtcaccggcggcgagggggctaaacttgtgatctgtttcagttactgtaccatggtggttaccatcagagtgtatgacagaccattttgtagggctcagatctcaaattttcatgtgatgacttgctaatctatctttaagaaagttgttgttctactatccagcttcaatcttgctatagcaatcactcccaaattcttactagatcatgctcgaatcccagctcaaagatgctcaatcacactgtcagtctgaatcagactaaggcagtctgacagtccatctttgggcctaattatctcaaaacatttcatggcaccaaggcataatccctatagcaaagttgtcctccttttatagctctacaaactttatgtgttgacctagggcaaaat

SEQ ID NO: 15926 - DNA, 324 bp, Zea Mays
ccaaaacctgtgcttcaactgcaatgaacggtatactcggggccacaacaggttctgcaagcgccttttcttcatcgagggcgtggagatcgacgacgctatagacagcagcgctgctgcagcagccgacacaggggagacggacgtgcccatcttttccctccatgcagtggcgggcgtgtccatgggcaagaccatgcagatccgcgtcgtggtgggcgcgacaactatcatcgccctcctcgatactggctccacccactacttcattgttgaagaggcggcgcgacgatccgggctgcccatcctaccccgaccgcgact

SEQ ID NO: 15927 - DNA, 581 bp, Zea Mays
ttggaggagtccacctcttccgaggagacctcctctgagtcatccgactcgccaagcccagcgtgctcgatggagcaccagtatgctcgggccacagtggacagccccatggattcgtcggtgtcctcggacgatgccatgggggatgtgggagcgggcgaccgatcatacttagaggaagcttcctccgagtactcctagtcaccaaaatccttcgagggtggactcagaggatgtctgcgcttgccattggtgctgcgaggctagcccttgcccctcttgcccctgcccatggtcgtacggaaagtggagaagtgaagaagaagatagcaagtgatcaaggacgagtgaagccaacagccaggcaaacaagctatttaaaggggccgaggggtgaccgtccacttcctaccgcgctcgccgaatagtcgcaagaattcaatgagcaattaaagccacctgaaaatgagtcaggcaactggtgctgtttcgcgtaacatggcaccgattggacccaagtaaactactcaggcaaatgattacacctctccgtcacatcaagttactacttcaggacaacg

SEQ ID NO: 15928 - DNA, 595 bp, Zea Mays
atcatctcactcgttcgtcatacggatccctatagccagtccatcgctgacatcttcgtagtagtacgcggtgtgccctatgggtcagttcaatggtgcggtcgtgcgtgtcgtggctttgtctgttgtcacgaacctgcgtcacccaccggcgtgcgtaggcatacacctagtatggtgtatctgttgtgttcttttgggtatgcgggtcactgtagagactctagcgttgaggccctacgaccggggttgactggcccatgtccgtgggggcttacttgaggcaatacgtgatggcatatcgtcggtgttcgatagggacttttcgacaccgtacccgaggtccgtacgtggtttggtgatgacacatcttgtcacgcttgacgcggggtcaactgcattgggtcggtccgtcggtcaggttaattcggggcctggtcatctaccctgcctcgtgaggtcgctcggcagggacttggtcgtttactccgcctcgtggagttgctcggtcgggacttggtcacttgctccgcctcatggggttgctgggtagggacttggttaagggcggcccattccaccctgcaccctcatg

SEQ ID NO: 15929 - DNA, 828 bp, Zea Mays
ataaagcggggaggggatattcgtatgagtcatagtaggtagtttgatgagaaatatagataaccttgaatagcaattcaacatttggtaaacattaggaaataaaaaaatcgatgaataaaaaaatggagtcaaagtgagcgaagctggaggtaagccctaatcacccgtgcacggaggaggaagttacaacaaaaaacctaacatcgaagccctaatatctagtcgtgttcattggaatcagaatgagatccaaaagacaaaacctaacacgaagaacacatagccagagaagtcttcgtacttgcggggatcgtcggcacgttgaggattgggtgtaccggagatggtagcacacgtcgggaacaccacgcagtggccgtcagtaacagtacagttgctgatggggaatgcgacgcgatctggaagaatcgcatggcgcagtgaagagcgtatacatgtggagaaggatggattgtgaggtacgcaccagaaacaggatcatagtcgccggcgacggagcggacattcgcggggaaggaggagcagcggcgtggagtaggcttcgctatccagatctctgcccaagcgcccacagagaagccagcgggccacccttttttccttttgactgggaacctggcagccttatctggaagcgtcccgtggtgtggccaacagaccaccattttttctttttgactgggaacctggcagccttgtctggaagcatcccgtggtgtggggattctcatactcacgtgttgcatcttggacgtacatggcgaatcaaacgattgagaggaattttgcaggtggacacctctt

SEQ ID NO: 15930 - DNA, 682 bp, Zea Mays
gagggagaagagggccgccaccagtgatcttcgtccgtgtcggcgttccgacctcggcgtgtgtccgtcgacgtgcgttggtgcccggggaagccgatcgtgtcctccggacgggccctacgtctccacggcgcaggggaattgctcgtcgggcggcaaaaagaagcaccgcgccgcaggtcatcgcggactgcctcccctgcatcgacaaattgggtgagaaccgcacctataatttcgcgttgaactccgcgtcacgtaggctaaagtaattgagttttggaccactggatgtagtcaccggaaaagtgccccgccgtggctcgccgtcgggtgcgcggcgccgccgcggttcggttctggtttggagaagacgcctctgccgtttgatttgaacggacggtagagattagatgtgctcacccgttcagcttggacgactgctatccgtcgatcggcggatggacgccccgatttacgcacgcgtaccccccttcgctagaatttccccggatcgttagatcggaatccgagggctgcggtgagatctcggcttcattatatccgtaccgttggatttagatccaagggccgcgatcgcttaccgcttcattagaatgtcgatctgatccgggccgtccgtgtttgatctggcggcccacaacatcggataccccttcgc

SEQ ID NO: 15931 - DNA, 277 bp, Zea Mays
ggcggcgaacggtaagggtgctgaatcccgacaggggcgggagaaccaccatccagatagtggcgtgccgcgcattcagcacgcaattccgcaacctccgcccgaaccttgcccaactcgtcaagggcgtggtccaactctgtgttgagcacggtgaccaagttgaccatgctgctccgactgggattgccctcaccaactggcgagacaatcacacctccagcactgtcggtcgaacgacgagggtagtacttcaggtcaaggccatcagctaccc

SEQ ID NO: 15932 - DNA, 714 bp, Zea Mays
gtggacatgtaatatattttggagctgcttcttatcgtgacattattaggaagtacgagttttactacccaaaagagaaattgaagaagttgtagaaaaagaaatcatcaacatctactgaagaaaagaagttgtcaaggataagatttgatggtgtgctctgtaactcttcatcaaggtacactatgtaactcttcatcaatttactcttcaaaacgttttagtagagatggacctgacaaatactcatcgtcgctatcatcatcttcgccgctatggattgttctttctccattatcactagcatattggaggaatgtttcatcttcaaatagatcttccggttcatcttccccttgtctctgaaggtcttcaactatacttgcgtgaacagtaaaagaattttcaccgaccaacgcgtcaatgtccatgttgacatcataatcttgaatctgaaaatcaacacactcatcatcttggtatgacagctccacaccctttgatatttcattgcttgaaatttcagccacattccacaaatgcctatgtgagaatttttgaacaactcgccagtctccacgatatttggtgtcttccaattaaaatacctttgtcgcctgtgtggatagaataaaaggatcatccttgtagcaaatacatgcttggttgatgcttctaaaaaatctgtcatctttcatccttgccctgttacta

SEQ ID NO: 15933 - DNA, 1082 bp, Zea Mays
cgctggccattctccttcctttcctaagagttgttgctagagcagatgctaattttgacaaccccgacatgcttgggggactctgcagcttcggatactcctctgtctttgaactctttgtctctgctttttctgctggagcgactacagcttaggcggtcacaacatgaattatctctaaacctaaggggtggctttggcgtattcaacaatttctatcttctttgcggcaatcgctgtagcagtcttctctaaagagtgtagcttcggtctatgagtcaaaaccttagctctctttggcttcgacgcggcggaagaggacatagttgccattttccttttcgaccttgtttttgagcgggaaaatagtagccaggataaataagtccaatcacataaaaaactctcttcagtctccttttgcctcgagcaccaaaggcagtgttgatggcttcgtcctccgacttcgtataagctcccagcagctcatcactggtcgcctcaatgacttcaagccaatcatcattccactcataaaactgaattctgtagcgataggtgtatctcagataaaccagaccaccttcgctggagccagtagcggtctccttcggcatctcccagtcattaacaagcgaccacaccttataagcaatgtgctcctgaaccaaatccctggtaccaatgtaagcacacactgtgttgaaggccatcaaacatgcttgaacttcatttccacttgcgagcgaaggccttgacataaaaccattgcttcatccaagagctcgaccattttttttcaaaatgatggcacataacacctctcattagaccggtacacaaagctgtagcatccgaagttgttatgatattgctcttttccaactgccttcgtctggtaggacaattcgtgaatgttgcagaagcagttgccatctggctccagcccttggctcctcatagcccaaataaaaactccaactttaatcaaagcctcgggagtaagctgatgaaggtatatctcaaatgtcttcagcacttcgaccaacattttatgcaagggaaagcggagtccagccttc

SEQ ID NO: 15934 - DNA, 635 bp, Zea Mays
gctaaggtaggtattctaagatgattaacacttaattaggaccatggttctcaagtttggcgtcttttgctcaaactaaaccacatgagataataggtcaagggtgtgagtgttgagtagaaaccctgagtaacacttagggtgttaaaggtggcttcgtagctcatgagaaacttcttggggtctgttagaccatcatagataggtagtgtaggaggcatgtacagtggtggccatggtgtagcttgcagctctggtgtcaatggagaaacttcaacatagaggaaatcttgggccttgtacacctcgtgacaaagattgtcatgatcttgcccatcataatcttgctccctgaagttgttcagattttcatgcgcctcgatattgcgcatttctttagttgcttcgtcgatcttcctttggagttctgaaagacaaatcatcttctccctacacttctccacttgctagtgaatagctttgctgatttcttcattgagctcttcttcccacgggagcaagctgatggccttcttcttctagatccttgcctctcagatgatagcttcgttaccctgattgggttcgatcgatgcaaggatggagcttgttgccactgctttcttcggcggcgt

SEQ ID NO: 15935 - DNA, 573 bp, Zea Mays
gtcctcggatgagtggtagcgcggtggagaggcgagactcaaaaccgaagtaggaaacttgctgacgtcggtcaagacactgaagctgtggggtctctccggcacgcagttggtgtgaaccttcatgcatctccagatccagcctctaatggcccgtgagaaaccgatgcaccaatactccgaggtcaacaaccctaatcgtcattcccctgtgttgctcgctctatcggagatcaaggccagggtcagggtcatcacgacgttatcgtcaaggtccttcatggatgaagacttgcccctcctctgtccaaggacgtcatgagcacccttgtgagcttattcttcctagtgtgtcgctctccctcttctctttttcctttttcctctaatgcgcactttgcaggggatcgaacccttagcgtcgtgcctcccgccccttcctaaggtcgctgtcatcgaggaggagaggaagcagaagagggagatgggttgtaacataacgtgttttcattgactatgctctatttttcttcttgccttcgggccttagaggaacatgcctacgattctgtg

SEQ ID NO: 15936 - DNA, 287 bp, Zea Mays
aaactgagtatcttgaaatccctctcaaagacagcatcaagggatggcgcttggagtggttcattgttgagaattatggaaactctctcccccctcggtcgggaagacagtcggacattcgcaccccgagttggaccgagtcccccacggatcaggaggtagctgaggcaggtgctttgctagctgaagttggattgctgaaggagaggggtctgactgctgaagttgtggttgctgattttgtcttcaagaatattcagccgttgaaagacagagcatacccggct

SEQ ID NO: 15937 - DNA, 711 bp, Zea Mays
ttcagttgcaaaccgtcgccgggaatcacggatctctgatccggccgcgtgccaccgaacctctccttcccccaggactacaaatccgagccccgcaaaccaattcgccgtgagctggcccccacctagggcccttcctgtgaaccccatgccgactcgtcgtcgtatactcgtatgggtgttgctcaggagccaccatcgtggttgtgtgctttcaccatcgtcggggaccctctgtcgggtcagggagactcgcctatcctggctgatgcatccgttgcgtcgtcgggcggttagggtcactagctctgactgaattgctcactggttcttggacatcaccgtcgggccgcactccgccatgggcgttattctccacgctacaatccctggtatggaccctccccgtggattcgctttgaccacaacgtcgtgtataagcagttgtcgtggagaatcgggcgccatgccgctgtggacaccttcttcagtgggtatcgccgtcgcggcttgtgggagctacgtgggccctggccgtcgtgtggatggaaggtgtgcgagccgctagatcgtgattgaacgatcacgatttgttgcaaaataacgtttctggcagggttcatcctggccactgatcggtgggtgggcggatgagagtagatcgtagttttaaaatctgggtcgttgaatctccgatgaacgcaccagatt

SEQ ID NO: 15938 - DNA, 1334 bp, Zea Mays
cctgggccttaggttctcgagccacgctcgtgttgagtccgccaagtacagggggttctagattaggaattcatcatagtccgtacctcttaccttttacaccagccgatagtctccctgccaagggattcgattctcccaagtacttcatgatgttggtggggatgctgtatcgctgtggtactagttcctggaggatgtggatattaaaggcccaaggcctcagtgggtgggctcagacttcggtcctcatcggggttgaagcgtcctccacagcgctagttgtaccgatgttggttgcctggaccctttcacacttcctcgttgtgccctcggccaggcatgcttcacgcgcgtctgcctgaccttgggtgcagatggagtgggactcgtgttgtgtcttcctcgagctcggacgactatccaaatatggtgttgtttcctattagcgtggatgtggtacattagttagcctccagctcccggtgtcgtgaaatggaactattggcatgctggtacttggcgaggtcaaggaggccttagattttttggtgagtccttcgttcgctcggagattctgccttggggagtttgtccatgagcgtcacgatggttgtgatgttctggctcacctaggggaaccatagcgggctggcccctttgcaggccagacggtggtggacgctagttgtcgtggcgtgagtccgccaagtgtcccagtgtaaccgccccgtctaccatcgcggcaacccccgtctcccagttgtgggacttcggctactctaggaagggcttggtcctgatggtgttttttgggaaggcaggtcgagtcgaggcgtggtggatgatgtggcacgcatcgtggttctggtagcggtcccctcaggactctccgggagtgatgggaggttctctagcaggttggccacaaggcactcctagtctagaccgtggctagccctgcttgatggggagctaagtctgccttttgatcccgacaggaagaagtcatggaatgtgtctcggatggggtctagcattcccatgatctcagtgaaggtgggtcgcagtgagcgtcgctgcccgccaccacctccaggagaacccattccaaacgctaccaaggtttccgacaatgttgagcaagttgctcgtggggtaactggcgcttccagggccctgatcattgtccctccatcatcgatgatgaaatcaagacacccaaaatgaatggtcatttcaggggtccaaactatgtcaatgtctttgttggccattcgaagcctagagagttcatcgagaacgtgcaaggcccctacctagtgcaccacttg

SEQ ID NO: 15939 - DNA, 440 bp, Zea Mays
gggctctagcgtaagttttctaagacccagagaatagtgcaattggacggcgggtttattctgcgaaagcagggggtctctttacaaagattgccacgacgaaggggtattctcagatctcggccgttggatcaatgagcgacgctccagattaaaatcgagcgccccccaaacctgcacactcctctggccaatggatatgagatcaacggctaatatcgctctgagcctagatccaagctctaccgaacgatttgcatcctacggttatgattcaacaaagcgaaacgttatcctgtcttttaatcgcagccgtccgacaaggatcgaacggcccacgatcgttcttctttttcccctctcccagcgactacggccggccacggcggcgcgtgagcatgaccgtggcggaggccatggccagcggccggccccaaggc

SEQ ID NO: 15940 - DNA, 698 bp, Zea Mays
ccaggggcttaaatactaattcttcctacagtggagggacaatgggttgattttgtgaacttttagggactctttagagaaaagaatcagccgaaggggtatgggttgactctggctgttggatttcaaaccgatggccaggattaaaagacctaccacatgaacggttgcaatcaccacccctcggatctaaatcttacgatcaaggttttattgatacatgatctatcccacactgtccatcgctagatcgatggcacggatcttaggcatcgaaggggtatcttcgatcaaatctgagccattcgttcatggatcgagggacagccatgcataactcgagcaccaaatgtggtggcgttgtgctccacggcggtgatcctcgccggagtagcaccaacccccagccctgagcctaattcttaccaccagccattgttatacgatgcggagactggcacgaacaagttgggaggtaattcaccggagttggagcaacgaagaccaccggccatggggcagcgttgatcagcggtggagttagtctccgacgagaaaattcaccgagcactgatcgcccacagccttcgaactccccaaggtggcatccacaggccatcaacggagcacctcgagcacacatgcgccccgacgatggcaccaacgagctggcccagcggtggccctctttatctccc

SEQ ID NO: 15941 - DNA, 364 bp, Zea Mays
agcaactgcatcaacaggcgcgcaggagcagcaggccaaccgccaataagactctggccccaccaacaggatcgtatcctcccctgaggcgggcccagaggccactgtcggtaccctaaatcaggggttccctcttctacagcatgaagacgtcgcacctatgcaacgtctccaggccacgcggaggacggtgcctgaccccaccgcatgagcaggccaaagggcgccacgtggcaaggaaagacagcacatcctagtatctatcgtggggtccggacctccacagaaggacaccggacccctatacatataagtccagagcctccgagtaaggtccgaacctgaaagggaaatagggtcaaac

SEQ ID NO: 15942 - DNA, 431 bp, Zea Mays
gtgggcaggggcccgacgatgtccaggccccagtgttggagaggccatgtatgggcgatcagctttgtatactgtgaggggctgcccggccgaggagaaaacttctggcaggcttcgcaggaccgagtgacccgatttgcggcgcagatcattgcgggccagtaaaaaccctggcggatcaccttagcagctagggcccttggccctgcgtgagagccgcacgtgccactgtggacttcacgtaggatctgcatgccttcggcttcggtgacacacttaagcattggctgactgacccctttttgtagagttggccttcaatcagtgcgaagtctcggcttcgatgtttgaggcgcttggcctcactgatgtcggctggatgataatacccctgtaggaacagggctattggtgcccgccagtcctcggtc

SEQ ID NO: 15943 - DNA, 498 bp, Zea Mays
tttctaactgcccgcaccccactcgcacgccctcatccctcgctcacgcactcacagaagctcatcacctgcctcgcatcacacgcgcactagaggagccccacctccgtccgtcgtggtctcggacttgttccgcgaccgccgtcgagtccccgccgtgtttgttgccccgataagctttgccccaacgccagcaacccaggacgcccctcggtacgccacttccccctctatttctctctgcccgcgctcactggacctccaccgtgcagccagagtcccgccacagtcgacccgaggcctcaccacgtccctaccgccgttcaaaggtcccgaagtcctctctcgaggtaaccaacctccccttgcccctaatttcccatttcctgcccttgtgtgtgcgcaatcgctcgccggagttgagctgcgccgccgccgagccacctcgccacggactgccaccctccagtgcttttgcgccggtgtcgtacgcccccc

SEQ ID NO: 15944 - DNA, 524 bp, Zea Mays
gtccgtcgtgctggttcctccggtccccgaccatcgcgttggcatcttcgcaggtacagaattcgtcgcctccatcccgagccaccccgctccctcctttactgttgctagggttgggcctcaatcccgacccacgccgccccctcctctccagttaaatcaattcatcttcaagggtatggaacgtcgtactaacagagagatgtttgtgcattgtcgcctacagatttgcgtatcgagttgttcgtcttcggttccaagatcaagtgcatccaaggtactttcatacacaatttcttgcgcaatttactgtccacatggccacaaccaatttatatatgtgctgtcatttgtgcatattacttggagatacgagagctgggatggtcatatgtttattgttacctagggataccattgttcttttgtataagtatgatatgtgcagtgattacttctacctttgtttgtcacaacctgtatgttcacggttcagttcattctctgtttgttacaacctgtat

SEQ ID NO: 15945 - DNA, 521 bp, Zea Mays
atgatatcgattggttgcataggaatgagacattcaaggaagatgatgttttcacaacgagagacctcctgacaccaggtacatgactgttcactcgactaaatttgcaaaaacaactgatttcaggcggtttaacgtagacatgccttattccaggctgtgtgcatgaaactattggtaacacgcctaaccataatttggaaagggctgcctactttagggagcggtacaaaaacttaactcccaccgagacggagtttaggcgtgaatgccttaggttgtataataatacaccaaagcggaaagggtcaaagatagagtacataagaaaacgtagagcagtgttggctagcacattgagtcaggagttcatcgccatggagtccccaacatataccactgaggttgtacaccctacaatagatgcaattgaacctgatggatccgcagttaccccctgcgactaggttatccctgaaatcgccagtaaccctttcctgtcagcttcaacacagactgag

SEQ ID NO: 15946 - DNA, 563 bp, Zea Mays
attagcttcgatacgcggccgtttcaatgtgcctgggccgacgcgtcaaaactttaaccttttttgaccttgacgcactagaagtcgccgaggtagcagctttcctcttcttcccttgctttcgcgaaggataatagtagtctggatacacaaacctgatcacatcaaataccctattcaacctctttttgccccgagctccgaaggcagttgtcatggcttcatcttcggcctttgaatatgctccaagcaactcatcactagtcgcctctatgacatctagccagtcatcattcggttcatcaaactggctcctatatcgaaaggtacacttcagatacaccaaatcattttggctggagccagcggcagcctccttcggcatctcccatccatgagcaaatggccacactctgtaagcaatatgctcttggaccaagtctcttgtgccaatgtaagtacacactgtattaaaagctgtctggcatgcttgcacgtcgtttccaactgcaatggccggtctcctgatgccgaagtgagaccatatagggcgctgaatgacc

SEQ ID NO: 15947 - DNA, 657 bp, Zea Mays
aattcgaagtaggtttatctactattgcacttagtcgctgacacattgccgaaatgaccctaaacttctatttcttccccaacttgctccctgaccgcggcgcgctggtcgaacgtctcggacgaggtctgtaccggccatggccggcgacgactgcccggactaatgatcgggaaagcataaccgacaataggtgacctcggaacacgcatcaatttgacatgaatgcattgagaacggcatgtccacgtgcacggcggaaaccgtgaccacgggcacgcgttcccgcacaaccggggccggattgagtaatcggacgccacgatgagcttcacaagcgaacggagttgccgaaacaacatttgatttgggcagagccttaccagggtgatatggccacggagcgcggtatttcgtgcttgccggagacggaaaagggggaaaatggggtcgcggcggctctgagcgaaattgggagatgggatcggggctaaaagaccgtaagaggctgtgctttcaccgtgcgcaatcgatttgggagaaggtggagagggcagtgcggatttgacttcgatgtaagtcactggtgtgcgtgatgaccgagcctcgccgtgaacctaatggctatttatagccatggcggtccggcgatcacct

SEQ ID NO: 15948 - DNA, 918 bp, Zea Mays
gagaggaccaaggtataacactaattttgaccccagatattttcagttttagttcaggaaagttaacaacctcctccaatctttcctgtgaggggaactgcattaaaaatccagatggacatttggtggctttccaagttcttccccagggaaagtggaaactaaaatcttgttccagatcctcacatctaatctctcccacaatgactttcaccaaacctaaaaaactttttctaggtttcttggcaacatttttagcaaactgagaggcatagaaacctaatccatcagccgccataccaacaataggcatggtaggtttactttgtttaggccaaacacatttagcagtgacatgagtttcttttctacaaatctcgcaccaaagtggtttgaaacattccctagcatggtgaccttcatccccacatttctggcaaaaaactcggcgaccaagatctagatccataataacgggggggggggggggtcggatgattcatgttacctggatcaacgccctcgcccgacgatgcagtctgcagatcttgcttggtctccgttttcacctgggtgggtctcaaacgccagctaaggttccggtgtcttccccaaggaggtgagttttgacgttgtggcttagggatttggcgatcccatttcgcgttcttccctttcggatccatctcagtcgagtctttagggatttggattccaatccctaccctcggtcacggatccggagaagggggaggacgaatgggaaccgaaatccaaccaccacagaagctagatttcacagcggaaggcaatcgccaaagggatgagagaaaggcagcgaggtgaggaagagggcgacccccaattaggtcattgggaaaccctagttttccagactgcactaccgcacgggggaga

SEQ ID NO: 15949 - DNA, 764 bp, Zea Mays
ccatcacttctagcctgccgttttgtgggtcaagacatcgatagcatgtttgtcacacgccaccctgatatttccactcattattatgctaacctgcaaccatgcttccacataatttgtgtcgacgaatcactcagattcatcaccctgcacttttttttgttcttgtttctgttcctctggaattttactgaccgcgctgtttctgagaggtggcgggaagggcagagcagcacgtcgcgactctttttctttacacacagtgatgtgaagctgtgtccgtttccccatcgctgtcatcaatgagctcgcaccatgcctggtccttccgttcatattaatggcgtaactgtaccgagcatttcccgcacccgctaacgttcttctccgtcctcccgctccattcctccactgctgggcgttaatggcgtaaacagctgcctatagctcatcttcttggccgttttctatgcgaggtttaatgcccgtttggtcactacgacttccccccaggcccccattgaagaagcttgctacactctgctccgcaaagagagagacctgatcttcttggcgtcggtgtttaatttggattcttgcaagtgggtggcgtctcgcgttcttgcgggcttgtgcttctttaatgcgctgacgcttcttgtcctgaattgccgttgcgttttttggatacgaattgccggacgttcttgcgcgtttctgcggtaggatcaggaggctggtggtcgccggcgcagcgtctgcga

SEQ ID NO: 15950 - DNA, 994 bp, Zea Mays
gcaaaatgatcgatatcacctcacaagcctatgtcatgtttggttctggctaactctgttacaatttatctaaggttcgtcggtaaaattggaaaactaattgatggcagatcgtcagtgagggtacatcatgcacccctttggttctcggctaactctggtacaacttgtctaaggttactcggccaaattagaaaattaacctaacgacagatcgttaatgaggtacaagatgcatcccttttaggtttggcaggggcttagacgatcaccgtgagttcaggatcccacggagacttggggcactttgggttaatgggagagaacgtagtgtggatgaatgtaggatgcatgaagtacactagatttagagaggttcggaccgttggagcgtaataccctacgtcctcttggttactagttgtattgctcgtaagtagaaaatggtaagtgttcgtttgtacgtttggacgtgtgtgatcagttatcccttagaagggatcccctcttccttttatagtccaagagataggggttacatgatgtgtgagttggcttagcaccagacgtctcctattgttgctattgaaggtgtaatcgtccatccatagctttttggcagcgtcggctccacatcgtgggtggtcgttgtctcccgtacgtcgtggatggaggatgttgtctctagacgtgacggtcgttgtccatgtgtgcacccgcaatggtgcactattgacacacctaggacgatcgagcctaacaccctacatggtgtgggatgtgggcacgatcatgcttatcttgtcacacaggcacaatcacactctaactccaccaactccttgactatccatgcttggtagcaaggacacatggcatgcctagatcccccaggggcgctggggggcctggggcatgtaacacccctaaatcccattgtgatcaatggagtgcgtcaacgtaggagggcattggttccaattggagacccagg

SEQ ID NO: 15951 - DNA, 589 bp, Zea Mays
cttctacttctattacaccattagtcctgcttcccattactcttggcgacctcatcgtcaggtgtgggagtccagacgtcaaccaacctcatggaaggagggggctcaaaaaggtctaactccccacccagcgcgcgtcccgcaacgtgggagggtccggcttccgcctcagcagggtgcgcaggtgcactagggtgtaattgcgaatacagtacatggacttcctcatgcaacgtattgcaatagacctgcaggtcgtcgacagttgagctaagttccttgattcgggcctgagcccttgcttccttagcacatgccagcaaacgggactgtactgcccagtcaagtgctaagtcccgatcagcaagctgatcccgcaggtgacggatgtcccttcttagttcatttatcctatctccgtccgcaacccaagcgttggtcctatgttgcagctccgcttgaagtcgactcactcgggcttcaagatctcctattgggtcattgctcccgctgctactgttctcatgtcgaggggccagttgatgccgaggcacaccgattggtccagttgacttgcgcgccgttagcc

SEQ ID NO: 15952 - DNA, 1105 bp, Zea Mays
ccgaggtggcgttctccagcaccgccacccgattggaggtctcggtcaccaatccatcgacacgccccaaggttgctgcctccaattgagcgatctgtgcttcgacgcggtcgcccaaggaacgggtgagatccgttcggaatgcttcaatctctccatcacccagcttctcctgtaacttggagatattggtggtgttcatcttgaccgcatcctccatctgggaccatcggtgatcttgtgactccaatcgatcacagagttgttgaagaagttgggattgagtcgccagcgtccttgattgcgcctccatggatttggactgcgcttccagggccgacgccatgcttggatcgggtgcacctgccatcttcgcgcgccttgtgtagtggagcggagccgccagatcggacaccaagtctgataccacttgttatcgccttggcgatgaagaagcagaagacaggcaggaaggaaagaacacggataggcaaaggagcagactgactctgttctggtatatttcctgtctatctttccattacacgcttgctttatattcctgtatagctatggcctaaggcccattactctatccattctgctcccttgacacggagattaggcctacgaatgcgacgacccaccatttgaacgccatcccttggttcctttcctcctgcgccctcttcaccttgtgctggcgccagtaggtctctgacaggtgtgttcctccttctgatggaaacagagcaacggcagcgctcgcgctcactagccatggtggagcaactccagtgagccccgatcctagtcttcgttgcactatctcttactcccactaacgctacacaatatgaagaacctagagaatatgttatgggcaactcaccggtgtttaaagcgacaacaaatcttgaccacgacgaaagtgaatcgatggcggcggaatttagtccgatgagcgattgtcccctgctatggtgtccttgctcccgatcaagccttgcacccaacttcgcactccctggcggatattttatgctacctttcgaaagccaaacgtcgtcaagacatggaggaccacgcatggtcgttcccagag

SEQ ID NO: 15953 - DNA, 317 bp, Zea Mays
attgaacacaagcgtgttcaactgggggagatgaagcggaaggccattacccaggggcagggtagcagtagtattcacccacgctatgctccaccccagggtacagcagctcgtcctggaggaggaccgcgtccagctcagtacgctccacaggggactccacagacaccccacactcgtcaggctgcccccactggcacctcggcgaggcctataggacagaggacaggtcctacatgcttcaagtgtagtcaggttgggcactatgcaaatgcttgtccgatggggaattccagcacaccagctcagaacaagca

SEQ ID NO: 15954 - DNA, 410 bp, Zea Mays
ctggatctggagttgtcctggatgttgttgctcatatgacgaaggtgcttgtgtaaatgcttggggcagggtccatcgagtcgaagagtgacttgccgaagcaactgagcctgagggttgtagacttggctgtttgtcgtgtcagtagtaggactgtccatagtactttcagggaattgaataggcatctcaatgttttcaatttttttggctgcttgagttgcttcgatggcctttggtttgcacctcttctgtggtggtgggttttgtggatatgtatcactgaatattttttccacctctttttcattgctctcctttgctctcaaacattgcaatttgtgcttttgagaatgtgtttgtcccaatggacaccatcagggcatggagtattttgggttagatgtttt

SEQ ID NO: 15955 - DNA, 541 bp, Zea Mays
gattggctcggcatgggcgcttcgggcgaacactgacaggcctctgaatatccaaggttttaccagcttccgggagaggcgccaccaccaatgtcccagcaggagcggcgtcagaagagtcctcggccagcatatcaagcatagcacttatctctgcatcactaggatccaaagacacctcaaagtggacctgtcgttcatcatcaagaatttctccaagcgaagcaaccaaagcactaacttcttcggcagagggtcgcactctaaggcccaaaccgccatcggcagcaggaggattcgacacaaaataagtaaaggcctttgaaggaggcaggttccagaacgagtatgcgacaggggcgccaacatttgataccttccctctaagtatcatttcaagccggttcactaagtctacagcaggaattcttctgttggtgacccaggttgagtcagctagacctcggtacagataggccgggtatgccctgtccttcaatggctaaatgttcttgaagacaaaatcagcaaccacagcctc

SEQ ID NO: 15956 - DNA, 968 bp, Zea Mays
gttagtgtgatgcccgtggccgacgtcgcgtcgccgtcgacgtgaggatcaccagtgattctcagagatacagaagacgcaaggtttgccacggtttgtggagttctgtttctcttcttcgttagctccctggtctctcacacagaattatttaagcagtcgcttacatgggcctcacgcccttacacatcatccggcccacacggcccaacaccttacagaatgttgaaaattcaaaaaccaatcgatgtcgcctcctgtcgctggaccggccatgacatcttccccgccgccatgaattgattgtccccaatcaagagcctctggaaaccgagtcttcaacacatcaatatcttcacaagtagtagcatcatctggtagctctgaccaggccacctgaacttgtaccacaggcttgtgacctcgccgaactaaacgacgatccagcaaccgaacaggatgaacatcccggccagacaggtcgaccaactgagagatgtcagaaaaaactggtgtatacttgggcgtaaatggtttaagctgagacacatgaaacaccggatgaaccaaagccgtagaaggtaaatccagcttataagcaactgatccaacatgttgtagcactttgaagggaccaaagaatttaaaagcaatcttgggatgagctcggttgaccactgaactctgaacatagggttgcaatttcagaagtacactatcccccacctgaaagtccctatccagtctgaacttatcagcttgatgcttcatgcgattctgagcagcagctaagcgagtcttcaacaactccgaataagccagcctctcttggagcaaatcctgaacagattgatcagtgtctcctaacagatgaggagctgcagctaagactggatcataaccatataaggctttaaacggagagcagcccaaactagtgtgatatgcagagttgtactaaaactcag

SEQ ID NO: 15957 - DNA, 493 bp, Zea Mays
atgatgagcccgctcaattgtttcttgaatatacttttttgtaaaaccaaattgaattttacaaggtggaatattgattagaaaaaagtgggatgctgaccgaaaaagcgctactcgcttgtatgaactagctggtcgatgattttgtttctcatcctttttatttgttgacatccgtttgttcattggggagcacatatgtagaatgatgattaatgtttatgcatattaatggattttattataatatgttgtcgccgtaacaacgtacgggcatacagttagtaaggatataagaccagtggttcgccaaggcgcttagggtctgggggaggcctcggcaagcatgtagatcaaccaggagcaagggaatccctcaccatcatcgcacgacaccacagatccgcccctcattgagaacgcaagcgtaagcgctgtcaactgcagtgagaaccctccccgaaccttcgctttaccgtctgctacatgtcgc

SEQ ID NO: 15958 - DNA, 822 bp, Zea Mays
gacagatatcccctgggtctagtcgggggcgaaaactctgctcggggccacatgctagtcgcccctcagtgacgtctcgtcgtggactgggtaaagggaaatgatggaaacgggccgacccaggagtgcgatgggcccacgctcggattaatcgtggcttgggcgtgatcacattgaggttggtcatttttcccacgcccgacatcctcaaacgtcggagatagctcggagcggtggcgccgggtttccctcggatagcgaagtttgttcactatagctaggagataagcaggaaaagtgtgaacaacgtgtacgcgggaagtaccctacgatcgtgtatataaggccaagggagatctccatcactttcatctcattagcacctcgcaacttggtagacaccacttgtaaacacttccacatacaaagacaccctaggaagtagggtattacgctcctcaaagcggctcgaacctgctaaaactcgcttgactctctctctcgtgccctagcgcgaaccatcgagttataatccatgacaccgtcctacccaaaagcaccacgaggttaccccaggtgtgtggtcggacactaaacaccgacatatcccccacagggtcgaatgtctcaacatacatgttgttgagtctgcttccccccatccatgaacaccttggagaggcggtttgggtccacaatggtggcgtcctattggttcggagaagtcctcgatggtggtattctattccgccaccttggtggcgtcctccggttttgccttcttgctcggaggattcacgatgaagagcgtgagaagctcac

SEQ ID NO: 15959 - DNA, 732 bp, Zea Mays
ccggtgatctgtcgttgcaacttgcgttcgtttgggagattcgtgccacgagaagtgtgggtaacgtcgggtgtggtgagaatatccaacgcggggtgaatccggtcgctggccgaaccgctcgtcgtgtcccgccgtggttagccgcactggcatcacctccattggccattatccggccaggctacatgcctcgacaccttaccatggcacagtgagtcatcgtaaaccactctctactactggttcgtcgtcggtaaggccgccacggtagatgccaccaagctctagcgatagtgctctcctcactctccggccgccaccgcgccaactcaaattcatgagccaccgcccccaagtcctataaattgagcacaccgtcgggtccgtaaggtagtcaagtactcaagacaccaaggcgtgcctccaattactcaccaaagctcaccaattctggatttcccccaaacctgctttccaccaccgtgaaagaagcctcaccgtggccagctcgtctcaggtcctctcatactttctgctctttcatttcattgtccttgtgtgcccctgatgctccccgaccctgccaattaagctaggaccccttagatcgccgggaacgcgatggattggccattgatcacacggtcaccgtggacagagcgcgctagagctccgttagtgaaattggttgagggaaaactcttgttagggtttgaatttggtgtcagc

SEQ ID NO: 15960 - DNA, 1555 bp, Zea Mays
cgccggtgtcgggaggccgcccttctcttgacggatcccatagatctatcggcgaagtgcacgcgcgcgaggacgtggactacagactactacgtgtacaacacccaagtagcatctctttctctgccttccgcttcattcccttgcttgttctctcgctcttgtgccattgctgtgatctctgtctctctcatgttttttatgttaacctgtatgggacttgattgtgttaattcttgataagttgagtgtctctgttaatttgaactatgttttgtgaggacatgcattcataaattgatcaaaattcgttttagtttatgtcccggagtcaaatgctcaaggtaatttattaccataaactcttgtgctggtgggaagaaacctcagcttcgttaagttgtctgtcggttgcactggctcttttgtttgtttttcttttccacatatcaaaagttcagtgctactacttattggttcatgaatgttatttaatttgctggtttcatgcttacatatcttttatttctactgatgtttaatttgcaaatcagtaggtttgcatgctttttttttcttgcaagggatccaaataactcttcatatatatataatggggacatcactttattgtttttttactttgttggcgtgtagaatttcactgtttcttatatgctaccagctttctgcaattctacaaatatggtgtttctcacaaacattgctcagagcacaagctatgtatcctcattgttctctttctcgacttttagcatattaactatattaacctggatatatacatcatttgaggaagggatcagctgattgttttttagagggtcgggatgaatccccataaattctaatgagtaaataatgaaatacatgcaagcagggcgagaaatgcgttgtgttttgttgactcaatcttctatttttttccttagattgggtgagatgtgattgcttaattttctctcccaaattaaaagagagacatatgcaaatgcacagaagtatatcccatcccatctataaatttagatatttcattcacctgaattctatagcatggctacaaatttggagtggtttggggagcgggttatattagaaaacactgggaaaaatacactgtaacttactttggacacactcattccctacaggggcgggaggggattaagattaaaataaattaattttcctttcaatcccctggaatcaccatgagaccttattcggttgcgtagagattggagggggtttatatcatttctattcaattttgactaacaaggtatttaatctcctcaaatccactcctaaggaatcattgatccaaactagccacaattcaggctgctccttcactctgtgttgtttcttcacttcttgaaattgttggatatccttcaaaatttcctgggttttcaaattgacctaccttgctaagttatacacacacatccattgtgtctcaggaatatgtagtgcatctagttcaagatttgcgaggccatgctcatcagatgtgtgtatatgatcg

SEQ ID NO: 15961 - DNA, 715 bp, Zea Mays
gggagttataacctagggaggagatgactttgcaaaattttggagaatctctatcagctggaggggaacaatgtggagcagaggaaggctcagaggttcgctaaccaactgatagcaatatggttagcatgtaggagctcgacagagcgggagaggtggatcatgtgagcatagggtggcatgtgtgtgtggcacactaggaggaacaaaccagacacaatacaatgtagggcatgagtgtgagcacacgagtaggtgaatcaagtgcggtgtctctaggcggtagaggtgggtggacttgcacacagggaaaggtagaggtgcaatgacacaatggggaagaaagccccatggcatgcaagagagagttgatagaagagaatgagtgaggccccatgagtcaaatacaagaaggcaaagcttatgcctaattcagtcgttggaccacccatgtagtattgtcagacccacaggtagagtcagatgcatgcacagaaaacaccagagagctcttgtaggccattggactggtttgacgagcaacatcgggctttgtggtaggagtgtgcaggtggcatatgcgatgtacaatgacattggactagtccaatgccaatagaggtagcatcattggacggattgctagatctatgtaaaatcatagcaacaccaacaacaccattagaccgatccaatgcccagcaaaagaaagttg

SEQ ID NO: 15962 - DNA, 647 bp, Zea Mays
gtaaaatgagctcaaagttgagctgtcagtcacactgataactgaattatggccaccagtgacattagcaagactttgaggttgaattagagtaggatctagtgatcggttggggatggttactatagttgaattgtagctggactataggactacaactttgttaaaggtggattagcaagttattacatggaattttgagatttgggcgctgcaatctgctctgtcaggtgttctgcataacattctgatggtacagtaactgacatagatcctaggtgcagctcccctcgccgctagtgaaccgcgcgctcagattcgtgccggccgccgcgattcgtgcctcagataagtggattacgctcggccgtgaaaagatctttgttgcagatgaactcgggacactgtggccgctctgtcgtccatccacttgcgccggtgacgtggccaagcaaccgtcgtcgaggtatacgtcgcctgccgtgatcgcgacatgccctgaccctttaactacgtcgcagtgagttgccttagcccacccgttcatcgtcggtggtcttgccacggtaaagtccatgaatcgcttgcgctagtagcttcttcccactccgaccgccagcacaatctcttcaaattgaacgccaccg

SEQ ID NO: 15963 - DNA, 722 bp, Zea Mays
acctaccccacttaaaggaatcttgccctcgagatttagactggatttgagaaaagataagggtattccctcctcaaggagtcctcactctcccaggtagcttcctcttctccttctctgctccactgaactttatagagtttcacttctgagttgcgggtcttccagactgctgagtcaagaatatttactagcttctcacggtactgaagatctttctgaatctatattgtctcttctttgatgtgactttctggtacttgcaggcatttgcggagctgggatacgtgaaacacattgtggatatcagacatggattctggtaattcaagacggtacgctacgggtcccactctgccaatgatgggataggggccgacgaatcgtggtgctagcttccctttcacttggaatcttctgacaccacacatcggggagaccttgaggtagacaaagtctccttcctcaaatctgggttctctccgcctgttgtccgcataactcttctgccgactctgagcttcaagtaatcttctgtggatcagggcaactttctcctcaacctctttaacaaaggcaggtccttccagtgcctttcccctacgttggaccacatgagaggggtctggcatttccgtccatacaatgcttataacagtgacatcttgatgctggcctgatggttgttattatacgagaactccgcataaggcaaactggat

SEQ ID NO: 15964 - DNA, 402 bp, Zea Mays
gtaccacgctataaattgaccatacggggcaggggcatacagctttctgcaccacttcccagttcccacgagtaatagttcgcatgcacccacaagcacacgcctctagctagctagaattcagtagagcacgccgtgcagtttgcacgaacgaacaccacactcgtcctaaacggctggctgcggagtgcgacatggtcaggccatgggttcttgtcgtccttcctctcatgctcgccaccttgcttattgccactaccaacgcccaaaactacatagaaccagcgcctagcccactaccggacagcccatctcctcctccgccaccgccaccggagccatcaaccgcgcctcctcctgcttcgacacctacgccagcagggtcatccccaccacctcccg

SEQ ID NO: 15965 - DNA, 372 bp, Zea Mays
actgtctattaatggagctgaggtctctccgagtcatgctttcaacattgttcctgttgatgcccctcaacaagcagtgcatcgatgcctccagctttgggtcttcccttatttctttccaatctttaggtgaatcaacttttgcttcttattgttcgtgttggcaaacgggttctcttgataatttttgaaattgcagaaagtcttcgattttgtatctgcccaggtgaaatcttgtggcgtccctgtccccgaccaagtttagtctttgatgcagtggaatcctctactgcttcagagacaaatagatgatctgaaggcctcaaaccttggttagtgagtctacagtttccttttttctgttttttgctt

SEQ ID NO: 15966 - DNA, 378 bp, Zea Mays
cgaagacacccatcacagctactaccaaagctaccagccgacaagaggtggtaggtccccaaggggaagggggcatggatgaggtccacctcatgaatacaagtcttactgcatatttcacgaaagctccagtcactcaaccaaagaatgtcacatatacaaagaagtgaaagagaggatggacatagagaaagggaaaagggactacctagaacaacaagcgaaggttgtagtccacaccttccaaccatagtttcaacatcagcaagaggcatacaatcactacccacaataccagccaaactaccaatagctacctacgcacccacaaaggcaacagttactcccaccccctccgcaactgatccaccatcaaag

SEQ ID NO: 15967 - DNA, 519 bp, Zea Mays
tcatttgtgcctccagccgagctctctcgcccccctctctcgccctgctcacacaaccaggccgtccgccgccgctcaccgaagttcaccgcctattctgcgaccgacgttgagcccttgtcgcactcttttcctcggtaagctccgccgcaccaccagtagcttgggacacccctcggttcacccctaacccctctggtttgtccggtccgcgttcatgggagtcttccccgtgcagtcggagtccgccgccatcgatctaaggctccaccgcatccctatcgttccccaagcgctccagagctcgcactcgaggtgagcaacctacccatacctttattgcgccaagtacctccccagtgcccgtgaaattcttcgccggagttgatccgcgccattgtaggccgcctcgccgtgttctgcgccctctgctgccccatgtcggttttgcacccatggctaggttcgccaaatcgccctaaacgcgctcgagctattccccaaacccctagagcctcg

SEQ ID NO: 15968 - DNA, 899 bp, Zea Mays
caaatatcttgataggatgcttcgtgtaagttagatcgccctgcacactgagttcttccattggtaactgttcctctaggacacggaggcacttcttgagttgagatacgtggaatacatcaagtacacctgacagatgatctggtagctcaagctggtaggccatctcccctactcgcctaaacatcctaaagggtccaataaagcgaggggagagcttgtctttaactttaaatcttctcattccatgaattggtgacacctttaggtatacgtgaccaccctcttcgaattcaagtggtcttctccggttatcagcatagctcttctgccgagtctgtgctatcctcaagttttcctggatcatacgcacttgtccttctgcctcttgaataatttttggcccaaagaattgtctttcaccagtttgatcccaatataggggagttctgcactttctgccatataaagcttcaaatggtgacattttcagactgtcctgataactactattgtaggagaattctcctttgcatatggtagactcttgtcccaactacccccatgcttaagggtgcaagctcttaacacatcctcaagtacttggttagttctctcaatctggccatcagtttggggatgataggccgaacttaaactcaacttcatatccatattcccatggaaactcttccaaaatcttgaggtgatctaggatcctcgatcggaaacaatcttctttggcacaccatgtaggcacacaattcgagcaacatataactctgccaactgagaacccttgtaagtagtcttgatcggaatgaagtgagccactttggttaatctatccatgatcacccatatggaatcataacctttctaggtgcgaggcaacccga

SEQ ID NO: 15969 - DNA, 575 bp, Zea Mays
tagtgaccactataagttaagtaagagtgagcatgtcgcaccgacataaggcatttccgacttaagccgattgcttcgttagtagggcatagcgatcaccctaagtcaagtatgtgtgagcatgtcgcaccgacttaaggcgtttctaacttaagtcgattgcttcgttagtagggcatagtgatcaccctaagtcgtgtaagcgtgagcatgtcgcaccgacttaaggcgtttccgacttaagtcgattgctccattagtagggcatagtgatcaccctaagtcaagtcatgccgatttcaagtcaagcccaatcgaagtcagttgtcaatcgagagtctgaatgcctttggaaaatgaaagctttattgatgatgaaatcttttggttacagagtacaatttcccttcaatgggttttgaggccttgctaagggtagaacattcttgggtgttctatgttccatgagttccccacttctgtgtcgtccatctgagtaagtcgatatgatcccagccgtgtgacgtctgatatgatgaatggttcttcccatggtggtgacagcttgtgtcgcc

SEQ ID NO: 15970 - DNA, 528 bp, Zea Mays
cagtgcaattgtatgagcatggatgcaagggttaccaccctgtgtgatgagttgtgcaaattgaacctggaagttgtttcttctggcggcttaaactatatctcggtggagcccacattgcaagagaaaatagtcagggcacagattgaagacaagggtgttcagattgtcaaggaaatgattaagcagaaggcagaaaaatacaagtgcttccgtcaggacaacaagggaattttatggtttggagatcgattggttgttcccaaggaccctgagctcagaaagaagatactggatgaagctcatctttcaaaattctccatgcacccaggtagcaacaagatgtaccatgatctcagatccttatactggtggaccaggatgaagagggaaattgccaagtacatatccgagtgtgacacctgccagaggatcaaggctagtcatttgaaggcagcaggccctttgcaaccccttcacataccatcatggaaatgggaagacatttgcatggactttatcgtagga

SEQ ID NO: 15971 - DNA, 684 bp, Zea Mays
ggggccggctcctgctcgtctctcggcgcaatccactccggctgcgacccatggagatgggggcggagcagctcggcatccaccaacgcatgcaggtcgttgtgggtgatggaggagaccgaccataggtcgcggggaggaagcacgttcactttctcggccatcagagcaggggaagaagaccgggggagagcacgaaagcttttttgaggctaggagaaagggtggctagggcaggaaaacaggagcagaaggtaaggagccgaagtgtccatctcggacgaatttatagggcaggcggagtcaccgagtcttgggccaagccacctagagacaaaccaagaacgggccgggacgcttcgaattccttgcatgcgtacgacaacggtcggcctgcgggcatacgcgtctcgtcgcatttaatgcccgcccctcctgtcagctgacgtcaggcagcaagcgccgctttgtattacgcatcgaaaggtgtgtcgttccctcttcccaccttttccatctccttgcatgtaacgagaaaaagtgtctcccgcctcgggcatccttcctcaaggaaaagggtgagaagaataatactgttcgggggttcgaaggtcaggccctcataagggttcgggagatcgcctcaggacgactgggttccgggccctttactggttaggggtt

SEQ ID NO: 15972 - DNA, 528 bp, Zea Mays
ctccccctcggcggcatcactgtccggcttgctcatcgtcgtgggcgcctgtgcgatgctatgcgctacccctggaaagtcaacatcgagaccagggtgagccattcggggatgcggtgtcgccacatcggtactgctacccgagccccgaccagtgcaatgggaggttctccggcgcacaccacgactattggtggtcttcccacgcgcagaggacagttgtggtcggaggaattcatcaccgacatgcgacattgccgccaaactgcactctgccgtggccagcgccgctcgggcatcgatgtctggtgaggactccctcccagagttcgccaggtcctttattacgtatcgcgcactgtggattaggacctagggcttgtctgcatagtttcgccgtgctccggcgagctctgcggtggggagaagcagggcgccgctgggtgttgtgaccgggattgggggaatagccctcgccgtggatcgtcgcatggacggctacgattaggagtagtataccggttcggg

SEQ ID NO: 15973 - DNA, 539 bp, Zea Mays
gcacgggcaccatcatttgggctataccgacgcccggtcttcgtagcctggggctcaacacgactcgtcgtgttgcgccctaccagtggcctgcgcactcaggcctagtcccaataggtcatgagtgcgtcgccggctaggggagatgtgggccataaatgcactgtagtatgaggggcttgtaggtcatgagtgctctacgacctgagaggctcgtaggttatgagtaggaggcagaccagtgtccctcccgtggctcagcgtcaggcgcagtttaatggagtcgatcatttatgatgtcaaccgtggtttaggcatggaatacattcgagtggtttaccttcgctacacccagtcccctgtccagtttcgccacgttcaaccccggactcggtgccgcatggttcgtttggagcgggttttttcaggataggcattgtctatctcccttggctgaccaacgggcttcagtggacaaaggcatttttctcagtgcgcttggtgaccgacgggctccatggactaggatcgtatccccg

SEQ ID NO: 15974 - DNA, 569 bp, Zea Mays
gtttctcagtaaccataggtccattaatatgaacagaacaggcagtacacagtttcgaatgtgtaacgacaatttggaagttacaacaaaacatgtttttaaggggaaagcatagaagagacatcaacagagaacatctcaacaaccaggaacaccaaagggaataatcgtgtcccaacatttcataataacatgtactacatgaaaaaacaattccctgtcggtatgtagctgaaatcactgtcagttattgaagtaggagcaacaaaccagcaaaccaaccagtagggatacttggtgcattttacctgttcgtgttatgaactgggatgataatcatgcatcatagccacttgataacaggaacaggcaccatggccagaaaaacacatcaaaatcaaaatcaatacaaagtacacaatgcaaatatacaattccatgtaattggcatcaaataccagtctctctggcatcccgatttgttataatttctagacaaacaacacaaaatgctgaaatcttcacaggaaaattcagacatatgcttgtcaattgtaactatataattg

SEQ ID NO: 15975 - DNA, 718 bp, Zea Mays
tttggatggagcgggtgtgggagagtgggtcgacgtgagtgcactctcggaagtgttccgcggcggcgaggtgatgttctcgatgccttggcgcggtagttgtcaatcggttgagccgacgagcttcgttaacattcatgaatgctagaacatggcatagagaggtgtgaacggacctgggaacagctgatcactgcagggtgtctcacagcggcgtgagtggcccgatttgagaaaaatccagtgactgggggctacggtgcacgagagagactaactgagggtggtatgagtgcataacagagagacggagcgaaggtagtgctcaatttaaaggagccaactacgtgcttcgccagtttgagacgaaggcgatcacggaggcggtgagatattccactggacgagttcgtcgttgcacccgccggtacaacggctcaagggcagtgactccttgcttgccacagttatagctacgtggtgaaatggtcacggcgtggcgcaaccacaaaggacagttgccaccacggtgatggtcgccccagccacgtcgccgtgcaagtgggtacgacgaactgagcaataacaggacccgagctcatctctacgccaagatctttttacctctagcagttatccgcgcgccactgagcatgaatcacaacactggcatggatcgcggcgcgggttcatcgacagcgggtgcactgcacctggg

SEQ ID NO: 15976 - DNA, 474 bp, Zea Mays
caaaagtaaacgctggtggtgaaagtagcttgatactatgaatttgattcctttagttaccgtaaaagaccccatcactatgaatttaaagttgtttatcaaacaacaacaacaaagaaataaacgctggctggaaaccatatcatatccagcaggtgtaaccacaaatggccatcgagtgagtctatctatgatcacactaattaccagactaattatcacaacactggacaagcgaacgtttttacacaaccactacaaccggctacgcagtcatcaaatgccgtagaaggaaaagggaaagaaatgcaactgcaaacattttgccctccattgcttgcttggagttggagacgaaaggaactgttccccatgtatgaacaagaacacggcaaccaactatgaacatgaatggtaccaaaacctaaccttccgatcaacaaaagaatgccctaaaaccctcatggaccagaa

SEQ ID NO: 15977 - DNA, 394 bp, Zea Mays
ggctcaccagaaccaccgccgctaccagtgccgagcccgccgccgccgagggacttcaacgcgccgccatcccccgagcttcttcgtgcctgctctctgctgttgggcgggaccgcgggggcgcgtgcgagcgttcgaacgggagctctatggtcgggaaagctatcggtaagcaccaccccgaactctctttctctcccctcgtcgtcagttcatgcatggccgaggtagaacctgggagctgctcggcgtttagcattgagcggcgtcggcattggggattatagatggggcgcctgggaggggacgaactacggcgaaagtgcgactgggggcactcctcgtcgccggtgagagctccggcgcgtcggggcgcgctgtgtgcatgcgcgcg

SEQ ID NO: 15978 - DNA, 1088 bp, Zea Mays
aagcagactaactcagtggaggctgagcaacaggggtccgagcacgtctgatggtcccagtttgcatggacgacttgactgctttgttccttgccttgcctccagctttgtgtgatgaaggaggagatggatcattgatggatgagtagtagtgggtggctgtgtgtgagtgggccatgttgggccagtgtttcctagttgtggcgtgtgggtggcctgctaagtgccaggtggtttaaatattgtaaccgtgaagtcttggacagaaaggaaataaggaaatcaaaaatactccccacggcatacctgagccttgctaagtgtgtcgattatttcgctcttttccatgttccagcgacagtgtgggttactagtgcttcgttgcatatggaaggcaatgcatcgcgatggtttgaggtgtataagctgcagcatggtctcggtagttggcaggaatttgttcaggcagtgttgcagaaatttggtgtggacgagtacccttagaccatgagagagttggtggatttacatcagaggggtaccgtggaagagtatttgaaggaatttaatgaagctcgttatgctgcttccatgcataaccatacattggatgagactttgtttgttacacattttatcaaaggccttaaacatgacctgcagggtgtggtgcagtatcatctgcctacaacagtggatcgagctgctttattggctcagatgcagcaggctataatggagaaacagaagcaaaagatgttgaggttttcaggccaatctcggtcctatgggcaaggagggaggactaaggtgaaattatcttctagagtcgatttgtccaaggagagggcagtcaaggagtatcgaagacaacacggtttatgttatacctgtggtgagaagtttgaggccggtcatcaaagcaagtgtcccaagagattacaaatgcagcttaatgctctgagtacagaagagttgggtatggctttgactgatgaggtcctttctcagttgaagcaggatgagtcggaaggagcagatggtctcaatctttctctgaatgccatcagaggtactgctaaggaaac

SEQ ID NO: 15979 - DNA, 428 bp, Zea Mays
gagagaaaaaaacattctcacgacctgcgtttttacaaggcaattttggcaccatttgttgccccactggggttgggtggtatttctcctagacagaacgaggtctgtttcgcggaatggtggaggaaatcaagccggcgagtgaagaaagatagaagggaaggttttcattctttcgttatttttggtgcttggaccctttggaataagagaaatatttatgtttttgagggtgcctctccttccctttcggtagcccaaaacttcagcagagaagaagttagattgtggtgtttggctggagctgctaagctccaggttttagtgagtgggtgggtgatttttggtcatggagggatggcttaactctctcctttctagaggtccctcttgtttgtgtcaggcgcggattcgtctttgttttttct

SEQ ID NO: 15980 - DNA, 517 bp, Zea Mays
gccgccgtgattcatgcccagtgcaagtggataactgaggggagtaaaagatcttagcgctcggattggctcggactcggtcactgttgagctcgtcgtacccacttggcctgcggccggccggaataatcttcaccggcgttggccgcttactaatcgtgcgtcacgtgcctggaagccttgtagcaagctcgtccatcgccggtggccttgccacggtgaatgccatggtatcacctacgccagtgacttcccctctcttcggtcgccagcgtggcatctcaaagttagccgccaccgccctcggacactataaattgatggtactgctagctctgttgggttgtcacgaagctagagcacccacccttgcctccgattaaccaccacatcgcccgaatttccttttcccccaattcagttctctacgccgccgtgagtgaactcgccgtggccagcgttttgcacgccagttcaagcttccttaattggtgttctagcctccctcatgtccccg

SEQ ID NO: 15981 - DNA, 550 bp, Zea Mays
gtggtcttctccgacggcgagggggtgcggaagccgggtcggctgcggcgcgagctcgctggacggacggaggaaggtgaacggcggcagcgtgcgtacagactacataggagcggcatgccacaggtgagtgcgagagaacgagcagccggggtggggaaagaggtgagcccggccatggcttttatagccaaggaggagggagcgaaggggcgtcggattgaagagcatcaagaccattaatggtgctttaactgtgtgggggaagaaacggtcgcgagtaacggcatggcgtgatggagaggcgaatggtcatgggggcacagctgtagttctctactgcagcagctgggcaggcgcggacaggggaggcgatgagaccgagtggtgcacgagcgacgacggcgcaacgttactggcgagcagacacacggatgaacacgagctggagaagcatcacgtgaggaagaagaaagaaatgacacttagatgtcggccctacttgtaagagagagaagagagggagcgttaggaacacgggatgggcaat

SEQ ID NO: 15982 - DNA, 527 bp, Zea Mays
tgttgccatacaacctccagatcaacaggttacttgggttgaatttaaagaagctttccgtactcatcatgttcctgacggggttttacaaatgaagcttgaggagtttctgagacttaggcaaggggcagatactttgatgcagtatattgggaaatttaatcacctttctcagtatgctattgagcatttaaacacggatatcaagaaaagagattgctttatgagaggcctcaactcaaaattgaaaaagaagatggccacttgctatgatcttaccttcaatcgggcaataagtgtggtcatagctgtggaagaaaaggcacgagtacatcaaaatgtgaagcaggcatggaaaggttctaggtcagggttttctcagtcgacggtgaagcgccagaaggtggtaattaggactgctggttctacaaatgttccttatcgttcaactacctatccattcaagaaccccacttatattcgtcccaccaactggccaaaccaacttccacctgcaaacacccaag

SEQ ID NO: 15983 - DNA, 595 bp, Zea Mays
gtgaactcggcgggattcgacgacgggcagtggtgcttgctgtggtgcggcgtgcgcgggggttgttcaaggcatccgaacctcctcgatggactccattcaccaccaccggaccgctctctgtcatggtctggacgcgtcgccaccccaaacactggtacgtagccttcactgagttatgcgcttgcgtctcatcgggtagtagcaaatttggattcgagcgcagattatccagtggcgcggcggattggactcccccggcgaagtccggctgccagagttcgtggccgtcgtgtgtgcatctggcaaggaagaaaggggttgaagatggcgccgtagtcggtgcgtgtggccggggggaagaagaaataaaggaaactgttaattggtagatgaacggcccagatcagtagacatattctctctgctagaaatgatcctggccgctaagtattgatcgggcggatgcgtgtggggcgcaggtgtttaaaagatggatcgttgagattagatctaagggtagatggtggatcggacttcataaaatataggctgtagatccttgatccgatggtccctatcacttactggtttg

SEQ ID NO: 15984 - DNA, 649 bp, Zea Mays
tggagaatggcctttaacgggaaggaggtcaccaccacaactctgtgtgcctgaaaatagtggcgcaatttcctggacgcgacaagtatagcatagataagcttatgcgtctcaaggtacctggcctttgcctcatggaggacctcgctgacgtagtagaccggcttctggatggttcggacccctgcggttagacccgagtcctcagactcctagccttccgtcaacatcgtggtggtcggaccaccaccttctcctaggggaacttcctgactcccctggggacgttgtgccgccctttcaccgaccagcaccatgctcaccacctctgtagccgctgcaatgtataagtacaacggctcccctgcctctggagctaccagtattggtagtgacacaaggtgctgcttcaactcttgaaaggcttgttctgcctcttcggtccaagaaaatggaccggacttccgcaatagcctgaagaagggtagtaacctctcagccagtcttgagatgaagcggctaagggcggccagtgaccccataagtttctggatgtccttgatgcgggctggaggcctcattgtctcaattgctttgatcttctccaggtttgcttcaataccctggtgtgaaaccaggaatcccagca

SEQ ID NO: 15985 - DNA, 321 bp, Zea Mays
tagaaaaatggaaagatgagtgctaccagacatggtgtaaattatgaagaaccatacctgcacaatgaacttgaggttcttctcccttcctactgaaaccatacaagcatataattagtcaaaatagcaataggttgattacatccatctattgagtagaataatttaaaagaaaataaccaaagatgataatagctagcatgaacataacaaaaaaatagacattggcgtatgggaaagggaaacatataacggtaattctaactccacatattacattcagatgattgtaatggcatttttaactaaataatgggattg

SEQ ID NO: 15986 - DNA, 459 bp, Zea Mays
attgaagacaagggtgttcaggtcattaaggaaatgatcaagcagaaagcagagaaatacaaatgcttccggcaggacagcaaaggaatcctgtggtttggagatcgattggttgttcccaaggacccggagctcagaaagaagatattggacgaagctcacctttcaaaattctccatgcacccgggcagtaataagatgtatcatgatctcagatccttatactggtggaccagaatgaagagagaaattgccaagtatgtatccgagtgtgacacctgccagagaatcaaggccagtcatttgaaggcagcaggccctttgcaaccccttcccataccaccttggaaatgcgaggacatttgcatggatttcatcgtgggattgcccaatacctcccggcaccatgattctatttgggttatcgtggatagattgaccaagacagctcatttcttg

SEQ ID NO: 15987 - DNA, 283 bp, Zea Mays
aggctgtgttttcattgcgcgcaatcaatttgggcgaagatggagagggcagtgcaaatttgacttcgactgagcttcactggtggagatgaaagcacctcgccgtggctccttgctcaatttataggcacggcggtccggtgattgatccgcggccacgaggtgcgctattaacgcatggcaaccacgtaagggagaggcacagtgaggcgaatcaaagcatgtgcgacagcgtggtggacaacgctgagtcacggcgaccgccggtgaggtaactccggcg

SEQ ID NO: 15988 - DNA, 303 bp, Zea Mays
gatatatagacaaccccaaccgcaacaagcagaaatggatcctccatcgccacctccaccaatcagagctgacccaatggttgcagctcagatgaggatgatgcaacaaatggctgacaccatggcggatatgcgcacgcaaatgcagcaggaatgccaagagatgcgccaggagagagaagagatacgccaggagctgtgtcaggaaagagaggagatacgccaggaaaggagggcgcaacaagaacaacaacaacagcaagtaccactgccaccaccaccacctccacttccaccccggga

SEQ ID NO: 15989 - DNA, 866 bp, Zea Mays
ggtatcgccccttctgcgtgccctctattcataccaggcagaacccctctcaattctgcccgacgtgggagaaatcgacgtcccgaactcaccggtgtggtgcttggactagtcgccgccatcaatccgcgcaaatgccgtcgctgggtccctagtgactagcgtaggcgcgcctccattgcccgcgggattaggagactgccggtggagctcttcggacggggcgaaaccatctgtgcaggagggtccttggcagcgatctttcgtgaagcgtcgcctgtgcccagcctctacctcgtctcggcggggtgagttcttgttctgctatctttgctgctatgattttggcacgaggtatcatcagggtatagattgtagtgggctgctcgagtatcacacagaccaccgggatatcgggcggtgggtggcctactgcagggcgccaccgctggagcgttttgctcctcctggttcgcagctagaggtagaagaaggcctgtgcgttgtccgatcgtgtagcggcggccatgattgttggagggtgtccagtcggctgggtgtaggagaaggaacgggcgccgttgttcaaggattgtgcggtcagtgtgggatagaattgatagtgtgctgtggatcataggattcggatccaacgtgtgaggatgatctcgggttcataagtgtctcgggctaatcctggcggtcgagttctgatcgaacggctctagcgcaaggataccctttcgccgagctgtttttcacatgagaccctcagtttattgagaacgaacccgccgtccagtagggaggaagtctgtgtcttgggaagaattgtagatgaacccctggtcttttatgaatttgac

SEQ ID NO: 15990 - DNA, 429 bp, Zea Mays
tgatgtttgagggtgccctcagctttgcagggaattgtgcctttttgattgcatgtttgaaggcatgcgaccctggcccgggtggattggagttgcgctcgtgcctcctttcgcacgattgctcaacttattcttgttcccagtgccggttgttgaggatttgttgggtgtcgtggatgtccctgaggcggtccttcttggggacgcgtgttcttgtggattgggaggggtgcgcccccttgctctaggacgaggccatgcgcgggacatagctatccacgtcgatgggtatctgccgatcgattttggcctgctgcacaacgactttctctaccagattgtggaggtttcgatacatcaccctttcctctggttcatcaggcttggggatagaccgaagcatcaaggctgttgcggccatgttctgcc

SEQ ID NO: 15991 - DNA, 468 bp, Zea Mays
gatattggttggcttcaatggtagtgcatgttgtctaccatgcgctgcagttatagagatgatgcgaagggcaatggggacctggtcttggttatcgaaagaactgtcatctggtattactctaaaggtgaatttcagtgaaacaatctgagctaaatctggaggaattggtgtcgctgcatttgtagatcgtaagataactttgcaagatttgccaacaatatatcgtgctatgttatcaaagcaaaacatttgtgctatggctgttgcatctgatgctcgaaatttgagcttgtatctgtcattaagaggcattgtgatagcaattaaaaatctatgcttagaatgttgttataaaattgggtgatgtaaataacaatggataatagtaatatgtcatggttagatttgtttataaagcaatgtaattgtttatgtaaaaagtgttgttagtatgtctaatttatt

SEQ ID NO: 15992 - DNA, 655 bp, Zea Mays
agcgggcgccaagaatctgatccagacgtcggaggcggtcagcagcggaatccagtaccgggagcgcgtcggagatggacgtcggccgcaccaacgccgggatggggctcacccccaacggcactaacgtcgtgcttgcctcgccagcccaggcggcgatgcgctgggccccggcgcgttgctcagcccggaggtcgtcgagtgtcttcctcatcacctccaccgcctgggggcccgaggccgtctgcgtcgcctgagcagcttgcgctgcctggaactggcggacctgctactccagtgcccgcactttcccctccaaacgcttccttttctcctctgcctcgagctcaagctcatccagcagcttgttccgccttgcccacatctcctccatgaaggcgaggtcctcctcctgccaggtgagatcagttgcccgtttcgccagggaagcttccctcgccttgaggctttcctcggcgcgagcaatgtcgctggccttatcggcgagttcctgctgcagcttcgcctcagtcgcatcctgcttgttctgatgtttctccagcaccgtattatcagctttcagcttatcatggagcgttgtgacggcctcctccctttggtctaagtgttacttctttttgaccaagcttttctc

SEQ ID NO: 15993 - DNA, 457 bp, Zea Mays
cgctggggtatttcacccacgctgccgaattgtgggccatcaccgggtcggagaaaacctgggcgcgggattgcaggatccggagatcaatcgcgtcgtccctagctccccgccggtgtcggggattgaacctgtgccgctgcgggcgaatccgttggccgctgtcaggactcttcaaccgcttcaacgatttggtggtggtcggtggtcgggaagcttctctggctcacccctcacatgtgtgtggccttattggacagagatagccttccgagctcgaccaattgctcatcggtgcaatggctccaccgcgggtgagaccactgctgcagacccgtttcactcccttgccatcactggtaatacgcatgtccttgtgttcgccatgtcccttattacatatcgcacaccgtggattaggatttagggcttgtttgtgtagcttcgcagacctccg

SEQ ID NO: 15994 - DNA, 517 bp, Zea Mays
ggaggtgagggctggtgctctgggttcataacaagtagacggaacaggccgaggcatcaatttatagaggacggctgtgaggaggggcgaatttggacgggggagcgctcgcggtgagaagggggaggagtcaccggaggccgctaatgtggcgctcacagcctaactatctacggcggtcactaccgagtccttacagcctgtgacgacgtggtgaatcgactatggtgtggcacactcgcagtgaacgacgatctccacggcgatgatcgtacgaccatgtcgcagcgcaagtgggtacggcgacagggcggccacagtgccccgacttcatcccttgcgcgagatcttttaccctgagtcattatccgcgcgccattaggcatgaatcacaacgccgacgaggatcgcggcacggggtcaccagcggcggtgcactgaacctggcgatctgattcagttactgtaccatcgtgctcttcctcagttgttctgatagagcaacttgtagtgcttg

SEQ ID NO: 15995 - DNA, 385 bp, Zea Mays
cccaggtgcatgcatgcagggatggctcctcgccaacttccactccgccgccaccctaggttcgatctgcccccagagcccggctcacctctggttgaccccgtcgtccctcctcccgcactacaacaccaacttcgtccgcaacgcggcaaactacctcctttctgtgcatccggatcgcctgcgtgttgtgtgtgtgcgtccgtgggtatttagggtgtcggtcgccagtcagaatattgcgaacgtccttgtgaccaggggtccccttgtcttagcatcctccgtgctcatcccgcaccactccatggtctcggcagtgcttgctgttgatcgccttgcgaagtcacccgaggttgacgatggcgtcttcaatgcagcccaa

SEQ ID NO: 15996 - DNA, 279 bp, Zea Mays
gcaaaactgaagtcgattagggtgttcatactcactatagtcgtgtcggtgttgctgcccacgacgcccggcggccccgccgtagatccgcgattctggtgagcaatcgccggccacgagagctttcttttcccccgagaaagtggctgacggctccccgtagacacgacgaagcgattcaggggtcgtaccggcgtttggggagatagcagaggtcaacgacggcgcacgcaggggcgggcatagcggtgacccattgctccaccggccagatgactc

SEQ ID NO: 15997 - DNA, 669 bp, Zea Mays
gactcgacggcggccacgaaataggccagagaccatgaaggacgacggtggagctcctcgggtgcgtgcgcgggcgcgaggcgggtgctagggctctatagtggggcgtgactggaggaggggagtgagtgagtgggggcgtggcttcaaaaagtgggtcgggcgcgtggggaggtggccgggagaagcacggtgtgggcgcgtccacggcggggcgtgcaggtgggaggttagggagacggagagagctgacgagtggggtctgcgggtcagcgagagaggccgcacgaataggtggtcagcactaacggatgggtcccgctgcgcagagagagaatgggacgcgcacgcgaaggggattggcgacgatagctcggtcccaccggccagagaaagaggaggagcaggtgcgcgagtgagcgcagacgaaggaaaaggcgctcataggcggggcctggctgtcagggaggggcaggcgtgcgcacgaagctgagctgggctagactgggctaacttgggttgaattgttttttcctttttcttctgaatttcaaattgcttttctttttattttctctaggaaattcaattcaaatcaaaccacaattcaaattcaaatatttcaaacatgtgcatcaaccaaaaacaaagtttaagctcacaatgatg

SEQ ID NO: 15998 - DNA, 1032 bp, Zea Mays
tcgtctcttccacaaatcgattatgtgattagaagaaagtcatggaggcgacggcgctgagcttgggcaaggcagtgctgggcggagcgctcagctatgccaagtccaaggccgcagaggaggtcgcactgcagctcggcgtcgaggacgacgtgaccttcatcacggacgagctgcagatgatgcagtccttcctgatgacagccgatgaggagcgaagccagaccaaggtggtcacgacctgggtgacgcaggtccgcgacctggcctacaacgtggaggacagtctcatggatttcggcatcgacgttgggaagaagccgatttgggggtgcatcccccgtagctcgtgcgatcgacgtcgcatagccaaggaggtgaagaagctaaggtccaaggtcgaggatgtgagcaacaggaacctgcgctaccgcctcatcaaggatggctcaagatccaagcctgccggtgcggcggagcaaactactgcctctgatggtgtagagcgtcaaaaaccaaaggcagacctgctgcagctggtcactagcaaggaggtcgacctgagggtcgtggctgtgtgtggaacaaccggtgatcgtgggaagacggccgccatccatgaggtctatgatcacccaagtgtggcatcaaagtatggactcagggcatgggttaggctgatccaccctttcaatccagaagagtttcttcgtagcatggtacggcaattcttggagaatttccatgataagcctcaaggtggagaagaagcaacaaatgttggggctactgtccttctgaagatggacaagatgaaccaaagtgatttagtgcacacgtttactacacagttgagtagcaatagctatctaattgtaatagatgacctatgcacagtagaagagtggcaacgcatcagaaggttcttccctgacaacaagaaagagagcagaatcatagtgtccactcagcaagttgaggttgcaggcttatgtacagagcaaccataccaaatgtccgagtttaagcagc

SEQ ID NO: 15999 - DNA, 615 bp, Zea Mays
caccatatcatgctatatgtattgacgaaccatgaagaggtgacgctatacttggagcaatttcttcatgaattctggcatcaattttgcataattatgttttttataaaagaaaaggatttcaaaaagataagaaaaaccttgaattgacctgcccaacccattcaccctagcttttggtcagtttctctacagcccagttcctctcgcgcgtgttgcttgctatgcctggtatctatgatccacctgttcggcccacaacattccccatgcttgtgtccttgcacggttgcttgcattcgcgctcgtgtccactcctctcttgcatgcttcaaaccactgtcacactcgtgccctgtgtttcggtgtagtggaattcccagtgtcattgtagcagtaacgccttccactagcattgccgcctcctcccctcaccttcccactccagtgagtgattactcgcgcactaatgcccttccgtatccactatgacccctatgagaaccccagagctccgacatctttccccgcgctctcattcctcctgagctctccctttctttgcctacctgctctcccacactctcactccactccctttctttccgtatccac

SEQ ID NO: 16000 - DNA, 495 bp, Zea Mays
actacaccagcctgaataaggcctgtcccaaagacccgtatccactgccacgtatagaccaaatcgtggattctacctccgggtgcgatctgttatcattcctagacgcttactctggtttccaccaaatccagatgtctagggaagacaggaagcatattgcttttgtaacagtggatgggctgtactgttatgttgtaatgtcgtacggtctgaaaaacgccctaccaacatttgtgtgggcgatgagtaagactttcgaggacctacttagggacaaagtagtggtctatgtcgatgaaatcgtggtcaagactaagagagggtcgaccctagtggaagacttaaccctggtcttcgacaagctacgggcaaccctcacgaagctaaacccggacaaatgcgtttttggcatttccgccggaaagctgcttggattcctggtttcgtatcgaggcattgaagcgaacccggaaaagatcagagcgatcgagg

SEQ ID NO: 16001 - DNA, 351 bp, Zea Mays
tgaatttaggcgaagaaaaagagatttgggcactcggctcggaaacgatcgctcgaaacggggaattgagtgaaattgaagcctggaaactcggattggcgtgaaatttggcaagtatgttgctggaagtgttgtgaaggtgcctgaaaaatttgggttcaattggagcatttttggttggtttgggcatttcaccgaacacgtggcgtgcggggaattaggttttcggtgaaatagccatttgaggtgggaaaaccctcccgaaggagctagaaacctgcagggatacacaatggggacaattgaacacattccaccttttggattcattggatttgacaagaatttgaa

SEQ ID NO: 16002 - DNA, 447 bp, Zea Mays
ctagtgtcctttcccctacattggaccacattaggggggtctggcactttcttccatacaatgcttcgaacggtgacattttgatactggcctgatggttgttgttgtatgagaattcagcgtacggcaaactggactcccaattcctgtcgaacgttaacacaaatgctcttagtaaatcttcgaggatcttgttgactctttccgtttgaccatctgactgggggtgataagcgatgctgaaatctaacttggtgcccatcgcttgctgaaggcctttccaaaattttgaggtgaactgtgtccctctgtctgacactatcttccacggaataccatggagcctgactatctccttaagatatatccgggcaagggcggctcctccaaaagtggtttttactggaatgaagtgggccaccttggtgagacgatcgattattacct

SEQ ID NO: 16003 - DNA, 574 bp, Zea Mays
aatgccgcaagatggatcgacagaggctaattctggatttaataaactatgcggcatggctggtgagctaataaagtctgagtgttgaggatcatgagattctaaaatcaacatctgatttgaaataaaaggggctgttgtcacccttgctgcctcaaccagttgcaaacttgcgttactgcgcggaatgactgaagtattattaaaaacagcatgttcagagtccatagacaacagctggtttgatgatttaagagttgctgccatccattgtgtatctggtagttgagaaaaacacttctgaattttaaaagaaagagatttcagtggggatgggagttgagatttatctgtcaggcaattctcagcactttctaaatcttggctgatattatcggatgaatcgtggatgggtgaggcatccagcctaccgacctgatcaacaccaggatcattaacctcccctacgcaatgaggctctaagaaaccagcgagcagcccaggtgacgtgctggccggcagagcagctcccagcagcacgccagagccatccaccagtgcactggctaaacga

SEQ ID NO: 16004 - DNA, 1235 bp, Zea Mays
atggcaattggagtgtggtgatcattgggagagtatgtggatgacctgtctcaggacttatacacttttgtgagcgggtcaccgtacagagtgacgaagaaccagctcatagagagcgattgatccttgcacataccaagaggaagcgacacacttgtgagggtgctccaacgaggattagtgaagagtgtcgactctctaagacatcagaataaatattgaggagtcttctaacccttacattggtttgaagcaagcaccttgcacgtggtaccaacggtttgccacctacattcgatgcctcggctttgtctccgccagctccgacaccttcctctgtctacaaggagggggccaacacagcctacctcctactatacatagatgacattgtcctcaacctcctcgacaactcttcttcagcacatcatgggtcgtctacactcagaattcgccatgattgaccttggcgccttgcaccactttatcaacatctctatcccacgctcatccgattgtctattactgtctcaacaatggtatgtacattatcttcttcaacgtgtaggcatggtcgagtgtcactccaccacgacaactataaacactcgagacaaactttctacttcggatggtgctctcgttgtcgatgcctccgactactagagtctcgtcaatgcccttcagtacatgatggttgatgttgcccaccccaacttgacatacgcggttcagcaagtttgtctcttcatgtatgatccctgtgagtctaacctcggtctgattaagcgaattctccaatgtgtgaacgacactctccttcattctccacattggcaccagctccatcgactggttgacaacatacttggatgttgactgggcaagatgcctagactccagaaggtctacctctagatactgcggctacctaggtgagaactgggtctcctaggctgtccaagcgacataccactatctcccgctcctaaggaatagtactgtgtcatcgcccacgctatggttgagtgttgttggctcctacagcttttctaggagcctcacgtcccacttgctagtgcgaccattgtctattgtcacaatgtcaatgttgtctacatgacagccaatctggttcatcactgatgcaccaagcacatcgagattgacatacacttttttcgcaagaaggtggctttaggacaagtatgggtgctttgcgtcttatctttgca

SEQ ID NO: 16005 - DNA, 434 bp, Zea Mays
aatggatccactggatctctatgattcttggctccggatcttctaaagttcttttgaatggagtccctggcaaaagatttcactgtcgacgcggcgtcaggcaaggcgaccccctgtccccgcttctttttgttcttgctgctgaccttttacagtctattgtcaacaaggcctgtgaaggtggcattcttcgtcttccattaccaaacaattgtggcctggatttccctatcatacaatatgctgatgatactattctcataatggaagcctgccctagacaacttttcttcttaaaagcaatgctcaactctttcgctgactccactgggctccatgtgaattaccataagtccaacatttaccccatcaatgtcacggaccagaaaatggagatccttgcaaatacttttcattgcaaaattggatcattg

SEQ ID NO: 16006 - DNA, 297 bp, Zea Mays
cttgttcgttgcacatcagatgtggggcatcaaataggggaatgtccctgttatgtgtgagggcaacaccgtcatatctggtgtgcactggatacgacacttacagagcttgtagaattagccttagacacttagtactcagtactcactagacgtgttcgatgaccatcgaacaagatactcagagaggatgtaaaatttgtctaagaggttgagtactcattagacatgactaatgtgccaccaaacatggcatcggataggggacttagagaggtatggaattatgcattcgag

SEQ ID NO: 16007 - DNA, 621 bp, Zea Mays
attatattaggggttctttaaagtaaccttcaagttttatagtggcccggggctttaattttatagagctccgccactgaattacactgtttgcagagtagagtttgaaataggtggtgataaagggagtggaacagggagtctgctagagataaatcccgcgccttgttcccgtacacccgtatgcattgcaagttgcccctagtgaaagtgtgcattgcacgggaggaggaggcagcctttgatccggagcttccgaatacggcggatcagggcgtgtcgggtacgttggccgggtcggtgaaattgtgagaaaacgagacgtgcctgccactctctctctcctccgctggccgacctgccccctccctccctccctctgctgctgtagctgagccctacgggcacctctccgttcaggagcaaagccaaaaacatcatccccctcgccaagaaagaaggcagacgaaggcaaaccctagccaacgcgtacgcctcgccccccgcgcctcctcccccagatccggccgatccgtcgttgccatggcgctgcgagctctcgccggcaagctgagggtcctcccttcacgagcggcggcctctcgctccttcgcctcccag

SEQ ID NO: 16008 - DNA, 767 bp, Zea Mays
tggcgggttaattgtggcaaagagaaggggctcatgtgcaaaacataacagccgaaggggtacgggtagagcggagccgtccggtcacgtttctagagcccagattagatccgaataatttgatgaatcggtaagcaacgcgaaccatacgatccagattggacgcgcgagattagatcaagctctccttgaaacggtatgcgaccgggatcgtcaatactaagatcgacggccaggagacgagcaagccacattctaatccgacccatccgatccaatcccgatggcccagatgttaatcagatacgatccaatcccaatcgctagttccggatcccacggttcacaccggtccggttgaatcgttacgtcgcttctaatctcagccgcacacaccagatcgaagggccaggaggccatcgtccaccccatgcccatccggcacgacagagctttctccccacggcggcgacatgaccggcatcggggtgccccacgcatcaatgacgcactcctgacgcgactacccttcacataacttgaagaataaggcaaacccagtcatgggtgtcttaccgggaatggagatgcggtcgacccagtccatggtgcggagaggaactgcgtcggtgtgagaacgacggtgcggaattgccgccgcctctgcccgaggtcaacacccgattccttccgcccaagcgccctaccggtgcagtcatgagaggtaaaatgctgccgagaaagccaatccgcgaagaccagatccc

SEQ ID NO: 16009 - DNA, 512 bp, Zea Mays
caagccagagctcatcggactttgccttgaacatgtcgtgccaccgcccgccaagccacctgagcctcggccaccgcggccagctcactccagccacttccaggctgcgctagccactcggttagcttcgctagaagcctgtgaagcttcccaagtcctcggacacggtagagcctcgccggagaccctgaatcaccctcgccggaatttggtcacccgccgtcgcacgtgaaccaagctatctggtaagccattttccaattcctcgcacccacgtcttccctagcatccagtgaagctctctgacccgttcaattggactatcgcgccgtgagcaggccagaatcctcgccatcgacgagttcgcccgcctgcacaggtggaccgacctactccaaccatcgccaaagacgatccgcacatcggtgtgaccgtcaagacctctcctacaccctcgaccacttcaccggagcaatctcgccgccggtaagcccttcgcccttttcttccgc

SEQ ID NO: 16010 - DNA, 477 bp, Zea Mays
aaaatttagaagttgcacagtccccttcatctcctccttatttggtttgatgaataatgctgagtcatctgcgtagagggaaatgcgcagatttggtcagcgtccccgaattttacttcatatgctcaactcagtcgccttctgaagaagtaattatagaggatcaatagcaatgatgaagaggagggggagagcagttcaccctgccgaagacctcttccatgccaaagaggagggtttgggaccccgttgacgaacacccgtgacgttgatggagagataattgtcgcaacccgatcacgccaacgtgttgggaacccaagacgttgcaatagctcaagaattgaaggaagtcccatctgacagagtcaaatgctttagcaatgtcgagctataggaagagggtgagagttttgtttctattacatatctagatcatgctatgtactgccatgtagttgtcatggatactccttg

SEQ ID NO: 16011 - DNA, 389 bp, Zea Mays
ctctctctctccctcatgccggcttagtaaacaaacatggttgaaagctcgagcgcgtcggtgttacgaattgagctgcctccaaacaaaaggcaaagataaaaggcaaaagctggagagagagagggacgagggagggaggccattgatagagaccacgagctgttctagaagtcaccgcgctgcagcctgcagctcaggggggcctgttccctggatctcgccatcgccattgccgctgccccccacctactactcctgctcctagtcctacacccctcctactccaatccaagaggtgctttggatcgcattgcttcgtgctagagttcggtggtcagcctgcgtgtgggacagtggtactccctccctgcttcttgattcgtctc

SEQ ID NO: 16012 - DNA, 443 bp, Zea Mays
gcgggcgtattttttcttcgtggatacgggcttgggcaagtgatatccaccgggttttttacccattgccatatctagccacgaccgaagcacacggacagaataatggctcgcacgttaccgaagcaggaccattgactctctacgtcgcgtgggcagctgccaccatggtccccatagtagcgtgcagtgtaccaaggcgaagggtgataggcggagaacatcggacaacatcgccaaagcatccgtacatatggtagcgttttagcctatgccacaacctactcttgtgccctaccctgattagacgaggcaagggtacgatgggtaacaacacttcatcctatgccacaacctactctcgcactctgccttggttaaacgagttaggggcacgacgggccaggaaatctacacgaagagcagaggaagatccattccgc

SEQ ID NO: 16013 - DNA, 301 bp, Zea Mays
gtaagcggccaacgccggcgaggatcatctcggcgggccacagaccaagtgggtacggcgactgggtggcttggtccatccccctttcagatcttttacccctccgcgactatcccctcactagagagcacgaatcgtagcaccggcgcggatcacggcgcgagggtcaccggcggcgaggtgcgatgaatctgaagatctttttcagttactgtaccatggtaatcctcatcagaagctctgacagcacgatttgaggaacaattttctccaatttttatgtgacaacccactaatccac

SEQ ID NO: 16014 - DNA, 645 bp, Zea Mays
gtcgcggtggaaaggcaaagccacgcggcacaaggccgagaggcggcggttcaccggcgaagctatccgcgccagccgcaaagcagaaggggagatgacggtgagtcaccggagtgacctccagctcaccggcggcagagatccttttcctcgcgacgttatccatccaccacgagcgtgaatcttgatgccggtgacacgaatcatggcggggagtcaccggcggtgagatttttctgccgcggccgatctgatccacaatagagcactgtaccatggcgaatggggttcagtcagtctgacagaccgtttttgagcttgtttcctcccaatttcatatggcaacatgatcaacacataatagcaaaattgtagagcaatataccatctacaacattgctatatggtgttaccacaaaaagccaatggatcatgcttgaaattgggcttgaagttgatgtcagtccactgtcagtctgatttcaagctttaagtagtctgacagtccaactttgggcttaattatctccaatatcttcttaacaactgagctcacattcttaagcaaagttgttctcctatgattgggctacaactttgatgtggtgacatagggcaaagaccctagagtttgaaagttacaag

SEQ ID NO: 16015 - DNA, 501 bp, Zea Mays
taaacattgaagatctagtgcactgaaatatttgaaacaaagatctgggcactgttgaatcggatgagttcggatgaatcggtgggggaatcgatcgcgggggaaggataacctcagacgtggcaccaccccgcgtacttagccgggcgtggccagagatattcaccggcggtcaccgtgactcagtgattttccgccgcggtgtcacccatgccttgctcctccctcactttgtctcttccctacgtggtaaacatgcgctaacgatgttatccgtggctgtggatagttagccagaccgccgtgcctataaatagtgccatgaaccccggcgagacactcacaacttcaccagtgagtttgattgaagcccaaaattcgcactgcctctgccacctcttcccaaattgagtgtgcacggtgaatcgatagcactttgcgaccgtgtagctccaatctcacctcccaatttcaccagagctcgtcgcagcgacgttttcc

SEQ ID NO: 16016 - DNA, 723 bp, Zea Mays
ggtgagagtgaagaagactacaacattctgatcccaacgaagcctagtcatctagattttgaaaaatctactgtgacggaagatgacatgcctatgatgatgaaaatgggctattttgaagaggatgagagtaagcttattcgatttgctggagaagagactattccagagccgaagaaggatgaagttgtcgttttcaagagcttcttcagagcagggctgcgattccccttgaatgagatgataggggtagttttaaagaactttgaaatatatcttcattagctgactcccaaagctattgtaggctcagcgtctatatctgggccctttgaagccaagggatgagctcagatgccgaagctttctgccgagtgcatgagctgcactatcagacgaaggccagggcagatggccttcacgaaaattttggttgttacaattttgcgtatcgaaaggatacaaaggcaccagtgcttagctaccgcacaaagtggccgactggttggaaaaacgagtggttctatgtgaaggctgacgagaaagagagaaagaagctgatgaccatggttatgagtcctctgagtttaaacttcagaatgactaggcctttatgtaatatgcaactggggtcaccatgtcagttggctgaagtggaatttagagtggtagctgagcagatcagtactagggacttggtgcaagtatacttggcgaacagaa

SEQ ID NO: 16017 - DNA, 323 bp, Zea Mays
tgatttggcatgatgcgagtaggtaggtttttcttggttgcggtggaggttaggtcgttaagggctttgtcgtggttcgattttagttgtttgcttgtgcgtttagttgggaacttgtggcagagtttagtactttagctgtactgcattttgtattgatgccgcggttatatttttttcgccttgtttctgcgtggatatttgcttaagtattaggcgtgatctggtcggggagtattgccttgtccggtggcttctgccttagatttagagcggattagcttgattaacctgaggtttggatgtagagaatgtagtaatag

SEQ ID NO: 16018 - DNA, 356 bp, Zea Mays
cccgtgcagaagtcgcctaagggtgcagccggactagcacaacaagtgcgaaaaaccgaagtctaccacgaagacttaccgtgcagaagtcgcctaagggtgcagccggattagcacaacaagtgcgaaaaaccgaagtctaacgcgaagactcaccgcgcagaagtcgtctaagggtgcagccggactagcacaacaagtgcgaaaaaccaaagtctaccgcgaagacttaccgtgcagaagtcgcctaagggtgcagccggactagcacaacaagtgcgaaaaaccgaagtctaccgcgaagacttaccgtgcagaagtcgcctaagggtgcagccggattagcacaacaagtg

SEQ ID NO: 16019 - DNA, 844 bp, Zea Mays
aaagggtatcgtctgcatattggacgataggaaaatcttatcatcgcactcctcaagcgctccccgccttgctctgccgcggccatgcctcgccgccacaagtccactgcccgagatcccaatcgacgctccggcctgatctccatttttggccttcggttggagatcgacacttttcggtgacgtccctttggctacacgaccacccaatcaggtgtttgggtcttcgatttgggtctgtagcgttggagatacccccttcaaactactaccggtccggaagccgtgcctcctagccactcacgctcgccgttcgtgatccgttctcgactgttggtgctccggactcataggtcagcccgcgccgccctcttctctacatcccagccttcgagttctaggctgtagatcgattttcgttgacacgttgtttggtgcttcatctgcatcctttttttgcagttctctagtccatattgatggctacattatcatggttgatggaatggtcagtggagaatgtttgtgaggcatttttctcctatttcggggaaaatcagcatgtgagattgccatctaccccagtgatccccgttgatgatccgaaggtgccccttcttcatacatgtttgcaccggttcaaggggacccttggtggcagagagaggcatcgcacctgcttttcgccgaggtgcattattgcaagtggtgacgaagatttgattgaccgcttcagaattgacgctactttccatcgactcacagagatccttgggagttggtctcatgggtactatttcaaggaggaagctattggcttgttatttagtcttctcaccgaggt

SEQ ID NO: 16020 - DNA, 290 bp, Zea Mays
aaaactttagagaaaatccaccctaaactttggctgtcaggagcactgaagaacattgccatggtacagtgcccgggaggataagcttcagaccctcgctgccgacaaccaatccgcgccgtgatttgcgctagggtcaggatgggcgcgcggcgtgcatctcctcgcaaagatctccttgatccgggtaagatcgccgcggtggagtatgatgattccggccgccacgcggccactaatcactccggccatatccggtcatcggcgccgctcctctccgttcatccacg

SEQ ID NO: 16021 - DNA, 748 bp, Zea Mays
aatcgagcgcgttcccggcgatctaaggggtcctagtccaattggcagggtcgaggagcatcaggagaacccaaggatgtcgaaacaagataacagggggcaagaacagacctgggattcgctgaccacggtgagggctcaaggcacggtgttcttggttgatttgggggaaatcccaaattggagagctctggtggacgatcagaggtgagagctggttaactggatgcacaattacatagcggagcaggcgggggcggcaatttataggttccaacagcggtggcgtccaatttcatgaagatgcgctggtggccggagatgaaaggggttactggcgctcgggattagtggcatttaccttggcaacctcatcggcgatgaccagacatgctagagcgagtcactatgatgaagtactgcgtctaggcacgtgtcatctgagcggcagacggctaactccggtgaacttatccatagcggccgtggcacgctcgtgtacggtggccggagtagaatagtggccggagtttatctcccgcgcgatatttcttaccgaggagcgcttatctgagttcggtcgggcgtgaatcgcgatgccgacgcggatctgagcgcaagatcaccggcagcgaggtctctgagttggcgtcctgatcaatgctctataccatcgcgcagctctatcagtcagcctgacagaccattttgtagggctcgaatcacgatttttcatgtgatgacttgc

SEQ ID NO: 16022 - DNA, 752 bp, Zea Mays
ggatgaccgaccaagtgttgtgggagctgctgagttcatagaacgggttcatcccgttgatactaagcgcaacttgacgttcctagcctcttcgccaaacttcatgaacatgttgccaaaatgttttcactagcgagcatcagaagggtgttgcagttttccatcatccttcatgaggtcatatgaggcatgtcaggacattaattagcttagcatccttagggttcccaaagagagcacacaagcggtcgattataggcaggtatcacatcgacaatgtaggactcctcctcgatgtgtaaccctcttcctcttcatcctgaggagggtaatcctacttagtcttcttcttcgtcatactagagggatcatcatccacgcggcagcccgcattcgtcttccatcgactagcactgcaatgtggacaactctctaatctctcgtactcgccagatacagtatgcattggttagggcagacgtcaaacttcttaagtttcattgccactgggcggatcagcttctttgctcgataggtattcactttcactttgttaccctcaggaaaagctttagcaagtacatctaatagctcgttgaagccagtgtctgagaaaccatgaagggacttcagtataagcaacttgagattaaagcgtagtgccatcatatgctacagataatcgcccttctcagagcggatcaattgtcgactgcttaatctctttgaaatttttcatccacctcgggttt

SEQ ID NO: 16023 - DNA, 380 bp, Zea Mays
aatggatggattgtactgctatgttgtaatgtcgtatggtctgaaaaacgccctgccgacatttgtgcgggcgatgagtaagaccttcggggacctgatcagggacaaagtagaggtctacgtcgacgacatcatagtcaagaccaagaggaggtcgaccctagaggaagacttaaccctggttttcgacaagctgcgagcaacccgcacgaagctgaacccggacaaatgtgtttttggcatttccaccgcgaagctgcttggattcctggtttcatactgaggcattgaagcaaacccagagaagatcagggcgatcaaagcgatgaggccccccacccgagtcaaggatgtccagaaactcacggggtcactagccg

SEQ ID NO: 16024 - DNA, 516 bp, Zea Mays
gcgcgacacacgaaaatgatgcgcacgacgagtgggaaacagcgcacgtgacgacgtgcgatagcgcgcgaaagacgtgctacgaagtgtgcgaatgacacgtgatgacaagacacaagagaaagacgcgacaacatggctatgctcatgggggtagataagggtggacatagggtagacggacgtcatcggagttttgacgacgtgctgcgagtaagcgagcatgagtgaacgctgcgaggatgtggtttgggctgttgtacacgtgcggtttggcaaacacgacatggcaaatgacgagggtgaggcgtgatgagttgtgttgcatggactctacgggcagggttgtgcataaggcacgaccacgagctaaggcacaacaactaggctcagcgtagagagatggcgaggtgcatgtggcatggtcaaaggctgacacatgacatagagttgtgggcacgcatgcgctagatggggtcgagatgggggtagacgaacaatgggagtgggttgtag

SEQ ID NO: 16025 - DNA, 586 bp, Zea Mays
aacagatcagatttacagctcagctcgccgccgatgatctccgccgtgattcgtgttgtcgccgtcttgatttgtgctcgggttgatcggataacgctcggagcacgccgtcgtggataagccccggccagtaaacaattccggtcgccgtactagggtcgccgcggtggaattagatgagatcgccggtgaccgtcgtctcacggccttacgccacgtatcgggacacgtccgtcgtgttgccatgactcactataaccatctgatcatcgccggtgagcgctgccatgattgttgccacgaatccactacgccagtgatcctcccactctccggtcgccagcacttctcagccaaattgagcgccaccgttgttgcgctctataaattgaagcctcccagagctctgtaggatcatcacgcacccagccaccaagtattgtcctcgggtgatcaacagtgagctccaatttctaacttcccccaaatcggttcgaatacaccgcaagaacacctcactgcggccagcttgttccaggttagttcaagctcctcaatcatttgtcctagcatccttaagttctcc

SEQ ID NO: 16026 - DNA, 455 bp, Zea Mays
ctgttttgaatggccccataggcgagattccacggtggcggtcatcttctctgtgttctctctctccctcggtccctccctcacgactttactccggtgactttgaggtggcacatatatggctcgagggtggcaaggctcccacatatatactctagggcatcaatgaccgagacctcccaactaaatgactgatttcttcgtttgatgatatggcgaaatccattccgagtgcgagggggtcctggaaggcgatactaccctggcgctctggccccacgtggaagcaaacgcaagcgtgtgggtgttgttgaggctttggcgagatcgcgacacttgttgtgttttaactgattctgatatcctctattgcagtgactttcaacaaagaagatggacattagcaacgaggatgacataaggaccccacctggcgatgaaacagtacaagagcg

SEQ ID NO: 16027 - DNA, 460 bp, Zea Mays
ctacggcaaagaaaagatctcacggcggggaagggataggatcgcgaattggagtttatcgccgtaagtatagtcgctgcgacgtggccggactaccggagtcgccgtggaagcgccggtgacctcggctgcgccacgccgaagcttgttactacgcggtagtaagcgtggcacccttaggagtattctccttgcgccgttacaccggtgactgctacggttacagccaccgtgttcttccctatctccggccgccaacacatcgcggtcaaattgagagctaccgacctcggggtctataaattgagcgcgtcctcaactccgtcaagtattcacgcagctactgcacccacctgcatcccaaaccccccaccagagaactcgaattttggatttcccccaatctgctcaagaacactgcgcagtttagcctccccgcgaccagcgcgattccggtcag

SEQ ID NO: 16028 - DNA, 486 bp, Zea Mays
tgcggtacatacagttagtttccggccgttcccgtacgcagcacatcgatcgatctgattgctacgctggacagtcagctgaaccaacgccaaaagggggaaaaaaaagaagaagaagaagagaagagaatctgcagccgccggcaggcaggcagacaccagcagcagtagcccccaccggccaccggagcacagaaaggtgggtggtttcaaccgtcctcctacctatctatccaagagacgggggggaccagggccacgcgcaagcagccaagccaagccatcatacgctcataacaggttgcccccagattatcctgattccctcggcgaattatgtgcaggcagtcggcagatggtgcaatccaatcccctcttccatgtcatgtcgtgtacagtacagccagtgcacaggcggacaggcctcacctcaatcataaaaatcgcctctatctaaccaggttggtgtcagcagccccccatccg

SEQ ID NO: 16029 - DNA, 508 bp, Zea Mays
  misc_feature (1)..(1): n is a, c, g, or t
ncccgacgcctccttctatcccccgcaatgagctagcatcacacgagtgggtataccttccattgccgccaccgagcttccatagtaggtggctgacctccatagtatgcggtaagtttccaatcagcgcctccgccccccatccatatataataccccattccaaccttggcgcaacctttcaacgacgatgcctaccttccactcaacatgcccaccattactgcttttaaaggaaggacacaggtgatgccgccaacccacccccattccccatgcatcttccctgtcatggatccacatgaacaaggtactgccagtttgttttgaattgtgttctactttctgcattttagatctgatgcacaaacctgattttgactgtcccctgcgcagctaagttcaaacctgaaaagctagaggggtggatgataatttgatgatagctattgaaactggtggatgatagttcaaacctgaaacgagacaccaatttattctacactgc

SEQ ID NO: 16030 - DNA, 466 bp, Zea Mays
atggcaggcgaggcacgcgggacacgaagcaagtgacgtgtgcaggggaaaacggctccctggccacgtccgccatgggctgcgcgaggaaaaaggtcgccgaagggaggggagggaggaagcgacggggaggatgctcaccttggcggacgagtggtgatggcgcggatccgacgaacgatgacgcaacaggtagctctagagaggggaggatgagccggttgtgcagggagagagtcggggcaggcagtttcgagtttatggggtctaggacgtgcgtcgtggaagaagattagagaagcaagcaagcatccggttggggcactacgcctacgggcccactagccagggggtggcgtggagacgaggcacctgcacgagtccgcgtatggcggcggtggctacagccgcgctttgcttgccgatcgttgggccgctgtgggccagcagcggggtgggaaaaatg

SEQ ID NO: 16031 - DNA, 480 bp, Zea Mays
gcaaagtgcatgttgcatgctttattttgaacggtggcgaaaaaagaaagctccaattgcttgcagaaaagaggaaggcacggatgcagctatataagctccaggatgtagagaggcaggtgtctttactcgaaggctgtttgagtttggcacaattcctctccggcttcactccccaggaaccatggctgcgagtttttttttcctcatcggctactctgttcattacctgaatcacatgcatctagaagtttacctatcacgtttacaggggtaagactgaaagttcatatggccacaggtggtggagctgaaggttggaatgcactgtgaaaggtgcgtcaaggccatcaagaaggcgatcagaacgatcgacggtaacaagccggccatcaacccggttctttcctacaccacaaaaaaccgctcgctctgagctcttgtgctgttgaccatgcttgcggtcgtgcgcatacagat

SEQ ID NO: 16032 - DNA, 1022 bp, Zea Mays
aatatagatctactacctgtgccgacataagcatcactaacaccatattgttttttgctgaagtaatggctcaacaaacatggttgtacgcacgtgttccctgtagcacaggtattggctggttagaggtcctcggaaggtcagatgggtctacttcgtcttcaccatgcaaaatgcgatgggcatccgttgtcacaaagactgggcaatctaaagaggttgcgtattttttggcccgcaagagaagcattgcaaattaggacgggtaccagccatcgcatgcataaacaaagcagcgaatttgtgaggactaaccctgtgcaattgcactgtgcctcgggcgcttcgcttcgtggcatctcgcaacacgcacgcatggagaatcaggaatagctctatatatcgcatagtatggaagaacgtcacataacactggtgaaaaaattggcccgtaacaaacaacacattataaaacagatcaggcgtataagcacacaaactcaccacgatcgaaaacgcaaaatggcgagtggtctccatcaagctgcgacaaaattcccccaagcagcaagtacccagatcactggaaaaaatagcccataagaattagccaaccagtaaggatatatctttgcacataggtagaggctagtacctcttttagaggccagtatgtcgaatatcaattccaaagaatctagatcctagtaaaaattgataagctctaaacaggttgggcagcaggcaggaaacctagaccagagggtaccacccagcatctaactgcacataagcatcaaaaaattggaaatgctgaaacgtccaagtaggaagccatagaaatgtgatcaacgattggataactgagttcacttattttaaaataattttgtgaaagtaagacataaatctgctatagaaaatggtccatcataagccttagaaaagtgtagctaaatgtcacaatctaaacacctaatggactgaagcattactctgataatacgaatgtcatgttacat

SEQ ID NO: 16033 - DNA, 628 bp, Zea Mays
ccatccgttagccctcggtgcagcacggtgttgcggcggccgtgtccggtgggtggggttggcatcggcaaagggtccctgaaagttcaaatggattcggcaaaagtcgtgctctcgcccaccacttgagctcgtcaattcgtaagacttgacctgctgtggtgagtggagagtggtgagtcacctgatcaggctttactgcaagattggcgccagacgggtcacggggtatgctggtagtggtagtgcgtgctgccttcgtccaatgttctcgaaaaataaaacccgaagagcgcgattcgtcccgtctccgattggccgacatggacggtgttgtctcctgattatgctcagacctgcgttatattttttggcatgttgtatataccaacaccacagtctcggaataatgggattttccagcagatcgtataatggatgatgacacgagaaaccgatcagggtctgttcccttcccttgccgttctttagttagaaagagatgcaccctccgcggctgctagtggtagctataaagccactagccagccacccccggacactttggctttcgtttcgttcgtcacacgcggcattttacgttacgagttttgtttggacgtaccaa

SEQ ID NO: 16034 - DNA, 753 bp, Zea Mays
ctggtggcaccagactgttcggtgtatgctgacggttgacaacttttccacaatagtaaatgtcggtgtgttgacccgagagacctaccaactagtgaatcagtgttgtgtgcccatatctagatgggtgatgcaagaagacacaagcttttatcctggttcgggcaagagaaggttgtacttccagcagagggaggacgagacttatattatcttgcacccaagtgcttgtagtagggggtataagctagtcgggagagggagaggatcccaagtccctagtggtgattgaggcaagtgccaataccaatcgtggaggtgaaaactcatgaagtgttctccttcccaaatgaagccatggactcctccttttatagcctcatgaacagatcctaggagcgccatggtttgtcatgtaaggagaggaggcgagtccgaacccttgaaccaggaggaggacgtccggtccctgtatttgcatcttgaccgagcagagagccgaggccaggatctggggctcggacacgtacctgagcctgtctgatggaggtgctgtccaaacagtgataagtatggtgataagtgcatggtaattctccccatatggcataaagcggacttgacgttggtcctatagccatcctgttgtcagaaatcttcgtggaggagttggtggtgtcctttggtcgatgttatctaggttgaggccatgctcaggcgagatggaggttcctcccgatgccttggtcgagc

SEQ ID NO: 16035 - DNA, 929 bp, Zea Mays
cacgatggacgctgggcaacgaagcgcctagcgcagcggtgtcctcgccggagtaccgcgcgccggcaaccccagtgcccaaaactgacgccgccaagtgaacaaaaagggcaggaaagatggcgatcctgatggagtcacacataccgtgattcgcgcaacgcgggccccagcagcagcgctgggcggaaatcagattacgacgggcaatcgccggtcctaggtgccaccttcttcactctgttcgccgcccgctggcttcgatggatgcctacgaatgcccctgacgccaaaatcgagcaccccacaccggcgagattgcaggtcgacggcggcaattgccttgacccacacggtggaggggatttctccgatgaagtgctcagccacccgattaatcatgcgagattggatcccttgtgttgctgatcgggggagaggaaaagaagtttggttttatagctgtagtccggatggaggagcaatcttttcccaccggaaagctcggccgccgcccgcctggtttgttgcggtccgatggggaaggttctgacgggttggccccatgcgtcagaggaggctgccggctgaggttaaatggatgagggggcatgaggtctagtctttatatcctgcgcaaagcccgactctggtgcacagcccaacccatgaacgcgctaatggcggttatggcttcctaacaaactttgacttggctgcgatcatcgtggtttcgtcgagaggacgaggcgtttgtggcacaggggccgatgcatgcgggttcagcgacatgcacaggtggttgcatgtgtgcaacactgaaatctgtttgatgcatgcggccaggtgaataaacaaatggaaaacacgcgtatggataatggatcggccaggagaaattggccaaaaggctattatgttcctttttt

SEQ ID NO: 16036 - DNA, 1924 bp, Zea Mays
ccttaaccaagccttgatcatggcgccactactccagcttccggacttctctgagcgcttcatcgtcgactgtgacgcttccgacacggagcttttggtgccgtactgcaccaaggggatggcgccattgcattcttcagtcgagtggtggcgcctcaccaccagaagctgccggcctacgagcgggagttgattggtcttgtcaaagcagtccgacattggcgttcgtacttgtgggggcgtccattcacgatacggactgatcactgtagcctcaagttcatattggaccagcgtctttctaccattccgcaacacacatgggtcagtaaattatttgggtatgacctcacggtggaataccgctctgggaaacttaacggggcagcggacgctttatcccgtcgtgatgaagatgctgcagcccttcacagcatatctgccccaatttttcagctctttgacacacttcgggcagacttggctaatgattcccaaggtatagaactgcgactgcgagcagggctgcagaatgggacggctcctcctggttggaccaagtctgatgggttattattgtataatgggaaagtgtttgttcctgcttcctcttctgtgtggtcttccttgctagctgaagaacatgaaagtggacatgaaggtattcagaagacattgcacagatggcggtcttctttctacatccctttagctgcccgaagggtgcgacagtttgtacaaggctgttcggtatgccagaggaataaaactgaacacctacaccccgctgggttactgcagccgctacctgttccctccgaaatctggagtgatatctcgatggattttgtcaaaggctttccgaaggttgggggcaagtctgtgatcctgacagtggtagatcggttctctaaatttgctcattttatttccctcggtcatccatacactgccgcatctgttgctaaagcattcttcgatgatattgtgcgccatcatggtattccgtcctccattgtgagtgataaggacactggctttactagttctttctggacagaactgtttcgattggctggtgttaaactgcagatgagctcagcttttcatcctcagtctgatgggcagtccgaggtggtcaaccgagtgattgttatgtatctccgctgtctcgccggtgaccggcctaaaagttggctcaagtggcttccttgggctgaattttgctataattcttattatcaaactgccctgcaatgctctccattcaaggtggtttatgggagagaccccctgaccatggtctcgtattttttttttgaagaatcagcagcacgggtggtggctgtggaccgacagatgcaggaccgtgaccttttcttggcagaaattcgggaaagactgcttcaagctcaagtgacaatgaaaacatatcaagacaagagccgtcgggatgtccagttcatcgtgggcgattgggtctggctccgtttacagcacaggactgctgttggtgtcactgcagcttctccgtccaaattagggcccaagttctatggtccgtatcaagtgctgcggcggcgcattggcaatgtgtcttatcagctccaacttcctgcacgtgccaagattcatgatgtgtttcatgtttcactgcttaagaagtttgaaggacccccgccagcggctgttgttcctttaccagatattcttcatggcagaattgtccctacacctaacaaggttactaaagccaggctgaatcgtggagtctggaaagtcctagtgcattgggttggtcggcctgctactgacgcctcatgggagcagctggatgacttcaagcatcagtttcctgcagtacagctcgcggacgagctgtttgttaaggaggggggaaatgttatagactccttctatggtc

SEQ ID NO: 16037 - DNA, 372 bp, Zea Mays
cgggagcatgttataagtgaattcgccaaagcaaaacaggtctgctaatactcttggatcacctgacagtggcagcaagtaacaactctaccagacagcatccgtccccttttccccctttcccctacttttcgtttttagaccatcacaaatctcccctgcaacaggaaaatcggatgtggaatatactatacgtcaaagcagctactaaccttctttaggcttcgttaggcttctaacaaacgcgacgtgggagaaaaaaagtatcgtagaattgtaggcggctcgaatgagaaaacccgaaacacggaattttcttgtcactggcccagagtacccactgagcgactgaaatggaccaggagcccaaac

SEQ ID NO: 16038 - DNA, 286 bp, Zea Mays
ctgttgttatttggacgagcatccttattgaaggtcctgaaggatctttctgtgtccattttcattttcatgtctgcaagcatgattttgctgcaaagtatgtactatgtactaagctcacggcttgtagttgtaggtttggcttcctaataatgtcagcattgctagataagacaaactttttaaatggcgaactgaatgcaatgtgttgtctatgcgaagtatgcgcccatgttaagctgttatactggtcatatgacttgtattgttctacaaatctatactg

SEQ ID NO: 16039 - DNA, 527 bp, Zea Mays
taagcgccgctgccaccccttccgttgtaggagaacctactagagagaggcttgacttacttatactacctgctgcttctctccctcgtaggtgttctccatgcagcggtgccgcttcccgctccgcaggttgtcggcgccgccgtgccgcagccgttctgtaccgagtacagcggcggcttcgtcacaacgtcgggctccaagtggaggtccacgggcctcgtcatggccgcgaagaaggtcgcggagggtcagcctcgcctctatcacattgtttttgttctgccattgctatttaggactttgtatctggtcatgatttgtttgcccagggttttggatgaggaatccatgcccgtttatatggtatcgcgatgcttttgaagttcattgaaacggagtagccgaatttgggtaaaattttgacgcaggtgctttgagcggtctgtgcttgcgatcatttgcttaagggattccgtttttgtttttgttttttgtctgcgaagcttgggattggtgagattctg

SEQ ID NO: 16040 - DNA, 386 bp, Zea Mays
gaggagatgacgaggaccctccttgccccttcagacaggtcaagggcaagattgtctatcttgagcagcaagagggcataaagaagaggcgtctgtatagagctgctcgtgcagcgcttgcagcagcagcaaatcaggctaagcagggagggcagttgaggatttcctctgatcagatcgcctaccgagttcgtcgcctcgcgtctcggactcgctcctccactgctctctccacttcttctgacccagtctccactccacctcccacttcgacagctcctgccgctctcgagtcgtccaccactcccactgtttccaccacctccaccactcctgcttccactgctcccgctttcgctccacctattcctccacctcgcttccgg

SEQ ID NO: 16041 - DNA, 1144 bp, Zea Mays
tggtggttcacgaaccaagaatgggtccacgccgccatcgagcgaggcctcgatgcagacgagggcccacatatcaggtcagggctggatgtggagttagctgcgtcggcggtgttgagcagagggagggagagatggcggattcgatgggtgggagagaagagggcgagcgaaaaggagagaagagaaaaattaaaatagaaaaattaacaaaggtcttggcgtccagcagttaaccaatctcaaggtctcggagagggcctttgttatgtcattgagggcagatggtggcattctccaagatcatttagcagttgaccgacctcaaggtgcaccatttgtcctctcgccacgggccaccgtggagagccactaggcgtcctcatcggcaggcgccataccctagggctttccctacgggacgacgaggtacggtacaatgatgttcccgtccttcacctacaatggcaaggaggatcccctgaactggctcaactattgagagctgttcctccatgggcaacattcacttgtcggggcacctgttccgcccccaaggcacttcttgtgttgccccctggcgctccggaccctagggcatctgttttggcccttggggactggggcacttcgtgtgtcggtctaggcgcctcggtccttggggcacttcttgtgtcggccctcggcgtctcgggctccggggcatctggtttggcctctagggcatatgttctgaccctagggcacttcgtgcgtcggttgttagggcacttcttgcaccgatccctacaacatttgcccccgtcgtcgcggctaactcctcttctgccccacgaggcaactcttccaccctctaggacacctcgtcattggggacttcccgatgtgggatgtggacttctcgatgtggcatgggccagcaactcttccaccctctaggacacctcgagggcatattcactgtttgttgtgaccactcctagatctcgacacctgccagactacgccatggcattcaagtggttgtacacatgtcactccgtcgtcatgggaacatcgacatctgccgccatgaccaccagcacagcttgaggacgagctgtcttgaaggagtggagtagtgttatggcaagtggagctgtta

SEQ ID NO: 16042 - DNA, 623 bp, Zea Mays
taaggaaacgatagcctctaccagcgtgggaggtacaggcggtgggttcggagtttcctccccaccacaggaagttctagccccatcttgagcacaagttctagacgacatctgaagaagaaaacatacttgattattacatgccacgagtacacaacctctgttacattattccaaactggttctaattatacatactcaacttatacaactcacttttccttatttagattacataaggaaacaacctactactatactactctagttatccacgtccttggctactcccgctccactgctagcttcgggagaacgatcatccgcgaggttcgtggaaggaggggctccaaagatatccaactccccataaggtcctctgccagctgctcctgatgttttggctcccatcaccgcaacctctagtggcacgttcggatgcaactggtcatacatcacgtgcacttcctcgtgcagagtgttattatacgcttgcagattttccagggctatgcttagctcttccacccgggctcaggcatttgcctcgcaatcccagtctatagatcgtgaatttacagccctgtctcgctccacaatctcccactgcaaacggttaacct

SEQ ID NO: 16043 - DNA, 365 bp, Zea Mays
tgggcatgtaagtaccgatgccctgcgcccctgaagcacttgaatgtcacctaggtggtggacgccatcgtcgacattcggaggctatccgccgccgttgacgactcagttctacgtcgtcgttccggtcccggcaggtggtgtgggagcttagtaagtgcgcgtacgtggtgtgcgttgtcgtattgagcggagaaattcgttgggggagggtgaattgcttgccattgcaccgtgggtgccacagatttgccgagtgcagtgtgtggggcttggcattgctggaatcgcggtgagtaatccctcaaaagcgtcataccctctacctattaccgccttcggatcggagttcgagcataggaatc

SEQ ID NO: 16044 - DNA, 587 bp, Zea Mays
gtttggaagacgaattctgcatgactttcagtgatttggttggggaatttcgagttccgctggaattcaaagtcagatgggtgctggggatttggaaattggaaagatgactttgatttgtgggataaattttgaggtttgtgaaagggtgtgttttttgtgtttgtgctgggatgggggctcaaggtttgtacgggttgggtagaggtatcgctatgagtatgacaataagtggtgctcttcgatgccgagatcatacagtggagtctgaaaccgtgaatgagataaaaaaaaattactacttatagacaagttagactgccattccgtgattccatgttctgtgactttttccatcccttctctccgtacattcatgttctttctcattcccccttccatcacttctctccgtacattcatgttctttctcattccccctcctcgcgtacatctcacgcctatctaaaattaaatttaaaaaaacacaaatagcacccaagggtattcgaacccacaacccaccaagcaagtgtgctcatagctaccactacaccacatccacatgtgtgtttctgtctacatct

SEQ ID NO: 16045 - DNA, 567 bp, Zea Mays
cttgtactcttcacccgagctaagtcttccccggcgacatcctcgggggctgggcacatgtcagcattatccaagggatccaattgctctgccagaaccattcctaaggtcgacgggccttcagctacttctgtgggaccagaacaatccaagtcagcatcccgaccctcgagatcatgctctaaggtcgacgaggcacgggacgacctcaatccagcatcgggcatggcagcacaagcctctgttgcatcatcatccacaggctccaacaacaagtcctccgggaccatatcctctagagtttgatcaaagttggccaggaacagttcttgcaaaccaataagggcagataatgcaggagaaggaactccactactttcaccactggtgacgaactgccgactattcttccgagttaatggagcctcattttcttcctcctcatcttctacagtgacagcgcaagcagcacacccattgggatcagcgacagataaggcacctgcattgggatcagtagcagtctgggtacacccattggggccagtgtcagttggtccagtcgca

SEQ ID NO: 16046 - DNA, 1010 bp, Zea Mays
ctcgcatggaaccatttgagctcctgaactgctacgatttagaagctcatatcctggtagagaaacaaactgcacatgctgactacacgtagcttgtgttgcgatcacaatttgggtttttttcaccatcatcatgcaaagatagatccagacaaccaacgcgatacaaactgctaactgccacatctctccagtacattgaaaaactggaaatcatagcaagcttaggctctgcaaagttcttgggagaagaagctactcctagcaaggtagaaacgtaggcacggtataatgtttgaggtggtggtagctagttgaaatagcttcatgagatggtgaaaagcaaggaatgacttagcaggcaaggaccaaccagtagaccaattacgaatctgacggtgaaaggaggcgaggactcgtcagcaagtgatcaggtcaatcgcaggtgctagtttttttcaaccacctagaaattgcagaacagaatggcaacaaatgcgttaaaattggcctgtgctcatgtaagtgagaggtctcgatctctcatagacaataatattggcctatgctcgcctaatgaatcaggtgatgaacgtacgcacgcagcaaactaccaccaaaagatatagtcctatgatcaaatcggcaacccaagaacttgtgagcaatccgcatcgacccaagaaccctagcaccaagatttctagatcatggccagtagatgtaaaggagttagaggaggagtggaggacaacataagtaccagcaagaagcatccaccgaagggatagcatcgatcccgtcgttcccctcgtggacgtaggctagtcggtgtcgatgccaccgctgaatctcctgctgcacctgccaatcagcttcgtggatctcatgcagctggtcaaacaattgctgatgctatgtcgccaccgcctccatgccatagctgtcgccgcctcgcgcaccacgagcgcgctcgtggtttgtttccacgatggatggatgagggttgt

SEQ ID NO: 16047 - DNA, 606 bp, Zea Mays
ggtccatggagtgcgggttctaaatcctaaaaatataaggtttcttttgtaaagtgtacccgcgaaggggtacagtcagatctcggccattggatcagacgcgaacggtgtggattagattgattttatcccgaaccggtacgctgcgcgagacgtcggattcacatctgacggttcaaaatgtatgcacccgagttctaacttcgtgcatccgatccaaaaggaacggctcacgctaacctaacccaaccggtaccccaatatctaatctgggccgaccaccgtacatccaacggctagcacaaacccccccttccagcgtcatccccaaacctcgacggtcgtgcctaccgcggcggagcgtcatgaccggagtagcgcccacaccaatcccgccgccatccagaaattaacttgcgctacactgtcctaagatcatggagaacatgaaggaggtgaagaataccggaaatcgggcgcgcagacgggttgttctcgcgttggggcggctctgcggtactctatctactccggcgagtaattctgtcaacgaccgaggctttccggccccaatccgccacggacacgatccacaggcccaggcgg

SEQ ID NO: 16048 - DNA, 381 bp, Zea Mays
cgagctattccgacgccgactgggcgggctgccccgacactcgacgttcgacgtccgggttctgtgtgtttctgggcgactcgttggtgtcatggtcgtccaaacgccagcccgtcgtctctaggtcgagcgcggaggctgagtacaggggtgtggccaacgtcgcagcagaatgttgttggcttcgtcatcttcttggcgagctgctgcacccggtgtccaaggcgtcaatcgtgtactgcgacaacgtctcggccgtctacatgtcccagaatcctgtgcatcacggaagaaccaagcacgttgagttggacattcattttgttcgcgagaaagttgctgttggggacattcgtgtcgcacatgttccggctcgtcatc

SEQ ID NO: 16049 - DNA, 886 bp, Zea Mays
tctgtcccaaggccaagacctcccagaatacgactgccccgcaaccgcctcccagactccacagcgacgacttccctccgctcgttcaagccaccatgcctcgaccaggcgagccagggacgcgccccagtgaaaccttcgccgtcgctgcttccactggcgacatggaggcagagctagagaggctctcgacccacgccgtcgtcgcctggctggggcgggaccgacctgaggtaagcgccgacaggatgaagagggcgttctgccaccagttctgcgtgcgccccgacgacatctccgtagcaagacatcacccagcggacttcgttgtcaccttctcccatcagcaccacagggagacggctttggagcgcagggaattcctctccggcaacctcgacatccgcgttcggcggtggcttccgatgacccaagcagaccctgtggacctcaggtatcacgtccggctatgcctggaggggattccccttcacgcttggaacgagagcattgccaagcgtgtggtggcgagggcctgcgatctggactatgtcgagctccagtcgctgaggaaggaggacacgcgcgccctctgtctttgggcctggacagaggacccgtcccgcattcctaaggtaacttggctaactatctcccgcagatcgtcgttggttcgagatggagctactccaccagctcgtcgctctggctcccacttccgagtaatcgtccacctcgacctcgtcgaggatccaccggaaagtgacggccgctgctccacccgcgagttcaggtgggcgttgggcgttgttgacggggagcgcacacctcgggatcgccacgacccggctccggtcgccattgttggtcgccgtgacgaggacga

SEQ ID NO: 16050 - DNA, 431 bp, Zea Mays
acggcggctagccggagtgtcgtcctgctcaactgcggcgaagatttttctaccccgcgatgttatccatccactccgggcacgaatcgggatggcgatggcacgaatcgcggcggagggatcgtcagcggtgaggtctctgcgctggcagcctgatccaattcagttactgtaccatggcgaatggcattcagttggcctgacagaccgatttgaagcttgattttctcctatttttatttggcaacccatccgaggctctgcaacaaaattgtagtacaatataccatcttcatctttgttacagtattccaagacaaattcttactggattatggtcgaaatggctcacaaacttggttctaggccactgtcattctgaaattcagacttcaacagcctgacagcccatctttgggtctagttttctc

SEQ ID NO: 16051 - DNA, 771 bp, Zea Mays
cggtgatccactgggagtaactaatttaacctaaacaccattctagagttcattccacgtacaccacagagatggctgaccacgagagtgccgaaacatggaccgagagggtgagagcggatctggagatggctgaccacgacagggtgactcacggcgacgcggagagtggatttgggagaaattccaaattagggcgctacggtggacgatcgggcgcgaggagtggttcactgggttcgtaacaagtagacggaacaggtcgatgcatcaatttatagaggacgaccgtgaggagggcgaatttggacggggaggcgttcgcggtgagaagggggaagagtcaccggaggtcgctaacgtggctctaactggctaactatctacggtggtcactgccgagtccttatagcttgcgacgacgtggtgaatctactacggcgtggtgcaatcacggtgaacggagatctccacggcgatgaccgtctagccaagtcgcagcgcaagtgggtacaacgactgagcagtaacagtgccctgatttcatcccctgcgcgagatctttcaccctacacagttatctacacgccaccgggcacgaatcgcaacgccggcgaggatcacggcgtgggatcaccgatggtggtgcactaaacctagcgatcttcgtcaggttactgtaccatgcgaattccttctagtgcgtctgatagagcagattgagaaggtccattctccatttttcaagtggagagctaccgatccatctgc

SEQ ID NO: 16052 - DNA, 392 bp, Zea Mays
cgccgatgacccttcgccgagattagtactgctcaccgtgattcgtgtgtatgggctgtggatcgagctcgccggcgaaaagatctcattgcggatgggttcaagtactgcggccacgctgtccctcgattccccgcgccggcaacgtggccttacggccatcaccggaatccgcgatactcaccgtggttgcgccacgtctctagcctttaaaccgcaccgccatgactcgcagtagtcgtccgttcatcgccggggagcttgccacggtaataggacaccaatcacgcgcgccagtaacttcatgtttctcccaccgccgcgcgtctttgtccaattcaccggccaccgctcaaggactctataaattgagtgcaccgtcgggttcgtag

SEQ ID NO: 16053 - DNA, 642 bp, Zea Mays
ggcgaactggtgagaggagggcacatggagaacccgaatctcaccaagggccaccttttcgcggacgaagtgaatgttgatctcgatgtgcttcgttcgcttgtggtggacggggttggccgtcatgtagactgcactgacgttgtcgcagaagacaacagtggcggaggttagctggatgtggagctcctggagtaactgtcgaagccagcagcactcgaccacaacgtgagccacaacccgatattctgcctcggcgcgggagcgggacaccgtggtctggcgcttggaggatcaggaaaccagattgttgccgagatgtacgcagaagctggaggtggatcgtcgagagtttggatagcctgcccagtcagcgtcagagtagacagtcagcgtgtcgatagagccggtgccaatgtgaagacccgaggagagagtcccctggacgaagcgtaggatgcgcttgataagtgcacagtgaggctcacgtggggcgtgcatgaagaggcacacctgctgaacaacataggccagatcaggacgagtcagcgtcaggtactagagagcccctgccaggctcctgtactcagatgcgtccttctctgacagtagaaccccgtcggtcgcggatagtttggcgtg

SEQ ID NO: 16054 - DNA, 413 bp, Zea Mays
tctggtatgttcgagttactccccttcaagtggaaacccatgaatcatgatgcagacaataaggctatgaatgttttgttctcatgtctctcactctatgaattcgatagagttggacaccttggtacgaatcatgagatctagactaacttagagaaattacatgtgggtaacgattatgtcaaaaccagactctttaaaacctatcgtcgagagtacgagaactttgtacagctggctaaagaaaccattaattccatgaggctaggaagacagttcgtcgctgccgcctcgtctgtactatagaaggtggcatcagtgtgtcagtgtgtgttttcagtatcctgtaatgtctcgtcgtcaaaacaccgggatgcataattaggtcagtattggtcattgttgttgtggct

SEQ ID NO: 16055 - DNA, 374 bp, Zea Mays
aatgtcaagcatgagaaataacctcatcctttgcctccatgaaaaatacccaagagtagcgagaaaagttgtcaacaatcaccaaaacatatcacttccccctaagagagcaaactcgagtaggaccaactatgtccatgtgaagcaacccatcgggttgcttggtaattaccttggtgactgggggatgagaagtagcaaccatttcccatgacgataagggtgacaaacaagatcttcctaaaaaatcaattcagggaatccttggatgaggtcaagtgagctcaatcgaataagaagaccaaaactcaaatgacccaacctcctatgctactttcatatctaagaggaagatcctaccacaagacatcgag

SEQ ID NO: 16056 - DNA, 625 bp, Zea Mays
aacaagcataagcataatttctcaatgaaagtgtacctcgtttcagcatccaccaacctccgacttagataggtcaccacatgctcctttcctccggtctcttgtgtcaaaacagccccaataaccttgtcttcggctgcaatgtataatctgaatggtactcctacttgaggtgcttttaatacgggagacgaagacaaatattttctaatgagattaaatgcttcctgctgttctgcccccccaagtgaattcgacatcattcttaagtcaaaaaataggggtgaaggcatcaatcttctcgaccaggttagaaataaacctccgcaaataatttaccttgcccagaaacttctgcatttcgaccttataggtcggaggtcccacgttccgaatagatttgattcggccagggtctatctctataccatgttcatgtatgatgaatcctaaaaacttaccagccaacactccaaaagcacatttacgtgggttcattttcaaaccataccgacgcattttatcaaaggctttgcgcaaatcagctacatgagaactaaactcagccgatttgactacaatatcatcaatgtagacttccacagtgtttcccaacagctcatga

SEQ ID NO: 16057 - DNA, 689 bp, Zea Mays
catctgtcctaaggtccgggagttgctccttgcgagctctctccataagtctgactgtctctgcgtccaggcgctgagccttgcatatgagatcttctagaactggcttgacttccatgctaccgtcatctcccagacaagcatttagctgagctgattctttcttccaatcttccagaaagttggttcctttaatcccgaaaggttttcggctgagggcgtctgctaccacgttggccttcccggggtggtagtggatttcgaggtcataatccttgatcaattcaagccatcttctttgacggaggttgaggtctggttgcgtgaagatgtacttcagactcttttgatcagtgaagatgtggcatttgttcccaatcagataatgcctccatattttcagggcgtgaactatggctgccaattccaagtcgtgggtagggtagttctgctcgtggggcttgagtaagcgggatgcataggcaataaccttctcattttgcatcaagacacaccccaagccttgccctcgaagcatcacagaagatgacgaaatcctggtgtatatctggcagtgtcaaaactggcacggttgtaagctttttcttgatgatctggaaactttcctcacattttggagtccacacaaacttgttatactttttgagaagttcggtcataggttttgc

SEQ ID NO: 16058 - DNA, 399 bp, Zea Mays
ttaaccatcacagttggttattgaacgttgaattcatgtttgaaatagaaggataattttttgggcatataccatggaggcatcgttgaacaagatcgttattgaaatgttgagttcattgacatgcaacgtgtggctgtgatattcgatgatagaccttcctttagtgaggttgttgctacggctaaggagaagattggttggcatgatgttgacgacattgacgttgatggggtgctaagcgtaggtcctccacccaacgtgcaaagacttatcatcccaataaagtgtcagcgagagtgggataattatgttaaatcagctatgaagacacaaaagcaagtcatggaggtagtggtacgccgtttgttagttgcctctcgccctggagatgaaaac

SEQ ID NO: 16059 - DNA, 272 bp, Zea Mays
ccacggcggtgaggtcgccggtgaggttgccgggtgcaataggaggtggggaggggtgccctatgaccgtgagtgtgtggcggagcttcgcgcactggttaattggactgatgttcactaggaagggggaaatggagctcaccagagtgacggggaagcacggcggcgctagcttgatttgctcggggttgaagcggaggagttggccggagctggtgtggagaggacggggctcgggcggctccttttataggcgcccgggagagggagag

SEQ ID NO: 16060 - DNA, 522 bp, Zea Mays
cgacgttgtctagagatgttgtaaacacgaagcctagctcttctaatttgacgagttctgaactgaagttgtaaaacgaatccttacaatgctaatcttttttatttgttgggtcaaatgccaacatttcgagctcacttgtctctggcctaggattggaccattggagtgatacagatacacctcgcaagtcgcaacaaaatttccatgccaacgtggttggcaaaatctgatagcactttgagcttagcttctagtaccactgttatttgacgttcttttgttctttcttggatggttagcttcttatgaactgagttgactttaaagctcttccatatttatgttattaaagatgaatagactgtagaggttggtaaaattgacatcttcagttttatgcttccagggcagagcactgttgcatagcctctcaggaaatctatcttcatggatcatcgatgctatttacagtgatatgtgataggctggcatatttagtgttgtcaatcaagattcaag

SEQ ID NO: 16061 - DNA, 777 bp, Zea Mays
cccaccggtcagccttgggtcggagtcttcttcttccccgcgtgactcgctcatccgcacaccggtcagccatacatgccctcgcccggccggactctcatgcgcgcgctcgcctgtggacccgttgcccaccttgccacggaccacgcatcgtctgaccgtctcctccccgcgcgcgctcgaaatctacggaactcggagtgcatgcgccaatcgcggaggtagttgcgggcgccatggacgaactccccggggctataaagccataggcctaggaccggttctcctctattcctcgtaacccaccaccattgccgtagaaccaggtggattacgccgtcgtcatcacgcacgggtggtccgccgcggtagaaacccacacaccgcccacaatcggaactcacggctggttgtagagcttcgctagaacgcagggaagctgctcagtttttctgcgggcgaagcttggagccggggctctgccaatcgctcgtcggcgtctggcttctatcaccgggccgcgccacatcgcgagacgtgttctactggcagagttcctccccggtaagctttcaatcgggttcgcctcctccttccctttagaacggtataggattcgctaggtttgatccggttggtggccggattggtcgaattccggcgaggtctcggcctcggatcggcggcgccgtgatagtgctgcgttggggcgctgttggtagaagtgggcttgcgaaccatacgtctcgcgttggacggcttagatttggattggcg

SEQ ID NO: 16062 - DNA, 859 bp, Zea Mays
atcaatctatggattttgaagctaaggaccatatagcaaagtcaaaaaacgaagaaaggtgaacaagttttatgtgaagtactgggcctggtgtagtgcaaaactgggagtaaaatgctcttcaatatgccctgtcagcctgtgtgataagagatcggtttcagttaagggaaattggtttctagtgcgtgagctcgagtttggggctgcgtatctatggatccatgcacttgcagcactagagtgttatagcaaaccttgagagctatattaggtgaataagtttgcttagatgaagtcggcctgtccttgttttgaattgtgagaaaaatggggatgaactggaggggtgcaggcgtgtgaagagggtccttgttctgtggattccaagttggttcagaattctgaaaatggatatccacgcactacttctgtattcagtgctccagctcggattttggggatacggtcgagtgcaaaggtgtaccagaggaggggataactcaagaaggtttcaccgccgtagtgtttggatcgagtgagctggacacctctccaaactagtgactaggttgctgatgttttgctgtcagcacaccacgaagttcccagtgcttctctgtaacttgggcctgcgtggtgccatggtttcacggccacgtgcccaagctcatgcacgctcttacctccccacgtaggccttatttggtggacaaacactgcatgttcaccgtgtttttcttttctgttgccgtgatcgccagacgccagagctactcgttcgcgcttcacagaggttgttggcgctctcgtctccgccaacaagagcataactgccatccttcagacttgcccagca

SEQ ID NO: 16063 - DNA, 299 bp, Zea Mays
tctacagctacaaggaaatcggagggcaggggcaacggaaacttcgaactgagtcccagcagttaaaagattgacggggctgcactgaatggaggaacgacacaacaagactaatgagcgcagagattttcagaggtgtagataacgcagattgaattgaaggtgaggcatgtggggtcgttgataatgaacatgaagcgcaagatggacgagggaggactgacgctattgctgttactacaactacaaggccatgcctgacagatggatcgtatgcactactgcttctgatttgcgag

SEQ ID NO: 16064 - DNA, 685 bp, Zea Mays
tgagatgtggctgcacacgtggctatgtgtgatgtgtgtcaaagagtcaaggttgaacatcaaagaccagctggactattgcacccgcttaagatacccgagtggaaatgggaagaaattggcaaggatttcattgttagtctaccccacactcctgtagggtatgactccatttgggtgattgtggacagactgacaaaagtggctcacttcatacctgtgagaactaattacacagagcccaagcttgcagatttgtatatggttcggatagtatgtttacatggagtgtctaaggagatcgtatcggactggggatcacagtttacttcttggttttggcggaagttgcatgagtacttggatacacggttgaatttcagttcggcctaccatcctcaaactgatgggcagatcgagaggaccaaccaagtactggaggatatgctaagagcttgtgctcttaaacatggtgttagttgggataagagtttaccgtatgtggagttctcctacaataatagctaccatgccagtttgaagatgtcaccgtttgaggctctatatggcagaaaatgcagaactccactgtattgggatcaaactggtgaaaggcagttctttgggcctgaaattatacaagaggcagaagaacaagtgcgaatgataagggagaatttgagaa

SEQ ID NO: 16065 - DNA, 1678 bp, Zea Mays
tcctcacagttcggtcccttaccgaaggttccgtttcctccatttgacggtgaaaacccacgtctttggatcactcgtagcgaggactattttgacttatgcaatgttgatccctccgcctggatccgtgtgtctacaatgcacttcacaggaccagcctctcgctggttgcaatcattaggcccgcggtttaggtttttcccttgggcagaattcaccaaactactccttgaacgctttggtcgggatcaacatgacgccctcattagacaacttttccacatcaaacaatccaccaccatagcagcttatattgaacaattctcaggaatagtggatcagctattggcttatgagtctcacacagaccctcgcttctacactatgcgatttattgatggcttaaaagatcatatcaagtctgctgtattgttacagcgaccttcgactctcgatactgcttgtgctcttgcccaattgcaggaggaagtctcggagccggggcgagcagatcatcgcaagtttatatccacttcttccacaagaccagcttattctccgctgcccctgccccgacccccacaacctgaagcgttggtggctgattctggcaagctgaattccctgcctcgctctcgtcagatggatgataaacttgcatcattgaaggcttatcgcagagctcgtgggttatgcgaccggtgtgctgacaaatgggtgtcgggacatcgttgtgcaccaacagtccaacttcatgccctggaagaattgtgggaattaattgaagacaagtcaagcactaacgaagtggatactgggctctcaccaccaggcgagctactgtctctctcactgtcagcagtttcagggattccttcgcgccggactatacaattctcgggcgaatgccaagggcatcctattgttctgttagtagattcaggcagctcacattcatttgttagctcaacattagctgagcagctctctggtatatctcctctacctcatcctgtgacagtccaagtggccgatggaggcaatgtttcttgttcccaatttttcagctccatttcatggtcagttcagggctacacattctttactgattttcgggtgtttcccctaaagacttatgatgcagtgttgggcatggactggcttgaacaatttagtcccatgaaaattaattggacagaaaaatggttgtcaattccctacaagggccataccgtggtacttcaaggcaaatatcaatatacagacagtccagacttgttccatgtggtctatttattgcatgctatggacagcgactcggcaatgggggatgttgatcccaaaatttctgaagtattgcagagtttccaaccagtgtttgatattctgcaaggtctacctccttcacgttcttgtgatcactcaattcctctaattcaaggttaccagccagttttcattaggccataccgttatgccccagctgtcaaagatgaaatcgaacgacaagtcaatgagatgcttgcgtctggcataattcagcacagtaacagtccgttctcgagtccggtcttgttagtgcggaaaaaggatcaatcatggcgtttttgtgtcgatttcagacatctcaacgccctcacggttaagcggaaataccctgttcctatcattgaggagt

SEQ ID NO: 16066 - DNA, 389 bp, Zea Mays
gtaacttagacccatccttagtaatattttatgagtatttctcttaagctttagggttttctctatttgggtcctgttttacccctcagatccctatttaaggttaagcacccacactagggtcttatttgcaaaatgccataacaatacaacttgcttgaaatttttgcctagtgaatgcactctaagtgtgtcaaacatatgcaatgccaatgcttatgatgtcatgctcaagttttagtaacagtaacaccaggggtgttacaatgtccccatcttcattgtcgttgttgtgtcgcccgctaccctcctgcacaccgtgacaactaccgttgccatgtttgcctccctacccatccactagatcaacttcccctccttgccatcgc

SEQ ID NO: 16067 - DNA, 642 bp, Zea Mays
cgcacactagccacacgcccatgccctcagcgtgttggtctaccatcactgccagccctgttgtgccgtgcctatttaagcaacgatcagggcacactgtagcaccccacgccacacttgacgtctcccgcaagtcttcaccgtcgttcaccctcgccagagcacacgctaccacttgccatagccgctgtcaatcggtgctcgtggccaaactagacccatccctctccggcccagccaagcgcatggacagcttccccaagctacagtgaagcttccccgccacttccccaatactctacggccttgattggcgcgccaccgctagccaacaagttcccctccgtctacgctcgcgaacacgcaaatccaagccgcctccaactaataggagcccccagcaagtttcacaaagatcctcgcgaagctcagctcccaatatgtttaccaagaatgctaccatgccaggaagcgatttcctagcatgctagcgacctctctctgcctaggtgcgtagagcggagaacttcgaccatctccgaccgataatcgccgcctttgatctcgccggaccaccccgaagctcctcaatcccttccccggcttcgcataacccatataaagaagttgagcctaactatg

SEQ ID NO: 16068 - DNA, 324 bp, Zea Mays
gccgaagaagcctcgccgacaaactcgggcactatggtcggttcaataaagcacggtcggtgagtaaggacttttacccttttcctcttcggcacaggctcgcttggagcagccgaagcatcgtctttcccggaagttgcttcttttctctttcgcccccgtagagggtagcggtagtcagggtatataaacccaatagcatcaaaaactcgattgaatcttttcttctttcggccttcgaaagccgcggataacgcagtatcttctgcctttgagtatggcccaagcaattcatcgcttgtagcttcaatacatttcagccaa

SEQ ID NO: 16069 - DNA, 858 bp, Zea Mays
tcgctgcgcagcccgtctgagcagtggccatgatttggtggatgagttcgtcgctagcggagtgtgtcctctagcgcacgggtgggttttgggcgaagttatacctcgtcggatgccgaccctgggggataaactagtgcgaagcccagccttcggtatggacttgcgtgggcgggatccggccacttttgtgcgggaggtggactcagaggctgttaagattgtcagaaaatatgcgctgaagactgagatgctaaaaagctaggatatccgcggttccaatgtgaggttgaaccgtgtttttgagttaaatagtctggcatatggtccctacccgtagggggactctattgacgccggtgatgatcgaggaaaacaagtgaaacctcggcctaaagagcgcacctcaaaggggaaggctgtggttgcagccacccagaaaaggaaattagaccagcaaggtacgagggatgatgagactgggccgagggcctctcggatttttgttgaggagttaatggggacgtgcgtgggtcctggggaggtgaagtctttgcccgagctccgggaaacttcttcacgcatgctgaaggttaccggggtcgatggcataggaatgaccctataccctgggacgctggcgatgatttttttacatcctgtttggctcatgatctaagaattttttcttatgagagaaatattggtgttgttgtgtcagcattgatggagcggtgttggggaccagtgaggtgggctaggagttgttagtggacgactacctggtgggtggtgttacaatgtttgacgcccagaatgggctaccacctgctggtgagttggattacttgattcttc

SEQ ID NO: 16070 - DNA, 338 bp, Zea Mays
gtccaatctaaagtgagttacttaatggaccagttaatacttgtgaaatagattagatcctatccacatgttttaacctagttcaccctacactaaataaagaatgatagaccaacccaaccaatagattcatgatggattgcataatctgtctatccccacctaacatcaaacaaacttttgacatatatcatgtagtccatctcatccatatatatcttaaacatattccccaactacgatgatatacactcaatgagaccaagaccagagaaggacaagctcaacctcgtcaagaaaggagagaagtcaaacttgatctttagaggcattactac

SEQ ID NO: 16071 - DNA, 534 bp, Zea Mays
gcctaagggtgaagccgggcacacgcaagaagcgcacgacaccgaccgcgggaagcgaagtccccatcccaccaaagtgccatgccaacacgattacaaatcgagacaatcttacagtaaacgcatcacacgatgtcatcatagtttacatacacaaaacgaagggcccatcggccacatcgcacaaataatacaaaacacattttgttgccctccctctctattgcgaagcgggggagggcagtgttttcactcactatcgcaacacgagagcgaggccagcaaacatgctacatcggctcagccttcggaataagatctgcctcccggaaattaaacaacatcatcttcaactcttcgccctcaaatagattccgcaagtccccctccccaatacacgccccggccatcgaggatagtaaatcgagttggctaccccgatctaatcgaagacgggatcgctccatacccatccgacgacgcttcccacttcgtgacatcccactaacactctacttcgacaccacctttcac

SEQ ID NO: 16072 - DNA, 418 bp, Zea Mays
gaagtgactctgagaactttgaaattcctagtgtagttataaaagaactcagtgaggctgtgtctgcagctgtgaggttactctcaaagttattgaactttgatcttttcatccgcagcataaacggtgaaaaaatcacttctttgctaagaagaacgctcaaatcaaatttcccccttcagtcaaaggattgtcttgcggcatgcctcattaagctagaatccagagctggcttatcaggagatcatggtgttagtagtatagatatggagataactatctatgagactattccaaggctaattgagcaaatgatgatatcactttcgtttgaaaataaaagaagtgctgtaatagagctcaacaagataatatctggtggtgtgctggaatatacaagagcagtggcagattctgg

SEQ ID NO: 16073 - DNA, 354 bp, Zea Mays
ctttgtttacagagtctgaacctaactggtatgcagtcctagttggtaataagaagcatacttttaggttgacaaaaaaatattttcccacctcccgacgttgcatgaatcttgctagaaatccaggcaatctctcatctctgaatgtcacttgagttccttttatgaggtgccacaaaattgataatcaaaatcatttcaaataagcccactctactgcaagctttagactttgttgatcgatataaatgtttttcctcttttatcttaatagagaaatggcaagcagcaacacagaatcaacagagacaaaaataatggaaaataacacattcaaaatgattgagatcccta

SEQ ID NO: 16074 - DNA, 451 bp, Zea Mays
cacaaggcattgagggccctgtgtcagatctatgaagaagaagtggccgacacaccgctcagattctttccaccctttcagagagaccgtcccgtttggatggctaggatgcgtgcattggaagagcagcagctgcttgaggatgaccccatagtcgtgtacctcactacctacctgctcaccctggatgcgcagtatgatttcttggctcgacaccaccgtcagatgattgcccgagcagaagatgaagagaagctcaaccgtaagctccatgtggatctcacctcagctcaagcccgtgtagctgccttggaaagtcgtgaagtcattgctgttgaagccctgaagcaagccaaggatgagcatgtccagaagctgatgaaggcctacttggtaacccataaccaacgtagagccctgcggatccaagagcctgctttatccaaccttg

SEQ ID NO: 16075 - DNA, 490 bp, Zea Mays
agttctggtgagaaatttcggtgacaaagagtgccatcccgcccggcattgccataacgagcttctacgcgcctggagatccccgatgaccatgccacgcataccgaacgatggtagatgagcggaatcacgacgatggcaacccacgcaaaccctcctgctctcctcccccggtggtggtcgcgacatagctgtgaggcgcaggcgaatctaaccatgggtcaagggaaagcgcaggtggtcgtccatctatttacggctgggcaagcatcaaggtggagtggtggcagagtcggacccgagattcctggcggctccaccggattcagttgcaacaaaccgagtaagaagacggagtcagagacgctggggggtaaatatggactttgctgcaacgattcgcggagttaggtagttggtccgagcggaagccatggaggtgaatcttatcagccagagtgccgcacacggcacgggtcacttaccccgg

SEQ ID NO: 16076 - DNA, 641 bp, Zea Mays
ctacttctagtctttggcggctcgcggtaccagcacctgattgctcatagtagtggttacaagtgggcgagagagggaaggattccaagactctatgtattgtttggctagatgatctacgtatctcgtgtccgctctcctctcgttgggtcgaccctccttttatagaccaaggaggggatcagttataggtatcttctcttggaagggatcatcgtgctgggtaaaatggaatggttcacctctggtaaaaaccttgtagtgtgttgatattcggcctcgtgtaaatcataggtcatgctcctttaagattgctgggaaacatgcctgtgataggagcccgagcatcatcattactcctcatgcctgtctcttcccacatagacccttggtctttgtagactaacctttagctttccttcatcgtcttgcgtgctttgtaggggtcagaggactcaggcatagggcccttaggtcatgattggggctcagtcctagggcctataggtcatgagtggagcaaaggactagggctcgtaggccatgaatgggaggaagattgactccctcccatgttgtggcttggcattagacgtagttaatgcgacgtctgcggtattgatggaaagagtagtccatca

SEQ ID NO: 16077 - DNA, 365 bp, Zea Mays
tggagaaattttagctaattatgaaatatttcttcatcagctgacccctaacgccattgttaggctcagtattttcatctgggcccttcgaagctaggggatggacccgaatgccgaagctttttgtcgagtgcatgagctacattaccagacgaaggctagagaagacgggctccatgaaaattttggctgctataacttcgcgtatcgcaaggatacaaaggccccagtcctgagctatcggtccaaatggccaactggatgcaaaagtgagtggttttatgttaaagctgacgagaagaaaagggagaagctgaagaagctggtcatgagcccactaagcctaagcttcgggatgacccgac

SEQ ID NO: 16078 - DNA, 606 bp, Zea Mays
aaattaactaatgggcaagcatcactgacccgaggcgaacctagaataagccttaattgagttaatcagatcctagattcacctacccacgatgacgacgatcaccgaggtcaaactaaggcattcccgacgagtaagcgtcgtctagctcatttagttgagccgacaagcatcacaagcatgcgagggtgctaaaacacgaataaggagggtgagtgcggacttgagagcggctagccccgacgggggtgattcacggcggcgcagatgaccaatttgggggaaaacccaaattctacggctatagtggctaatcggagctgagagttagtgtctcgggttcgtgataacttggcaaagcagagtggggcatcaatttataggagctttaggcggcggctccgaatttgggagaagagtggagcttatcttcctggtgaggcaatcaccaaggctcaccgtggagcgcatgcgttcacctagcgactgccactatctcggggatgccacgatcacggcaatgtggtgaatcaagcgactacgtgtcccttgctgcaatcacgacgagcaccgatggcgatattttaccgaccacgcggccaagtg

SEQ ID NO: 16079 - DNA, 687 bp, Zea Mays
caccaacttagctaatataatcaatatgtacaggagctgaaaatgactagtacaaaactgccatcccctccccggctccccccactcctttgcggggctgcaactaggagttcaggctcctagcagctctctgtggataagtagctctagctaccgactagtctcaaagatccacatgaatttgctaccacagaaatcaggattatctcaaaaagcatccatggcaacactgcttcgtgcgcaatcatgcaggaacttctgggccgccctttcttgtacactggatgaactctacattaccccaaccacaatggggccttgtttgtgcttgcgcatggctggcaaactgaagacagtctaaaagattgacaatagttccttggatgtaccaagaactgctgccaacagaaaaaaaaaaccgtggggggcttaaaaggtatcacccgccaatgcttttggcagggatcctgacattttcgtaccctctcagcgtctccgcggtaaaagattccagcgcttcgaatatcggagccagacctgccttcagatcagccgcgctggcctcgcggatctgcctcacggtttcctcgtgctcgtgccgggccctctgttcgtccaatcccttgtgcaacgagtccagtgcaaccatgcggttatcaactgccctgccattgtcggcaacggcgg

SEQ ID NO: 16080 - DNA, 407 bp, Zea Mays
acaacggaacacagttcggtgctgaagctttcaaagagttttgtgaacaaattggcacgaagaccactacttcatcctttcctggcttcggagtaatctcctccccgccgaaacgaaccagctccttcttcgcttcactgaaatagcccaaattcatcagcttcggcatgtcaccttcggaaatggtggatttcccaaactccaggtggctgggtttagttggcactgtgctgtaatcatcttctgactcaacttcctcagcatcagcttgctcagcttcagcggcaggtgcatcctccgatactaccagccctgaacgcttcatcactttagagattgtagcagtttcggcaccttcggcttcctctccgtcgtgagtaaccctagctgttgaacgtactctggcc

SEQ ID NO: 16081 - DNA, 617 bp, Zea Mays
aaaatgggaaacgcacgaggggcttggctggccatttggcattttggttcatgtggacacgctcacgcatcatctcccctcgtcctctcatccactgcaagcgggtccgaatagcagcatgttcatcttccttcatacgttcgtgaccaacactccatcgcgcactcagactttggcccggctgctcgcggctacagcgcaacatttgtgatcaatggcgcaccaatctgccgtatccctcccctctcgcctatataaggacaagctacctcccttcctccaatcgcaagcaacacaatagaccattttactattcatcttccccatccacgccattctcactgctgctgttcctgctcgtctctacgccgcgtcagctctcctatgtgacgttctcctccctccccctctcatctcccatccagtgaagcttgtggacgcgcctatgtcgcccagccgaatcgccaccactactgcgccgctctgaaccattcctctccctttcttattcatggcggcagttccttccccatctccattaacagccaacgctattattggagctccatcgctagcgtctctcggcctcctctgctcgcctataaaatcaccccctc

SEQ ID NO: 16082 - DNA, 516 bp, Zea Mays
gtcccgtgagacccccacgctcgagccgttggatcaacacttaatggccatgatccactttaggcaaagggtacgctacttcagatccgtcccgttcgtccaagatccagcggcggatacctccatgcaatccccggtgactaagaacagtggtgccaaagcccatggtgacgcccgtgcgccccatggcggaggtttcccaacgtgaacccagccctacccgcccgacacccatacgcgaatccacccggtgctaaacgaagcagagaaaatgatgaatcgatttaggcactccttacctaggttggtgacggtggcggtgctgcacacacgatcctacggcacagcgacagagtagtgagtcaggtgagcaattctgatatcgcaacacgtcaccaagacccaggcgaaactcggacacgatccttggctcccgacaacgctccctggtccagccgcaaagctccacccgttgtaggggccagaatcgacgcgggcggcaaacctccagtcgta

SEQ ID NO: 16083 - DNA, 499 bp, Zea Mays
gctgcttgcaagcggggattgaaccatatgtgggtgcgtcagcggggtgtgggttgatttagaaaaattaaggaggaagaagcgcggatgtgggtggaggaagaagcgcgaggaggttgcgttatggcacacggggatggtaggcgcgtgagaagcgggcggaggaagaagcgcgtggaggttgcatgcatccctatccaggtgcgtgagaaaggggcgaccgagatgaggacaacggaggttgttggcgacttggcgtcgttccgatgtttgcggtcggggcagcccgtgcgcggagtggtaaaaagctcgattgatctacatgatacactgcgcatttggaataaagttgtcccgtccgtggattgaaagggtgcgaaataaaccaaaccatataaaaaactgaattcgaacaacagctacatatccgaatctatctagatcactacctcacaagagtttactgtgcgtcctaaagataaacccctcctaacttcag

SEQ ID NO: 16084 - DNA, 435 bp, Zea Mays
aaaagactccaggctctgtcaggaggagatcccatagaagatgatcccactatcgtctacatggccgggtacctccacaccctcgacaaccactacgatgagctctcctcccactgtacccacctaaactctcgactggaatgcctagagcagcaagtcaaagagcttacgcaagagaaggtatccctccaggagagtcttagcatagcggaaggcgaggaagccaacacccgtgaggcctatcggaccttgaagatagactttgacaagaagctaaaggcactcgcccccaaaaggaagatccagaagaagaccactaaccaaggatgccagacagagaagaagaagaaggcccctctagccctacctccccccagaatcgatgactggtccgacgaagaagatgtatccctagccagcctcgatgatcttctc

SEQ ID NO: 16085 - DNA, 491 bp, Zea Mays
cgggcccgcagaactagcaactcaagcatcagggtggggagaagcagcatcctcagggtcagcattatctgccacgaccgaggtagcttcgatgtcgctggagggcatggccgctgaataagacccgacatcgagcagaaggccaacatcgcacccggcccctcgacagcaaggtacgcggatcttgcactgccacctagcagccccttacttcaacctctcttgttgctcccgctccgatttcaatctttggtcgcggccaaaaaaagcagaggaagctgaggctgagaatgcgagtgcggggtgaaagccacgggtagccccctcccaaatatacagacaaggtgcactagccaatccactgagattgaaactgaacccccacctttaaaagtcaaatccaaaagcgaattttgtttctcgaatctcgtgcgcacgcgtgcgacaacggatcacccgtgggcatcacgtcccatggcattgactcccgc

SEQ ID NO: 16086 - DNA, 786 bp, Zea Mays
gaaccaagagcaaagaggaaactgagcccaatagcagggcgaccggcctagactgggtgcactcgttcccctggcctgctccaacgtttgttggttccccaagctgcttggcatacaatctcgatggactttattgaagggctaccacggtcttaaagttttgactgcatattagtggtggtagacgtatttactaagtatgctcactttattccattgtcccatcctttttcagttgttaccattgctcagtccttctttcagcacgtttacaagttgcatgggcttttagttgctattgtgtctgagcgcgataagattttcacgagtattttttggaaggaactcttcaagctagccggggtcagtctccacatgactagcgcttaccatcctcaaacagacgggcaaacaaagcgcattaatcaatgtctcgatacttatcttagatgctttattttcacttatccttccaagtggccagttggattgcttcaacagagttctggtataacaccagccaccattcctctattggcaaatcaccatttgaagtgttgtatggatatgttcccaggcactttggtgttcaggtcccgaactcttcttctactgatgcaacatctccaccagaccaaacaacatctgttactgcagtagcatctccaccgggccaaataacgtttgaagcataaagcggataagcacaactctgagcgtacattccaaatggggaatttggtattcgtcaagctccaaccgtatgtcaagacgtctctagtctcc

SEQ ID NO: 16087 - DNA, 507 bp, Zea Mays
tgcattttctaaataaaaaggacctaaattaaatctttcttaacggcacaaagacgttgggttgattctaagaaaacacgagggctccttatgaagtctaccatggctgactcaagcgcacttaccctgggccatccgatctcggatctaaggccacattagatcctcaccctctcacgaactggtacgctcacaggaccgctgatcccaagatcttcggcctagattgcatctagccaaatctatttctaaaatctaattatggtcgcctgttcgccgatcaatgaacaagacatttctcttcttgctctcaccgcacgaccactgcatcgctcacagatcccgcggcggggctcaccggcactcctcaatccgaccacccccagctcctccactctcgtgaactgatgtgtatcgtagcgcaggtctaagcgaacctatgagagcaaatatcacctatgacggcgctgcgatgttgccggcccgcggcgcaaaacggatacgcgg

SEQ ID NO: 16088 - DNA, 973 bp, Zea Mays
ggctgcctaacatatacctcttcctctatatacccatttaaaaaggaacttttgacatccatttgaaaaggcttaaaaccctttgaagcagcaaaggctaaaaggatcctaatggcctctaaacgggcaacaggggcaaaggtctcctcataatcaattccctctttttggcaatacccttgggcaaccaacctcgccttgtttctcactaccaaaccatcctcactttgtttgtttttgaaaacccattttgtaccgatgggatggcagttagaagtaggtggcaccaaaacccaaacctaatttctttcaaaattttcaagctcctcatgcatagcattaacccagttaggatcagataaagcatgtccaacatctcggggctcaaaagtagcaacaaaagctgagtgagcaaaatgagaaatgtgatgtgacctagagcgagtgactcgctcatgaagctccctgatcatctgctgaggtgggtgacggcgctgaatatgctgtggagcctcccttgacgaagtggcctccccctcaacagcagcttcaactcctccagtctcagcaggagctggctcgagcggaccccaagtggtggaaggagtgggtcaggtccgtcagctgtagtagtggaagcaggctcgactggggcggccggtggagttggctcgagagcaacccaatcggcgtcatcgtgctcctccataaagatggtttgtcccatctgatctggacctgcaggctttaagacaggggatggacatggtgcaatctcatcgaatgtaacctcacaaggctccataatgtggttagtctctaggttaagaacacgataagcatgagaatgtaatgcataacccagaaaaactccatcagaagaccaggactcaaacttgtccagattaccttgttttagcacaaagcatctgtagccaaataccctgaaatgactgaccttgggtggccgtcc

SEQ ID NO: 16089 - DNA, 390 bp, Zea Mays
gttcgactcaacgggagctgtccgaataaacgagagtgctagcaatcacatgacgcagccaagttcgtacgacacaaataatgcgtcgtgttgccaggacgcagccaatgcatagttgatgccataacttagccgattaataacgcagcctggtcgacgtgtccgagtacccactatacaatttaatcactcatcgtgagtttaaaagctcaacacaatataaatatttagagcgatttaagaatgcacaatatatccttcatatctttctgctaattatttactacggaaataaaagcagaaaaataataccagatttaatccataaacataacacatctgatgtaaaaaaaatgttctcatgtttaagcacacatttttctattaatt

SEQ ID NO: 16090 - DNA, 466 bp, Zea Mays
gaaactacatgatgaatcttcgacccactccttcctaatcaaggagtctttgttcagtaaattcttgttctctaggaagcacataaagattttaatttagggtttttttcctttccaaatatgtttcaggaatggaccatgagtagtgttgttcaaattattgtacaaagaacggttgtctggagctagccggagttagctctgatgaacaggaacttgaccggcaaagtcacccaccagcaagtgaaacagagcagcagcaatgacaacaatggaggattctagtgtgaggaggtgaaggggaggcgccgaaggggacagagtgatacgctgatttggtgatcagggatcacggaggaatcagagaagattaagggggaaattagttcattttccaatcaatcccttccaatccccctgatctccttatcattaaatcaaccttataggagagaagggaaccaac

SEQ ID NO: 16091 - DNA, 816 bp, Zea Mays
attgtggtctccaaccaaggacggtggagcagcggctccaacgagcctataccggctggaaaacgcaatgattggtgctccggtgcggctgacacttaattatatccctaacgaccatttcccctcaatcaattgcaaagctctagcttctaatcactctgcccacggtgacagcgcaaactacggatgaactgaggcattcctgatgatcctacgtgttctagctcaattggctgggtcgagaagcatcaagagctcataagagagctgaaacaagagcgaggagggaatgatcggacctgtagagcgatggccacggcgaggtcacacactgtggtgttctgaatagatttgggggaaatcacaaattggggagctgtgggggatgattggaggtgaggactggttcactagatgcacaactacctagcggagctcacgggggcggcaatttgtaggttccatcggcggtggcgactaattttggagaagacgtgcggtggccgagaaagagagtgagtcaccgtggtggtcagccgtggcgatcactaggtaatgggctacggcggttactgggcagtcactatggcttgcgatgacgtggtaaatggcctaaggcgtggcgcaaccatgggaatggtgcatattccggtgacgaccgctcggccacgtcgccggcgcaagtgggcatggcaacagtgcgaaacagtggcccgagttcatcctcaacgcgatatttctaaccccaagcagttatctgcactttactgagcatgaatcgcaatggcggcgacgatcacggcgcggagctcaccg

SEQ ID NO: 16092 - DNA, 812 bp, Zea Mays
tgattgagcaccatctgaagatccaccctgacgccaaaccgatgagtcagaagcctcggagacagtccgttgagcggcaggacttcatccgtaaggaggtccggaagctgctacacgctggcttcatcgaagaggttcatcatccagtgtggctggccaacccagtcatcgttccaaaggcaaacggaaagcttcggatgtgcatcgactacaccagccttaataaggcttgtcccaaggacccgtatccacttccacacatagatcaaatcatggattctacctccgagtgcgacctcttgtccttcttagatgcttactctagtttccatcagatccacatgtctagggaagataggaagcataccgcttttgtaacagtggatgggctttactgctatgttgtaatgccctatggtctgaagaacgccttgccaacatttctacgggcgatgagtaagacctttggggacctgattagggacatgatagagatatacgtcgatgacatcatggtcaagactaagagagggtcgactctagtggaagacttgaccctggtcttcgacaagctacaagcaacacgcacgaagctgaacccggacaagtgcgtctttagtgtctctgctgggaagttgctgggattcctagtttcgcgccgggccattgaagcaaacccggagaatatcaaggcaattgaggcaatgaggcctccagctcgaatcaaggacgtccagaagcttacggggtcactggccgccctcagccgcttcatctcaaggctggctgagagggtgctacccttcttcaag

SEQ ID NO: 16093 - DNA, 753 bp, Zea Mays
ccccggtggtgatcctccggcgaccctgtgctcagccctaccctcttctctggtgagactcccctagttcccatatctctctctctgttcttcaccagtctgaagctctcactcattcacaattccaccttttgattcaaattccaatttctatcaaatcctgtgaatccaagtgcatgattgagtccctttatgttccttgagtactcctgcaggtttctagctgcttaaggagggtttcacagcctctaatagccatttctccaaaaccctagaactccgcacgtcacgtgttcggtgaaatgcctaaaccagccaaaaatgctccaattgaacccaaatttttcaggcacttttacaacaccttcagtaacatattcgccaaatttcacgcccatccgatattccaggctttaatttcaccaaattccccgtttcttcgcctaaattcaaaccaagcacacacttcactcatattcacccatgtaaacctattcgtgaagtatcagctcaattccacgtcatttcgtgcctcaattcgaattccaaacctcctatgacactttttatcttcaaacaccgttttcacgtcgtttgacctctcgatcgccttatctctcattttctgtgccatatttctctgtgtatgtatttattcacatttcatatacttatgactatgtgactaatacgtgctcacctcttctgtcatttcagtgaccttgcctgtctatgagtcgtctcctgtcctgc

SEQ ID NO: 16094 - DNA, 517 bp, Zea Mays
gtttcaatataatcagtacttcactttatcattttcatacgaggacttgagttattttcatataaaatgtttattagtttttataacttatttgcatttttttagtgaaactagaatattttatgaattttaaatattgcggtgttggttctacaatgtctttgtgataagcaattttgaactgcatgatgtcaattttaccgttttcctttcttacatctcatctatcatatacatgattatgtattgcttaacttatggatggttgggcaattaatatcatcggatgaactacccgacaattatccggtacctacccgagtagtatccgttatccgtttcttacccgtccggattattacccggtcccgtcctgtatccgtcccgaatcttaactacccgtatccggtcccgtatccgagagaaatacattagggtaggatatgggatgaccctgtatccggctgtatccgtcccgttttcatccctaattgggagcttcggttatggcgctccg

SEQ ID NO: 16095 - DNA, 614 bp, Zea Mays
tctgcgcgttcttgtgttcttgcatctccataggctaaccttaggtagccccctcgttcttaggattaggcgggtgcattcctccacccatctagagtttacctttgacctttgtcgcaccagagtggggggccttagcctaggtttttgcctattttattacttaccatgatggtccaaactgttgagcacctcgactcctcctctgacaaccttcgaatgagggagggtgtgacatcatctgtgcagcgagttcctcgcccccttgtgcctaggactattacgcatggtgtgcagcatcacacaatggtgcaggcattcagagcctcatcacgggccaccccggtgggctgctgtcggtagctggggagttcctccgcaccccaagctctgcagcctcgtcgagggtgatgaggcgaatggcatcatcatgccactgcccaatccatggagcatagagaatctttgtttgttcaatccataagggtaggatggggaatgagtttcttcccttgtagcttggtagcacctatgtgtggtccagttcggtggggtccaatctcatacacccggtctctagtgttcatcgcacaacacatgtgtgtcaagttata

SEQ ID NO: 16096 - DNA, 626 bp, Zea Mays
gaaggagctgatgtctttacggattccaaaacagcatctagcacgctaaccgttctcctttttcttgaagtcaccatggaaatacttgatggcttcggcagtcctattgtagctggtgggctcaacaccttgaactgatctgttgccttctctaacttcggctcttcggccgggtctgtgctagcttcaatcggcataggaggacttgattctggggcagaagggacgacttctacatgttcaataagctttggcacatcggctatctcaatgcgtctcggtctacgtgtcaagaccttcactttcttcgccttcggcacgctagaagatgccaaagctgcaatttttcttttccccattgtttccgaataggaaagcagtaatcaggataaataaacccgataacatcaaaaaccctatttagcctcttttttccttgagcaccaaaggtgactatcatagcttcatcttcagcccttgagtaggccccaagctgctcatcacttgtttcctctatagcatctaaccagtcatcatttgtttcatcaaattgacttctatatcgaaaggtatacttgagatagaccaagccattttggctggatccagcggcagcctccttcggc

SEQ ID NO: 16097 - DNA, 477 bp, Zea Mays
ttttcttgctcgaaacgatggttcagatcatcgagcaccgcgacttgtctcccgaggacttcctgatggaggaaggggcagcatcttctatgccacgaggctcttaccatcctgcgcctggtgctgctactatgcacgctgcgcagcagcatacgcccacgcagacatccagggctccgtcgggggctgctcatggtggggcgttgtctgcagccaaggagttgctgcgtaacccaccaagttctgcggcctcaccgggggccatgaggtagtggcgcgaagatgtcgaccgtctcctcggcatggcccatcctggctcggccaggtccaagcctcaatcattccggcgtcaacacgaggcgtcggtgtctttacgctcaccctcagtgggggtgcacagactaacgacctgcgggcagaactcaaccgtagacgtgcgggcgaggatgctcgagtctctctggagaggtgcgtgag

SEQ ID NO: 16098 - DNA, 525 bp, Zea Mays
cgtccgcttccttaacctctcgcccacgccatggacgtgcccacgtccgcgcatttcccagccacctctgcatgcccttgcccctttagagcccgcaccccgctttcccacttccccctactcaattgcaccctcgccctctctctcgccctgcacgcgcaaccaggtagctccgccaccgctcatcgacatccgtcgcccgttctacggtcgccatagaactccccgccatgtccgttgccccggtaagctccaccctatcacccgccacctggaacgccccttggttcgccttctccccctctggttcgtctgatccacgctcaccggagcatttcttgcgcagccggagaaccaccaccgtcgacccgagtgctcgccgcgccccagccttcgttcgtgagcccctgagtctctacttgaggtaacattcctaaccctgctcttattttcccctgtcgtgcactttctcgcccgcgattgctcgccggagtgtccttcgtcatggcaaagtccttcgtcatg

SEQ ID NO: 16099 - DNA, 706 bp, Zea Mays
atttcctcttcttggcggccgtagccggcgctgctccccgcgaagggcctttgtcaaccaccatcaccacctcctttccctggcggtcagcagcatcggcatcgtcgtcccccagatagccggcatacagcagctgattcaactcaaacacgcggttcaaccaaacgtttgaaccacggatatcccaactccacagggtttcagtccttggcacatatcttcccacaatctttgcggcctctgcctccacttcgcgcacaaatgcggccgggttccaaccccgcaaatccacagcaaaggtaggacttcgcaccaaccggtcgcccagggtcggcatccggcaggggcacacttcgtccagtacctagccgtgtgccaagggccacactccataactgataaattcctcaaccaaatcgcacccactactcaaacaggcagcgtaccgaagggccccttcgtcctcgtcgtcctccgccacctcgaatcgagggaacgccacataacagtgtgagcatagaatggccggagggaggccaggcaggtcttcgacatcactaggagacacataaaaccaaaaatcccaccagttgccccacttgttcctggcacaagggactatctccacgacttccgccgaagtctttccagtcctcggagtgaaggtgcacaatccaaattgtgcaatcttatttcctattttcct

SEQ ID NO: 16100 - DNA, 512 bp, Zea Mays
gacgattttaatacgtgttttgcaacgtgtctataggttactgacgattgaaagcgtgtctaatttcgtgtcattctaatacgattttaatagcgtgttaaaaattgtgtttaggtatctcttcacgttgaaagcgtgtcaaataccgtaacattttgatgcgttcttaaaattgtttcaaataacgtctttatgtaccgccgccgtagagacacttttgtgtgcgctacaactaaaacgtacatacaaggggggttttctagtagtgatcggtcatgcacggcgacgcccgagcgcagacggtggcgccatggcacatgaccatgaattctcccctctgaagcccaaacctcgaggcgaagagtgttacacgttccagggaaaatagcaaatctaaaggaagagttcgcaccaggatttgaggcaacgacgtggccggtcgctgatgtcgagcgaatccaaggcggagcttgactctggcgagcaatcgcaggtactctggccaactccac

SEQ ID NO: 16101 - DNA, 333 bp, Zea Mays
cgtgggttgctggttgcccacatattcagggatacatggcgaatagcatgaagcagtatgcaagacctgctttggctgattctgccgtgcttcggcttcaacaatatccttctgctttggatcgtgactttgcacgtccttgttgtgtgtcccttatcctccccacagaataagcagaacaatctctgggctgagtgccaaaccttcctccaaagcttctcccccctctgcctcttggggctggtggcctgtaagaagtttgctgcattcccaaagattgtgagctttgctggctgctctgggtgtgatttgccctgtcatcatttgtgctgg

SEQ ID NO: 16102 - DNA, 355 bp, Zea Mays
ggaaaatttagaaaatttgtccaccactacgaggatgcaattgaatttaccagagcgaggcaacccttcaataaaatcaagggagagcacctgccacgcatgagagggaaccggtaggggttgtaaaagtccaggatagcgaacccgatccggcttagactgagcacaaactgtacaggaacgtacataatcatggactgctgacttcatggtaggccatgcaaagagctgtttcacacggcgataggtaactgggaaacccgaatgaccgcccactgcgctatcatgcagagaagagataacctgattgtgcaaggcagtattggaaccgagccaaatgcgacccttgtatttt

SEQ ID NO: 16103 - DNA, 541 bp, Zea Mays
ctacatcctatccacccattccctgtgattgtgtagcaccccgtggaattgagtttgatgtgcttgttcgcggaatctagaagtccgacgatggcgtgccgccgtgcgcagtgaccggagttcgcgggattgggttggatttggaacgagggcacgctggctgttgattcgtgaatgagcggtcgcgattatatctggggaggaatggcatgcatcatcggatccacttttgatggctaggatttgaagccgcgtatcgtttcgctcgggtagttggtgaccgtagatgtgagatcctgtggtaggaagcaattctgggtttcattaaacgctgaccattagatcgggatcgaatgggcctagtttcgtatcgattcagaaagccttcgatctaatcgtggccatagctcttggattggacgaccaggatagatcgataccccttcgtgggtctaatttgcacttgagcccctcagtttatgtcaaaacaacccgcgatccacatataggagattctgagtctagagatttattacaccag

SEQ ID NO: 16104 - DNA, 424 bp, Zea Mays
attacattatcgtgcttattgtgttcttgacctagagactaaccacattatggagacttgtgaggttacattcgatgagactacaccttgtccttcccctgtctttgagcctgtaggtccaaatcagatgggattgatcatctttgtggaggaggagcatgacaacgtcgattggggtgatcctgagtcgactccaccggctgcccctatcaagcctgcttccaccactttggttgacggacccgacctccacttcttccaccacttggcgtccgctcgaaccaactcctactgagactagatgagttgaggctactattgaggggaggccacttctttgaggacggctctgcggcatgttctgtgtgatcaccctcctcaatagacgattggtgagattgatgagcgagtcactgttctaggt

SEQ ID NO: 16105 - DNA, 540 bp, Zea Mays
ctacatgcctctttagacaccaaactgaacacaacaaaacagagaaggaacctttcagcttacccatgaagacgacgaacatcaacagaaccaagatcaatcacaaatctagtcttctccaggaccttgtgctggtagggggggtcttcatcacccgcttcatcggcttctccatgttagcacctagaagggaatatcggagagaagagatatgttcaggtagaagaagggttgaagaaggagataacagcgaggaggacgatctgatttgatacagagtgagtagtatattgcctatatgacgtgttttttacagatgcagggaaacactatcgttgttcctgatgaccagcggtgtgacacatgaagatatgcttaaaagtttgtaattaaaacatggccgtatttttagtgaatgctgtaatgccgtccaggttttcacccacaccatgccactgatcaggcctgaatgcatactgatttgagtactgcttggaggactcattgaatgggtgcatgattcataccaaacggtaagtg

SEQ ID NO: 16106 - DNA, 394 bp, Zea Mays
gctgggtcggcttctgggttgtatggctctagtgggggagaaagttcaactgcatcataaaatatgtttgttacttctaaagctaaaaaaggattacgaagctaaacctcaataaaggtacctataagtctcgcacgctcagtagcttcttcagctcttttggcttcttcctgagcgtcgtgagattctttttcattctttctaatagcttcatcagctatctcacggctgcttcggctgaaggatttttaatgtcgttggctgaagggtttttaatgtcgtcggcagaagctttggctaaagggtttttaatgtcgtcggctgagaaaacaaattatggctgaactacagccttggcatgttcgcaaccagctttctccaagatagatgtgcc

SEQ ID NO: 16107 - DNA, 351 bp, Zea Mays
atttccttgggggcattcgatgttatcttgggtatggattggttatcccagtatcgcgcagttatatcctgtttttggaagacagtgttattgcaggcgccgtcgggtagggaggtggtattcttgggaagttcccctaagttcacgttatccttgttggcgcaattgctttcggatcgccggtctaggaagttgggaatctttttctccatggtggtggagggtgaggctgccttgcgggtgcaggacatccgggtggtgtgtgactttgctgacgtgtttccggtagagcttccaggcattcctcaggagcgcgatgcagcttttgagattaagctgattcagggtacg

SEQ ID NO: 16108 - DNA, 295 bp, Zea Mays
ctttgttcctgcctcagcttccgcctgtgccttaaaggctatgaaggccctcatcgattggtcctttgttgacatcaatgtgacccacataaaacgacttaaatcatctactagcaggaagaaataccagctgccactcggagtcgctagcatcaccggaccacaaaggtccccatgaacgagctcgatcttgcgcgctgctctgtacttggcattagtcgggaacgggcgtcgacgttgcttcccggcgaggcagctgtcgcagacctgatcaatgtgatcaatctatggtagc

SEQ ID NO: 16109 - DNA, 797 bp, Zea Mays
taaatgcttcaaattgcaaatagaaatagagaagaaaaaaaggaattcggattgggccgctagacaggaatttcccccatccttcccttacctcagcccagtaccatttcactcgtgcggcccactaccacacgcgcgcctgaacccttctcctgggcgcggcctgctccctcgcgcccactttgtgtgtgtggctgacgaacgggtcccacttcgcgggttcatcaccaacctcgtggaaatacacaacaatatcgtgcgcatctcctccatgccaaaatctctgggcaccaaaccaccggggcgagtgttgggctgggaccccgattcctccggtcgtgctcctcggagtataagaatcgaagccgctcctccataaacaacggtgcacagggaaggcaagacaggaagaacagagaatccgagctcgacactgggcattacgacgacacgtcaccgcttggtcctggcgcgtaactattcagcatcaccggacttcgcggagcgagggcacatccttaggagcaattcgggacacgagagtaaaaaggaattcttcaacgacgcattagggctgtcgcgggccacttcctgctctggacaaagcttctgggcgcgccagtcaaggtaaggttgcccctgtgtgtttcgtcgttgtctaaactgtgagcaacacttcgatctcgtccgttcttgaaagcgcttgctggagtgaccggaccgccgctcgctggggccatggcaccgccatgggaatgctggcgccgctgctgtctgtggccggtgggggcgtgtgg

SEQ ID NO: 16110 - DNA, 279 bp, Zea Mays
gtgaaatgaagaggaaggctatcacccaggggcaggggagcagtagcatccgtcctcgctatgttccaccccagggtacaccagctcgtcctggaggaggacaacaaccagctcagtatgtaccataggggacttcacagactccacacactcgtcaggctactcccactggcaccctggcgagacctgcaggacacagtacagtcaccacttgcttcaagtgtggtgaggtgggacactacgccaatgcttgttcgaatcggaaccctaacacgcccg

SEQ ID NO: 16111 - DNA, 342 bp, Zea Mays
gaaaggatttcacatccacgcgtaccctttggtctttggtggaggaggtggaggaacagcacctgtgggctgtggccgaaagcgagcgagcatacgagagacgggatgaggcccagcaagggaactgtgcaaaactggcacacaaacacgttgggtcccccggccggcccgggcttgcggaatgattccatgcggtagcggctaactgcttccgccatcgacatgtccggctgtttcccctttcaaattccaagctaagaatttcgactgttaaccgcgcacaggacgccacgtctgaaggtgatgcctcagggagtcagggtttctaggcttctagcttcc

SEQ ID NO: 16112 - DNA, 766 bp, Zea Mays
tggcacattgaaaggtggcaggtgcattggttaagccaaagggcataaccttaaactggtaatgaccatgatgtgttttaaaggcagttttatactcctctccttctcccattcttacttggtggtatcccgaagtcatgtccaagctggaaaaaaatttggtgcctgacagctcatccaagatttcttccacaaccggcataggaaacctattcttgatggtcatgtcattaagtttgcggtagtccacacaaaaacgccatgtaccatccttcttttgaaccaacaaaactggagaggcaaaaggactaacactatgttctatgaggcctgccttcagtaattcagaaatttgcctttctatctcggttttgtgggctggtgaatatttatagggcctggcattcacagggactaaccctggaatctgaggaatgtggtgatcaaatggccgagcagggggtaaagttgcgggaatagcaaacatctctttaaattcatccaacagattctgcaactccacaccaacagttggttcctcagacttgggggttacttccagcaaggccaaagcccagacatcatttccttttaaccatttgtccacatgcatagtagacacctccaccactcttccacactgtcccccagtccccttcaatttgacctcttctccatcaactgaaaaactgatcaccttcttctcccaatcacagtgcattggactgtgttgcttcaaccagtcataacctaaaatagcataata

SEQ ID NO: 16113 - DNA, 463 bp, Zea Mays
acactgcacacaactttttatccttgatggtgtcagggttagaaaatctgaattcaaaaaggtcgttggaccctgggtggtatctgtttagcgttattaccagtcatctcttattttttatgtattttctggaacttgtagcatcacaaaacatataagaatgtgtacccattaaaatcaataagaatagatcaaaaaaacatttcgctagtagctgcagcacacagcactacatgtagtctagtacccacaggtttcactggaacaaatgcacttcctagtgtgggagcagacttagttcctatctggcctctttcctactaaacaaactgaatatttgtttttggtgaatgtttttttttgactggggtttttggtgaatgttgagaaccagtgttagtttgttttcaggtaagcttttgagccttttgattatacagcaaaagtgataagttgaaaaata

SEQ ID NO: 16114 - DNA, 386 bp, Zea Mays
tatacatactacgtagtacagaatttcacctggactacggcggtctaggtacgtgtatgtatggcgccgggcgggcggtggtatgtatggtctcggggcggggccgttcaaaagcatgctttcggaggttcgaaaggcatgtagtagcaaagaagagacaaggatagcagagccgaagcatctctccctttcctgattcaaaattttgtcccgcttttgcgctttagcttggccttttgcgagctcgccgtccgcaagcaaggtatccattcgcattccctactagtgctagctcgctcgccagatcagtcatcctctgcggccactggtcgtcgtcgtcggtcgacttgttgtctctggttctggccaccagatgcatgcatggg

SEQ ID NO: 16115 - DNA, 357 bp, Zea Mays
gtctggagaagacaacaacggagagttctaagaccgaacagtagccgaagttgtagagtcctccattaatgccagggttgtcaaggacaacaaccgttccagcggcgactcctaggaaggggaggaggatggctagcgttctaggcgctgttctgaggccttcgaagatggctactgctgctcatgctatgatggacatagatgaaattggagagttggaaaaagttatcgacgtaggcgctgctcctggaccttcggaaattaggtcaacatagcaagtaaaggagagcgtgccatagaagttatcattgtcgatacccgaagcggcatcgaccgaagatcttgattttattatct

SEQ ID NO: 16116 - DNA, 461 bp, Zea Mays
ttcgtggtatagtttcccaatatttcattacacatggtttcaatcatctctagccattcttggcagggttccttgaactgtttttcaaacttgaaacgttaagctagtcgaacaagttcatgcttcttcttcgtccctttcatctttggcatcccccagccactcgtcgttgggaatgtcctgttggccaggtattcctgtaccaagtcagtggtgctgatttcctctgcaaccaccctgaattctgctgcggctagctggcatgctgaccctagctgcatgttgcacaagggcctagtcattccgaagtttaaggacagtggtcacatgaccatcgtcatcagtttcccacttttcttctcatcagccttaatataaaaccattctcctttctagccagtcagccactttgtacggtagttgagaactggggccttcgtatccttgcgatacgcaaaatt

SEQ ID NO: 16117 - DNA, 286 bp, Zea Mays
cggaccatcaaccctatcaaatttctccaaatctatgctactgttatccttgccgccaacagtgatgaggaggtaatgacaaattactttcaggtagccttgatcggctcgacttggtcatggctcatgaatctcctagaagtcttgttcggctctttgaaggaactctgctgccaatttgtgtctaactttgaaagcacctactcacgacccgatgtggagttagatctccacgatatctagcagcagcatgggagaccctgcacatgtttgtgcataggtttga

SEQ ID NO: 16118 - DNA, 491 bp, Zea Mays
cgacgcgaggcactcggagctgatcccgtgcttggaccggggcctccactaccagctccggctccggctcaatctctccctcatggagcactacgagcgccattgcccaccggcgccgcgccgcctcaactgcctcatcccaccgcccgacggctaccaggtgaggggagaagccaccgtgtgttacgttgcagagtagtgttgtgttgcgcttgcttgcattgcaccttgtttgtgctgctctcaaactcacgatgatgtgacgtgatgtgcgcgcgattcgtgcttaggtgcccatcaggtggccgaggagcagggacgaggtctggaaggccaacataccccacccataccttgctgctgagaagtcagaccagcggtggatggtcgtcaatggcgataagatcaacttccctggcggtggcacccacttccccactggcgctggcaagtatattgtgcaccttgcgcaggtttgagatacccccgag

SEQ ID NO: 16119 - DNA, 493 bp, Zea Mays
gaaacgagtaccaggggcactcggctgattgttaggaacaggggcagtagtgggacgaataaagacgagctgcttgaatggatatgaaggtgggcgaggcgaagaacaattttgattaaaaggtcggatcaccaacctagttctcttttcaggcccttgatatgacctttcacctccaaacccctttgattttccatgtcccgcatttttggcttcaactgccagtgttgtactgacagccttactataggtaaggtccaagcatgttgccattttccgctgaagcctatcattgagccccctcataaaacaattctttttcttcaagtcagtatccacctagtcaatggcatactgagagaggtgattgaatttattgagatactgcatcaccgtatctccttgcctcaactggataaactcttctagtttcatctggagtactccctctagaacataatgttcctggaatgccaacttgaattcttcttag

SEQ ID NO: 16120 - DNA, 757 bp, Zea Mays
ccaccggttcagagagcacgatataagaaccctcagactaccagggaccacctgtcagcagtagagtaggggaaccgtttacctaggaagcacccgccccggataaaccccgaggcaccaagcccgaggtcgggcgtggcggagctgcagagggaggacaggcgaaccgaaaggaaacaactcgagtggattccttgcctagcccaacactgatccgctataagtggtcgatcgcattaactacgctaaacaccaagctatagtagagagtcggtccgcctcccacttgtgacctgcacagcccctcggactgcaacacactcatgacctacgcaacccattggtctgcggtgcactcatggtctatcaagcctaagcatgagtgcgtagaccgttcatagagctcgcaacacgacgatccacaccgagacccaggctacgtaagctaggggtcgggtggcgcagaggaagtaatgatggcgctagggcccgtgccgctcacaccatccgtcataatgagcacaaacagagacaactaggcagcaagacacgtacggacaaagcggcctcgccggggtaagacacccagttttaccacggtatagtggctccttctcgagggagccaccgacagtcgacccccattttagcctataaaaggaggaggtaagtcacgaagaggggagatcttgggggagaagacagaagacacttgacggagtgcaaccgcacatgcctaggtggacttgaagacctg

SEQ ID NO: 16121 - DNA, 463 bp, Zea Mays
tgttcgttgtagtctctacatggtctgagtaacaggaatttgggtttggcgtcgtctttcttgggttcgccccacgccggtgagtgcgccgccgcaaggagttcggcgtgcggtgcccagttagcgcgggaggaagacggcaccagagccgttgattcgtggatgaccggtcccgattagtctctgtgtaccggttgaccttaaccgttgatccgggatcgtgtgggtgaaagcaaatcgtatgcacttaaaatccacgccgttggtgcgggatccagtgggtctcattgctcaacgttttcggatagtgatccacctaatctgcgccgcatgacttagatccaacggctcataacacccgatacctcttcgctgcgcgcgatttgcatttaggccccttagttttcaggaaaacaacccgccgtccaccctgtacagcgctctgagtcctaggatattttgc

SEQ ID NO: 16122 - DNA, 828 bp, Zea Mays
ctcacaaggatcttcataggtcatagcctcttgtggttgtacacaagttaatgggagttacaatctccaagaatgcaagagggagaggagagaactctcataagagctcaagcaacaacacaagaatgaagaacacaagcgcacagaagcaacacaactttttctagtctcgcgaatatgggttcttggatcacttggatgcgttgctctaatgtgttagaatgaatcactagctcttggagtgtttgagtacttgaggaggctagttagggggctatttatagctcaaaacccccaagtagtcgttgctaaaaatctgccctcggttggcgccccatatcagtcaggtgcaccattggaccagtcaggcgcaccaacagacccccaacagtaacatcatctccgggatcctggatgggactttccactttgagctggcatcagactggtctggttcaccactgtaccaccatatgtcagccacacgttgagatagtagttgaagacgaagtagcctttagagcctgaggtccagtgcaccagctgaccatggtccgatgaattttagccaaaaactcgagagtcactccttcgctataaatctaggtccggtgcaactgacctggggtctggtgcaccagaccgctaaggcccctgcaggcacgtctagtaaagtggtctggtggcgccctagatagctatgcttagctttttccttgtttttcttctccaaatcatttgcacttgttccaagagttttttcatgtgacatggacaaatattctaagtgagaatccaactatgtctaattcatgtacttaattttat

SEQ ID NO: 16123 - DNA, 588 bp, Zea Mays
ggatgtcccaacacctgtaggtccacctctggctacattgtgtttcttggagacaaccttatctcttggtcctccaaatgtcatctcgtagcctcccgctccagcgccgagaccaagtattgtgttgttgccaaaggtgtggctaaggcatgttggctcagtcaacgcctccaggattcacgaccctctcaccaggagcacatttatctactacgacaatgtcagcattgtctacctctctgtcaacccgattcagcaccaacacatgaagcatgttgagatcgatcttcacttcatccgtgagtgtgttgtcgttgaggatattcgtattcttcacattccgacgacctcgcagtttgctgacatcttcaccaatgacctttcatcctcagttttttcaaagtttcggtccagtctcaacatctgttgcggctagagtttcaactatatggtgctagattgtatgttgtgtgttagactgtgtggctattatgtggttgtgtgtgttatgggcctagcccagcccatatagctgttggaatataatataagtgaattatccacctccttctataaccaacttaatat

SEQ ID NO: 16124 - DNA, 579 bp, Zea Mays
ggggaatcctataaagtcttcttcaaagcttcaaacctaacttcggttcactaaccttcgacaccatcaccgtgaagaatgatgaagcaaggggtaatgaggaatctggttacaaaaaaattaaagtaaagaataaaggtaaagatgtatactttgttaagcaggtttcgggctttgtttccagcaaactcatggtcgcccttagcctagatttgagtgatgaaccagttgcctatgcttcgggctttggctggaacatcaaccaggttcgatgatgaatggctgaaattcgaccagttcacagcccttgcgtgattacacccggcttttatgaaagcggagaccgtactacgagaagccaccagcgcacagaagtatccatggacagttatgacttcgtcaaggacgtcaacctctttctcgacgcattcgagtgctccggggacatcttcggcagagaggctagcttcctaggatgcagctccaactgaattgaatatacttctcaatcgagtggtgtattggcttgcaaaattaaaacatctctcttatgagttctcagcgcttcactaagcttca

SEQ ID NO: 16125 - DNA, 715 bp, Zea Mays
cgcctgcaccatttggatcgggggctcgaggggcgcgaggccgggggattggtgtggccagcttgctggtgctgaggcgatgtcgttagggtgggattggtcgacgcggttccctcgggtggcagcggcttcgttccgtcccgtcggaggtgagctcgcggcggcagtggcgtttaccgaccgggatgaggagcttctagcatagtagcgcatgctttcgcccccacctccttgcagatttcagaccgtgctgaggatctacctggcgcgcatcgtctctccgccgttgctgccaggtgccaggcactagatttgtgtgttgcccacccagccccggcaaccggagcacgccggtcgccggacacaaggttggcatctaccgctggaatttcatctgggcacgtccacatctcccgtgattccggtacggattggttgcgagtttgcgacacagaatggcaacctggtcagacaaaattcaccccggaatcgacagcttccatttgatgcaggatatgcaaggcaccgctcaattggatcgggtgaatttatgacgtaatgtagattccatggcggaaagttcgggcctatcgtcaaaattcagctagaaggttaagatgcatgagtaggaaagagggcgaaccatatgactgtgctctttgcggtggcgtagacgattggcgggacgtgtctgcgaccctacggtaggatcgtg

SEQ ID NO: 16126 - DNA, 748 bp, Zea Mays
ctcaatcttgcttgtcttgcgttgggtggttgtagtagaagaagtgggctgacttgaactcacagctttacctttcgcatccacttgtttggatgaagttcaaattgatctatttgttccacaatatgaggatttgggcattgcaccttcttgctgttggaattgaggtgtgacatccccttgctgttgggaatgacgccatgagacattgtatttgtaagacgtagcaatttgcctttcagccctcgttgcaaaatgaaccaactcagtgagacatgtgtaattttccatatccactttatcagcaatgggtttattgaggcccaccagaaaccgagccattgttgagtcctgagcctcagttatccctgtacgaagtaagcacatctccaattcctgaaaatatgcatcaacactgcgattaccttgcacaagacgtttcagcttcaaatgtagatcacgagaataatatgcaggaacaaaacaacgtctcatttccctcttcatgtcttcccaggttacacggtcatgcccaactctatgatattcactacggatctgattccaccaagttatggcatagcctttgaactcaatggctgcaagctttgccttcttttcagcagggtattcatacaaatcaaatatttgttccactttggtttcccattcaaaataatcatcatcattctccttgccgctgaatggaggaatggacactttaaccttgctcaaaccatcatcattg

SEQ ID NO: 16127 - DNA, 1082 bp, Zea Mays
gcgcactattttcagagagtgcaggggccctggcgcaaagtgtgccaagacacagagaacccaggccacggactgcgggtttattaacctattttccaggggctcgtttacaaaacgtttataccgaaggggtatcagacgtagtgagccatccgatcatgatcggacagcccagatcagatcgggctccatatgaaacggtgaacgctattgaccatgggatataaaatcaagcgctcagattgtccaactgaatcggtcagctaatatctaatctcggccgcacatctagtatcctaggattcagattgcgtcgagcttttcccttaacccgatccattcacccagtatcctacggccagacatctttcttccccaccgcgacgactggacacggcgccgttctgccccacagcgtagcacgccagtgatcaccccgcctataccccgatgcgtgattctcggctttgatagatcctactcgaagcggatgaattggtgaacctgggggtgcaatccataccagatatagtggcggtagtgaagctccccacgacgacgagcggacgaagtggctgcggcggcttcacgacgatgaggaggggcggcgaggaatctggacgaccccgcgacaccgcgcagagccccggccccaaatcgaggccacgcagttcgtatcccttggaacacggttggctcccagagcgcggggcatcaatggcggcttcactcagcacgcgatgaggttttgcacgacgaccactacggtgcttggttatggctcgatgagatgggccctagcgtcacctaaatacaccgcgaagaagtccggatacgagcggaattggtgagcttctcctacaatctcgccatggcggctcgatgagatttggttctccctccctcctcggtacaggcggcgcacagattggggcaacgaggcgattgtgctggcgcgcccgatctatatgattcggagaggggatggataagcacggtggaaggggttgaaacggtttgcccgaggaatccggccctgcaattcggtcaacggagagtggaagcggtggatccaaaaattg

SEQ ID NO: 16128 - DNA, 457 bp, Zea Mays
catgagattgatgttagaaccaccacacgccaatcatcgactgtaaacatgcagtcacaaacctagccatcttctggcatgccgatgaattcatacgccaggcaatcgcagcctcctccatcgatttgggataaacccacaattctgcgcatggccggactgtctgggcctggcctcggcccacccgacccactggaaggtggttgcagcctttatggtgaaccaccgagagccgcgcgaggaccgtcatgctcctcgcaggggttaacagacatgctcagaccatctagctatacgcgcagactgtccgagtatgccggaccgttagacaaagagtacacagaacatagtactgcgtgtcaggcacaattctcatactccaccccacccgcagcgcactgtagtcatagcatgccaccacccgcgcatgaggccgaatatttcggtccctacgaag

SEQ ID NO: 16129 - DNA, 398 bp, Zea Mays
ctagtgtgcttacacaaggagtcggattaatcaaagcaggagcgacgggcggataagaagggaagtggcggctaggcgtcctgactgacctctccagacgctgatctttagcgcctccttgctgaggccccggacgtagttgccgaggtacttctgcagcaggaaggcgacctggtcctccaacatctcggccgccgccggcgatcggcagcgcccgccggcgccaccaacgcgagacccgaaggtgcggaggggctgagaagcgctccgcctgtcggtccccttgctcggcgtgccgcgtgagcgagaagagaaagtactgggctagcaacacagcagacagcccacacgcagggcaggcggtttcctactttccttgtcttggacgagtcgaggag

SEQ ID NO: 16130 - DNA, 1594 bp, Zea Mays
gcagctagctagcgtcactctcatcactagtagtactatcgtacaaccagcctagcaacagcaaactctcatcattatcgtaccactaccagcccagcagtagcgctgcctgccgctacgctgctgctgcattcctacatgcttgagaaagttgtagctatagggagggggaatcacatcacaggagagctgaggtggagcaccgagacgtgaggatacacgacatctctatttcacctgtgctgatttaaatagtatgcgtgcagttgtaataataattaattgattcagaaattgaggggtggacctgctggatgctacctcacgctttgggcgctggactataaaaccatccgaggacgcctgtagtggccacacatgctacgactgcgatggcggctatggcaccagatccgagcccgccggaagctggcggtggcagtggggacgcaccctttttctccagctgctaggagcatggatctataggagtatgcacatagtataataataatatgatggaatgaagtacgtagtgattaattaaggaatgtccgagacttaccattgcagtctgtagggcgaggggtgatggcattccactgcagcacattacttgagtctttaccctcgcatgtgacgtcagacgtaggtaggtcaaaggtagttttccttgaaaccatgtacacacaaaggagcaaagacctttttccagttcatgaattggccagatgtcgatgggatagaggagggcgttgcagcatgaggcagtagggttttgtggtgctgtctcctggcaggagagcgtcgccacgtagtataataataacaataacaataacaataataataataatatgatggaatgaagtacgtagtgattaattaaggaatgtctgagacttacaattgcagtctgtagggcgagggatgagggcatttcactgcagcacattacttgattctttaccctgcatgagacgtaagacgtaggcaggtcaaagttagtgttccttgaaaccatgtacaaacataggagcaaagaccttttccagttcatgaattggccagatgtcgatggaatagaggagggcgtcgttgcatgaggtagtagggttttgtggtgccgtcaactggcaggagagcagcgccacgctggtgaagtcaagctcgcaactccgcgaggagcaagcaggtgacagcgacagcagcggtagcaacatgatggtgacgagcagtgaaaaagaggaggaggccatcggctgctctagtatgtactagtgggtagggtagtgacgattgtgacccggccgttcctatcgattgaggtggtggtccattttatagcccatgcaaacagccaggcgctgctgcgtctgcgtgtgccatccctctctagtttgattgggacgcagagcagagcagagcaacacagagcagagcagctagctagcgtccctctcatcactagtagtactatcgtacaaccagcccagcagcagcatactctcatcattatcgtaccactaccagcccagcagtagcactacttgctggctacgctgctgctgcattcccgcatgcttgagcaagc

SEQ ID NO: 16131 - DNA, 527 bp, Zea Mays
ctaggccatcaacatcggcaccgcctgcaccagccgtccaagctcctgcacccggaggcgatgacctagatgactctggggacgccgatgacgaggatgacaacgacaacgaggacgaagaggaacatgtcaacgaggaagccaactacacccagcaggactacttcatggggtttgggcctgtcgtcgaacattacacatcaatgttcgagacggggcacttccccaacctgctgcaagaagtgctgcacgcgttgggaacctacgtccgcccctgtacgaaacaaggcgagtgagcgagcctccccgggcttgctactacatcactcgcatccacgtcagggtgatggatgcaggggataggggattcaggactctgtctgctcatgagtccctgacaccgctatctacctacgctgcttcggtcagcgatgctgccagacggaccctgtggtctctcatccacacctaccgacagcagctgcatgacacgaggttcaggcatcttcctctgcgtctgagtggag

SEQ ID NO: 16132 - DNA, 1114 bp, Zea Mays
atcaataaagaccataacaaatttccaaaggaaaggagctagcaccaaattcatcgcacactgaaatgtagccggagcgttagtaagtctgaaaggcatgactcgaaactagtagtggccctggtgagtcttaaacgcagtcttaaactcttcggaggcacccatgcgcacctgatgataccccgaagtcatgtccagactggtaaagaattgagtgccagcaagctcatccaaaatctcctcgaccaccggcatcggaaaccgattcttgatggtcatatcatttagcttacggtaatccacacagaaccgccacgtaccgtccttattttgcactaaaaggaccggagaagcaaatggactcacactgggggtgatcagtcctgacttcaataacgcagcaacttgcttctcaatcttcgttttatgatgaggagaatatttgtagggtcgagcattgactaggatagatccagggagcaaaggaatatgatggtcaaatggtcgagatggaggcaattcagttggtgtaacaaaaatgtcacggaattcccccaacagcacctgcaattctggatggatcccagtgctgttctcctcacgcacctcctccaacaatgcaaacacccagatatcattccctcgcagccatttctccacctgtagatcttcctccaccacctgctgatgtattgtattgcccaccaactgaacttccacacctttgtccacaaagctaataaccttatcatcccaatcacaatgcataggactgtgtcgacgcaaccaatcatagcccaaaatagcattataggcgccgagccccaacaccctcatatcactctgatatgtatgcccattagcccaccattccaatgattgtaccatcgtgtcactatacataatctccccatttgccaccctcactttagctgaagaacaaggatgcactggcagccccattctatcgaccaactgcttgctaatgaaatttgtggagctccccaaatcaatcaacaccaacatcacctgattttgcaataaggctctcacagccatacactcctcatttgtggtaccactcagagcattaagtgacaacataaaattctcc

SEQ ID NO: 16133 - DNA, 1095 bp, Zea Mays
gcgcatgcctaaaacaagcataagcataacttctcaataaaagtgtacctcgttttagcatccaccaacctccgacttagatatgtcaccccatgctcctttccttcagtttcttgtgacagaacagccccaatgaccttatcttcagctgcaatgtataatcggaatggtactcctgctcgtggtgcttttaatacgggagccgaagacaagtatttttttaatgagatcaaatgctccctgctgctctgccccccaagtgaattcggcatcattcttaagtcgaaggataggggtgaaggcaacaatcttcccggctaggttagaaataaacctccgcaaataattcaccttgccgagaaacttctgcacttcgaccttacaggtcgggggtcccacattccgaatagacttaattcggtcagggtctatctctatgccatgttcatggatgataaatcctaaaaacttaccagccgacaccccaaaagcacatttacgtgggttccttttcaaaccataccgacacattttatcaaaggttttgcgcaaatcagctatatgagaactaaactcagctgatttgactacaatatcatcaatgtagacttccacagtgttccctaacaattcatggaaaatcaaattcatagccctctgataagtagcaccagcatttttaagaccaaaagtcatgacaacccattcaaataaaccaataaagcctggacatatgaaggccgttttagacgcatcctcttcggccataaaaatctgattatatccggcattaccatcaagaaagctaataattctatttcctgatgcattattgattaatgtgtcggctataggcatgggatactcatctttaggagttgctctatttaaattgcgaaaatcaatgcatactctaagcttacctgactccttcttctccactggcacaatattggagacccattctgcgtatctacaaggtctaataaaatcagcttctagcagccggtgaatttcgtccttgattcgtgggagaaggtctgcagaaatgttgtagctttctgcttgaaaggtctgaaaccgaatttaataggc

SEQ ID NO: 16134 - DNA, 509 bp, Zea Mays
ccgagccagatcggatcggctgtcgcctacgccgacggggacggacgcggccagcgattggtacgacgtacacggacgcgattaatcatataccccggcggccggctgctgcccctgctgattagtgtagcgacgaccataccatacataccaataccatcgcgtcgattgcgtgtgtacgtgtaccagagggccgatgatgcatgtcgatgggatgcaaagagatagcgtacgatgcattgcattgcaaggtgcagcgagcctgctggccggcccggaagggaagacgaataaaatgctgccgatgccggatggatggatgatgattctgtcgtgcctagtttgcacatcttgatttcggatgagcttatctatcagatatgatggatgcgtggataatctctgactctatctctagctagttctctatctttcggttctcctccctttccataagaacaccttcaactgtgatttaaatcagtgtcttacctcaaaatatagaattc

SEQ ID NO: 16135 - DNA, 563 bp, Zea Mays
gacctcagctaaagccgtggaattcatacaagacataatattcaggttcggaataccgaacaatatcataaccgacctgggatccaacttcacaagttcagagttctttgatttctgcgagcaaaaaagcattcaggtcaagtatgcttcggtagcacacccgagagccaacgggcaggttgaacgagctaacgggatgatattggaggcactcaggaaaaaggttttcgataaaaatgaaaagttcgcaggaaagtggataagggaattgccttacgtcgtttggagcctaagaacccaacctagccgagctctgcatggaaacactcctttcttcatggtctatgggtcagaggcagtactgcctgctaatattaagtttgggcgccaaggttgatctttgaaagcatagcagaggccgaagcaaccaggctggaagatgtcgatgtactcgaagaagagcggctgaacgtagtaattcaatcggcacggtaccagcagactctgagactctatcacgacaaggtcgtgcgacaacgatccttttcagtaggagatcttgt

SEQ ID NO: 16136 - DNA, 497 bp, Zea Mays
gtaatgtacgtgttgcgttggccacagatgggttcaatccctatggaatgagcactaccccgtacacatgttggctcgtgtttgttatcccaatcaatctccccccaggtgtgtgctttcaaaggcagaatatattcgtgtcgttgataattcccggacacccggggaataaaatgggcgtgtacatggagcctttgatcgatgaattggtacgttcctgggaggaaggggtatggacatatgactgaggtacgaagacaaacttcagaatgcatgtttggtactagtactccatgcatgacttaccggcgtatgggctattctgcgcttggtgtgtttacggtaagttcccatgcccagtttgcaaggaagctctcaggttcatttggttgaaaaagggtggcaaatattcgtccttcgataaacatcaacaatttctccctcctgaccatccattcccccctagacatcaagaactttacgaaaggtgtcgtagt

SEQ ID NO: 16137 - DNA, 790 bp, Zea Mays
gctcaatccaagccaccgatcacggaatctacgatctacccctcgtcttccccagcgagacgcccacgtaatatctacggcgtgcccgacggcggacccgccatagccctaccttccccctcctattgcaacggttgatcgggcgccacggactctaacccgcgcccaatccccttccacacaccaaaacccactcgtgcctcctccaatcgcacatgttagcacggccggaagaggttgcaagacggcgtgacaacgatgacgcgcaacagccggcaacagagttttcacaaacatgggatggcggcgagcgtggagtattacttaccgagatcttgggtgaggctagagccacgcacgacacgcttacgggttgcgcccatgcaccaccagggacttggtgccggcgagctcagggttctccacaaagtcccccacgacgtcggtggtgaaaggaacaaactagagggatggtcgacttcttatatcgcagtcgaggcacgtagcgaggggatctcgcccaagtggttcgtcaactgagcgagcagaggtggttacggcggcgacgcgattctagtagcacgaactggtgcgggtcccaccatgcagccatggaattggccacaaccgcgcgcgcgatgcaggtgcgatgagggtcccacatgttagcggaaaacatgagacgagcacgagcgcatggaaatgacgagtgggggctaggtgtcggcactcccccccggccaagtgttgtacttagttgggccggtttgctgctttgagcccaagcgcg

SEQ ID NO: 16138 - DNA, 955 bp, Zea Mays
ccgtagaattattcatctagtattattgttacaaatatatggtttacctatcccttaatcttttactctaacaaactatatttaaattaatgtcaacaatcataatcaaattaaaatacacaaacgtgaaagacagcatacactaattaaaatagatcatcacatacatatgaaattaatcgttcagtataaacatgatttcagactcaaaattcacaactaaaaattataattcgccacagaagttagatcgtgattaactaactcttttgaactaagaaataatctcacacaaaataatctatctatagggattagacacaaaatattctttttctacctctcctttctcttgtgcagtgaacgaggacgaatggggcaggtagtcgggtgtcgggggaaagtcgtcgggacgcagcgtcggcttcggagttccggtcaacggtgaacggctccagcggcgagcggctccggtcagcggtgaacggtgaggaccatgccacggaggagggagttcgatggaggtgcggctggggagctcggagtgggcttgggacggatggggactggctctatgggggcacggtcgagttttgtagaggtgtgggaaggtgtaacggacgccggtagagcttcattggccattaatggcgcagtggcggtgttactgcagagtgcagaggaacggtcgcttgaatgaggacgtgagtggggagagaagaggagaaacggtagccgaaggcgctccacgtaaggcgagcagtcgaggagacgcagggatgagccagcgtggtgcgtgacgagtccatgcgagcggcggcgcgttcgtgtggtctggaagcaacgatggagaagaaaatagccttgacgtgtggggtccacaagcaagagagacaaaaagaagggagaggaaacgtgactgcatgaagctgtccgcccaggttagttggccgag

SEQ ID NO: 16139 - DNA, 477 bp, Zea Mays
ggctgctgggccacgcacaggggccagtagcagcagagcaagggcaagggcaagggcggccctgctacggtatagatttacatgcacgcgccgcataaacaaagacatgagaagcttcgctgcccgcgctctacgccgtatttacctgcctgtgctgtgtgccgcgctgcatcgtatatagtctgctctctaccagtgagcagcagatgctataccacgacaacagcggcagcagcagcagctagctgttgcattacatccgcccattgcctgccagcatgcctttactgttcaggagcaacagcatatgtgtggagcgcggataaatacactgccattgcttgctcgctcgctttgctccgccctgtgcctgtgcctgctgcggcctcgtttacgtctagcgtcggtggagctgcacgcaagctctactactgctctcagctctctatctggtcctccgcccctagcagctatata

SEQ ID NO: 16140 - DNA, 386 bp, Zea Mays
agtcggctcaccagatcctcagtaggaattctcttgttggtgacccgggtagagtcattgataccactgtacaaataagccgggtatgccctgtctttcaaaggttgaatattcttgaagacggagtcagcgaccacaacttcagtagtcaaacctctagctttcaataagcagatctcagcaagcaacactttcacctctgttacctccgaaggggtcagagattctacccagtttggagtacggacatctagctgtctccccgactgaggggggagggacttgcagtgattctccatgatgaaccactcgaggcaccaccccttgatgctatccttcagagagatatcaaggtactctgacttcctcctgcgacgtagttccag

SEQ ID NO: 16141 - DNA, 678 bp, Zea Mays
ccacccatccgagccgaatcatccccggcaacaccctcgggggctgggtgagcgccaacaccatccttgagggccgagttctctgcagcaaccacctctaaggctgaaggtccctcagtcacttccatgggagcaagacaatccaaaccagcttcctgaccctcaagaccgcgctccaaggtcgatgaggcgcgggacgctgcccgggatgaccccaacccgacgtcgagcacatcagcacaaacatccatcgcgccaccatctaccggttctgataacagatcctctggaaccatgtcttcaagagtttgatcaaagttcgccagagataattcttgtagaccaatgagggcagacaaagcaggagaaggaacaccactactttccccactggctatgtagcgccgactgttcttccgaatcagagggatctcatcttcttattcctcctcatcttcatcagcaacacggacagcacacccattggggtcagcgtaagatgggtcacacccattgggatcagcttcagtaaattcaggcacgggcacttcctcagcagcaggagccgaaggaccagaatcccgatccaagctagacactcggcgaagacgtctcttcttatttttctgcccattagcaggagaagcaggctgattggctcggcaagggcgtttcggg

SEQ ID NO: 16142 - DNA, 598 bp, Zea Mays
ggaaaagctgcttagctagctcgtttgtaaacattgaatctcaaggagggtgatctgtagaatgagggattgaggaagatgggctctgataaggtggaggagaggcatgagaggatgaagagcgagggtcaccaggtgtaggagcggcaacagacggaccaaatacaccgccatcatcaacaacaaaatcttcctctttttgctcaggagtaataaatgggacaccatacttctgttagtgccactagttgatgtcatctagatactgattaagaggagcagcatgctaacgagcagttatctcataccccatggatgcaacaaactagtgtaggttgtcatttgtctcccttgcctcatgacgctgctcaacaatgtcggttgcatggctatgatagatagagaacacttcagcaatacctctagctaggcacaaccacagacttggccttctcccacatcatcttcctcgcccgctgtggtccataggatgagaggaagcaacaacacatgaggaagagccatggggaggcgcctaaggaggtggctcatcatgagatgaagtaggacctctagatccagtcattgccctctttgt

SEQ ID NO: 16143 - DNA, 515 bp, Zea Mays
tacattggctcaaccttcgggatgatacccatctccctatagttgaacaacattatcctcaattcctcacccgcaaacagacttcgtagttccccctcacccacactcaccccagccggcgaggacaacaattcccgcttgccagtcccatccacacgaaggcgtccaccttccacctcaccacgatgacgcctaccacttcgcggcagctcactcaccctccgtttcgccaccgcccttcgccgcctatgcccaacactcgcacccggaagatcctcatcacccattacacgcggtgaagcctccaccgtagccacatccaatgccgcaaagtaatccaaatcctcatctgaagactcctctgtccacacaatcaaactcccagaatcatccgactcaaaacacttagacacagaatcatcagaatcgtcttcagcaaccacggtcgaagccgccacaaaattagcattgacagtagcaattgtgtgcgcaggcccaaaatcttgaacctgcgc

SEQ ID NO: 16144 - DNA, 644 bp, Zea Mays
gggagacaagggtgcacctgttcacaatcttgaggtgagaataccgaaactgtctaagagacttctcgaggtgagaatactgaaactctcttaattagaggtgtgtagtaattacacaataacattatcaatcttaattatttatctgattcctagccattgttgccgcctcagcccacgctcgaccaccgccaccgctacttcaagcagttagcttagctgtggggtaaaatgattggttagcgatcttttctacttttatatactgtctacatagtacacagtagatccaagccatgtacaactgcaatttggttcctgaaatctgaaatgtgtgatcctgtgccatgcaacaacagttggttcactcaaaatgtgtggttctgtacttggataccacttggttcactccaaatgtgtgttctcgtttttagtctaaatgtttgtagcaacccagttttattctaaatgtttgtagaagttagtcttggttctggacttggatatcaattggttcttgtcttggacagctgaaattgtcacctactactatgactcatgtttaaccgtggcctgcattttggaaagcaagttctggtcttagcactgatactggtgttctctgatcatgcttgttaacaagt

SEQ ID NO: 16145 - DNA, 942 bp, Zea Mays
cggagcctccactgcgcgatgtggccaccggcggatgcgggatcaccatcccccataagacccgggatgtggtgcgccctctcctggtcataccgctagagccgtccagaaaccaaaaacgccgagagcagagcgagaaagaagaaggtccgccgcggtgggagcttcgattcaccggcattgaggctccggtgcatgcctggggatacgctctgggagtcggggaacacactggtgggggacacaaggcaggcggccagctcggagttgtgaatttctcactggtgggacagaggcgccaacactgtgctccgtgtcgtggtcgtcctcgtttccgcctcctctcgcggtaagaaatccatcatccggttcaccaatacctcctctacgtgtaccatacctcggatccatgtttagggcttgagttcgtgggttggtgtggcctggaccatggcctccgccgtgggcgctggacgccggtggccctggtcgctgggttgaagatagaagaatggccctggccgttggatcataatcaggcactgcgaaatcgaatggtgggcgctctgtacaggggattgcatagcgagcgttgatccgtggatggacggatggggttagatcacgcgttaataaaacctagaccgtagatgtgagatccagcggtgcagaatcagatctgcggttcattaaatccaaatcgtcgatcatggatcgaacggcttcagtcgcgtactggttcattaaaatctagattcaatccaggccagagaatcccgatcggatggctcagattagaagataccccttcggccgcgcgtcttataaaagaaccccctggaaactagagattcaacccgccatccatattcaactgttcactgtgtcttgaacattttacccccgagccccctgcactctctaaaaatagtgcgcccagtc

SEQ ID NO: 16146 - DNA, 354 bp, Zea Mays
ggactttcaactttttgctcttcggcgcaggctcatctgaagtgcccgaagcagcaatcttggccgaagcagcaatcttcctcttctttcctcgtccctgcagcgggtagctgtagtcagggtaaacaaaaccaatagcatcaaaaactctattcaatctcttttttccttggcccctgaaggatgtggataatgcattatcttctgctttggaatatggcccaagcaattcatcacttatagattcgatacatttcagccagtcgtcattgggttcatcaaatttatctccatatctgaaggtgtattttagtcgaaccaagtcaccttcgctagattcggtgacagtctccg

SEQ ID NO: 16147 - DNA, 335 bp, Zea Mays
cgactgagtggcatggaaggaacttacgcaaattttcaatgtgaactaagcaaagggcgatgtggtctttttcatccttcagtcagaaactgtcaccttcaaatttgactgcagtggcacaaaagtccccgaaaattttcaccgatgccatgttaggtgttagcatgatgtaatcaggccttgatttgtggatgtaattgcgctatctacggttgccttgcatgctacctgtgcgctgtatatatgtactcctattcccagtattgaaatacaatcaatcattcacatacttacatggtatctatcgcggttccgatccgctacgcttccgcaac

SEQ ID NO: 16148 - DNA, 1059 bp, Zea Mays
acaagtttgtagaccaattaatgaagaacaactttgcttaaggttgtgagctcatttgttaagaagaatttagagataattaagcctgaagtttggctgtcaggctgattaagtctgaaaatcaggctgacagtgaactgacatcaactttaagcctaaatttaagcatgctccaataggtttttgtggcagcgtcatatggcaacattatagatggtataatgctctacaggtttgttgcagagcttgacttatgttgccatttgaaattaagagaaaatcaagcttcaacttggtctgtcagacaagctatttactgaattgggcgcactgttcatcggttttcagtaacatcgccgtggataaggattggctcgccggtgataaggacgtcgccgtggctcgggtaagacgtcggcagccacggcaaaggttaccggcgacgtgtcaaagcctccctgaggtggcaggcctcggttgaacggcggccaccgtgccatccccaggttccgccgcgcggcgagctcacctgcgcaatcaaatgtctgcggttctcatccgattccggccggtaggctataaattgaccacggacgctgcttcttctccacatcccgtgccgcagcaactaagcacttgactcgagctcaccggaaaacccacgtaattcccaaatctccctctcctctgttcttgctccgccgcgaagaaaccccccgtggccagccatccccgggtgagtacctattcattgttccatgtttttgcttgctgttagcctcctattgcccccagtatcaatcaatcgaactacgaccgaagcctttcaccagaacgtatgcttgctctgaagagcaccgccgcagaccgcctgcacgtcgacccgctactctgtctgaccccttcgacctctcgccctttgttacggtgtcctggtgagtcacttatgcttaccatgccttcaatttgaactctaccgcgttgtcgtgttcggaacaggctcgtcggagtcttggttccgccattcccgtggtcagagggatttccggtgtgtgatcg

SEQ ID NO: 16149 - DNA, 466 bp, Zea Mays
gtcggattacacatctagggttgagatcatccaagcgaaagggtatacaggtgccctaatcatggcgttgctccatggatctacgacttaaacctcatcttctcccctccgaccataatgggcggcgctccctcaccgagcggcatgaccacactagagtcacgtggattgggccccagtgaccctcgtactaaaactaattggcactaaaatgaagcgaacactatcgcgggctgagcagaggacttaccttcctggattcaaagtggcaacgataggcccacgtgacccgacggcttggccacgcgcccgaactcctatgagaaatcctcaatgtcctgctcgccaccgttgctcgtctatgtgtcacacacccgcgacacggtcgggtgaacactcacactcacgatccagggactcagaggcgacacactcgagtaacattggcagtggcacccgattccct

SEQ ID NO: 16150 - DNA, 282 bp, Zea Mays
acgtcccgtgccttcttcctctcccacggcactcagctgaggatgtcgtgcccatacacttcttctcagaacggtatgattgagccgttgagcgcatgattcgcaccgcgaacaatgtcatgtgatctttgatgttctaggcctcccttcccgctcgctactgggctgctgctacctgtctgctcaaccgactcccgccaaggcggttcctcaccctaccccctaatttgctctctttggcacctccccctcctatgatcaccttcgtgtgttcgggtgcgc

SEQ ID NO: 16151 - DNA, 312 bp, Zea Mays
gaaaaaggaaaaatgctgcttcagcatcctctagtgcattgaaggcaaagaaagtgaagaaggtcttgacacgtaggccgagacacattgagacggccgatgtgccaaagcttattgaaggtccagagactggcccatctgccatagaatcaggtcctgtcatgctaattgaaacttgtatagatccggtcgaaggccgaaatcagagaaggcaacggaatagctaaaggtactgagcccagcaaccacaacagaactgccgaagccatcaagtgtttccgcatcgacttcgaaaaaaggagaatggctagt

SEQ ID NO: 16152 - DNA, 433 bp, Zea Mays
gttcgccggggatgaagcaatggtgtggcatgagatgaccgtggcggtgacccatctctcctcgccccgctctgtatctctctcttctcttgggtagcaggacggccatagaattaggagtagtatgagacttgggtgaggtggagggtcatgtgatagcttgatttatatacacccagaggctaaggagtttgccttggagtaaatactgacgatccgtggtggttacaacggagtctgcaactctggcggcgtcagctatacgaggtataattggtaggcggttacaacgaatgcagataatgcagtgaagatcctagcgagacgcagagcttcagggtagaaacaatcaccatgctcggtctgtaactaactaccaggtgaataaccattcaacgtcgtttatgggacacaccccgggagcctaagttcg

SEQ ID NO: 16153 - DNA, 305 bp, Zea Mays
ggagcgcgggttgattagcgatttcctcgggggctctttaataaatagtacccgcgaaggggtatggaaagattcggaccgatcagatcagatccgagggccaggatcggatcacggccgcagcaaactgaccagcaagcgcatccacccgatcgacgatcgacggctacgatttaatgccgtgaaagggtatcgttttatctaatcgcgtccatcgcttagaagatcaacggtccgcgcgttttcttcccccaacgccgccagatcacgatccaaccgcgtacgcgtgtcttcccattcccgcg

SEQ ID NO: 16154 - DNA, 618 bp, Zea Mays
catcatgtgaagtgcacatgatcacatggtagttagaatatatgccaagaacccttgctcttttcctattttctcatttaaggtctgaacctaatagtcgagggggtccaaacactaagggagcgatggtgataaggaaggcgactcatgggaggagttgagtagtggtcaccggagagcatccgatcgacagatgatgcgccaatcaaagcaacctgcagtgcccacctcccgatggcaccacaatggtggaaggacatgatccccacttgagtattatgagcgtcgagggttcaaaatgattatttagtgcatcgttcgatgattggaggcatgcttttcttaaccatggccaaagcaatgtttgggttccttttttatcttgatggtgatcctataataagatttagtatagatctcacacatctaccacataaagcatgaacaatgtcttagaacctcatatcgaatatcatattagacatatatagccctattgctcccctctttcttgcttccaactcttttctcttcactcatctctcaatgtggcacacgagcgctacttgtaatctataatggtaaagacttaaaactagctgtcaattttccttttta

SEQ ID NO: 16155 - DNA, 525 bp, Zea Mays
cgaaaaaagacttggaaggtggcagattctaggcagaatatgcaacaagagcaccaatatttgatactttgcctctaagaatcatctctagtcggcttaccaaatccacagcaggaatcctcttgttggtaacccgggttgaatcagtgacaccactatacaaataagccgggtacgctctgtccttcagtggctgaatattcttaaaaacaaagtctgtaactacagcttcagcagtcagacctctctccttcaacaaacaaatctcagcaagcagaaccctggcttctgttatttccaagtctgtgggggattcaatccaacttggagcacgaacatccggctgtctccctgaccgaggggggagggacttgccatggttttccacaatgaaccactccaagcgccatcctttaatgctatccttgagtgggatgtcgaggtattctgttttcctcccgcggcgcatctccaaactcgcaccacccacgagctggtgctgccccccagccatcccaagccgac

SEQ ID NO: 16156 - DNA, 305 bp, Zea Mays
cgacgagcaattccattgcgatggcacaaccaccgagcgtcggaatgacacgagagcatacgagatgccaccacaatttccccaagccacccgccgaggacccattgataccctccagcaagaacgacggcggcggctgggttcttcttccgcccatcctgctatggtgaatcatgtactctcgatgtcgaacgcgagagctgagctaggtttgtgggagaggcgagcacaacgcgaatatatatgcgctgcatgggggaatctggataggggtggtgagcgactccatccgaattccgcgcgcg

SEQ ID NO: 16157 - DNA, 400 bp, Zea Mays
gcactttctggattagtagaggaacttcttttgattaatgaatgccaactgttgtattctgtcatggaatgtgagggggctaaatgacccagctaaaagggcaagtgtgaaacatacgattctctcttctggggcaactattgtatgtcttcaagagacaaagataatgagttggaataataatttactaaaggaaacattgggatgcaagttagtagctcagacagttcatttaccatctcttggagcctcaggtgggattctaattgcatgcgatgcagacttttttgacataactgttattccctatccatcagtatattcgttatccgtcagtatcagctcccgtctgagcgacgtggggtgggacctcacaggagtttatggccctcaacctgaa

SEQ ID NO: 16158 - DNA, 577 bp, Zea Mays
gccggaattaaaggtgcgcacattcgaagtcgttcctaaaagactctccgtgcagaagtcgcctatgggcacggttgtatcaacgaaggcgcacaaccttatcatacaaattatggttacatacacacagcgagggcatcacatattacattggctcaaccttcggattgatacccatttccctgtagttgaatagcattatcctcatctcctcaccctcaaaaagatttcgcagctccccttcacccacactagccccagctggcgaggacaacaattcccgtttaccagtcccgtccacgcgaagacgaccactctccatctcaccacaatgacgcctgccacttcgcgacaattcactcactctctgtttcgccactgcccttcgccacctacgcccagtactcgcacccggaagatcctcagcacccaccacacgcggcgaagtctccgccacagccacgtccaacgccgcaaaataatccaagatttgtcagtagcaatcgaactcctagaatcattagactcaaaacacttagacacagccaaacgaatcgtcatcagcagccactgaaag

SEQ ID NO: 16159 - DNA, 782 bp, Zea Mays
cattcaggtatcgggaggggttgcaataggcctgcaggtttttggtgctcggccttcgttcgttggcagatgtcacatcgggccacatactgagctatttctttcttcatccctctccaccagtatctggttttgaggtctaggtacatcttggtagtccctgggtggatggagtaggctgagttgtgagcttctttgagcaggacttctcaggcctccccttttggtacacacagacgatttttgaaccaaaggactccttgttcatctgtcctgaagtccgggagttgttccttgcgggctttctccacaagtcttgctgtctctgagtctagacgttgagctttgcatatgaggtcttctagcattggtttgacttctagactgtcgctgtttcccagacatgtattcagtgagctgattctttcttccaatcttctaaaaagttggtcccctttattccgaatggttttcgactgagggcatctgctaccacgttggccttcccggggtgataatgaatttccaggtcataatcctttattagctccaaccatcttcgttgacggagattgagatctggttgagtgaagatatacctcagactcttgtgatcggtgaaaatgtgacatttgttcccgattaggtaatgcctccatatcttcaagacatgcactatggctgccaattccaaatcatgggtggggtaattctgttcgtgcggcttgagtaggcgtgatgcataagcaatgactctctcattttgcattagcacacaccct

SEQ ID NO: 16160 - DNA, 531 bp, Zea Mays
agttattatgcgccccatttggtcccgcttcggcctccgaaggccgaaggttgaaattgacgaagccgccgaagcatgtcagaaggcatttggaactgtctgcttctttattggtacgagagatttgattcaagagcacatagcattcagagtatggccgcttgtagagagctgggaaatgccgaaggagaccatcaccgaatctagtgaaggtgaactggtccggctgaagtacacattcagatatggggataaattcgatgaaccaaacgatgactggctaaaatgcatcgaagttacaagtgatgaactgcttggatcatattccaaggcggaagacaatgcattatccacagccttcggaagtcggggaaaaaagagattgaacagagtttttgatgccattggttttgtttaccccgactaccgctatccactgcgaggtcaaggaaagaagaggaaaactgctacttcggccactccagacgagcctgtgccgaaaggcaaaaagttaaaggttcttacccatcg

SEQ ID NO: 16161 - DNA, 666 bp, Zea Mays
gccatgcgggccccgtgggtcatacgctctaccgcggcgagctcagattcgactgacgtgtgggacccaactcgccacgtcgctaactcctggacccgctttgcattagctcctcctttcccctccgcacgacttcgcgtaacaacctggttcgattcttgtgggagtcaatctccacaaccccggatgaattggccgccttgatcgtggtgcatataagttgcgccccagaacctctaatcccacgtcggaatcacgtagaaccaccgcgagggagagagagagtcgatcatatcgtcgcgatcaaccagagtaatagcgaggggagagggagagccgctgcggcaaactcgggtgattgacctccagtctacgccaggctgctgggggaggcgctaggatcaccaccgaacgaagaagggcccgagattccgaggatagttcgtcggcgtggaagcttcgccgccgcgccaccatctgcgtttgggagccttcttccactgacccgctctctggtaagacctccagatagtctctacttgttacaaggatggtgtagcgcatgtccgggggaggaatcgtgcacccaagggccagattgacttgctccggcaagcaaaccatcatgggtgcgggcgccgccgtgtcgggattgctggaggatgg

SEQ ID NO: 16162 - DNA, 584 bp, Zea Mays
agcaggatgtggcacgtgcgaacaccggtcttccactcatggcctatggatcctaagtttgcggccactccgagacacgtggatgctaggtctgagccccctgacgccctacaaaccctaggaccgagacccactcatgaccaacaaattctaggtctaagtcccctaacaccctacaaactctcataacaacaaagaaggccaacagtcaggcaatgaagtcagaagatctttgtggagagaatgatgacgacacccgagtttccttcaccagcacggatcacacgctccctgatggattcatggcacgacaggcgccacacgtgggaagagatatcgagacacgacaagactttaccgggagtgaaactgttccttttaccctaatgttacactctctttctggagaatatatttgtaagccaccctccccttggtctataaaatgaagaggatcgacctctagcgagaggagagaatgaccggaaaacctcgactcctaaagagcgaacagacaaacgaattagggcctctagcgatcagatcatccctcagacaactgcctcatagagatttgggatcct

SEQ ID NO: 16163 - DNA, 358 bp, Zea Mays
tgcgtagcgtagtggcctagtactcctatttcttctatataacaaagccggttagaaacagtgcacaagagtgtgtccacgtcagctaaaaatcggtgttcatccgatactacatcaacggctgaggaagcacctcgtggcaacgcaactgaaacataggtgggaaaagactgtctcccgcagcggctgttcagcttgctttcctcacgcggctggagacttctaggctgcttccatatgcgtgcgagtgccagccgttacggagcaaaaaagctttgccagccttaccgtccctacggcacgacgtctctaacgtcggcgaccgcgacgacgacgcccccgcgtatcccctcctcgc

SEQ ID NO: 16164 - DNA, 1202 bp, Zea Mays
catgaactgtgctctataggttgatgttgttgagtaggattccgcttaagtgaaggcccatgttatcgcatcttccttgttgtgcataaggtccactgattgtatgattgtccataactcgacgaattaacttaagtggttgactatggagatctcttgcaagtttatacttctcacccacatccatggtaaactagcgcttccttgatcgacagttttagtttgccggatgccgtgaagacgttgggcactatgtctttcgggcgtcgaccgtgggcccatgcgatctaccgtaacgaagtttttgctccatcaccattttttattattttttattctgcaaagagtagtcgatcagtctcggtgcaaggtgtttgtagcccagcccatgaagtgtctggctttgcccattctagccaaaaccaacgtaaccacaatgctctagcaaagcttttagaatcttgcactcctgggacaccaaggttaattggatgtgtcactgttggctagttgactctgcatttccctcccgttaagttttctcgtctgacccaaaggagcattcttcttatcttgtctatgtcctttagcacactgtttggtaagtgtgttagttagctacaaggacaaaaccaccttagttagtataatccttctggcatgagtgatgttgcaccctttccatgttgccatcctgctttgcaccttgtccagtaagtattgaaatccacttttggcaatctagatatgatcaaggggatgccgaggtatttgattgggaagtgcgatctacccgtaggaaagctgcaagagtttcattgaggttttcgtgattgcatctaattactaggaggggcgatttctagatatttattcatacactaaacgcatgttcgaagccccgtagaatgtaggtcagggcatctaactcacatttgatgagtttgatgaagacgactttgtcatctgcgtacattgagatacaaaattgtgatgtgttgatggaaatctatgatagaattctggcttgagtcactaagctgagcagtttttacaatgactccattgctaggacaaagagtagtggcgataaggggtcaccttgccttagctcccttccatattagaatgattgtcatgggatcccattgagtaacattggagacgatgatgtgtccagcactgaagcgatccagtttctc

SEQ ID NO: 16165 - DNA, 338 bp, Zea Mays
aaactaacgacatcctccttcggcacatgggagaagcggagactaaattgggtgatggatgccctaggcttcgagtaccctgattatgaaagacttgatgacgaagccgggggattgaagagaaaaagggttgtgagtgtgttaacaaggaaagcacagaggtcagttgaaacaggcaagaagaagaagttaacaaataaaccaaagctggcattaaagccttcgacaccaaagaaaaggaaggttacaagttccgagcgcgggaatgaagaggaaccttcttcgccgaagcatttagagaagactccttcggcaacttcagttggggtaacatagag

SEQ ID NO: 16166 - DNA, 822 bp, Zea Mays
gaggggcagcaggggcaacatcactggaactcccagcctcatgatcatgagtgcgtggaggcataggaggcggaggcggaggtggaaccccaaagtcgtcatcatcgtcatcgtcatcatggactgttgcgtcctgagtctcaaactggtgaaaagtggtatcctcggcctgagtatcaatcactagagcaggtgccggcataggatcctctggagctggacggtacgacccaaagatgaggcgagaggcctcaagagtaccctggaactgaggggggcgaatcagctgagcaaagatgtgacacagatagtgagcataaggcagctgtcgatgagcacgaagaccatccagtacggtgttctcgatctcacaaatgagaaaatccatgacatcaaactctaagtgagaaactagggcaccaaggagccaaagctgaatatgagtgacagcctccctgtaacccattcatggcagaagcatccgtctcatgagctgatatagaaatctggccactgtggtgaaatctgccagagaacgtcgtgacccatctaagaagggcggtcgaaacaaagccgcgatgtgagctgtaccaggagcaactccgccgtgagggcgacgaggagggtcagaggtgccatagcacatgctgtgaagacgagtcgatgacttgtggaatccaaacacctgacgaatctgactggcatgaatggtaacatcctctcgctcaaatcggaatctcatccagtggtgatcagggtcgatccatacagtagcatagaaaactcagacccattcctcaacatatctgccgctggtagtca

SEQ ID NO: 16167 - DNA, 616 bp, Zea Mays
gcagtcatagcatcggacctcttagggagaagaataagataggctgaattcaacaatccaagtttatgagcatttccttggtgcagaaaattcaggtcagctagcagatcctccttaataatgctccagcaggtcttgtaaaacctccccgtcaacccatcaggcccaggagccttatcagaaggtaggtcaacaatggcatcccttacctccttctccaagaaagggctatccaggtcactgagatccgctacaggcctatgacagcccaataaatcaatagtaacagtccttggaaaatcagtgcctagaaggttggtaaagaaaccgtgcaaaacttattgaatatcatcatgatttgtgtaaacccttccatcctcttctagttttgaaatgaacttcctctttttacggtaaacaacatgtcggtgaaagaattgagtattggcatctctttttaggaattgaattcgggaccgtaaatgtgcgatagttctttgcaaagacgcaagcaccagacaatgctgtttcagctgcccccataaccaaagctcctccctggacaaggatctgatatcttgcgccatctccagcctatgcaacacctcacgagcaa

SEQ ID NO: 16168 - DNA, 348 bp, Zea Mays
gacaattcgccccggtcaaggcaaggaactaaagattacgaaagaaactgtccatcttatactaggcttaccgaatgctgacggtggtaagccactaggaatcgatgaagcagtggcgggcaataacttgagggctgaacttggattgtctaaggatgagttcgttgttgcatctcttcaggaccgattgagaaaaggagacgatgatgacctgtctatcagatgcttctttttgatattgttcaatagattgttgttccccacttccagctggggcatatctaaccatgaggtgttattgacggaagaaatggactgtttccatgagacagactggtgccacttaat

SEQ ID NO: 16169 - DNA, 724 bp, Zea Mays
gagaagcacaggggcataggtgcaaaagactccaagactcagcttcctacgcactggacggcgggttagtttctaggtttcctagggtttcttatgcaaaatggacccagcgaaggggtaaggagcaaccagaactgttggatcagacatgcgcgagtctgattagaatcgaaccggtactcaatctaggtcgtccgatcagggatcaatggcctcgatccattctagatgaacctgtataacatgatctaatctcaaccactcaatttcatatccacgattcagatcggatcaggccgaagtaacatcggctatttaatctgagccgaacatagggagatcaacgaccctcgcatcatcacctacccccagttgcctagcgcgacggtgtcagcgcccgtgcggtgataggctcaccggagaaaatctgctccgcacaccgaacccccaaacaccgacaggataggctctaaacgaagctatgactatgccaacctgggcgaccacaacacaggcccaattatcataagtcggtgccaacctaccccccatggcggctccatggtgcggacaaagtctgatgaacaattatcggcacactgttgatccatcggttaccctatcgatgtcacatgatcctgcggacgcaacgaacaagccaatgtacttactaggggtcagaacgacaccaatatgagcgtccacgcggttgcgcggcccacgg

SEQ ID NO: 16170 - DNA, 665 bp, Zea Mays
ctcgccaccaccgacacaagcccctccgtcctcaacgacctcatagtccgctcgcctaaccatcggacatcgctgcgcatggtctaaagtgttgccatctcgtgccatcgagttgtcccacttgcacacatgctgctcttcgaagatggcagcaatgcccatgcctacgagaaggtcgacgttaagtgcgagcacgacctcaggcctcgtcgtggaagccccccatacaccgcgtcaatgtgggcggtgataagcttcgccacagctcttgtgaaggcatgtgtaaggtactatataggtaaatacaatatcttgtccttcagagttcaagaaaacgataggctcgccaccaccgacgcaagccctctgtcctcgatgacatcttagtccgcacgcttcaacatcgggctccgcgtggcctaaagcattgtcgatctcgtgccatcgagttggcccacttgcacgccatgcgtctcttcctggcactaatgcacgtgcctacgagaaggtcgtcatcgagtgcgagcgtgactagggatgacacttttacacgcgggttcacgtatccgccggatatccgacatgttggatttgggcacaaaatttaacccacgagtctcacgcatacctgacccatgataaaataagttaggtatgagatttac

SEQ ID NO: 16171 - DNA, 735 bp, Zea Mays
attgcaagtcagccaataggcgcttctaaatatttagaacaaacaatcatggattaggaaatgagactcctagtgcatcaattgaaaagactaatcatgaaagacaaactcaatgtccacacaggtttagaggcaccattccttacaaaataacaccctagcagataggaacactacaaaccttcatgtgagtttgaccatttcatttgtctccctgcactgggcacgcgtggggggatattggtggcttggaaggggggcacttgtaaggttcttcagaccagagtagactctttttcagtatatgttcaagttgatcatatttctggtactccttggtggtttactggggtgtatggccctcaaccagatgatcagaagttgcagttcttaaatgagttgcgcacaattcgctcggcatgttttggaccttggattattggtggggactttaatcttatatatcgagccgaagacaagaacaatagtaaccttgatagggctgtgatgggtagattccgtcgtattcttaatgagttaaatctgtcggaactgccattgatggggcgcaaatttacttggtccaatgaacgagcaagtcccacgcttgttcgtttagactgagtctttcacacttcaggctggggggattatttctcggactgtgttttgcaaagttcagcaacattcatttcagaccactgtcctcttctgttggggctgcatgagtattcc

SEQ ID NO: 16172 - DNA, 722 bp, Zea Mays
gtcagaggattctccagccaacatattgagtaaagcatctatttctacatcatctggactcactggcatctaacgtgcctctcatcattgggaagatcacaaagagaagcatccagggcctcaatatcttcaggagagggtcgcactctaagacccagaccactatcaccagcaggagggtcagacacgaaattgaaaaaggacttaggagatggcagattccaagcagagtaggcaacaggagcaccaacatttgatactttgcctctcaagatcatgtctagccggctcaccagatcctcagcaggaattctcctattggtaacccgagtcgagtcagtaacgccactatacaaataagctgggtatgctctgtccttcaagggctgaatattcttaaaaacaaagtcagcaaccacagcctcagcggtcagacctctctcttttagcagacaaatttcagcaagcagaaccctagcttctgttacctccaaggtagtaggagactcaacccaactcagagtgcgcacatctagctatctccccgaccgagggaggagggactttccgtggttttccacaataaaccactcaaggcgccatcctttgatgctatccttgagaggaatgtcaaggtattctgttttccttccacggcgcatctccagacttgcaccacccatgatctggtgctgcccccagccatcccaagtcgacagtga

SEQ ID NO: 16173 - DNA, 526 bp, Zea Mays
gttcatttggtcatcgcggaagtgcggatggtcaccgggggagcaggagggcaccacgacttcggcaactgctcgtcggagtgccttcaacaccgccgagccgccccaacgcgagaacaacccgtctgcgctcccgattcccggtattcttcacctccatcgtgtttcccatggtcttatgtcagtgtagcgcaagtgaattgctggatggcggcgggattagtgcgggcactactccggcgatggcccccgtgatttggtgggcggcgccgccgtctggccaagctgggagggggaaaagcagggaaaggatcgttggccataggatcgtaaacgaatggctctgattaattggtagctacccccccttcatgtttgaatcccagccgttgacgtgagatcggatggattcgtgccgatctcggtcaaataaaatccagactgttgaagttagatccaatggccctagttgcataccgattcattttatgggagatctaatcctagcccttgggttctaatccaa

SEQ ID NO: 16174 - DNA, 887 bp, Zea Mays
ggcagacaccaaagcagacctaccccaagcatttcccctaagttaattgcacagttggtgagctatcaagctctgtccacgtgaaccgagggggtggcggatagatgagtgcgttcccggtgatccctggtggtccagttcaattaaaggggtcgaggggcatcaccagcatgcaaagatgctagaacaagaacagggagggtatgagcagacctgtggagggctggccacgacgagcttggttctacggtggcggaaacttgatttgggggaaacaagaaatttgggcacactggtgatcaattgctagcaattcttggtggctgggtagttgatgaccttgcggaactggtggagggctcaatttatagggagagtgagcggtgatgatcaattcggtcgagccgtgctggctgccggagatgaagaagaaccttggcgcagtgaattcgtgtccaccgtcgtggcaacctccccggcgacgatgggacagctctagggagtcacgacgacgcggtggaaaggcagagccacgcggcacaaggccgagaggcggcggtcaccagtgaagttatcggagtccgctgcggtgaacatggtacggtggccggagttgtttaatggccagagtctatccacggcgaggatatttacgcgaccccaagtgctatccggttaccagtgagtgtgaatcttaacgacggcgacgatcccggcgcgaagtcattggcagcgaggggagcggttgatttgatctgtccaggcactataccatggcaatgcttaatcagtgtgtctgacagccaagatttagggccagattcctcccaattttctatggaaacatccccaagtctctgcatcaaagttgtagtgctacataccag

SEQ ID NO: 16175 - DNA, 407 bp, Zea Mays
cccggggaggacctcgcggaggcgagcgcatgctggacgacatcctcgacgcccagtgcccgtaccacaaggacatgcgccacacccttcggaactgcagggacttcaagcactccgtcgggcacgaccgacccttccaacctctacctcctcctccgccgcgaggaggacccgaagaaccacgacaaccccagcagcaggaggagggaggaggtggagccttcccgcgcgttgacagggaggtcaacgtcatcttcggcgaacacggatcgcaggagaacagaagacaacaaaagctcaacgatcgccagatattggtggcgactaccggtcctcctgctccgtaccgatggtcggagtacccgatcaccttcactaatggctcaacttcgaccacccaggcaaat

SEQ ID NO: 16176 - DNA, 678 bp, Zea Mays
gcaagattgttgttcttggtggcgatttccgtcagattttacctgtcgtacgaaagggctcacagtcttccatagttaatgcatcaaatacgaattcgaagttgtggcagcacgttgtcctccttaaattatgcacgaacatgcgccttcttggcccctccttggaagaaaacgatcgtaacgacctcatatcttttggtaaatgggttctatctgtaggtgatggtacacttcctgccgaaaaaaggactggtgatcgtgaacccacatggatcacaattcccgatgacttgcttgtccaaactaataatgataaaatagccacgattgtatctgaagtatacccagatttctttatgaattacgataaaccaacatatctagcctcgcgtgccattatatgcccaaacaatgctacagtcgatgatattaataactatgttgtttcgcttgtgcctggggaaaccgtgcgctaccttagttgtgacactatatcaaaatcatcacaaagaataccagatttcgatgtgctatatcttactgaattcttaaatttgattaatgcaaacaatttcccatctcacgagcttatgctaaaaaagggtgtcataattatgttgttgagaaaccttaatcaaagcatgggcctctgcaatggtacacgactactcgttaccg

SEQ ID NO: 16177 - DNA, 456 bp, Zea Mays
ctcaagctgtcgaagtagtgactcgatgaggtgggtagcaacctagcccccaagctatcaaagtagtgattcggcgaggcgagcagcaacccagccccgggtcgtcagaatagtcggtgagcttgatatttgatcatgcaactttgagtcttgaactttgaagatcctattaagacttacctgtgacctgcatgttagttaaggatattttgatggcatgaaagaaaatgtaggaaaattgctatgcacgaaggagatttgtttgagttatgaagtaagaattgagtatgtgttgtcgaggtgcaaggagagtgcataacgttgttcatgggtcggtgtgcaacctttggtgattacattcgtaaagtagggtttgagcgcaccctgagtcgagtgaggcatgtagcaccgaactggggtcagacttcgtcactcgagccaattgccttatgtaac

SEQ ID NO: 16178 - DNA, 675 bp, Zea Mays
gtaaatcaggccaaagacagtaatgagttcacttatgaccagtctggaaaaatgcagagagaccatccatggacaccaaatcaacataacaaagagaggaatggtggaaggagtggctcacctcgaataggcgcagaagagacgacctgcgcgtgtctgcccttctgctacgcagcagatctacaagaacaacatacatcatgagttccaggaaccgagacaagagaaattagcactggaagaaatgaacggacgacggcgacggagtcgagaggagaaagcgcttccgccgggtagcaggccgacggaaagacaaaggcaccagcgaaggggctccacatatgtagtagaaagcagagggatgggcgctacgacgaaggacagaagaacagcgatcctgcgctgttggaaaagcacaggcgacgagacggatttgtgggattttaaaatccgctgaacagccctcacctaatgttatgggcacagcaccgaagcacagcgacgcgcgacgagctggacagaagacctacaccagcgcactgacgtagccaacggcgattctggaaatctaagatctacaacggcgcaccggcctgtagcactatgcttgcgctgttggagaggctgaggcggcgcactcacctggctacagcggcgcaaccccgcagatccggc

SEQ ID NO: 16179 - DNA, 414 bp, Zea Mays
ccgggatttgtgccgggcacgctgtggatattcacggggaggtgaaagatctcgcggggaggcagctagggtcgtaggggaagcttatcaccgtgcttgtagccgttgcgacgtggccggaccgccggtgtcgtcgtggacactccggcgacctcagttatgccacgccgtgactctttactacgcggtagtaaccgtggcacacttgagcttaccctctctgaaccattgcaccggtgaacgccacgattacgccaccagtgacctcttccttctctggccgccaccgcgccaacttcaattcacgcgccaccacccccggagcctataaattgcgcgtgtcgtcgggtccgtaaggtagttaagcacccaacccaccaagtcgtgcctccaattgctcaccagcaagtgcca

SEQ ID NO: 16180 - DNA, 906 bp, Zea Mays
gtcttccatgctgctgcttgcaccttgtgagaacatacgcgaagactggtgtgtccctgtggttgatgttgaaatgtcaatattttgattgcctagttcctttacagtagcattgacctggaagcagacgtttccagagttaattgtgtgcccagagaagctaacgttccaaatgaacgtcctttcaagcagctttgtgattgcatctggaatgaagcctgatggagtgttcgctatgagcatatcacaaggccttttgacaattctttgagccatgcgcccaaagagaatgaagtctgtatcagcggtctcgtctcctgcagtgacaagtattttatacctgaaataagaggtgtcaatgacttagtgtggttaacatagtaggcttgtaagtcccaaaggaattaatatgtaaacaggaaaacattgacgtaaagaaggtagaacatttttgtgctgttggggggggctgagtggtgatagagaatatagtatatgaacttgttgtatagattcatgtcatgtttgatgcacacaaaactggtacattgagttgacaaagggaagagtgctgctcaacccgaggacacgtcatctaacctttggacgggcatagcaatgttagcacaatcacggtttgtgcatttgtaagagtctccatgagtgacagctatgcaggcgcatttttctgcacgagttataccaccacttgctatcaattttccttatagtgactgtaaccaagaattcctttccctgcatggaaaataagaaatagaggcaatctcaaataaatgtgttatgctgaaacctaaataattgtaactccagtctgcctctaatagaaaactgcgggctcaatggcattttttggagagataaatgtttgtagcagtaagaatccaa

SEQ ID NO: 16181 - DNA, 1640 bp, Zea Mays
gttgaattgtctcctgctcttgatcacaaaggggacaaacaaccaggtggggcataccacgctttcgtaatctgtcagctgtccaacacctatttcttatggccagccataggaaggttttgcattttgggggggcccaagatttccataaccgcttccatggctcaaaggtgatggaaccagaaaataaaacattgtaacaagatttagaagtgaactgcccagatgtctcatgcctcaaaatatgttgatcagtttctggagacaaaacaacctcactaatagagtcccaaaggagaaggtattgttgcattccaaccagagtgagaggtaacttgatatctttgatccactgaccattaataagggcttgggccacagttctagtggaagttaacttcttgtccacctttgagaaaatcaatggagctaaatctttgacggaattcccgctcaaccacctatcaatccaaaagagagtatcattgccgtttcccacatgggagatcactgaaatggcaaccaacgccttgacttgtggctgaacagggatatcaagaccaatccaggacctgctagggtcggttttctgtagccacaaccacctagcttgcagtgcccagcttctgtaaagcagatttgggaggccaagaccaccaagttgcagcggcctagtaaccttctcccaagccacaaggcagcaaccaccatttatttcctttcttcccttccagaggaaagcccgtctaattttatcaatagctttgatcacccacttgggaacgctcatagcaatgaggagatagactggaatggctgagaggacgaaacgaaccaaggctgttctcccagcgagattaagaagggatgctttccagttaggcaaccttgcagcaatcttatcaacccaaacaatgaggtcacttcttcgcagtttcttgttggagattggcaagcccaaataagtgcatgggaaggcagcaggcacacactgcagggtgctgcagcattcatgcacaacaggcgcagcacaacagatagggattgcacaacttttatttatgttggcaatcagcccagatgcctctccaaagcagtcaaggatcaacttggtacaaaccagatcatcatccagaggcttgacaaagagaactacatcatctgcgtacatggagagcctggacctgacatttgcagcccccaagctatgcagcagccctctagattccgcatgcctgaataagctgccaagcacgtccatcacaatgataaaaagcataggggacaaaggatccccctgacgcaaacctcgccgatgccaaatatgatcacctgggaccccattgagaagaacatgcgtagaggaagaggccaataggttagagattaagttgcaccatttcagaccaaagccaagatgggacaacacctctaagagaaaagcccaagagactgaatcgaaagcttttgtaatgtcaagctttaaaaacagactagagaccttccgccgatgaagggacttgatcgagtgctgaacaaacatatagttatcgtggatagaccttcccctcacaaaagcactctgatttgcagccactaaccttggcaggagaggagccaaccggttagccataatcttg

SEQ ID NO: 16182 - DNA, 656 bp, Zea Mays
cttttgcgtctccatgcatcggattagcccaaacttctgttccattactcgcacccattcatcggcttctaagggttccttcgccttgatgaagagcgatgggcgagtctcgaagaattccagataggtagtatctcgtggtccttgaggaggagctcttcctccatgctgttgaaattggttgcccgccatctcacacagaaagcgcatattgtcggccagctccccatcaggtccttcattagctgttcccgatggtctggctcccgttgcaccaacatctggtggcacgtccgtgtgcagccgatcatacaatacatgcacttcttcatgtaaggtattatagtacgcttgcagattttcgagggatgcgctaagttctgccacgcgagctagagctttcgcttcacagtcccaagcgaaaatgcgcgagttgatggcccaatcaatggtcgtatcgcattctgaaatttcgtactgcaggcgactcacttcggctgatagctccgcaatatgatggctatctcgctcacgcgccccgattcctgtggcgtagttctgaccaaagttgctccacccaggcttccaggtctccaatcgggtcattactaccactgctacttccttcatgcctggaggctagctgatgtcgtggc

SEQ ID NO: 16183 - DNA, 317 bp, Zea Mays
ttgatgatgcgattaatcaggcaacaacagcactatttgtgtacccctcagcccctctcggtctcgtcactaaccaaaccaccagcccaccattgagcactgaccagccaccatgggaaggaagagggcagctgttaagaagtcgtctgttagtagcaatcctccccaactctccccaatcgtaggaaatgctgctttggatagtactggtaccaaatctgctgatagggttcatgttgaagctgaatcctttgtggccagtgccttctccccagaagatgttgatggtgatcatgtgccagtgccactaccccgaa

SEQ ID NO: 16184 - DNA, 1001 bp, Zea Mays
atccgacggcacagatccaaactccccaagcggtatgccagaactaatctaggccgcccattaaagaatccacggccccgcacccttcatcttccccctgacgcgcccaggcggcggcgccgcgctctacacggtggagcactccggcgaggcgccaaatctaccccacccgagtgccaaaccccaaattggaccgagctacgcgatgctacgcacacggcgaactagtggaagtagttcatactaggaaggatggcgaggaggtttcagttcacggtgttgtgcgtcccgacagcgcttccctagctccggtgacaaattctccagttcccagtcatgaatcctgttcaacgaggctagggaaaccatccatgtgtcgcggcgaagcttctgcgcccagtgcggtcgcctgattgttgacatgggccacactctattgcggcggacgaattcctccccggcttccctcacattcgcacgacggcttgttcacccacacggttccagcgaccgaacacatttcccctcatgcgctcacgatgccacggcgtagacgagatctggcagcagtggctccatcctccttgcactttcctctcggtggcgctgcagcgaggcgaaagaagctgcggcacaaggtagatgtcgagagggggccgcacgagttttatacccagggtagcggccaaagtccgactcagagccagccgggagatacgcgatgttttgttgagccacccgcgagattcccggcattggcggcatggttagctctgaccgtcaagcgttctattaccgaagaaatcggggaagaagattccgacccaggggccccaccccccagagaaacgcgacgcgcgcgcaagggagcattggctgactcgtgggccccacccttcagtgggcgtcacacaacgcgggtgaagtgggctgccactgggattcggatcccacctgtctgcgggtgccaggcgcgcaacggagaggggaatgggccgaaa

SEQ ID NO: 16185 - DNA, 303 bp, Zea Mays
ccacatcccgagcatggcgggctacgccccaggatctcctccacgcgctcgtccctccatcacaactccctgtctcgattacagctgggccccgtgtcagaaccatctccgcggatgtcgcgctcggggcaacgcacccccgctattaccgccgcacgccgtgcctagcggaattccgagccgcagataaaacccctcagcaccttcccgactgcgaaacttgaaacttcacaccctcgtcgtgccagccgttcccctccttcactgcgaaaaccgcggaattcatccgccattgccgacgcc

SEQ ID NO: 16186 - DNA, 614 bp, Zea Mays
ggagtctccttttatagctatgcaccagtggttcaagaggggtggctcatgcatgagtaggacgatcaggcttctattgaatgatgatgagctcgcaccattgaatcgcaagacatttggggagagaatagggggagaaactatcaacttgaatgcccatcattaccgttgttgagtgacggggacagcagtcgcgcttgagcaaaggatggcgggatcgacgactgtgtgcacacgttggggaatagggagaggggtgagacgttagggatgacatgtacagctctcctattagcaaattagggtctgggaagcatggggaaaggctgacacgtggggctagggattcagtgtcttggagaacaggcgagtgtggggtgtgcgccgacaagcgaggttcacctatcaggtgaccaagggcatatgcgtgggtcctgggtcgaaagactaatgggtcggctcggttactattttatcttttccatttttttagatttgaatttaagtttcatttgcaaattcgaatctaataaactccaaatcactttaaaattttgtagaaaatatgaaatattcagatgataagtttggtggagtttgagctcttttcttgg

SEQ ID NO: 16187 - DNA, 559 bp, Zea Mays
tgacactcgagcggacccaaagtagtggaagtagtgggatcgggtccgtcagacaaagtagtggaagcaggctcgagtggggcagccggtggagttgactcaggatcaccccaattggtgtcgccatgcttctcctccacaaagatggtttgtcccatctaatctaaacctccaggctcaaagataggggatagacaaggttcagtctcatcgaatgtaacctcacaagtctccatgatacagttagtctccaggttaagaacacgataagcacgagaatgtaatgcataacccagggaaaccccttcagaagaccgagtctcaaatttgtacaaattgccctgtttcagcataaagcatctgcagccaaacaccctgaaatagctaaccttaggtggccatccaaaccacaactcgtaggaagtcttgttcaagaaagctcgaagaaagatgtagttcgacacatgcaggcagtgttgatcattttgacccaaaacgcctaagagtcctatgctcatcgagcatcgtcctggccatctcaacatggatccaattcttg

SEQ ID NO: 16188 - DNA, 400 bp, Zea Mays
ttggtgagggggatttgcgtaatctttttgagggtgatgagttgaaaataatgttgtttaatttttgggaggtggaccttatcccgaaggttgagccgatgtagtatgtttgctgccctcgtttgtcttgcggtagtgagtaaaaacgctgccctcccccggctcgcaataaagagggaagggcgacaaaatgcgatttgtacttattcgtgtggtgtggttggcgacccttcgctatgtgtatgtaatctgtgacaacattgttgtttgtgtaatgtggtcggtgactcttcgcttgttcatgcgatgttgttgaatgagatggggacttcgtgcttgctatgattgtccggctgcacccttgggcgacttttgcacggatttgtcttttagtaaagac

SEQ ID NO: 16189 - DNA, 634 bp, Zea Mays
atgggaatgccaatcaagcatgggtagcacagaaggccttgcctttactaagaaatgagccttcacttggtgctaaggcttttcaaaacaggttacaacacacttacaactgtagggttagttatgatgtgacatggaaaggaatgcaagaagctctaaaagagatgtatggcaattgggatgatagttttagtatgttgtacaggtggaaggaagaagttttgataaaagcccctcatagtgtggtggagatagacacccaagttatagatgaaaaggtctacttccatagatttttctgtgcacttgagccttgtatagaagggtttcgtgctgcgtgtaggccttaccttagtgtggattcaattgtactcaatggtagatggaatggtcacctagcagctgcaacaacgttagatggacacaattggatgtacccggttgcgtttaggttcatggattctgagagcaaggataattgggtttggtttatgacacaacttcgaagggccatagtgaatatggagaaactagctatttgtactgatgccggcaagggtttgatgactgctgtggaactagttttcccacaagctgataagagagaatgtttcagacatttgatgcaaaattt

SEQ ID NO: 16190 - DNA, 468 bp, Zea Mays
cgtcaattggatagtctggatgagcatgtggaacatcctctgtgtccatagagatgctgccccagctgaggattgggcctcagagtctgtagctggattataatctgcatcatctgcacgatggcgcttggacttgaaacgacctgcaagcttcttcttaagaccacccagaccactgcaatatatatgaggaatatccactggttaatagttgatgacgccacaacatagagaaagaaagtgtaactttctgtcagggaccggactgtccgcgctagggggcctgactgtccgtgccatcctggcggacggtccgcgaccgtccaggggcgatttctagaaccctagccgccccatccatctaataatcaatttaacagaaaataaccatccaaatccgttcaaatttttgcaccatattcacaatgagtaatactagcaattccaccaatcaaaattgtaattcca

SEQ ID NO: 16191 - DNA, 295 bp, Zea Mays
tgtacggtggtcaggattctttaatggccgggcttatccccggcggtgtgctccgagcgcttatcaagtcatcctgagcacgagttgagacgacggcgacgcaaatcttagcgcagggagggtcgccggtgacgagcaggctatgctggcattctgatccactcgggttactgtaccatcagaagttcagtttcagtttcttgctacatgcctgacaaagcaacttcagaactctttttctccagattttctatggcaacgtgatccacactctgcagcaaatttgtagagtaat

SEQ ID NO: 16192 - DNA, 598 bp, Zea Mays
ggaaggggctgggggtatggcgttggggcaaagcagccacatcagagagtcgatgtggcgagtcggcgagtctaccataaaaaggtgacgatgaagcgacgacaaatggcgagggggatggggtagcgaatgcaggtggtgataggcgacagtggcgatgcagcaaggtgatggtgccaagcggcaacgattgtcgcattgtgatggcatgaagggaccctagtgaggagcgagggaaggtgatgctactgacagacaggatcccatcgatagcctgactgtctgtcggtgcaaactctgaggtaaagtagcagtgttgcatgtgggatcctcacgagatgacgagcatgcaatgtggtgccgacagtgggcgggttaggtcacccactaacctatcagtcgatgatcaaaggagtgagcgaggcactagtgggtcttcgctaggggagggaatcaaatgactcaagtggggagtgagcttaatagtggagcaccgaaaaaagctagatcaaaacctagttttctttagatttgacctcactgtaagtgcaatcgacccctaattgagggttttggagatcaaatgacaaaacaaaca

SEQ ID NO: 16193 - DNA, 497 bp, Zea Mays
tgcggtccgagcgtcggacgccgggtagagcgcgcgacgtaggaggagctcaagcacgctggctagggagagaggagcagggagctatcggcgtgtggagaagaagtcagagagctcgagcagaagagcatgactagagagagcagaaacggtccagtgagggagatgacgcctgagtagagggtttgggcggcggtatgctctccaggtgaagagcgacagcaccagggagaagataaggccaaggagggagaaggagatgcacgggggagaagaagaccgcgtgtagaggagcttcgacggcggccaggagattgaagataagggaatcgcgcgtgtggaaggagataaggcagaggaaggaatcagcggcaggatttttctatccagcgtgtcggctgaagaaaagcaacagagggcggggggatgaggataagactaaaaaaatcgatgactggataagtgagaagaaagatttttctgtttctttttaattt

SEQ ID NO: 16194 - DNA, 450 bp, Zea Mays
gtcacaggagcgatttttacagcccaggggggcttttggattggatcgatctgcagcctgacagccatgactcacctgcttatttactgtgctggtttgctatccataggaggattgaccacctctgctgttttccttgtgcctgtacccttacgtgggggtcatgcaggtgaaaaaatggagcatgctggctctctttggccctctgtttatgaccctaaaggaaagacccagccggctgcaactgctgtcttggttttgggcatacaagcacctaatctgagatctccaagttttagccgattgcatatttgtccaccgcgtcacaccattctcacaactctagtttaagttctccatcttccacatccctctaattccactaaaaagccttgaactcacggtgggtactgaggccggtgatcacgacaggcattttttcccttaccg

SEQ ID NO: 16195 - DNA, 643 bp, Zea Mays
tttttcatcatcatcaacttcactaggagcatatcgggataactagatgaacttgtccctgtattcacttactgacatccctccctatttgagggataagaactcctttttaatcttcataaggccagcagggatatggtaattcctgaagtgagtggagaattctacccatgtaatggtgttggcagcagcgtgagcagcgcaatatacatcccaccaatccatagtggggccagtaaggtgacctgatgcatagagtactttctccctgtcggagcactgagctatattgagcatcttctccacagacttcaactagtcatcaacttgtaatgggtccaaggagttagagaatgtcggtggtttatggctcataaactccttgtgcttatccctaggcgaagctggtgctggtggaggtggtagttcctgtcgttcttggcgcatttcttggtgttcttgcctcatttcctgtcgttcttgacggatctgtgcttgcattcttatcattgtgttggccatttgctgtagtagtcgcatttgagcaactgtcatttcatcaattggcggaggattcgaaggggattcattgttggttccggattagttagaacccttcttcgacgaatttgtgctggtagat

SEQ ID NO: 16196 - DNA, 302 bp, Zea Mays
ggtagtgcgagctatgacccagcccccgagggtgtccgagttggttctccctctcacacttccatggatgttcacgtagggtcttctcctctgcattctggttgcatggcggcagctcaagctttgggtcaggaagtcgccttagagaccagcgctcctgatgacagagttttgatttctgctgttgacactgacttggtcgccactgatgcattgcgggttgctccgggtgttgatccttcatcgagccatcaactgatttcccatgacttgggagttccttcgttcttctccaacctcca

SEQ ID NO: 16197 - DNA, 473 bp, Zea Mays
actggatcctcaatcaacggcacatatcagatcggacggaccccgcgtttcaacccaaacgtttccccatgatcaaatccccatcgtccaaactcggatggacgactctggatatcgtcttcttcctcctgcgcgcggccacggcggcaaacaaagcatgcgtgacggacattcgccggagccctgcctagacccaacgccgcaccgattcccaccccagaaacggttggggacaaactcattggagattaggtggcggttgtcgctgtccacgagctgctcggatctgcagccaaggcaagcgacggcgagaatttgcaggtgatctgacggccttcgatctccctggatgtcaccaccacgagcacgtccccgcagtgaaggtctcgatccaaccctggcgccgaatcatcgccaaatccgagaacagcggggcggcttcctcgcactcagcttttttccgcaaatctctc

SEQ ID NO: 16198 - DNA, 789 bp, Zea Mays
cgaccaagtccttgctgatgaaccacgtgaggcgaagcggacaaccaagtccctgctgagaaacctcatgagagcaacctcatgaggtagagcatacgaccaagtccttgctaagcaaccacgcaaggcaaagcgcacgaccaagtccctgccgggcaaacacatgaggcaaagcggatgaccaaatccctgctgagcaacctcaaagcgaacaaccaagtccctaccgagcaacctcgtaagcgaagcggacgaccatgtcgctgccaaacagcaacacaaggtgaagtggacgaccaagtccctgccgagcaaccccatgagacggagtggatgaccaagtccctgccaagcaacctcacgaggcgaagcgaatgaccaagtccctgccgagaaaacccacaaggcggagtggatgaccaactttatgacgagcgaccccatgaggtagagcgagcaaccaagtcccgtgtcgatctaactgccataagagaagggtcggcccaacgctacgggctcgtgttagcatgacaagacatgccatcacccatggccaggcctcgggtacggtgtcgaagggtctccatcgaaagtcaaatggtacgttgtcacgtactgtcccacgcaaacccccaccgacgaatgtggccagtcaaccccgatcgtagggaccttagcgttggagtatctacagtgacccgcatactggaaaggacgcgacaaatacacaatacaagtttatgcctacgcacgactaggggtgaaaacgggcagggtacccgaaacggg

SEQ ID NO: 16199 - DNA, 440 bp, Zea Mays
aatcaaggtagattaagaatcttggcaccagataggctcgggctcagtcgcagatgagtttcaccgtacccacttgctcgtcgatcagccgggataaacctcgccaccgttggccgcttaccgctgtgcgccacatgctcaagcgttgtaccatgtcgcagtgaatcgcgtcttgcatgttctgtggtcgctggggagcttgccacagtgaaagccactaatcccgagctccagtaaccttcttcctctccagccgccaacgcatcttcacgaaattggatgccaccgctgtgggagcctataaattgccaaccccgcctgctccgctaagtaattgtgcacccagtaaaccaaccctcacctcagatcggccactagagctccccaatttgggatttcccccaaatcaaccaagaccaccgagcggtgtgacctcgtcg

SEQ ID NO: 16200 - DNA, 316 bp, Zea Mays
gttaaggagctaagaacaatgaacaggatgtagagaaaagaatcacggtcgcctgtccacgggagacctgcccacggcggtgctctgcccgaccgtgaagacgacgacgacgtcgggagctctggtggatgaaacaagacgaggattggtttgtctgatgcgcaaagaatagacagaacgagtgcacactccaatttatagagagaaacaaggaggttggctaattttggccagaaagagagacgacgccgtcggccctagaagatccccgaagccgagcatggcatctctgttaacccaaacgtaagcactcatg

SEQ ID NO: 16201 - DNA, 359 bp, Zea Mays
aagttggcggctgctgagttgccttctttggacaatgatccacccagtgaccttgttccccacaacggaaacatccgcagcctcctccttgcgatggtgctgcctagttgttttggttggttgctggggcaggaaggcgaggtgtctggttgttccatcgctggtactgatttcctcttggctagttgctctgacggtattgcttctgctgagggaactgcctctgatactgttgctggtgctgacactgatgcgagtgctggtgaccttgcttgaactactgagttgggttgcccgagtagcggggacagttgctactcccggcctgagatccaccaatcttgcgttttctatcctcc

SEQ ID NO: 16202 - DNA, 1954 bp, Zea Mays
gtgggtatgggccggaaattggcccagccaggggggaaaggtttctttttttcattttctatttccatttcttttatctcctttcctcaattaattaactagataatcttaggtgctaaaaatataatctatgtgaggtgcttctaatcaaacaaagtgtatgcatatgatgagaagacctatggggtggagtttagggagagataaataggggggttagattagggttccaaacctcgggttgaaattttgggatgttacaaacctaccccacataaaaaatatcgccctcgagattcagacggggctcgagaaaaggtaagggtatttcttcctcaaagagtcctcactttcccaggtagcttcctcttctccttctctgctccactgaactttacagagtcttacttctgagttgcgggtctttcggactgctgagtcaagaatctttattggcttttcccggtactggagatctttctgaatctggattgtctctgccttgatgtggttctctggtacttgcaggcacttgcggagctgggacacatgaaacacattgtggatatctgacatggattctggtaattcaaggcggtatgctgcgggtcccactctgccaatgatgggataggggctgacgaatcgcggtgctagctttcctttcatttggaaccttttgacaccacgcattggggagaccttgaggtatacgaagtctccttcctcaaatctgagttctccccgcctgttgtctgcataacttttctgccgactctgagcttcaagtaatcttttgcggatcagggcaactttctcttcggcctatttaacaaaggcaggtccttccagtgccttttcccctacgttggaccacattaggggggtctggcactttcgtccgtacaatacttcgaacggtgacattttgatactggcctgatggctgttgttatatgagaattcgacatatggcaaactggactcccagtttctgtcgaacatcaacacacaggctcttaataaatcctcgagaaccttgttgaccctttccgtctgaacatttgactaggggtgatagtcggtgctgaaatctaacttggtgcccatagcttgctgaaggctcttccaaaattttgaagtgaactgtgtccccctatctgacactatcttccgagggataccatggagtctgactatctctttaagatatatccgggcaagggtggctcctccaatggtggttttcactgggatgaagtgggctaccttggtaagacggtctattattacctagatagagtcattccctttttgcgtccggggtagtccggttacaaaatccatgcctatttcctcccacttccattcgggcactgggaggggttgcaataggcctgcaggtttctggtgctcggcttttgttcgttggcaactgtcacatcgggccacatactgtgctatttctttcttcatccctctccaccagtatctggttttgaggtctaggtacatcttggtggttcctgggtggatggagtaggctgagttgtgagcttcattgagcaggacttcccgtgcctctccttttggtacacatagacggttcttaaaccaaaggactccttgctcatctgtcctgaggtccggaagttgttctttgagagcttttgccataagtcttgctatcttcgtgtccaggcgttgagctttgcatatgaggtcttctagcattggcttgactttaggccgccgttgtttcccagacatgcattcagctgagctgattctttcttccaatcttctaaaaagttggttccctttatcccgaaaggttttcggctgagggcgtctgctaccacgttggcctttccggggtggtaatggatctcaaggtcataatctttgatcagttccagccatcttctctgacggaggttgagatctggctgag

SEQ ID NO: 16203 - DNA, 686 bp, Zea Mays
cttggctgtcagacacactgaatcagagttaccatggtacagtagcctgatcgggttcagtaaacctcaccgccgacgaccgatcctccgccgcgattcgtgtcatcggcgtatggattcatgctcgtggcagatggataacatcgtggggtaagaaaatcttcgccgccggtgagctggacgccactccggctagccgcggtacctctccccttgctcaccgcccctcggacaaggattctcaccaccgttaagccgtcaccgttgtccaccgcgtgtctaaccctttccaccacatcgccgtagcctgctttcactctccgttgatcaccggagcgattgccatggcgttggacaccaatccattgtgctagtgctcttctccttctccggccgccagcactgctcggccaaattgagcgccaccgctcttccctcctataaattgaagccacgatgagctccataggatagttaagcatccagccaccaagaatcaccagcaatcgttcactgcagagcaccaattctggatttcccccaatttagttttccgccaccatgaaaacgacctcgccgcggccagctcagctcaggtcagttcaagtctcttcgtggcttgttctagcatccctaggtcctccttaagctcttcgaccccttcaattgaactggaccatcaccta

SEQ ID NO: 16204 - DNA, 586 bp, Zea Mays
gggacactaggcatgtctgtgggttgccatggaaacacatcccagttgtcctacaaaaaacaaatgagcatgtcttcctatttggcggtgaggctggagttgatgatcatcgtcttgtgttcatccaagaagccaagattggctttcttggtttcttcaaccgaccacatggtagtggacgagattgctttttcaccgagatcgtgaggtctacccatggtgatattttgacgttcgtcatcaggtgttgtggtaccaccgagggaccgatgatgagagccatctggatggcccctggtagcactctgccactccttggaaatcggtccaaacggtgatgttgccctgagatccgggcatcttgagtatcatgtaggggtagtgggggatgaccatgaacttggctagtcctgcctctcaatgatggcattatatccacactcgaaccgagccacctcgaaacgcaagaactcggttcggtagttgtcggggggcgccgaaggttaccagcatgaagaggtgccccaacgagtactctccttcagtcgggacgatgccgaagaacagggtgtctaacttaatgaag

SEQ ID NO: 16205 - DNA, 470 bp, Zea Mays
gataacctgtttgaatggacaggcgaaagcaaaagagaatgcttctctataccatttcgagattcaaacacccccgaaaaataggcagccccaaacctttgaaataaaggccttaaacatataatcatcagtgacaaatacgcccaatttaaacatgaaaaagaaataactacataatttgttgctaatgatttatcaaacaaacaccttctattgtttcattccaggtgtgtggaaataaacactgaacgaagacatgcatcttctactgtgtgtatggtactttgcacaatcaatggagacaagcaattcgacattatatgtaagaataagatgtaacgaacaattaggcagatgaacgatactgaccctacaagccgacgaacatgaccaaattgggcttccctttgctgggggtgaaagatggcttcccgggatccagcatcctgcgcaactcatcgacaacggca

SEQ ID NO: 16206 - DNA, 545 bp, Zea Mays
tgcagttgctcccagaaacgtgctacaaacggtgctcctctgtctgacacaatagtccttggtattccatgcaaacacactatctggtcaatataaatttctgcataattttctgccctatgggtggtatgtactggcaagaaatgagctgtcttagttagcctgtccacgatgacccaaatagaatcgtggtgtcgggatgtgttgggtaaacccacaataaaatccatgatgagatcctcccatttccaagatggtatggggaggggctataatgtacctgctaccttcaaatgactggccttgattctttggcaagtgtcgcatccagatacatacttagcaatttccctcttcattctggtccaccaatacaaagatctgagatcatgatacatcttgttactgctggggtgcttggagaatttggaaaggtgagcttcatccaatattttctttctgagttcgggattcttaggaacaaccaatcggtcttcaaaccatagaactcccttgctgtcctgacgaaagcatttgtacttatc

SEQ ID NO: 16207 - DNA, 360 bp, Zea Mays
tctatttcttattttctttaattctggactaggcgcaccaatacagagaaggtcgaggtttattctacaaaatctaccagacacaggcttcccacgcactggacgacgggttatttataataaagggtagggtttcttttgcaaagttgaatggccgaaggggtatgatgacatgtggaccgttggatcagcggtcaagggcccggattagatcggcggaatactgaatcggaagggtacggtgaccgtaggatcctgattctacggtttagatttaaaataccccgcgatcgcctcggacccgcacgatcgcgatccaacgcctagaatcgcccaggccgaatcgttccgtggatccaa

SEQ ID NO: 16208 - DNA, 465 bp, Zea Mays
gccgagcactaattatagagaaccatgggggtggaaccagaagttttcctcacactcagaacaactcagaggtggactgcaagtttattagttgattccctagggtctctttagcaaaagagcgcggcgaaggggtatcggctgtgtctggccattggatcagattttaaaagccaggattagatcatgaagcggtacaccactctttttaatccatgaatcacccgatcgatggcgcggatttaaaacgccctagatcgtgctggattcgttcgatcgcgatccgatggttcgagcctattctactccaatccgaacacctaatctaatcagcgtcgttgccaggctaaccgatgtcccggatcttttcacccttaccctctcaccgcactagccagaacatgacacgacaacgacggcgccctcgtccgcggtggcgctatggccggcgtctgccaaactccg

SEQ ID NO: 16209 - DNA, 787 bp, Zea Mays
atttaatgcgtgcgtgatcttttccccgccctgcatctgcgatctaacggccatcctttgctcaccccgaaacgatgacattgaccagatctacaacgttgcacaccgatccaacggtcatggttccatctgcgaagcagtacgcccttgttccaatctggacgctggtttatggatctacggctaccactcatcttctagctcctgacaccgagtcccgacgaccaacaagagcaccgtggcggcgccaggaccggccacctctaccaactaccatgcaaccccaatgccccaaactcaacgcaatcaggtgctaacctacacagaatcgatggctaacacgcttacacgcgggaggaggacatactggcgagcggtgatggcgcagcagagacccccggccacgcaacacggcggatacatggaggagttcacaccctggttgaccaaattatgggctctcgatcgccaaaccttcacagagagaacccaggtaatgtcctcggggcgcggcgaggcttctaagctcgatccccacgacgaattgacggattgtcctcggcaacgagtcgagttccagtcgcacgatgacgcaacgagcatgctcagcgctccatggcgggcaccgcacacggaccgtacgagtccggggaacgccgcaggtgcacgacgacggcggccaacaccctggttctctctctacgacggaactcccctgggcggtactgcagcggctagggcacgagctcctctttctctctcacgggtgacagcgcgtttctctctc

SEQ ID NO: 16210 - DNA, 363 bp, Zea Mays
ctgggggggcatggtgcggtcgccggcgggattccccgccgtgtgggtaggcagcgccgccttaggccgtcgcgttttaacgggctgggtgcagatgccgttgaaccctcagccaacgaccgagattagaagccaacttaacctttcgtcgattcaatcctatccgttgatccgaaattatgtggccggtggcgcataccggttcggatgtgttttgggtcgtccgatgatgatctaagggcttgggatcgcgtgtgtgtagacagctggggtagtattgctaaagagcccctggggattggatgaattaacccgcagtccacactgtgggaagcctgagtctgggaaatatttcgagttagc

SEQ ID NO: 16211 - DNA, 1052 bp, Zea Mays
gacaatttggggccaggtaaactgtcgtggtccggcctttaggctctcgacgctttgtagattcctgactacctggtggttcgtcgtaggtcctcggcatgaagcgatgggctttttcctatgcatagatcgggctacaagattcgtttgtgcatgggggaggaattagaggtcgcgtctccttgacatcctggagcacgttcatgaggccgtggagtttgggattcgctgtggcacagtgatggccttcgccattgcgcaacttcactgtggtggcagtcttcatgatgttgtcaacctacctgctgggacaacgtcaacggacttggaactcctaacaagcggctttgacgtcgcggcgaactccgtgctcgggggtggtgtcggtggaggaaataatccgtgatctcccataatcttgctttgcgggccgttagttcctacaacgtgtatgttcgttgggtccctcgaaccccggttggtcctaggttcactctcagtctgaggggcgctattcgtgcgactttttccattaaccatactcgtgcgtgatgagcccctgagcctctgctcgatgcagagatccatctgggggtcatcctgccttttttactctcccccgcacatctcttccgcagcgatgaggggtggtgagtcgaaccactctttcctcgatggtctagcagtggcgctaggtgagctacaaacgggtaatctgagtgaggctctgggtcctttcgtaggatccaagcgcgggatccgttatgggaccgtcctcatactcccagacatcgacacatatagttgtcgactctgttcgactggtctcgacggctcattgcctctctccacgataaaccatgagtcggacattcctaggactcaaacacaagctggtgacgaccttcgcactttgtgcaacaggatcctggccgctagtgtgcccgtcacttgttttcccctcgctctagatttcgctgaggtggtcgtgagcccttgtcgatcgacctctcgggccctagatttcgcggtaagtctaccatatgtttttc

SEQ ID NO: 16212 - DNA, 2053 bp, Zea Mays
cacctaacctcctctcatttcctgtgagaacctctactactacttagtatagcaattatcttttgatatgacaggccggtattgggccatgtaatcttggaggattaagcccagattgtaatagctataagtactcatacttgtgaaagaagaaagacaggaaatgaataacagaaatccaccacaaactcacctggaaaacttacctggtgtgcttgcccgttgaactcatctgagttcattcccttgtcgcggctcacgtcagggaggcgggcgctccctcggccacgagctgtgacagttggtatcagaggttggagtcctgcggtggagttcaagaggacgcgacggcgccttcggcgagaccatcggtgcagtcgcgcttcgtgttggaagccatggaggagcaccagcgtacgaaccaggagaattggaatcgtgtgttcgcggcgctggaggacttgaccgggcgggtcaaggaagtggagcggacgcaggatcagctgatgacgcaatccgagttggcggctgcagtagcagagcaggcggcaatggagaggaacgagctgtacgccaaggtagaggagacaggcaaggagatgtcgcagctgcgtctggagcagatgggaagggaactgggagatacatcaggaggatcggaagaggaactccctaatcgagatcagaatcgcattcctcaacaaaacagacaggtgaagggggagcaaggaaagggaaacagagaagggcgacacccatttgatgctaacaaagaggtattgcctaaacttccttttcccaagtttggcagtggagatccagtggtttggattgatcagtgtttggattatttcactatctatcgtgttcccgagtcaatctgggtgtcagcagcaaccatgaatttggaacagaatgctgcccagtggtggagatgttataagcttagtcatggaattgggaattggcaggagtttgttgcagctgtgactgaacagtttggtgctgatgcctatccaaaagccttgaggaagttgttggctctgcgtcagactgatagtttggagacttatgtggatgaatttgaacgagccaagtatggagtagtagttcataatccaaggatgggtgaaccattttttgttactcagtttgtgcggggactcaagtttgagatacaaaatgtggttcaagttcaagtacctaccaccatgaatcgggctattctgttggcccgcatgcagcaagaggtgttggaccgcagtaaaactcgaagtatcaagtctgctagtatggtgaggcaacaaccttatcaagtcaggatggaggagaagggtgttcagaagccagtggacttgagtcgagaaaggcagatcagagattttcgaagacttaatgggttgtgctatgcttgtggagaaagatttgaacccgggcatatagcgaagtgtgctaaaagaaatcagggtcagctgaatgcattgactactgaacatttccaaatggaattaactgatgaggtgttgttgcagttggaacaagaggaagaaaaagaggaggcgtgttgtcgtttgtcaatccatgctttatatggcagagacagcagtgatagtatgtgtgtcagatccatagtcaacaaacaagtgatggttatgctcatagattctgggagttctactagctttatcagtgagcacatggtgaagcagttgggtctgactgtggtgccttgccaacctgtgcaggtgaaggttgctagtggggagaagctgctgagtgctactttgattcagaatctggaatggtggtctaatggacatttctatcatacagatatgagggtgttacctttgggagcttttgatgctattctagggtttgattggcttaagcagcacagcccaatggagtgtgattgggagcataagaagttgcagtttctggatgaaggagttcaggtgaaattgattggtgatgaagtgcaagaagttacttctgtgcctgggatatctgtgttgcaggtacagaaatggattaagggcaatgatgtgtg

SEQ ID NO: 16213 - DNA, 900 bp, Zea Mays
gtcagtcgacctgacgtgcatctattcactgaatctgaatttgatcagggttcagtgttatcgcgccattttgcgcgcgctggtctgaccgatccataaggatttttggtatagtcgttacagcataatgaaagaacattgatcagggtacaattttgatatagatttgtctacaagcaaccacatgaaatttggagcaatagccgtttgaaatcaagccggttggcatactgttcaccggagttcagaaaaatctcgccgggataagatcgccaccgcggctggggatgggtctgcggccgcggtaaaaatcttctgcgacgtggcgctaatgtcctgaggtggcactgcccggttaatcggcagtcgccggaccatcgtcgtggctctgtccgcgcgggtgagcttgccagcgcgtttacagctccgcgagtctcatccaactccggccatcggcctatacattgagcccgggtcctgcttcttcaccacatcacgcacacgagcacttgagcaatcgactcaatttcaccggagaactcacacagtccacaaatccattccgtcttgttccgagcgccgccgtgaaggacctctccatggccagccctcttcgggttagtactcgctcaattgcctcgtgttctagcatgtccttagcttcctgttgctctcgacgccaatcaatcaaagtttaccaaagtcccaccaccagaacactccgttgctccgaagaatgccgccgtatgcaccctctctgtcgatctgcttctctatccccgttcggcctaatctcaatcatgtacctagttcctggtgaacccgtaaagccttcccaaccttcaattttagctttgatcccattaatcatctggaacgctatctccagggtcggtccgc

SEQ ID NO: 16214 - DNA, 620 bp, Zea Mays
gccggctcatacggttgttgtggaaccgcgtgaaccggctagccacaagtgccagctcctcatccccaaggctctccacctgctcctctgtaatagacaacaaagaagatagagcaaacatagcaggtgaggagttagaagcagaaccacctccagagaccagggccatggtgggtgcactagggttctcaatcttggcccgagtctggtggtcaatctctgtggacttgagcttgctgaagagctcgtccacggtgagagtctcgtagttgggtgactcaatgatcgccgagaccttcacctcccaaacccttcgatctagagcatgtagtaattttagcgctctctcatggtcactatagggtagttgtgccttgttggcacgaatcttgttcacaattgactggaacctggagaacatggaatcaacggtctctccagccaactgtgcgaagttctcgtactctcgcctgtacgtctcaaacagtctggtcttcacatgatcgttgccctcatggaatctctcgagggtagaccagatctgatgagccgtagacagatgtccaactcgctcaaactcaccaagcgagagacacgagaacaaagcgtttcgagcttta

SEQ ID NO: 16215 - DNA, 421 bp, Zea Mays
gttagcaatcttcattacatctaaagcctctttcattattggatccgcctcaggattgtatggctccggtggtggcgaaaggccgactgtagtaaatagcataatgataaattttcgaagctacaaacaaacaatgagacaaaaagtttttaaagaatacctataatgaacgcgcgttcaacagcttcttcagcctcctttgcctccacttgtgcatcgtgagattctttttcactcttctttatagcttcgtcagccatctcacgaccacccttcatccacacaccagagtagaatttgctgcccaacgtagaagcctcaactgaagggtccttagtattgtcagctgagataatagattctggttgggccgcggccttgacatgttcacacccagccttttcttgaattgtcgcaaccc

SEQ ID NO: 16216 - DNA, 364 bp, Zea Mays
ttttctccctttcagtctgggggttcgagcttctcgccgctgtgaagacacaagggtggttatctcatcttatcgccgtcgttggctaaattcccttcacatctacagtgttttcttgtctggggggtgagacgagggatcgtcggatttgagttgagtcggagctcactgggattgggattggtaatgcaggggatctggtatcgctccgtcttctgctgggagcggttcgttcggatcgcatgcgcctctggtgttgatcggcatgacctttgagaactttattttgccttccgccgttcctctcgtcctgctccggttgcctgttggtttattccctaggcgacggaatgctgcaccttct

SEQ ID NO: 16217 - DNA, 549 bp, Zea Mays
gccggttaagacctcgcttatgaagtatatggggcaatggagcgggcgtgcacatcctaccccttgtctttcgacaccgagcattgaactgaccacgtggggtgatggcgctatgtagagcaagagcgaatcttgagactatagagggccgtctgtatctccaccatacactcaaagccgtcagtcttttgcaacagcttatggagtggtaatccacactctccatggcacgaaatgaagcggctgagggaggctaggcaccccatgacccattgtacccccttaaggtctgttattggtcccatgatcgagatggcagtgagtttcttagggtttgccttgataccccattcggagactaattaacctagcagcatgccccctaaatcgtcaaatacgcactttccgagattaaacttgatgtcatttgccttcaacttgtcaaatgtagacctgaggttggatatgaggccttcaaaccacgggtattgaccacgatgtcatcgacataagcctccacgatccttctgatgagatctccaaagcact

SEQ ID NO: 16218 - DNA, 669 bp, Zea Mays
tcgatagccctctgcgtctggagttcgtggaaggccattggctatctgcgctaggacctctccaaccttgcttggcgtgttcagcatccgatagaagtcagggtatagtttccgtgcgaggagtgggttctctcgtcgaagctagcatcatgttcagcttcctcgtgctcgcattcttgagcttggcaaaaatcgcggcggtgggagttgtgccgttctcggtgtgttcgttcgtcaggggtctcccccatttccgaagcttcatcccgagagacgggttgagccgggtcctattccctggcctcgtggtgtcgtcgcacgtttcgacgcctgtttctctgctgtcgtgcatagcgctggggaggctcttcccccaacacggtgggttcgtcgtcagagacaggcgacgactctagtctcccctgaatgaagaggacgtctgggaagaaaggagttggtgcagcggtgcactccctcccattctcctttgagggctgaggaatcagggtggttgtccgttgcgctgctctgccctggttcagagtgttcacccacttttgccgggtgatccgtgtccactccttagtgggcaaggtggacaacggagctcatcgagatgaggaggccatggttgatcggccttctaccctctgggggtctcgagtctag

SEQ ID NO: 16219 - DNA, 566 bp, Zea Mays
gaccgtcgtgccgcgattcatgtcggtcgccgtgattcgtgcgctgtgacttgtggataacggtgaacgagtaaagatcttggcgcatggatcaacttgggtttggccgcggctaagttccccgtaccacttgctcatcggccgattgggataaacctcgccgttgttggctgattaccgccgtgtgccacgtgctaaagtgttagaccacgtcgctgtgaatcgcgtctcgcatgcacggtgatcgccggtgtaatgccacggtgaaagccactaacccgagcaccagtgatctcccacccctccgaccgccgcgcgtctcaagcccaaattcatcggccacctcttagcgatcctataaattgatggccaggtctgttgcgccatgtaatcacgaagccaacgcaccagctattgcctcaaatcgttcaccagagaccgcgaatttcttacttcccccaatactgtttctaccaccgcagagacaccctcaccgcggccagcttattccaggttaattcaagctccccgatcgtttgttctagcatccttaagttctcctcaag

SEQ ID NO: 16220 - DNA, 395 bp, Zea Mays
agaaacaacaaaacacactcaattattgcaggccacaagtacactacctttattacattatgccagactggtacaaattatacatactcactagtacaactcaactttccttatttaatttacataaggaaaccacctactactatactactctagttatcttcatccttggttgctcccgctccactgccaactttgggagaacgatcatctgcgaggttcatggaaggaggggctccaaagagatccaactccccataaggtcctccgccagctgctcctgacgttccggctcccattgttgcaacctccggtggtacattcggatgcagctggtcgtataacaagtgcacttcctcatgcaaagtgttattctatgcttgcagattctctag

SEQ ID NO: 16221 - DNA, 583 bp, Zea Mays
ccacataagtgcgagggaaacggtctttcagagttaaaagagaggcgataagtcggacaagttaagtcgggcatgttaaatcgggtagaaaactcattccggcatattagtcggatgataggagttagtcgtctaggctagagcacaagggtataggaaactaagtgaagtacatagttcattatcagccattggacctcaaacatagaatgagacacagggaaaaggaaggaactcagtacacaacatcgaaaaatggcaactttattatataaaggggcgccattacatgaacataatcagttcattacaaactgactccaacaaaagatccccactcctactactacccctacacaacatctactacctaagccggtggtgcctcaccgccgtcgccaccatcgccattgccgcccttcgccctgccgtcgtccccacaaccgctgccgctgccctcgctgttgttgtcgctgttaccaccttcaccaccacttctaacgccaccgccactatcgtctttaccaccgtcgctgccaaccttgtcgtctgctccaccttcatcgccgccatcatacccttt

SEQ ID NO: 16222 - DNA, 697 bp, Zea Mays
caggccgccatctggatgggggtgccttgcttggagcggacggaacgggaggagtgggagtgcgtgcgccgcgtgcagcagctctgcctgcgtgcgcttttttgttttgtattgaaagggaggggggttccagtagtggtggtggtggtggtggtagcggtagcggtagctggggtctgtggtgtggatggcggtggctgagagcgagcggcccgcaacgcgatcgaggaagaggagggaggacattttggattggatgtggggaaagttgccaggacggatgtcccccgctcccgctggaatggaatgcgcttcctgtacatgtgggatacgatctttcttgtttcgatgacataggctgggctcgatttgcctggaccatacccgctcggtgtttggtttgagatctcacgagtgaatagtgactggcccataacgaggggatgggcggcccgagcagtagatagggtggccgttgcctgttagtcaggttaaagtgtattgtttcttataatttttttccttttttgcgtataccatgatctaacttgcggagcagcagatttattttattttcgggcagtttatagagtcacgatctttgatttgttatcctcacataactaccttgtctactacttattaaaactacaagaggtagcatgcctcccctgattctgcctatgtcctgtccaac

SEQ ID NO: 16223 - DNA, 376 bp, Zea Mays
tcaccggagttatccccagggggtggctttttacctggcagtcttatcgggctatcggcgacgcgaatcctacagcggtggcgtgaatcacggcgaagatcggtcgtcggcggtgaagacagccgcgctggcggtctgatccggtgggcactgtaccattgcgagtttcagtcagatgaacctgacagtgcattttggagcctcattttctccagtttttatgtggaatttatgtcaactttctgcagcaaagatgtagagctataatccatctatgactttgatacaatgtgcccccacaaaaagtcactggatccaaatcaaaaccgatctcaaagttcaccccatcacactgttactgaaaattcagttcagg

SEQ ID NO: 16224 - DNA, 698 bp, Zea Mays
tgtgctgacgtgatggacccgcacgaccgtggccaggtatcccctcgacctatcgaccggtaatactcctatccccgggtcctcctaatctaggtcatcgagttcaccggattcaggttttgtgtgtggtgtttggtgcttgtaattgctcaccagagaaatttccccgccgtgggagcaccatgccgtgggccggctttatcccattgcctaaaccaattagtaaggattcatcggattcgccacgttggtcgctctatcaccgcaagaatgcattggatttggggtcggggcatggcttgcctgtgaggagccgctgccctgtgcgcttgctcctccatggtcgcggctgagggaagaagaagacgtgatgtccatttaatcataaagtgacagttaggattagctgacagatgtccatctggtgggactgattctggaccgttggatcgggtgttgatggataggattagattgagtgtaccttttcatcacgttagaacctggatcgtcgatccttgatccgtgggctgaaatttcatacctcttcatagtctaatctggaccgcaaggaatggatcagacagttctggtgggtcgataccctttcggccctctctattgcaaatgagtccctgaacttattactaaataacccgccatccgtgtggctgtagtatgagtcttgagaatgtttt

SEQ ID NO: 16225 - DNA, 580 bp, Zea Mays
cgcacacacgatcggccgtttggcccaagccagccctcccccacgtcactcactcacctctctctcccattagtctcttgcttgtgggccctatttgccataatagtgttttaagctatagccgttctattctttggatagtgaataccgttgctgattcctttgaccacgatgctgcttgcattctctcgcgtcggatcgtttgcccactcgtgctcagcagtggagcgtcatgtcggacgttccatttctccttgcctctttcccttctttcccactcagcagtgcggctgctgtttctcggcaccattaatggtacgtttacagccgcatacgcattcaatcggcataaactctagcgtgattctctctcctttattgcctataaatcaagtccagcaacaaccgtgctactcatccctgctgtcgcacctcactcgcgctcactgccactgcattgcgccaccgctcgccagaccgtccgcatccgtacaccgttcgtcgccggagttcgtctacgctgtcaccgttgtcgccggagtccgtggagactcgccagagttcgtactcaccgttcgcg

SEQ ID NO: 16226 - DNA, 910 bp, Zea Mays
aaagggctatagcctaagttgtcccaacgaacagcacattttctagcacccgtcttgccaataacttgagtgaaatgattatgggcctcgagcaatttatcttcctaactagtgagcagtctgccgtctcgaaccagcgatctaataaagttttttcttcttctgttatttgccatcaagtgaaaaaaatttgtgtttgcatcacccaggcgcatccagacgagtcttgaatgttgcttagctcttgccttttaaactgacactattccgaggattttcaattttagacttctcctgaattctagctcatccccagagagctgtctggattcctgctctttctcaaggaaggtaaggacggtctgaataattgctagttacactttaaaattgcctacagtctttcgactccagatctttagagctttagccgttcgggccattttcacatgcagccgaaggatggcatctgaggaactaacactagacgtccacgcttgctgaaccacctcattgaacccatcaatttttgtccaaaaagcctcaaatcgaaacccctatagaaaccaaaatccgagcaaccttgcataactagagggcaatgatccgaggtcatggtcccaatggcttgcagatcggcctgaggaaacgtatcatgccactccgtagtcgccaaaaatctgtcaattctagtcatcgtagggtcgtcttgttcatttgaccaagtgaataatttaccattgagatcaatctctaaaagctgaaggtagtcaattgtgtgattgaattgtcttatcactcttctatttattgaacctttgtttttctcccttgctctccttatcatgttaaaatcacctaggatcaaccattccggcttcatcatatttcgaatattgcgcagctctgt

SEQ ID NO: 16227 - DNA, 422 bp, Zea Mays
acatttgaatcatatgacatgaggtaccctatttccatgatttttgcacttaggtccaaaagtgggcaacatttgcatataaccccctagggtttcagtccagggttttccaggggtctatttagggtttttggtacttctagggtttggatgccacttaagtctattaatggtgacattttatgatcattactaataagttttgaagttttctcttacttaggctttgtttactcttttaggcccaggttagggttaagtaccctactctagggttttacccatgacatgtcacatcaatacaacttgtttgaactttttgcctagtgaatgcactctaaatgtatcaatcacatgatatgctaatgttcatgatgttatgctcaaatttagtggcagtaacaccaggggtgttacatcct

SEQ ID NO: 16228 - DNA, 413 bp, Zea Mays
acatggacgagtaaccagcctctaatgctgaaatttccgtccttatataatatagctcgtaaaaaagcgatacggtggcgaatgtttttaataggattcctctaaacatctttttcagtagagcactggtgggtggtaatcttttatgttggaatagattggtcttgagtattgctcatactcatctatccactgggagagatgagttcaaatggaatttgtcaacctcgaggctttttacggtccgttcaatgtacaatgctcttattaataatgccaagattttctatttcaaaccgctatggaagatgaaaatacctctgaaaattaagatctttatgtggtatctaattagaggtgtggcactcacgaaagacaatctagctaagcgtagatggcagggaagtaaaaaa

SEQ ID NO: 16229 - DNA, 1178 bp, Zea Mays
ggcatggcgcagtcgaggtggaaaggcatcgatgcccccgcaatagggcatcatctctgcgtaggacacaaagaagacagatagattaacatatgagggatttggccccatatgaatcgtaatctatcgccttattttgtcggccttaaaaggcggtgctagtctaggccacttatgccgcctacgtggggcgaggctgagagtattgagggccatcgagatggcgttagggctctcagacggggcaggtcgagcgggcatcgccctaaccatggtgccccgcaactgatggtgaagtcgaggcccccgaagcggatggatgctctaggggtgcattccacatgggagcctccgctgctgctcacggtcgtgccaagattcttgaaggggaagacaagactcccaaagtagatcatcatcccggtagttcagttgttgtcacgacttgccatctggagcttggatgatctcgttgaggaacgcgcaaggccctacctggcgtgccaattgttggtgtttcatacctcgctccgacaagtaaatttattgtgcgtgtttcgggctccgaagggtgtgtgcggagagcacatatttatgctggctcatggagaatgttcgtacatatagtcatcggtggcttgcgctatcaagaccattgatgatcaaactcgtaataggggttacaagtaggatggaagtggaaccaagaagttgagagagggaggagaggctcatagatctcttattgggatggaagtggagcttagaagttgtaaggtggagtcctagctaagtcttggcttggcggggctccagcttctggtcctcgttggcgctcctccttctgttcgtccttgtgggctagtcttcgtctgttgatccatctatcgatctcccttgccatgaggccagcctctccctttataggctaggacagggtcgactagcggtggcttccctgggaaggagtcgcaacgcaagagtaaaacctgcgttttacctcgagtgactccacgcgtactcatgggccccagggctgcctggttgccgtgtatttatcatgggggtggcgatggtactaggcgtcatcattccagttatgtcgacacctagctcctgtagtctagggctcggtgcagtctgtcatgtagtgccctacggaaggtctgtgctcccag

SEQ ID NO: 16230 - DNA, 524 bp, Zea Mays
aggccataggccagtttgggtcaccccagaattgagtcaggaatctgctgtaaaaatttgagctcaaacggagcaccaagagaaaagttacgcccgttttatggaaggtacctcaagttatggtttttcagggcacaaattggtaggaaccgtagtggcggctatagagcacaggggcacaaacctccctggtataagaaataggtaagcgccagatgatgaaacaaggagggctgcaatgcaatgcggtttgcaacctaatctagggctagcgtggcgagaattcacacaaggcggctagcgagggcaaatcgagtaatgtggtgtctcgacttgtaatctgggtaaggtggatgggctagcggcggaaacaaataacagcgatggagcggttgaactacgattacgacacaacctaaaccagcaataagactcgaacacggacacaaattcaacaaagcaatctgaaacgaaattgcaaggctaaacatggttataggacaacggaatttttttgtatggca

SEQ ID NO: 16231 - DNA, 963 bp, Zea Mays
ggagatcttgcccttttatagctcaagggtaggacattacaatgggggtttgtttcctactggtaagggtatgatctgttgtagcgttgtcttcgatagtctcgctgacgtagccttcctgacgtcgtctccgggatcgtgcgtagttgttcaccaggcatggtgtactgttttatctgtccggtacgcgggtccctgtagcgagtccaacgatgaggtccccatattggacgcccggcggctcccacaaggcagagtcggggcatgtctcggggtcgtgcgcgacgcggccctgccttctatcagaaaccccgcgtcaccttcctagcatacactcaggtatggtgtattgctctatcctgctcggcgtgcgagttactgtgtcgactgatgcttaggttccctatgactggggttgatcggtcccacaaggcagagaccgtacgcggggtgtaccgtcacgttgatagggactttccggtacctcttcggtatgtcgtgccatggtcctgacatagtttggtgacgacgcgtcctgttgtggctgacgtggatcaatagtactggtttggggcctatgtctcgctgaattgctcggtagggacttggtcggcacctccgtctcgctaagttgctcggtagagacttggtcggaacctccgcctcgctgagttgttcaatagagatttggtcagcacctccaccctgctaagttgctcgacagagacttggtcgggacctctgcctcgctaagttgctcagcaaggacttggtcaggatctgtgcctcgctgagtgctcgacaaagacttggtcgagacctccaccttgctaagttgctcggcatggacttgatcgggacctccaccttgctgagtcgctcgacaaggacttggtcgggacctttgccttgcagagttgctcgataggggcctggtaggcagtgggccatcgagagtcttgg

SEQ ID NO: 16232 - DNA, 414 bp, Zea Mays
ctaaaatctatgaatctcataaaaaatacataaacaaaattcatttttggtttgatatgtggaacaccattcaatgcatagaaccaattggtcattgaagcctatgcactcaacgtgtgagacacatcgccgccgtcgccgagggacccaacccatcgacacgacccagtgaaccgatgccttcgacgccacccttgatcccgcatgtagcaccagcatcggggaaggtgcaaaggctagcggcacggaaggggcgctatcccttgatgccacacaagatgcagcaccaacggtaaggtgtcagcgctatccccagtctcacatgctctccatcatcacgggagtgggcaagcccgagtctcgcttctcctcctcctcctcattccaccgaagtcgacgctcactggagcccgg

SEQ ID NO: 16233 - DNA, 586 bp, Zea Mays
gcaagttcctagatttatttttataccaaaaattcattttctttattaatttctgatttcctaaagatcctggactaggcacataattcctgagaagcgcagggtgtcgcgtgtaaattgttcctagactccggctaatcccgtagtggacgacgggttaatttggaataagccgaggggctctttagctaaatgtcgcggcgaaggggtaccggtagagctgagccgtccgatcctggatccagggaccagattagatcccaacccaccaatacacccgagccacggatcatgagatcgacggccatcatcctacacccgagctgggccgctatgatccagtctggccgtccatctgcgaaccaacggatcagataccccaagcccaaaaccggtaagagttatgcgatctggaacgtcccttcatgatccgatggtttaggttgcatcacgcgcagagatacgattcctcctaatccggcccacccattacaagatcaacggccaggagattctctcccttaccactcacacggccggcgaaccccaggtagcggcggcattctgcccacagaccatggcggcg

SEQ ID NO: 16234 - DNA, 812 bp, Zea Mays
cttaagcgtttgtaggaatatacaatataatatatatatttgcgcagaaaaaatagttttagctaggaattagtgtacttacctgtaataatgaataaaagtacagaacggaagatatggaggagcagagcaaaagcaaaggagggagagtgagagcacgcctggatagctagggaaaaggagcagagagtgatgaccccggcggcctggacgacttgaccagaaggggaagaggtcaccgacggtggcggccctagacggctggggaagaggaccagtctgttggcggccctgttttcctcctctcccatgcaacagcagcttcagcttccaacttgtttcactctctcccggtcaacaatatttcccgcctctttccctcctattcactttatattcccgcgcagcagcttcgtgctcatcttttccccgcgcgtcgaaccccgcttctacatgccttgtttccgcctcagcgcgcatagcgcaaatcatgcaccgcctacacgcgcccaccgcgtaaaccaccgcccaggtcctaagcgcagcgctaacatgccgcttagcgtctaattgtgattaggcggacgcttaattgcgcttttttgaacattgcttttatttgaacccaccaaaccaatcttggaaactgcattgcagtgttcacgacgcagctcattaatattttcatattattcatatataaaatgtaaccaggatactagagaaatgatgatcagcccaaggtacttggatcatttttagcagttagcaagttattttagtcaattcaaacaggttagcatgacaaacac

SEQ ID NO: 16235 - DNA, 445 bp, Zea Mays
aaatacgcaacattgcactcagaaccatcaattaaacaaaaagttagatccaacatataacaaggtggcatcaaagactgcacctcttgtgcagtttaacaggatgatatcatcttaaatgcctaatactgcaacagccaacagtgtactcgcaatccacatttcccggaacaaattagatggaaatacaagacaacatagcataaaaggatgcatcttttcacaccttttggggtcttgaaggcagcagcagtctcgcccacccaacccaaaccttgagcttgggcgatgccgccaaagaaaggcagaagctgtgagccgttgacggcaccaagctggtaagcttcctgaaagactgaagggcgccttgctcggatcagatcttgggagtaccgccgtgcgcaatgcggcaagttggaggggcgtcttcttcgctgtagcttcc

SEQ ID NO: 16236 - DNA, 1054 bp, Zea Mays
tttttgattaatgataacgtaagattatttttgacgtgtgttttgcagagcaaatagtaagttagatcacaatgcagcaaaatagtaagttagatcacaatgcagtaagttacgctacaaccggtcaaaacaatcccttagatgagaacttgaagctaggctcctagttgattttttgattaatgataacgtaagattatttttgacgtgtgttttgcagagcaaatagtaagttagatcacaatgcagcaaaatagtaagttagatcacaatgcagtaagttacgctacaaccggtcaaaacaatcccttagatgagaacttgaagcgacgactgaaaaacacgagtcaagatgaaggtcttcatatcctaagggtcgaaggagttgtgggacacttggtatagagttagaacttttaattttattttagccatactataaagaggagttgtggatgagtagtttgaccaagagataactagtgtagtgtcggtgcatgttcacactcaaaactagtgctatgtgtcactcataacctcactcacaagttagaatcaaaatcagtttagaaaaaccctagattagaaacaagtgcagctgctctaagggtaccagactatccagtgtgcaccgaacagtacggtggtcccctcgacagctggctagagagcgcccaagagcaagcacttggcgctagccgaatttttgacagacacccgactgtccggtgtgcatcggacagtctctatgcattgtctggtgctcctcggtgtaatgactaactgttaggactagccgttgggagagcagcattggcgcactggtggcgcaccgaactgtccggtacgcccataagcagaaaggccagaaatggctagtttggggtggttgggtatttatatcccctccactagtcgtatttattgccttgctgccccaactaacttgaattcattgctagagcattgcaagtccacaaaacctagtgaggcgattagcaaaatcataatctcatgttagtaactcattagagcccatgagagccacatagag

SEQ ID NO: 16237 - DNA, 341 bp, Zea Mays
ctggtgatagcgatgacttcgatgtggaaagcgggaatgaagatgccgaagatcggccctggcggccaagtcataccatcttcggaaagtcgtccatcaaacagagtcagattgatgccatgaagggaagatacttttgtgacatgtctattgtgatagttgggggagacagtgccgcccctgcacctgaggaagatgaagttgtagtttatagaagcttcatgaaggcaggtcttcggttcccattgagcaaattttttgttgaagttttgaagacatttgagatctttcttcatcaaattactctcgaagctataattaggataggtattttgtctggg

SEQ ID NO: 16238 - DNA, 395 bp, Zea Mays
cttttttcccttcggcacaggctcgtctggggtggccgaagtagcagctttcctctttttcccttgtccccgcagcggatagcggtagtcgggataaacgaagccaatggcatcaaaaactctgttcaatctcttctttccaggacctccaaaggttgcggatagtgcattatcttctgccatggaatatgctccaagcagttcatcacttgtagcttcgatacatttcagccagtcgtcgtttggttcatcgaacttatccccaaacatgaatgtatatttcagccggatcaaatcaccttcgttagagttagtgatggtttctttcggtgtttcccagttttccgcaagcggtcatactctgaatgctatatgttcttgatttaaatcccttg

SEQ ID NO: 16239 - DNA, 628 bp, Zea Mays
cactgacatggtggggcccttatgtcggtctcactggcaacttgtgcccgcgcgccagccgtagcttgccgctcctacgttgttgttgcagcgtgggaccagttggtcagcgttcacttgcggagcgagccacgtgcctcagaactgggtgctgtcaggtggggcctgaagaccagactgtcggcttcaaccactacgatagaagttgcaggcgcaatcatcgacaatctcggtcttcgcacgcggccatggcggcattccctggggcgcgcttggactcagcctgttcagctataaaggcgggaccctaccctcgtgattctcctattgcgtccaagtctaggaacccatagcaaaaagtgagagaagggagtttatcgccgcaaaggggtggcgctccgttcggcggtcggcggcgaggtctagtgtggtcgtgcggcgtcgcctcaatcactggcgcctgcctgtggccttcccgggccgtgattgaattggagccatcgggaatttctcgtcgatgtggtgcacgaccgcggaattgtgctacgccgtggttgacctcgccacttgtgccaccatcgttgaggttagatttacatgtttgctgagtgttccgtattaatttctg

SEQ ID NO: 16240 - DNA, 411 bp, Zea Mays
cgagaatgatgataataatgggacataagggccagataagggtgtcatggctagaggtgatccaaactcatttggatctttgcattgataccaatgaaacatcatatgatcattgacatgtacatgtacttatagtatcctaagaacaacacaaagagtccacaacttcgcatgacctagaatgacccaaattagggtaaccctaacccaacaaccctaactaggctaggtctaaccaggaaaggactagccaatagtccccaactaggttaccccgactaagattaggcctaagccaacatacctaggagttcctcaaatcggtccctcaatcggggcacctcaggcgaaatcctagcctaagtcccctcgatcggtcccaaacctggccacaccgagactgcctaggac

SEQ ID NO: 16241 - DNA, 374 bp, Zea Mays
caggtttctcctctgaatcctagaactatttcaatcctagcaatcatacaactatttcaatcctagcaagtcggctaaaccaatcccaaaaccataagccatcaaaccatgcgattgtcgatgacatcgtagaaaaaattgaagaatctaacacccacgaaaccccctagtttcatagacaaagtgaaaaaatattgagcgacaatacatctatggcctatcctagcacaattgcttcttactcattctcagtaaccagtgatcagtccttggtcatctcgctgcccacccacaatatcagccattcagcctagtgtcgtatatatatatatagagagagagagagaaattaaatcagtctaattttacaaaac

SEQ ID NO: 16242 - DNA, 584 bp, Zea Mays
aactagggtttttggagtcagtacttcattttcataaagcagatactacccacagtagttcaattgaatggttctgtgagcaacaggggacatgagggagtctagagcatcccacagaagacgatgagctaacctgtagacatctggccacggcgagctcactcacgacggagttttgactgatttgggggaacttcaaaattggagcgctctggtggacaatctgaggcacgggttggtgcgttgggtgtgtgattacttagcggagctcactagggcagcaatttataggttccatcggtggtatcggctaattttgagaagtcgcgcggcggccgaaaaagagagtgagtcatcgtagcggtctgccgtggtggtcactgggcaatgagctatggcggttactaagcagtcactacggctcacgacgacgtggtaaatagcctaaggcgtggcgcaaccacggtgaatggtgcatattccggtgacggtcactcagccacgtcgccgccgcaagtgggcacggcaacagggcggaacaatggcccgagttcatccttaacgcgatatttcttaccccgagc

SEQ ID NO: 16243 - DNA, 694 bp, Zea Mays
gccgaagctaaagagaaatgcgcagtcgcagaagctaaacgaggaattagcgaataatggacaaatcatttagagaaaaacattgaagagcttcgcacatccaaagaaagatgctttgaaaaatctttagactgtgtgaagaaaattaaagctagctttgccaatgtgggcgcctattcttccgaagagaacttcatatgaggcgaccctgaaggtgttattgaatggataagtggggaggccgaagcctttgaagaatgtctaagtgaccgcggggatgtatgtgcgttctctggtgcgcgagggatttcagctatcttggagaaagcgggatacgaccatatcaagaccatggcccaggacgtagctgccttctccgtaaatgatacgaaggacccctcagctaaagcaagttaataggcgggaaattttataacgacatctaggaaaatggtggtcgagaaatggctcatgaaattatgaaaaagagtgaaaaggacatccatgagaccggaggcaaagcaaaacaagctgaagaagctgcagagcacgaaaacatataggtattatgtcatgatttttaacttcagcatttgtttttatagcttcggactgattaactttatctttcttcagctgaattatctctgccgtcggtaccgctcgatctcctggccgatccagaagtgaagga

SEQ ID NO: 16244 - DNA, 682 bp, Zea Mays
tgtcttcaattgaggacaattattcttgtagtgactagggtctctacagtgccaacaagcattggctggaggttggttgcttgcaacagatggggtgtggagggaactttgacccggttggctaaaacatgatggagcggaccctgctggcttgtcgaagctcggtcctttgggaggaaacccaaaagatcggactatctggtgcctatcctgctgctgagctcagagaacttgaaacttcctcttgaggtgacccttttcttcttctcgagctctttccacctggatggccttgtttgagaggtgagagaaactaaggaaatcttgggtggcgaggatggttttgagttccggtctcagccccttcaagaaacgggccatcttcttggcttatgtgttgacatcatcaggcgcatagcgaaccagttttgtgaatttgtgaacgtattcactgacagatctccctccttgggttaactcccgaaattcttcttccttgagctggacgatccctaggggcacatgatgctcttagaaagcggcttcgaattctgtccaggtagcatctctgatggcagcgctgaaagtatcccaccaggatagggccatccgagagagttgttgagcagcaagatgaacacgctggttttcaggtcattcgatggcctctaacttccttttt

SEQ ID NO: 16245 - DNA, 494 bp, Zea Mays
gaaaatatggcatttgtttccgattaggtaatgcctccatatctttaaggcatgcactatggctgccaattccaggtcatgggtggggtaattctgctcatgcggcttgagtaggcgtgatgcgtaagcaatgactctctcgttctgcattagtacacaccctaagccttgcctcgaagcatcacagaagacgacaaaatcttgatgaatatctggcagtgatagaacgggtgccgttgtgagtttctcttttatgatttggaaactttcttcacattttggggtccacacaaatttgtgatctttcttgagaagttctgtcattggtcttgctatgctggagaatcctttgatgaagcggcggtaataccctgccattcctaggaagcttcgaacttcactgacgttggttggttgcctccattttgacactgcttctactttggaggggtccacttctattccttctgcggttaagatatgcccaaggaagg

SEQ ID NO: 16246 - DNA, 648 bp, Zea Mays
tccaaacaggcccttaccttgtccaactcccaactaccgtaaaattactcatgtatacttgtgttgagcaatgtcatgctgctctttagatttttgtaggctagaaaagcaaccgtttccaattgtaatgctatgggggcttcatgtaatctcaagcttgttggtagcacaaatatttgattagtccccattctctgtatcattaaattatttgttttttcctggtgttccttcttggaataatttcagggaccttatgtttgctcattttccagagtatgaatgtgttccctgattcatcttggaatatattcaggctggtatattttgccgaatttccatattgtagatggatgtatatcatgttcctcgttgggttgggatagtttgagtccactgttgtggtagccgagctatggagagtttacttccttgcagtgctctttgcggtggcagctatgcaaagatccggagtttgtgtttgctatggaaacttccatacattttctggtgctttgtgggcgttgaggttcatgtttattttcctcaagttggacgaaatggtggcttgtctgaacaaatgactagtggcccctggtgttcatttggttaacggttggcctgtctgaacaaatgactagtgacatt

SEQ ID NO: 16247 - DNA, 350 bp, Zea Mays
cgggtagagagaggggtgagttaccgacgagcgctaacgtggctttcacttaggcaatgtcttaggcgatggacaaactaccaaaggcggtttactacaacgtggtaacgcttctcagcacgtggtgtccaggcggcaagcggtagactccggtgaggtcatctggaccggccgcagggcaagtgggtacggcggccagctcacggcctcatctgtggtcgagatcttttcaccgccggccaatatccgcacacagagcgcatcaatcacgacgccggcgaggatcgtggcgcggggttcaccggcggcacgttcactgcatctgaagatcttttcgttcactgtaccat

SEQ ID NO: 16248 - DNA, 362 bp, Zea Mays
gagcaattgggctgcgtcactcgtcaaggcccaggaaggaaaatgctgtcgtctatgggctggaatgggttaactagtgggcgccgggaggtttatgtaggggaagtggctgccgcgtgaggcatgtaagaaatacacagaaccttcttccttcccaagtcttgtctctcttcctcctcctacttgatattcctctctgaaccacatggttgtaatgatctacgactggtgaacctatcggagttacaattggtatcggagcccacaatgtcgctgctgcctgggagagctttgggcctcttagggggtgggatgtaagggaccagtatgcacgccctggtttagtaccacttcgcctagcc

SEQ ID NO: 16249 - DNA, 721 bp, Zea Mays
ggaaaagtggtgtgcagataagttgtaatattgcccagtaagtagtacctgaagagtatcttacgaaatcaatggtatattacaacccgctccccagcggaaccctcattttctccacgcaggcctagctactcatcgccagtaggatcccgctgaaagcgctcggccaccgcgtccacaacgtcttgcacgccctcacgagcagcatcttcagcatcggccaccagacctgcgatgactggccccaaggagacagccggatcgtggctccggaagcatgtcaagacgtattctattgccgactggcaaagtctgctgccctcggcctccaagcgggcgccaagaatctgatccagacgtcgaaggcggtcagcagcagaatccagtaccgggagcgcgtcggagatggacgccggccgcaccagtgccgggatggggctcacccccaaagacactagcgtcgtgcttgcctcgccggcccaggcagcaatgcgctagtccccggcgcgttgctcagcctgcaggtcgtcgagtgtcttccacatcgcctccactacctgggggcccgaggctgtctgcgtcgcctaagcaacttgcgctccccgaaactagtggacctgctcctccagagcccgcactttctcctccaaacgcttcctcctctcctcggcctcgagctcaagctcatccagcagcttgttccaccttgcccacatctcct

SEQ ID NO: 16250 - DNA, 707 bp, Zea Mays
cattgtataagtgacaaggcggcctcctacacctccttgtggcccctctcgaccacctatttaagctaaaaggcagcgatggggaaggtaagttagagcctagcgagggtgtgcaacatgagcttggtgctgaaggggctgacctacgaacattattataggttggtgagcgcggtggacagggtggtgctagcgcgacatgcatggagggtctttggcgaccatgcgtgacatgcatggactttgtttggagcgtggtggcgggtcgcggccgcggcatccgaccatctgttccgttgagcctcggggcgggggcagcgtttggggcggaccgcactaacacctggtccggtgtgccgttggtgacgacgaaatcggggctggggcgccgtcgacggaggtgatgggatggggctagggttgctgggtgatcggagcggggatcgggtcccattattttcagggccgggacggtgggttcgaagcgcggggtcgttcgggtggtgggtgaatcggatggcttagattgcataacggtatagcaggcaactgagtttgcgtaacggtagaacgattgggaggcagccaaccccttgcagccttaataagtagtaaagattatacgatggtacggtggtgcactttggctttgttgacttatcttcgtcttctttttttgggggagggggggagatgactctttctat

SEQ ID NO: 16251 - DNA, 304 bp, Zea Mays
aaataatgaccttttataatactaaactcctctagttcgtttgttgtttatatgtatgcaattcttttctacattggggttattggtgtttcgccccaaatatacagcatatcatgttccatttgaatatttccccattattattcttgcttggcttatcaatggttctcaccctgctttgctaacactgtctatgttgatagtccttatagaaaacaaacacacaaaaaaacatattgctgagaatttgagatacatatggccggtttgttttagggagaagtaaatatctcattcaagaaag

SEQ ID NO: 16252 - DNA, 292 bp, Zea Mays
tcttttgaatcttggtggaggagcagcagttctagaatgcctctgatcagatgaaaaaatgtttcaactcattggtgatcttaggtgcctgtgttgtatggaagcataggaataagtgtgttttttatggatgcagtcctagtttagctatcgccctacgggtggcaagggaggaggctttgtattggtccttagcaggagcaaaagccctgtccttcctccaggttggagagctgtttgtataacagagctctaggtcgtcgtttccattttttgtagccagtgaacagtc

SEQ ID NO: 16253 - DNA, 689 bp, Zea Mays
agtattcttgcactagatccctggtactgatatgttcagtcaccactctgaattctgctatggctagctggcatcgtaaccctagcttcatgttgcacaagggtctggtcatcccgaagcttaagctcagagggctcatgaccagcatcttcagcttctccctctttttctcatcagccttgatataaaaccactcacttttctagccatttggtccgatagctgaggaccggggccttcgtatccttgcgatatgcgaagttataacagccaaaattttgatgtagcccgtcttctctggcctttgtttggtaatgtagctcatgcactcggcaaaaagcttcggcatttgggtccatcctctggctttgaagggcctagatgaaaatgctgagcctaatgatggcattaggggccatctgatgaagaaatatttcataattatccaaaatttctccaattatttcgttcaggggaaaccgtaatcctactgtgaaaaaacttttgaaaacgaattagcttcttcgaagtagcccggcttcatcatcatgggcatatcagcttcagaaacagtagatttttcaaaatccaagtggctaggttttgacgggatcagaatgctataatcttcttcttcttcatcagcgatttcttcctcaacatcttgttcagtttcggcagcaggtgca

SEQ ID NO: 16254 - DNA, 701 bp, Zea Mays
ccatgatcctcgtccccgcccccacgatcccttccataagcgcccccatcctcgcccttccatcgccgcgctctccatggatttcgattcctcggcacagatcgacgcaatccgtggagtctcctcgccccagcctctccatggattgcgaatcctccgtccggtggtgaacatcgacagcaggtacgtgatgaacaacaccgacgaggccgccctgaagcgagcagtgtacaagcagccggtgtccattctcatcgacgccagcggcatcggctactacagcgagggcgccttcacggggccgcgcaccaagaagagttctctcacgaatccttagatctgaggccgtcgtcgcctcagcgacctcatcctccatccccatcaccagctccttgctgctgctgtgctccaccgtgggagcaacagggctacaacagctgccgcattagctgctcatcgcccccatataggcgacgacgccagccagtaagtcagtccgaccactctcccgcgggatgctgcctctctgtcccagctctttgcctccgcctcccctcgtcctccatcgctcccctcgtcctccatcgctcctctctggtgccgccgccacaccactctctcaggggggatccaggtccgataaacgtagttctgggcctcggcacaggcaacacgtacttatgtatctctttgatatgaca

SEQ ID NO: 16255 - DNA, 1023 bp, Zea Mays
gttttaaatgcgagatgtgcgaataatcggttagtgtttcactcgtctaatcgctaagtgttgtcataaataattgcgctaaaattgggttataagaatgcagtggtcacgtggtgtgtttgggtgtgacaagtagattaggagtgtggggtctgtcgaagcactgtgatgtcaaacatgtatatcgaagtgcattgtggtggtaattgcgttaagttaatcggtagtgtctcgagtgcatgccacagcatggttgtatgcgagacaaggtaacataaggtgtgctcgacacgaatgttcggtcgacataagtaggaaattgtgtttgcttaattagagaggtggtgacatgccgaattagtcatcgctttctcaatatttataagtcgaatcgagtcgatgcgtattttgtgtttattaaattatgcttcgcatataatgtgtgattgtgctcacgggttcgagtagacacttcaagtaaatcaagtagatttgtgatacaagtgtgtaatggagttagttgttttaggacaattattgaaatacgcggttcgtaggataaacatgtatgcgttcatgatttgggaagtaaatgcgtggtgactgcgaattggagatttgtgatttacgattcatatgagttggtcggtgtgcgaatatacttgtgaatctgtgggtttataaaaatgttgtagtatatgttgtgtctcggattgcggcaataaaaggcaagttgacgtgtacgttatctagcggcgatgtcgttgctctagttaaccgaatggttagataacttggttaagctcgtaatcgcagcgaatggcttgttgtggtctaaatgtgtatggttatgggcacgggtaaaaagtagtagtgctcatgtggggtctaattgaaaccccaaatggttgggtgattatcggggagaatgcgtcgttgattggttgtagtagttttagtgcactaaatgacttgaataaaatttgcaagttgacttgttggtcctcatttgattgttttaac

SEQ ID NO: 16256 - DNA, 437 bp, Zea Mays
aggcgactttcacttcccttggaagggatcgctgcgttgtgataaaacgaggtgttttaccctcggtaaagatctgtccgtcggtattctccctcatcgtctgggttgtctggtcatgcttatttaagtctgctaggacaacatgcacgggtgatgggaagtacgggcatcatcattactctctctactctacgctgactcctagtcttcatagcctaacctctagcatcatcatcgtgttatgggctctatagggggagtcaggaataggctatgagtgaggcgcagtcctaggacacataggtcataagtggggatctggcctcgggcgcatagaccatgaatgtaaggtggaccggctcctttgcatgtcgcggcttggtgttaggcattatcagacgcaaaatccactcgagtggctccctgacgatccgtct

SEQ ID NO: 16257 - DNA, 300 bp, Zea Mays
ctgccactcatattcagctttggctccttggtgccctagtttctcactcaaagtttgatgttgtggattttctcatttgtgagatcgaggacacagtactggatggtctatgtgctcgtcgatagctgccttatgctcactatctgtgccacatctttgttctgctgattcggcccccacagttccagggtactcttgaggcctattgcctcatctttgggtcgtaccgtccagctccagaggatcctgtgccagcatctgctccagtgattggtactcaggctgaggacaccaccttcc

SEQ ID NO: 16258 - DNA, 322 bp, Zea Mays
agcacaggaaatgctggcggaacctcaacaacctcctccaattttgtccagtttgtaaaggtaatcatgttctcattgaaaacaggcttgtacaaattgttcgaggctctgacccggaagtatgtgatgttgtagacgactccttttatcagaggcttgaacttttgtatgactggtgggaatattgcagcatggatatcgtttccctgcacaaagcagcgatggaggaaacagcaacataatagcaattaatctcataccaatgccagcttccctttaccaaatagataactgtgcagatgttgtacctcttcgtcaagca

SEQ ID NO: 16259 - DNA, 426 bp, Zea Mays
gccgggtatggcctcggacgagtcgtaactgcgtctcccgctcggggatggccttgggtgatacgtgactgtctctcacgcccgggcttgcctcgggcgagttattactatgtctcccacccggggttggcctcgggcgagtcatgacggcgtctcccgcccagggatggcctcgagcgagtcatgactgcctctcttgcccggggaagatcttgggagagtcgtgactgcctctccctcctgaggttggcctcggatgagtcgtgactggccctcccacccaacaatgacctcgggcgagtcgtggctatgtctcgcaatcggtgttggcctcgggcgagttgtgattgtgtctcctgcccgaggttggcctcgaacaagttgtaactacgtctcccgctcgtggatggcctcacgcgagtcgtg

SEQ ID NO: 16260 - DNA, 642 bp, Zea Mays
gcctccgacaccattctcgcgtatgcgtatcagtagcagagacagctaagtggacgatgcagagagagagctaatgccttctagaagacgcaaatgcgtgccggatctttattccatgttcctttttttttttttttttcagcagtagtacatgctaataaagtattgagtagacaaaagactcgtcatcacgtcgtcgtccacgtcggtagaattgcacatatagtatacctctgtatgtgtcttgagagaccagggagagagataccagcttgtacagatcgccagcgccaacactgctgatcctgtgctttcgttggtttgtgccggtgtacgtacgtgacttcacggatcatgatagattgatagctagctagggggagctagcttcgagtgtgtgccgcttaaatttgttcatatctttaagctgcagacgcgagctagcagggattcattcaatccagccgcagccgaatcgcacctgtatacgtccgccaatgcaatgcggtggctgctttgcaagcagggagcagtacttatcctttcgactgaagaaacagattgttaaagtgttgcgttccgagtttacagaaagacgagctccactgtgtccaaaaatggagtatctatctaacacccccg

SEQ ID NO: 16261 - DNA, 412 bp, Zea Mays
caaaaagtacatggtcttattaacaaaaagtctccgcgaaggggtatcgtggatccagggtcgtccgatctccgcctagcggcccagattaaaacctcccaaccatgatacggtacgcaactagggcggttggatcggcgatccacggccccagtcccgcctgcgcgcggtcgactctccaccgcgcgatcgctatccaacggtggagcgctatcgctatcacatcatcaaatccgggccgatcattcacgcatcaacgacccacgcattctccccaatcctacaattgaatacggcggcgccgctcgactacgcccggtggaggatgatcggagctagcccggcacggcgcccgctgacccgatgccaaaacaacgagctacaatgcgttaaggaggactcgccgaacacg

SEQ ID NO: 16262 - DNA, 733 bp, Zea Mays
caacggtgaacgcggccgcgctccggtgagcaactgtaccggccgactggggcaatgactagggttcccgagtaacagtcacggaattggacccattccaaaccttttccccaacctaatttcactaatgaccaataggtttgctctggccacggtgaccgtgagaagtgcggctagacagtcgtgttccccgcgaccagagggctcctagcgcacttgcgcgggtcggcaagcatcgtatacatatgagaaagcttaaacgagggagagggaggatgaactgaccggaatggggctggctgcggtgaggtggatttcgcggtggcggagaactgatttggggcgaattcaaaattcgcgagctctggcgaacgattgctaacgattctcggaggctgggtagctgatgaccttgtggggctggtggaggcttcaatttatagggctcaacggcggtggctggtgaatcgggcgagacgcgcggcagccagaggaagaaggcactggcgcaagcgctaggtggcttctaccgtggcggtatctccggcgatcaccggacgctcctagcgtaactatccgcgatgtggtaaagcgcccggacacgcgacacaagaccgagcgacggcggttcaccgacgttcttatcggttctagccgcaaggcagacgggaagtacgggggggggggggttcaccggagtggcgtccagcgcatggcttttaccgatggcctt

SEQ ID NO: 16263 - DNA, 676 bp, Zea Mays
ccggccgcacctgccggaaaaatacgatgggacatcgaacccatcggagttcctgcaggtgtacgtcaccaccatcacggcagcaggtggaaacactgttgtgatggcaacatattttcatgtcgccctatctggacctgcccggacttggctcatgaacctcgccccaagatcaatctacacatgggaagagctctgtgcacgattcattgtgaacttcaccagcgcttaccaacagcatggtgtggaggcccaccttcatgttgtaaggcaggaacccggggagaccctccggacatttatttcccgcttcaccaaggtacgaggtactatacctcgtatttccgatgcctccatcatcacggccttccgacagggggtacgtgataataaaatgttggagaagttggccacacatgacgtggagactgtccccacgctcttcaccctggcagacaagtgcgccagagccaccgaaggccgggcatggcactcggccccacaaactgggaccacccagacgggtggttcgggtgccatcccccgggacggtaaaaagaaaaagaagggccgcggctacgagagaccgcagtctaccgcgctggtcgtcgcagctgcgaccggaggccggggcgaccgcaacaaacgcccacgaccacaaaggggtaacagcggc

SEQ ID NO: 16264 - DNA, 516 bp, Zea Mays
cttgcactaaatcccgagtgctaatgtgcttggctacaactctgaattgaacttcagctaattgacatggggagccaagttgcatattgcataatggtcttgttatgtcgaagctcagcgttaacggactcatcaccatactcatcaatttttccctctttttctcatcggccttcacattgaaccattcattggtccagccagtaggccacttagtacgatatccaatcactggagtcttcatgtcctttcgataggcgaagttgtagcatccgaagttcttgtgaaaactataacctcatcatccttcatctccggaattatttcgtcccaagcaaatctcactagtccatcgtcattcttcccaaaatacccaagcttcttcattagaactaggtcttctgcttttacagtagattttccaaattcaacatgactgtgcttgcttggactcaagataccatcgtcttccccatcatcactaccagcttcggcagcaacatttttagcttcgac

SEQ ID NO: 16265 - DNA, 435 bp, Zea Mays
caccaccaccaccaccatcaaatcatggatgcaagactgtacgtaaccgcatgcccacacacacgtccgtgtgaatgtgtgatcggcaaactaccaagggaatgaatgcgcaactgatgacgacgtgcctgcagctggaaggtcaaggtggacgccttgcaggggccgtggaactgcaccggcccgatgtagtacgtccccggcgcgacgaccatcgtcaccgcgccagctgatccgcacgctgccttccacgctgccatcagcggctgcagcatcatgaatcagagtgccggccggccggccggagggtgaatcagagggcaggcagacacacatcgaggacgaaggaagaaatgaataagccccggcccggcccaaccttggtatcatcgttgacgccattcccatgggccccgtagttcttcacgtttatga

SEQ ID NO: 16266 - DNA, 1336 bp, Zea Mays
tcgacgatcaactcgtcctcgagctgaaagtggggaaatttgtcgcggaagtcggcggcatcttcccatgtagcatcagtagtggcctgccctttccagcggatgagcacctgttgaatacccctggccaacctgtaccgaacagcctgctccggttctgggatcaccgtcccattgtgagtgggtggaagaggaggtggtgtagctggtggggcgccgacgaacttcttgagaaggccgacgtggaagacatcgtgcaacttggcacgcggaggtagcgctacgcgaactgccaccggattgatgagctctgtgacttgatacggcccgacgaagcgcggcttcagcttgcccttgggcgcgtggggaagggaggaggctgcccgatgacgcaggcgcagcagcaccatgtcgcccacggtataggagaccggtcggtgcaggcggtcgtagaacttcttctggacggcctgggcttgttccaggcggtagtgaacatccgctaggagctcctcgcgttcagccattgtcttggccaccgccgccacccgggtatcgccaggctcacaagagcggatggagggaggatccctgccgtaaaccaccttgaaaggagtgtccctgagtgatgattggtacgccgtgttgtagacgtactccgcccacgatagccaacgtagccactgacgggccggtccccagtgaagcaccggaggtacatgtcgatgactttgttggccgcctccgtctggccatcggactgcgggtggaaggcggacgtcatgtgcagcttggtgcctatgaggcgcattaactccttccagaacgccgaggtgaacactgagtcccggtccgacaccatggactgaggaatcccatggaggcgaacgatctcaccgaagaacgcctgggccacagactcatcactgtaggggtgagacagaggaataaaatgacaatatttgctgaacctgtcgaccacggtgaggatcactgatttgcccccaacgcggggcagcgcctcaatgaaatccaagccgatgtcggaccacacggcctggggaacgggcaggggcagcagcaggcctgtcgggtgtaggtgctcagacttgttgcgctggcacgtagcgcaggtgcgaacgaagtcttggaccacacggcgcatggcggggaagaagaaatcgcggcggaggcgatgtagagtgcgctgcaccccttcatgaccgtcgtcgtgagtagcggccaccacctctagcagcagcggggagtccggcgggatgtacagccggtctgcgtatgccaccatgccgtcgaacagcgaccatggtacgcccct

SEQ ID NO: 16267 - DNA, 806 bp, Zea Mays
cctgtgggaccgggctatcagctcaatcgcgcccacgccaacagcacccgcgccgcgtcctccatgatctccagcgagctcaccccatgccctggtttcttggctaatcgtgccattagtttataagacctgaccccacgaactcctacgcccattgctcccctctaatctagcaaccacggcgagaataggagacttaggcttagatggcggccagaaatcgtccgccagcgccattgccatcttcacctaaagaccgggcacacgggtcgtgtccaggagcctcgcggggtgtttgttgaaggtttcgtgaccgtctggggaggtagtgactatggtggtggctggaattcgttgctagactttggtttccgctgtgcgctgtgggaagcttggttcgcctcttcgaatcgcggtgagtagcatcctacgaaatgccctaccgttaccgcttcatgctgttgcgttcagattagagtttaggatcggcaatgccctaccgttacgcaatgccctatgcaatgtcgccgccgtgcgtaggtctgttgccatcgtgggcgaggaaaggagatgggcgggccacgtcgtccattgatcggacgaggaacggctctgattaggccgaggatgtcaagtaggggggatagatctgggtcgtccgattcggatcggtcgggagaggaatggatggggattctttaaatccgtggcgctggtgttcgatccaacgactggattcgcgtaccgattcactaatattgacttctaatctggcacatcaaaattggatccgacggccagacagc

SEQ ID NO: 16268 - DNA, 455 bp, Zea Mays
tgggaaggttggtgagtgcagtggtttgacaccatcagagaaaccttcacccactcccaagcttataaaaaccacccctgctaagtctatcacccctgtgagagatggtgtgattgatgaacctgtgagagctcctcctcagaaacaagtgtggtttccaaaacctaaccatctcaggaacacacttgacacctttcccgacatctctagcgatccccttcctagagcccctcagccatccaaaaagaaagccccctcccacaaacaaaatccacccaagagagaggtaggtaccattgtgagcattgtgagagggatgggcatctagcatcgttttgctttaggaggaagagagatgagcggcgggtttctgagtcgagcaggaaggacatgaaccgtccctctcatggtgttcatgctcagcctgttcagagacgtcctacaaggcctagagg

SEQ ID NO: 16269 - DNA, 863 bp, Zea Mays
gccaccattaccgagtcgcaaaatgtcagcaacgtccagggatccgaaagccagtcatactaccagcggcaacgatggagatcaagccaacttgtctcaacggaaaagcagccagaaaagcgatcgcgtcagctgaagcaaagcaactggcgagcaagtgggccgattgggtcgtgtatttagagcctggtgggccgaccgtagagcctggtgggccgaccgtgtgacgatataaacatgtgccgtggttttgtaaagggacatcgaataattaatgaacggaatatcaactggttgccgtcacgagaccttcttcttccccacgtctccaatctctactgcttcccctcttccctgctctataggcttctagagggtgctaacacaaaaaggatggagctcgccgccgtagcagaacctgcgtccatcacctcctcgtcctcgatgccatgcccgagggctttgcttgatgcctcgaggagactccttggcctcaccgtgtgagggccgcgtccactgatcaccaggcttcgtgccgcagggatggtgtgggtgcgccgcagtccgcgctcgtcgtgggtgaagaagacaccaatcaccggtacgttccacactgtcgcgtttgcctcgctcgaatctgtccgtagaacagtgcacgggtgggggagcaccaggggaagcgcggggaagggtgttgccagtaatggcgttgccgctgttcagcgttcgccgcagtggtcgactggtgaaagaagaagccctctgcgccgtccatctcgggattgagggttgtaattagatccatggatggggcgccctcgaccgtcggttttcgatgtgcgtcctcgattaaatgagtcata

SEQ ID NO: 16270 - DNA, 697 bp, Zea Mays
gtaattcggttcctgctgctgaagaaacgcctgtgactgaatttattgacgctgaacccaatgggtgtgcccaatctgctgctgatcccagtgtgggtgctccatctgttgctgatcccaatgggtgtgctgcctgtgttgctaatgaagacgacggggaggaagaggatgaagttcctttgactcggaaaaacagtcggcagttcctcgctagtggtgaaagtagtggagttccttctcctgctttgtctgctctcattggtctgcaagaattgtccctggcgaattttgatcagactcttgaggatatggttccagaggatttgttatcagagccagcagatgatggtgtgatggaggtttgtgctgatgcgcttgatgctgggttaaggtcatctcgtgcctcgtcgaccttagagcgcgatctcgagggttaggagactgacttggatcgtcctggtcccatggaagtaactgagggcccatcagccttagaggtggctacctcagagaacttggaccccaaggatggtgttgacacttgcccagcccccgaggatgttgccggggatgacttggttcgggtgagaagtgcaagccactgcccagcccccgagggtgctgtcggggatgatccggctcaagtgggcagtgcaaactatgacccaacccccgagggtgtccgagcagggtctcc

SEQ ID NO: 16271 - DNA, 855 bp, Zea Mays
agtaggggttacaagcgggcgagagagggaagaagagctcctaggtctcttatgtgtggctataccttaggactgcgggactagagttctctgctaatccttggacatcatggtggttcgctcctttactccggcctttgtgatcctccaggtcttctggactgtctgtctcactcgtgtcctcctttgtgtccatctacgaccctccccttttatagtctccttctcttagaatgggctattgagccacggtaaaatgagacgttctaccctggtaaattgtgcttgtcaccttgcaccctggttgtctgggctttcatggatgtgtcctttatggcaggcagtatggacggcgtggagcaccacaccttcattactacctctgtagcctaggtctcgatgtgtctcgtcgtattgcgggtcatgcagatggtcggtatattcaggcctaggctcaataggttatgagtgcgctgcagaccaatggactcacaggtcatgagtgggaggtggaccgactcacctaatgtggctcggtgccaagcgtaattaatgtggttggtaaattatggtgggtcagtcttgggccagacgaggaatccactcgagtggcttcctctcgattcacccggtccccttctctagctctgcctcacccaaccccgggctcggtgcttcacgtgggtgcttctagggtagacggttccttaccctcctactgaccagtgggcccctgtagtctggagacctttccccaatactctctctgactggtgggcctcaggggcccgaggatcttttcttcgacaaaaacatataaggaagaaccgtggcacccaagttgattattggatc

SEQ ID NO: 16272 - DNA, 1084 bp, Zea Mays
ttctatgaattatcaaagttctagcaattatttttctattgaaaatccatttataaattattttctctggttttacactgctctggactgggcctcaattacaggaaaggtcagggggctcggggtaagaatccagagacacagggaatatcactggtggacggcgggttgaatctctaattaccaaggggttctttaacaaaaagtacccgcgaaggggtacgagagctcctcggccgcacgatcctacatctacggttaagatctcacagcgcgaatggatacgtggtcgtctaatctgagccgtccttgatcgaatcgacggtcgcgacatcgtcacctccctccgccaagaactgagcacggcggcgcaacccaccgtgcggtggcaggaccgccggagcagagaacccgatcccctagcccgccatcttctaattcactcgctcctcgcctaattaatgaccctatgatcttgtttcccccatcaatttctgccctcaacaagcgcagggcaccgcccacggcgcgccgcggcgacaccatggccggacagtgaacctatgggcctagctgcaccgatatacaattcgctagcgtgcaacttataggaagggaggacggatacggtggggacttacaaatggccgaccgaggtcagacgacgctcgcccacggagaagggtggaactcgccagcagcggtcacggcggcgagcaattcacccactgcaccaacgtacgacaccaaccgccggcgctggcggcaaccctggacgattaccactccacttagccacacgccgaggcgaattcgcccacaccgaagaagttcaccggcgatgcgacaagcttttcctggcggcgtccaatctcccccctgctctcaccctctttcgcactccatggcggtaatgtctactagagtctatcgcgatgcacgggaaaccgggaggcacccaggggaaggttcatatcctccggtcaaagccaccctaacgcccccgatccatgcgcgagctaaacggcgcggccgaagaacgaggacgacgagcgggtctctagctgacaaatggggcccacgg

SEQ ID NO: 16273 - DNA, 399 bp, Zea Mays
ccttttgaaaccctctccaagaagtttagagccaccgtcaagcgtctccaaagctggtctcaaaaaagggtgggtcatatttcctctcagctagggatggcgcgggaaattatgcataagctgcaatctgctcaagataacagacccttgtctatgttagaaaattggttgttgaagcaactcgatggtcacattgtggccctttcaaccttgcagtgttctatggctcgaagcagctctaggatcacctgttggctgagggggatgctaacactgtcttcttccacctccatgctaaataccgcaaaggcaagaattttattggtaacctgttatccgacgatggtttgataaagtcaaggcatgaggacaaggaggaaactctaagtgattttttcc

SEQ ID NO: 16274 - DNA, 725 bp, Zea Mays
cacatttggagtgacgagctgggcgagcttcaatggggctgttgacgacaaacttgctgcgcgagcccatacgtgacgaggatgaacgacgacggttgcacggctttcggcggcgtgaataaacagtggggcatcgaggatcgaattgcgagggcacggtcaatggtcgacgtggatactaagttgaagaacgatgtcgacgacgagctccgacgcagcgaaggggagtcgatggctttggcgacgttgacgaggcactgcctgtacgcaagcggcaagagctgggcttggcacaggtagagaaccgatgatgtcatggctgtgcacgggtgcggctctggtgatgtgggtcggacagctacaatgacgagcggtcgcacactactgagcgagtagcaacggtgagtggcgtagagcaaagcagcagagcacagagcgtgaatctgtgtgagcagagatgaggggcgagggagaaggggctcaggtgctagcttttatagccgcggacgaggaagcgaggggacgcaggagaggaaatcgcggacacattcaatggccatcgaagcagataaacgaaagtcataaatggagatttgatggagaacgctggtaacagctgcagcaggcgggagaagggaaaacgccattgcgcgttgaagtgggagaggagaagatacaggcggctgctctactggtgcggctgggcgcggggagatggagggctg

SEQ ID NO: 16275 - DNA, 961 bp, Zea Mays
actgtacaattcatagctacatatatagagtactgggtgagtggagcccatctagggttgtactgctaattctaacacccctcgcagtttgaacgtctatagccacaagagatgttgagactaaatcaaaactcccaaaacaccatggagaggaggcccttcgtgaaaatgttaacagactatgtcattgttgggacatgaaggatacagacttcaccgacgccgaccttttcacggacgaaatggaggttgatctctacgtgcttcgtgcgttgatgttgaataggtttggtggagaggtagatggtgttgatgttgtcgcggtagacaaaggtgcatcaggacaacgcacagtgcagtttctggagaagctgacgcaaccaggaagcttcaacaatgccattattgacggcgcggtaatccgcctagtgctcaagcatgagacaacattttgacgcttggaggaccaggagacaaggttgccactgagaaacatagcatagcccaagctggattggcttgtatccggataactcacccagtcagcatcagtgtagaagacgatcccggaggtggagaggcgaagaagcacatgatttggagtgcccaaaagatagcgtagaacatgttttatcgccgtcaggtgaggctccgaggatcatgcatgtggagatagacctgttgaacaacatctaagcaatgtcggacttgatgaacgttagatactgaagggtgccggcaaaactccaaatgccacaggaggaccggagtttgacagcaagctttacctaaagatccacatgcgtgatgcagggtttgtagtctgtatcctagagcgctaaaagaatatccaacatatagagcactgatgtaggaagaactaactaaattgtcattccattgagatgctgaggaagtggtggagaaatctcaggtccttcatggcaaattcccactgagg

SEQ ID NO: 16276 - DNA, 371 bp, Zea Mays
ggttgggatccatggccggttgaacaggtccaacaagatcaaccgcctgcacctgttcctttagtcaacaatgaagaggaacaattcagttaccaattctccggtcttgaggacttaccttcagatgaatctatgggtcttttcaacgatatcgttatcccgcaagctgtcaacttccctcaggaggatgtccaagatcaagaagttgttgtgcttgctcttccagccctccccccagcggacccatttttggagggaaataacgatcagaacgatcagggcgcgcaaaatttgaatctgaatgctgatgataacatcattgtgggcttcatgactcatctgaatcagccctctcaggaccctacctacaa

SEQ ID NO: 16277 - DNA, 542 bp, Zea Mays
cgaaattcgtgcttgctagtgagggatttgagatgcaggtgggtgcagtaggtgcttggatacatggcggagctgggggcacggtcaatttatagagcccgcgagcggtggtgaccaatttggtcgagccgtgctggcggccggagatgaagaagaaggcggcgcagtgaattcgtggctaacgccgtggcaagctcaccggtgttgacaagacagtggtaggaagtcacggcgacacgatggcgcggttaagacacgcggcgcaaggccggacgacggctatcatcggcgttcttatcggcttctaccgtggtgacacagtacggtggccggagttctttatcggttgaagcttatccacggcggcgtacaccagtgttacccacttacccgagaacaacgtggaccggctgccgcacgaatcacggcggcaatcggtcgccggcggtgaagttgccgcgctggcggcctgatccactcgggttactgtaccatcaaaagttcagtttcagtttcttgctacatgtctgacagggcaactt

SEQ ID NO: 16278 - DNA, 480 bp, Zea Mays
caaagaagaaaggaacaataaaacttgacatactgggaggaatggttccgagtagtaggccccctttgtgtcggaggcatcgccgtcaccgacatggagggtgctgggggaggcgctgccaccagctctattccctcatggtgcttcgtcggcacaatggacactagagggtatgacgccataggctccacccctccctcgccgcacccaaccaatgcacccaaagtggaagatgacgtcgcagcctacactccctcctggcgatgctccgtaggcgacacgaacgcagcaggatccaccgctggcccatccctcgaggctgggacgatgaagtttgcttcggcattgccatgatggaatgggccacccacagacgctaggagcccatcctgtcggaggtcatggcggtcatgtcctccatgttggttgaagaaattatgctcctcctcagccccacacgagctagatgctcgaccttct

SEQ ID NO: 16279 - DNA, 344 bp, Zea Mays
gacaaataggatattaacacgcctcctgctcgctgcatcgactaactcagcttacctgtaagggaccctacgttccaactatctacacggatcctagtcggctcaactagcttccttacccctcgcacccgttgagacaaatgcgaagacccttgcacattgtcactacacccgtgcgccgatgtagcatgccactaaggaagcgacaacccaatccttgctcacatgacactgcatccagatcacgacatggcgcgccaccaagggggtggcggcccggcccttgcccatttaacaccatacctgggttccgatatggcgcgtcgctaagagggttacgcccc

SEQ ID NO: 16280 - DNA, 551 bp, Zea Mays
tggacggtaagatcgtgccatagactaacgggggattacagtggcgtacatactccttatttattatactactactagtacagcttgagggatggtggccccacgtggtggtctcgtgctcagggtgtgatgtgtgtgattagtggcgcgtgtaaagggtagggggctggaacacataaaaatcggcacgttgattaggagacacatgtaggcccgttttcctatcctgccgtgcctaggttattgatgatccatgatcacggtgctctccacggccaggggggacgatgatgtgcatgccgccccaacgggtcacgatgaatttcttgaccctaagggctaaggcatgcagggaccagtcgaacgaaatcaaatgcaaattgtcctaggctggccttagatctgtggttgtattacggtgtacgatctattgatggaacagaaactctgaccgtgtcatacttcacttgactcgctcagagtgtatgtcatgcccctaaacttcagtactcacatgattatctctaaacatgtgttcaggaactgagcaa

SEQ ID NO: 16281 - DNA, 461 bp, Zea Mays
caattatgcgctggctcgacgaattggagtttggggcgaggtttggccggattgcttgctcgccggcgtgtacgccgccgcggcgcggacggcgccgccgtgtcttagggcgggtcgggtgaatggatcgccagccgttgatctggcggccaacggctgagattagaactcgtgtaacgcttaggttgggaaatcagatccgttcagatctgatcggatggatcaggagactctagtgtaaataaaatccacgccgtggattccagatcctggggccgggattacgtaccgattcgccggatgtatgatctaatctgtaccgcctgtttctaatccagcggctagaataccaccgtaccccttcggcctcggatttttattaaagagcccctggagtttgaaataattaacccgcagtccatcgctactattcactgtgccttggaaatccttaccccgag

SEQ ID NO: 16282 - DNA, 417 bp, Zea Mays
ccgatatcagcaaactctgaggcgctatcatgacaaggtcgtacgacatcgatcctttgaagtgggagacctcgtccttcgccgaattctaatgggggagggacggcataaactgtcgccactatgggaaggaccattcatagtagcagaagccactcggcctggatcatatcatctcactcaaatggacagcacgaaaattgggaacacatggaacatagaacatctcagtaagttttacccctagctatatctcaaaagctattgggacgacaatgtactctgtaaactgggaaatatatcatcaataaaaagacttcaaaggcactcaaattgttcactgtcaacctgcatgcttacttaactcggggtgaccactataccctactaacggagcaatcggcttaagtcggcaat

SEQ ID NO: 16283 - DNA, 749 bp, Zea Mays
agatctcgctggggagcatatgtggtcgcatgggaggcttatcaccgcgcctgtatccgttgcaacatggccagaccgccgggttgccgtggaaactccgatgacctcggttgtgccacgccgtggcttgttactgtgcggtagtaatcgtggcacacttaagagtacaacctttgagccattgctccggtgaacgccacgaatcctttgcgccagtactcttccccctctccggtcgccgcgcgtcttctccaaattagcctccaccgctcatgaatcctataaattgtgtgtgccatcagctccgctaggtagttgtgcatccagtgaaccagctctcacctccaatgatcccctacagctccccaatttgagacttcccccaaatcggtccagaacatcgtactgtgtgagctcgccgtggccagcgcgctacaagtccgttcatgccctttgttccctcgtttaattactctgatatgctcttgatactccctgacccatccagttgagttagaacctgtaggatcaccgggaacatctcggtttgtctgttgctcgcgctgtcaccgtgggcagtgtgattaagagctcgaaccttgcaattacgggaggggaaatggttgtttagggttgaatttggtgtcaagcaaagggaaggattagtcgttgcctatttcggccagtacgagctcgccggagctcggcctgtcgccgttcaccgtcggggctcacgggttgtaaagaat

SEQ ID NO: 16284 - DNA, 959 bp, Zea Mays
ttcgagtcaaaccggcggctaaagtcatcccaatcgtcaatgttgtggcaaggaagatgtcggagccattgcagtgcatcttgcctaagaacaatgggcaagtacgttgtcatgacttcctcagttgctccagtggcctgggcagtgattgtgtagacggccaaccacccacctagatcctgtttgggcttgtagttgtcgacgttggagactttgaagataggcagccattgaattgcccaaagtcgggtgaagggtcgagaccccgcacgtcccccagtcctcctggtgatattcttgggcatggtcgtgatgatggtccctgggaggtgagtgatctcgtgtgtcatgtcgcctctcccgggctgaccggcctagagccgggctattcgtataggctacttccaactcagctctggtggcacggctacatgccggtgcaccatgatctcgatcatactcttccccctgcctcatctccttttcgttccagtgaccgcgtgaagctttgatgttgcttcgtatgtatcgccaactattgatggcatggcgtaggtcatttgccggatggatgagggtaagaagatggttcgctgcctgggtgagtatctgccagtagccttccacgtctaggatgcgcggcaagccattggcgatctgagccaaggctccaccgacttcactcggcgtgttcaatgtttgagcaaaatcaggtggcagattccgagcaagaagcgggttctcgtgtcaaagcctgtcgtcctgctcagcttgttcccgctcgcgctcctgggcatggtgatgatcacggcgtcgggaattgcggcgctcacggtgcgctctgtcgttaggggtttcccctacttcagaggcttcatcctgagagatgggttgagcaggatctcatgccccggcctcgtggtgatgccaaatgttatggcgcctgttccaacgtcggc

SEQ ID NO: 16285 - DNA, 627 bp, Zea Mays
gtcaattgcttaccggagatgggcgtgtgggcagatccgcaccacgtcgtggccagacatcgtcgcgccatcatcgccggtgagtcctcgtccatcatgcttgctttgttcgtctctgcgggaaacgctagccgcatcgtgtttgggctcagggcactcgccggttcgtggggtcgccggtgcttctgccgtgggggtgtggcggcgccacctgtgctgaccgggaaggaagaagggtccctcaccctcgatccaaggatggatggatatcgttgatcctgggcataccgtttctagaccgttgatccagcgataaacgcttacgattagatcctgagtatccctcgcttgagtcgatctggttcattgatatcaggatgagcggatgctgttagatcgcgcgttaataaaaccccgaccgtggatctcggatcctacggtggacagaacgtaccgattcgtgttatagtcgatctaatttgggcccttggttcttgatcaagcggctcgagatcgcccgtaccccttcgccgcgtccgagttataaaataacccctgggatctccacaaattaacccgtagtcccaagcagttgaaagaaccttacactgaggccctggaattttt

SEQ ID NO: 16286 - DNA, 426 bp, Zea Mays
cgcttccccgaagtcgccgaggaagcggtgattgaagatttctaccggggatccaatgactcggcctttgttcgagccatactacagaaagcgcccgccacctccgaacaactgttttgagaggcagatctctacatcaccatagatgagcgggcctaggacctcatcggaggtatgaaaacctgcaccacccctgccacaatgcgacacgaaccaacaacctgacatgcattggtagaagaggcctcacgaggaggtgcacgccgccggaccacccgtcgctcgagcctgtggtgcgccccgtggaggggtacagacactggatgaaatccttgacgcctagtgcctataccacaaggacatgcgccacaccctacggaactatagggacttcaaacactccatcgggtcgaccattctagcctc

SEQ ID NO: 16287 - DNA, 649 bp, Zea Mays
cgaggaaggaggaagacaccgagatctagtgcaagatgtggatcaataccacaactgagaaacggaggagagatgagggccgaagaagaagagccggagatgaatacagatatatgaagaaggagaggcggggacatggccacgcggggtttgcgcctccatggccatgctgacaatgagtcgctgagagccagagacggagaggcagcgacactgagagctggtctgccggagacaaagacggatccgtgaagaggcacgacatagacgataacaaccgtagtgaggcacagtggaggtgacaagagctagtgagttagggtttcagagacggcgagacgatgtggaatgcagtggagtggagtgtgtgtgcgagtggccgatccgagtgctttgccttttgggtttagggttaggccatgactgacgggcgactggatgagtgggttgcggcctatgggagaggccgtgaggacatgggccgcctggggtgcttatatggctgctgaaaaaccgagccattagtgggcctgctccataaaccaggccacgtcatgccgtgctggcccaatgggctggctactgtgcacaaacccaacacgccaatccgggtcgggctggcatggacctagtactgggccgactaagc

SEQ ID NO: 16288 - DNA, 663 bp, Zea Mays
gttcagaacagttcaaatccctgaaaatatctccatccactaactactctaggtgtttctggtgtgtgctaactaaaggaactcattgcctagaagggggtcacttgctacaactccaccttgcctggtataaacatggaggtgtaaaaatcatcccctagctgattcagctgcttggatgcctatttgttgtcccacatgcagaaaaagaagttggccacatctcttgtcttccatgtgctttccccatacgtggtgctcatgcagaaggattgggagacatgttagtgtagttggactcctgttaaaccctagtaaagaccccaacagctccagctctctaaactatttacattggtgagttatggcaccaaactaaactccatgtgtttctgtcgatttccttcccctctcaccgtgccataccattcccatacacctattctaagcccttaagtttttcctagttccttggtctcattgcatcagcttgaacacgagtttgccttggaggtggggaccatacaggccgactgcccacctccccgtggtaagccttcccaagaaggtaatatgtttgagttgttcacgtttcataacccatgtgtgatggtgatgctcacggcgttgcccttttgaacgctactgtgtatctcggccaga

SEQ ID NO: 16289 - DNA, 354 bp, Zea Mays
cttagtcgcccccacacacgcgtttgacccagatgtgatcgcgttcgcaaccacccctgcataaagccccatcccactatccatccccgtacaacaaccccactcctccagccgctcacacaacctcattctcatctacctcatcgcgtgcatgctccattaggcgtgcctttccctctcctttccctggccacaccatcccacaaggaccgacaccaagcaacagcgccgccagcaagcaccccatgccctgaaccaccccacaccatatctgcagtacaggtacaacagtccctgccgccggggacgttagacccaccctgctcgcgcgcgcagtctgatggctaattcgcc

SEQ ID NO: 16290 - DNA, 423 bp, Zea Mays
aaagtttcaagtttatttttagaagatcatgataaaaccttagtcatgaacatcaatcatgatgcaacacagaggacagtttgctgtcaagaagaagagaatgatgagaacataacctgctcagatatgaccatgtcaatggctcctgctgcgaaggtgaaactcttccacattataactaccatcgatatatttgaagaattgatattgcgccgtaaagtgtgtatacttttatttgtagaacttcttacatggatcaagcgatgtgttaagggtataaggaaggctttgaggaacaaagaagttgattggggaccaagtaatgatatttccaacatcccctaatcaggcaaccacatcataagattgaccacatacttgggtgaggagtacacgctagagtcgaggacgactctattgtaa

SEQ ID NO: 16291 - DNA, 652 bp, Zea Mays
tgaccgtgcaatcaacggacaatccaatacgttcccggtgatcatatgggtcctagcttaattggctgggtcagagagtaccaggagcatatcagagcactgaaacaagcgaatagagggcatgaacgaacctaagacgagctagccacggcgaggtgatcacgcggcggtgtttagaccaatttggggaaaacatcaaattggcgagctctggtgagtaattggaggcacggcttgggtggattgggtgcttgactaccatacgaacccgacggcacactcaatttataggctccgggggtggtggcatgtgaatttgggttggcgcggtagcgatcggagaagaaaggggtcactggcgcacaagattagtggctttcaccatggcggctctccggcgatcacccgatatagacgatccgagctattgcgacgtggttaaaggcctgaggcatggcgcaatcgcggtgaacaacacggaacccggtgacggccgtaaggccatgtcgccggcgcaaatgactaagggacagcgcggccacagtgtcccagacctatccacggtgtgtgcttttcaccggcgagctcaatccacagacctgaagcacgaatcgtggcgagcagcaccaatcacggcgaagggtcaccggcg

SEQ ID NO: 16292 - DNA, 575 bp, Zea Mays
gtggtcaccccgagttaagtaagcgtgagcatgtcgcaccgtcttaagtcatcgccgacttaagccgattgctccgttagtagggtatagtggtcaccccgagttaagtaagcgtgagcatgtcgcaccgtcttaagtcaccgctgacttaagccgattgctccgttagtagggtatagtggtcaccacgagttgagcaagaatgcagattgacaatgaacaattcctgaagtctttttattgatgatgtgtttcccggtttacagaatacattgccgccccaatagcttttgaaatatagctaaggataaaatctcctgaggtgttctatgttccatgagttcccaatttccgtaccgtccatctgagtgaggcggtatgatcccggtcgagtgacttcagctactacgaatggtccttcctatagaggtgataatttgtgtcgtccttcccccgttagaatttagcggaggacgagatctcccactgcgaaggatcgaggtcgtatggccttatcgtgatagcgcctcagagtttgctgataccgtgctgattgaatcaccgtgttcagtcgc

SEQ ID NO: 16293 - DNA, 1339 bp, Zea Mays
tgggccatcagaggttgaatctggcgatgcatgaaggtacgcgccaaaagacccgttgcttcaacgtcttgaccaacgtcagcagatgctccacttcgatcttaaagctcgcctatcccatgcgttgctactcctccgtagataccggctcccgacgagtgaatggcgaggaactcccaaccacattcctcacataaaaccactcatcttcgtaccagacggaggaagggaggggatcttgaaatactccactttccgaccagagcatagctgaatgatagccgagccgatgtacaactgatcgccgtgacccaaggacacctgcgcactgaagaaatactaccacaacctccagtgggggtcaatccccatgaacacttcacatagtgtgatgaagcatgctatgtgaaggatggtgttgggatggacattctggaccttcaggtgatagtgatggaggagcccacgcataaaggatgaaggggtaggccaaactcgcactcataaaaggatgcaagcacgaccacttcatcgtccctaggacgaggcacttcaccatcaccttccagcctccaccctgagacatcttttttgggaggaaccttttttctctaggccgtgaagatgactctcccgaatcatgcaggatgggaacgatgccatgcgcacgggaagtaaaaggatgggcacaaggttgtgaggaggcaaagcgattgagagggctagctcacggcacaaaaatacagtaagagtaaccaaccccgagcaccctcccaatctacttatgcgtaagtgcagggggcaaggatggcacccaaaaagtgggggccacctcaaacaacacgaagggattcacccctttcgacgaagggtcaccttgggagtcgggcaagggaaactgtgtgccttgtaggatcccgtcacctaggacagagcgctagaaggacgtgccatagaagttgcaccagtaactggtggggtggttagccagacagaaacgccacctaggcacgatgtagcaagcagaccattttgagtcccatcaagccgtccacgccgagcagagtcatgatgaccaccctgctttaccgtgccaccgcagtaactacatcacaccaaccaggtaaaaccgagacccactcaaaaatcccaacgcgagcaagctcccagtgagctacaagctaggtgaccggcccataggtcatttgctcatacccacatccaaggtcgtacctcacattctcctgtgggaacccaattgacgtggtggccacagagcctccctttcgtcggcaaggtcgatcaaaggggcgatacggggttgaataaggaaggactc

SEQ ID NO: 16294 - DNA, 455 bp, Zea Mays
aaaagaaataggctgataaaaccatcacgtcccatcctaggcagtgcacgtcagatacccagctgacggtagctaacatatacccgtaccttaatcaccacttttttatgtgcaagtgcaacaggcaacaaacgtactgtatgagctcaagacctcaagtaggagtgcagtcgtaccgtggaagacatcatttactcggcggccatcgaaaatgcaagctaactgcgctggctaatcagagatcatcatcgaagactacttaaaaaagtgacacacgaaggagcacggatcggatggtgattagctcgctaataacccgccatctggcagagcacaagcttaattaaatgggcattaaacctgccgtgtggagacccgggtgggattagccatctcgttcttgtttaacattatcctttggacgaaagttaaccagagcgcctcctctgtcccct

SEQ ID NO: 16295 - DNA, 434 bp, Zea Mays
gatagagtcggagcattgggtcactcgatagccatacgcagcaatggtagcggtcgtgaggtccctgtgcgccgccgtcctggccagtcgtgtgggggagatgatggagcaccgtccgatcgtacacgagtggctaagattagttggaggataccgcttcgcccgatcgcgatctggggcgttgatcttgcatcgggcggtcagcgggcatcgcacgactcattaaatgtgggccgtcagatctagatccgagggtccgcgctacattccgtttggtggggctcgggatttaatctggatcgtccaccttacatcgtacggtcccaggcgttccataccccttcggccgaagccttttgcataagaaaccccgaccaatacagaaatcaacctgcagtcctgcgtgggttgagtctgagtcacaggcatttttg

SEQ ID NO: 16296 - DNA, 721 bp, Zea Mays
cagggggtactgtctgcacccgtggaggtcctggacctaacccgggagtccggtctacttatataggggtccggtactttcccatgggggtccaggcccactgttgatacctcggaggatattgtcttctctggccacgtggcagctctggagccgtccatgtggtggggtcgggtgctgttcaccacgcgactagagatagctgcgcgggcaccgcgccttcatactgtagtaaggggtacccctatttcagggtaccaacaagttcctacatgcggaactgtccagtcagtggctcccagcacatgcaccttctctctctaaggcacgggaccatgtgtcatcccaaccccttcacttgcacgtcctgtttcccgatggaaacgcttccaccaatcctgcccctgcatagcctgagcttcgcctttgcacccgtcaccaaatagcgaacatgaagagcattcactccgatctttgccccctctcttctcccaccagatgccgcataatttaactgagcgagttcatcgacattcaaacggtgtccgaccccctccctccaactaatgtcgcgcacctataaatatcgaccctagcacaccatgctcactcccattcgagcttcaagacactagaaccctctcctcgtgccactagtgccgccgccaccgttcaagagcatcgaaggtcacgttctgtcctcaccggagcaccccccgac

SEQ ID NO: 16297 - DNA, 605 bp, Zea Mays
atggatcgtgtcttaggctggcctgctagatataactcatttaatctctactaactattaagaaggtaacgtagactaaaacgtgcccccgctcaccttatcacgtggcatgcacctactcccccactcacactgcatgcaagcatgcaagtatgcaactatgcaagctacggtgccccctcatccactcatgctacatgcaagcatgcaactagcctccgaagctaggccccgtggctcccttcgctcacgctgcatgcgttcttgtcgagacaaatttttgcatgtgttcttaattaaaattctctactaactattaagaaggtaacgtaggccaaaacgtgcccccgctcaccttatcacgtggcatgcacctactcccccactcacactgcatgcaagcatgcaactatgcaagctacggtgccccctcatccactcatgctacatgcaagcatgcaactagcctccgaagctaggccccgtggctcccttcgctcacgctgcatgtgttcttaattaaaatgaaaatttgaagaagctcagtgtagctcagttggtcgacagtatgcatttacgcccacacccgatctctcaagtccaag

SEQ ID NO: 16298 - DNA, 665 bp, Zea Mays
gaaatgtcttaaaaaagaaatgcaacccactcagattttcagcctatagaattatagatggataaatctggtggaggaggctgaaggctcaatgtccactgaccatgaatcggaagggagaaaacttgccatcgtccactgaccatgaactgcaactaaacaaaaatcggaagggagaaaataagtgaagtgctcaccagatcgaagacatcctagaagctccacgtcttcttgccgtcgtcgtacaccgttcaagggcaagttcttcagcgtctgcaacctggcgacagaggatgagagagatggcgatggcacggacagcgggtgacaaagcagaggcgaggacgagagaaacaacaacctggggccatgaatgagagatgtggtgacggctggacggtggctgagggcggcgacggtgatgtgtgagggaggcgacgaatgcaacgcagaggacgtcgcgggccacacaaaatcggtcgtcagaggagtgggaccctacccccgtcaaaactgccgatacacgggcccagcaatcctacgaacaggcatcccaaacacgcatacgaagatctcgtgttgtctgtgaccgtgggctacctatcccctgaaaaccgtccggtttgtttgttcccaaacgaggccctagtgtgtggtttacaatc

SEQ ID NO: 16299 - DNA, 602 bp, Zea Mays
aaacttattagagaatttgagaatatagagttcaaggagggggagagtgttgaggattttgggatgagaattactaaccttgtcacaaatatcaaatcccttggtgaatctatagatgatacccatgtggtcaaaaagttcctgcgtgttgtaccaccccgatttaatcaagtagcagtatccattgaaatgtttgtgagatgaaggatcttatagttgaagatcttgttggcagacttcgtgctgctgaagatcgactagaagacaaggttgagcacatcactgataaaataggtcgtttactgttagctgaagaagattggcttgaaaagcataagcatcattttcagtcgtcttcaaataaagacagtagcagtagtgactcatgtcagtggaagcctaaggctccccatcgatctgatggagggagttcagtgaaagcaaaatcagcacaaagtcttcacaaatgtttattacatcccataactgaagagtaatataataagtcttggtcagcttgaagagggtggatgtgatattagactgtttaatgggaggttgagtgtactagatcctgaaaataacctgctaatcagtgcacc

SEQ ID NO: 16300 - DNA, 1183 bp, Zea Mays
gcaaatttgtagagctcttgaagtagttcaagtttggttacgtgattaagccctagagctagctgtacagaaattgaagtaaaatagcctagaagttgggctgtcagtcggggttggactgaagattagactgacagtgacattaggttgatttgatagctgaattgtgcttgatcgagtggatgtatgaacaagaactctataacaaaatgaaagctggtatgatggacaacaattttgctatggtcggcttgatcagttgtcaaacgaaaacataaggaaaatgatcctcaaatcgctctgccacgcgcaaaatggacagtacactaaagaagatcccaagtgccgtgtgctcccaccgacgtaccgccaccgtgattcgagcttgcaccacgattggtgccgccgagatgtggttcaattaaaagatcttcggcctgtccgatgctcggattaccattctagccacgggcaccacgtgtcctcatcgtgaatcatccgccgccgccatagcaagccaccggacgctccgaccgtccacgcagttggttagaggctcgcgtaatgcaccaccgtaaaaggatcgtggtaaacccgccacgttaccggcctgtggacaccattgaggctaacgtggagcttctcgcattatcgccgccgtcgtgagccacgaccaaattgcccatcgtcggggtgacttcctttaaattgagcctgcgctcagccctgcctctctattatgcacccaagccacccttggttcacgctgttccccctttgatagcccagaacgccagtttttccctagcgatggtcaccagtgccgtcgaacagtgcaaccgcgtggccagcccttcctaaggtcagtcgtagttgtttaactcgtgtttcgcaatttatagatcatggtgaagctcatgcgtttgcccgcttgaactttaccgcacaggatcaactggaacaccgccgtgtcggtcggtgaacgtcgccgaagacactgtccacgtcgaccggccaacccatagctcctccgaacaaacctaggtgagcatcgtatgcctgatgcattactaataatgatcttgaattgaaccctacaacacttggaaccctggtacacctcaccagagctcgtcgatctgccgtaagcaaggctagtaaaaccctagatggtttagggtca

SEQ ID NO: 16301 - DNA, 1114 bp, Zea Mays
caagggcaataagaggtggtagcagagtaggcgagctcactggtgaagacacgctagaggaacccacgcccgccgccaggggttcccctagggccgacgcaggtggagacaactcgataaggaccacctccaagatggtcatgctcgtcgtccccgaaacgacctaagatgacggcgccgctgccacaggggaggagggtggcgctccgcccgtgggatcgcccctaggaaccagaagggggcacctcctggtgactgcagtccgggggcccaggggatgcagatgccgttctgaccaccaagaccacgtccctcacggacttgtgcaccacgtacgcgctggacgagaagaagaagggaaaggaacaccaggcagggaacataggaccaggagcaagaagggaagcaaattgaaatactgggacgatcacgtcctagtaaccactttcccatacgcgaccggcgaaggaacggaagactgcggtgcaacccagggaaacgcctccacacgacaccccataagatccgagggcatcacaggggacgccgccgcctgtgccgaccctctcacagccgtatttgccacgacatcaacagcaggcgctgcgacaaggatagaatccatggccggtctgctcacttcagccagaatgttagagctggtttgcgacatcgtcgagcatgatggactacctactagcgccacggtccccgttccaccaaaagctaaagaagacgttccctccaagacaagaggaagaatagctccctcgctcgaccaagtggggcatgcaacgtccttgttcttcttcttcttcgcttaaaggtgactcatgcgccccagggtttccctgtcgctccttttgcgcttgtgctccagttggactgtgccccccccctcagggagtggtggaaggctgggcgccagaggactaatcccctgcaggaaccatgactcaacatcacgaacgaagcaaaatgaaaagagagaggaatggaaagaagggcttgccagatcaccagcatgccccaagaaagggggtgcagtaaatcctcatccatgaagggctctgacggcagcacactgataaccttaaccctcgccttgatctcg

SEQ ID NO: 16302 - DNA, 1123 bp, Zea Mays
gttagcttaacgagtcagcttgaactcggacgagctgagctggctcgatatccagccttatcagctatcctccattgtatactcgaattgcggtagccttgttaggtaagcagaggaagaattccacctacgagacatggtggaacaccagagaatcctcaggcagattgaagctctggacaaagaaatcatagctgcggtgaccctcagattctctgatctgcgtgacgatgagcacccgccgcatctcgttctccacattttctagctcagctgagcgaggaaggacacatcagcacctctggagccttgtatgagtatctaggatgctagggggctgtcaactccagattcttcaccgctcgggcatgaaggggacgagttggctgcaacagggatggaagcacagcagttctggaagcgacgccgacgaagaatgtccaacattgcgcaccgtgttcatacacccgccagccacattgttatcatcatcggggtcagcagtagaggtgcacacactcgccaaggactgagcattcatgcggcgatgattgcttggtgcacgagctaccaggcgccaatccagccgctgagcagagaggtcagcccagacacctgaatcaatgcgtccgatagcggcagtccgctacacgatgtgagggtgacaagcagttgaagcacctacccttcaagtctttagggatagggtggcaggggcgaggtggaacgcgcaactgtctcagacgagaccaccagcactcatacatctgccaaccagcatcatcccagtcaacctggtgtaaggacttccagatgggcacagggcttgtggcaactggagaagataatagggcatcacgttaggaggcaacaacactagagcttggactggatttgttccagcgttgcgccttggatcttatagcaaaggcaggagaaggaaaggaaacaggcaccgccagggtaggggaggctacacgagaaggacacacagcgctggtagtggctgccagagccacggtggccgccagcgtgaggctctggaaggttgctgtggcgcccgggagggggagacagggcaatgacgcctggggaaggggcgtgggggaggcgaagcacgggc

SEQ ID NO: 16303 - DNA, 619 bp, Zea Mays
atttgtgttgccttgttcttatagcatttgagaacaagtgaccaacactaacacaatttgaacgggtcaaatcagagttaaaacgtggaagatatgcattaaagaagttttaggatcattttatactactttgcaagttccgggaatcaatctgcaaaatccaggggcctaactgttaagtcttcctatagtggagggatggcaggttagtttgtaataacccgaggggctccactgtaaaatagccacaatgaaggggtactgatcagttctggccgttggatcttacatcaagggccatgattagatcggggaaggttatgaactggtatgcgttcactgccttaggatcaaagatcgatggcccgaaatcgtccacgcattgttgtcatccgaaccacatgtcaggcgatcaacgacacatattctatgcatcgaaggtgtatcgctatcttctgatccgggccgtccacacattgatctagggttgagcgaccgtcttccttctctggcgtgcccgacggcggcgcaaccaccggcaacctagccaatcaacccaattgccctaacctaaacactaaccagtgcaaacggaagagacggagatgcagaaccaaat

SEQ ID NO: 16304 - DNA, 478 bp, Zea Mays
gccttagaggtggctgctgcagagaacccggtccccaaggatggcgccaacagttacccagcccccgagggtgttgccggtaatgatccggcttgggtgggcagcacgagctacaacccagcccccgagggtgctgccggtggtgatccggctccgataggcaatgcgggctgcgacccagcccccgagggtgtccgagcgggctccccttctcatacctccatggatgtccacgtcgggtcttctcctccacattctgattgtatggcagcagcacgtgcttcaaatcaggaagtcgccttagagaccgacgcacctgacgctagagttttgattcatgctggtgatgttgagttgatccccaatgatgctcttcagattgcctcggttgaaattccctcgtcgagtcaccaactggcttctcatgatttggggcttccttcattcttctccaatcttcaggtaatttggcttttcc

SEQ ID NO: 16305 - DNA, 396 bp, Zea Mays
cttttaacttatcacatttagcctttgacttcctaatgatttgagtgtattccttaagcaagtcagctaattcatcatgggaaggtgaagcaaattcatcatcactagcactatcatctataatatcattatcaatttgtaccttccgttcacctttagccatgaggcataggtgagaagtggatgagggtgatggtggtggtgaagagaagtccccagcgatagcggcctctttttcatcattttcttcgtcacttgaagaagacccgcttgaggactcaatgtcagtgagccagtcaccaacaatgtatgcctttccatttttcttcttatggaatcttttgtgcttcccatcctttctcttgaagattttcttttcctttttctcgtcatcac

SEQ ID NO: 16306 - DNA, 602 bp, Zea Mays
atgagactgaatgtgatgagtgcgctctacacatgtcaaacatcaccactttgcagaccaagtactccaccttgctagatgagcacgacgagttgagatctaggtctatcctgttgggtgcgtgtaccgtttgtcctggcttgcagtctgagctagcagagacagacgctatgatagctttgcttgagaaagctagcttagtgagtgcccctgcacctacacagtgtgcactttgtgagggtttgcaatctgcccttgagtcctgcagacacgacaagacaagaatcgagaaagaaaacacataactttgatctatcttgagttgggtatcatgcagtgagccccagttcggcatgatggtaagtcagttcaagaggggaactggcgaactggggttaggctttgctaataaggatggcagtgtcactcactttgggaaggttggtgagtgcagtggtttgacaccttcagagaaaccttcacccactcccaagcttatcaaacccacctctgctaagcctgtcacccctgtgagagatggtgtgattgatgaacctatgagagatcctcctcagaaacaagtgtggcttccaaaacctaac

SEQ ID NO: 16307 - DNA, 1084 bp, Zea Mays
cacgatttctatataccattaacatatagaataaacactactattggaggaataattatagcagcatccgaagcgggatccgatttctaattacattcatgaaacctagattatgattccaccttgtcacccggttttgggacccccttgtaatgggtaaggattgagtcgcgaagggctagggggggaggaacacgttctcaagggtggtccggagtcgtgtaaccgcttagcctagtccagcgccctatgccctgcacactccaccatcctaggatggttgttcccgaacctagggcttggcccttagaggcctaaaccttaccctgaccaaggaacatgtctcgagaacctgctcggcaaggttcggaaacaaaatccagaatattgaagcgctcagaacaacgacccgtagatacattgttgagcaccataacaaggttgtgtgtagggacaccctttttgtaggtcactaggcgaggaggcgaactggagctgcgcaaggaagagcggtggcgactgctactcccctcaccaggcgaggcctagcgctgcgacgtatcctgtgacacataaggtggatcaccggggaacccgatatcgacctctgagtacaatgtgcctcagcattaaccgcggacgagacagatacctacccactctagcggtgggcgctacgaccaaagtacacgggtcgcacagtggctcgtgcttaccaaggcaggacatttgaatctctgcgccgcttgggctgctgccatcatggcacccactttagcgcgcgaggtaccaaggtggagggtgacaagtgaggaagacatgacgacgtcgcttgagcatccctacacactgtagcgcttcagcctacgccgcaacctattccagcgctctgccccgattagacgaggcaagggcacgacgggccaggagacgtacacgaagactagaagaagatccatcgcccgcgcatatctagccgatgcgttcacacacacccgagaggccgatggactcacgtctagtgcgtggcgaaccatcacaagaaagggtccgccccttacactgtataaacccccgagcaatt

SEQ ID NO: 16308 - DNA, 565 bp, Zea Mays
gaagatttggatgctgaccacatcatagaggatggaaaagtttaaacaagggctactgagcacgtcgagggacccaccttccgccagctcaaggagcaggggcatgataccggagctggccggcaagacggagtgtcgatggagaggggagaaacctgaaccttctcaatggggagagtgaagagcgtgacgacgaggcggatgagtgagggccacgatagtgtcatggacacgagtagcctcctgcgtcagatctgagcctaccacagttctccccttcctctctgcctttcatgtcatccgccagagggtttccatgtgacgccctactcctagattcgatggaggcgacaaaggcgatgggcaagggataggtagtgactcgaggcatcatccatggaggcaacaacggtcctactcctagatccagtggaggcagcggtggtcctgctcccagatccggtggaggcgggggcagtcctgctcctagatccggtggaggcggcagaggggagaggagctcaggcggcgacagatgcgggcgcatcgcaagcgggatgttttc

SEQ ID NO: 16309 - DNA, 906 bp, Zea Mays
aatcactacgacatcacgtccatgtcatccgttggattagttacattatgaattacagccacgattaagcttcctgcgttcgctcaaccacccggtttcccactaacctgtggccccttggtcggactcaactccaatcccaagcagcaggatatactcgacgaggtgagattttcctaggctcaacctcctaagccgtaacaaccaagcgataaattctcaccacggactcgtcctggcgctatataaaatctggctgcaaccctttccgatgaagctaccccgaaggacgagctagatggtggctggaaccaagcgtcatcgttgagggattgtcgtcggggcgagctatcgtgctgatatcgcagttagatttctcgggtgcttcgctgggccaagaaaagggggaaagtcatgctcgagcagcttcctagactcattggcggattgacgctctccatggttcttcgctagctatcgtcggagcgtctagctatcgtcggagcgtcgcctgtagcctttgtcgtcatctctgttgccggtgagtatcttagttactgcgttgctgccttcttcattccgttttgcgcgacttggtcaggctagtacacagggacctctggttgccggccatggcaaccaccgcgggcaggacacagggcgccgcctctgctgggcaccgtgggggagaagatgaggttttgagcgttgatccggaaacggactgtctggattagttctagcttgccgtttgggcagggtgtgccccatccatcgatcggatgatgggtggccacgatgtgattccgatattttaaatctgagccgtgtattgcggatcgtgtggtacggatccgagtgagtctaacccttcgcgtgatgtaatctgggtcgtccagatctaat

SEQ ID NO: 16310 - DNA, 511 bp, Zea Mays
gacatcccaataatccgaaacagaagagcatcaaaaccaaagtgagaaaacatattcggtacctgtttgatcaggctacgcagttcgtcagccaccgcagggatgcatagctagctcctcgcagtcagggactcagggcaccacgacaggagcaggaagcaagaactgaactggctagtggagtggagtggagtggagcgcaacctcgctctcgctcaaggcgttccgtcagtacacagcttggctggtaagtgaccggtaaggtgcaagcggtaagtcaactccatgctcaacaacattgaactccattgtgccccaatcgccatctggacgcatggagtcccccttcttacctctaccgatgtgcagtgctttgcctccggagacccctcttccgtgcagtccggtgctgccacctcctccttcctcgcatcaggacccccgtcagcaacagaagaaggcaccggcctggcagacctcaagctgggcagcacctcgtggagaaccctca

SEQ ID NO: 16311 - DNA, 629 bp, Zea Mays
gctgaatcaagaatcttcactggtttttcacggtactgaaggtctttctaaatatgcactgtctcttcttcgaggtgactttctggtgcttgcaggcatttgcggagctgggatacgtgaaacacattgtggatgtcggacatggattctggtagttccaggcgatatgctgcgggtcctaccctgccaatgatgggatagggacctacgaaacgtggggctagcttcccttttacttggaacctcctgacaccacgcattagagaaaccttgaggtagacgaagtctccttcctcaaatcggagttccctccgcctgttgtctacgtaactcttctgccaactctgagcttcaagtaaccttctgcggatcagtgcaactttctcttccgcctctttgacaaaggcaggtccttctagtgctttttcccccatgttggaccacatgagaggggtctggcatttccgtccaaacagtgcctcgaatggcgacatcttgatgaatatctggcagtgatagaacgggtgccgttgtaagtttctcctttatgatttggaaacttccttcacattttggggtccacacaaatttatggtctttcttgagaagttctgtcattggtcttgcta

SEQ ID NO: 16312 - DNA, 277 bp, Zea Mays
gaaatacctctaccactgttggcccgggatggctggaggacagcatcaacttgttggtggtgccagcttggagcttcgtcggggtaggaaagtcgaatatcttgatatcccccttaaggacagcattaaaggatggcaccttgagtggtttaccatggagaaccacaacaactccctccccttgatcggggaggtagcccaacgtccgcacgcccagctggacagagtcccccacagcttcagagctagtcgagtccagggtgctgcttgccgaaat

SEQ ID NO: 16313 - DNA, 546 bp, Zea Mays
gatagagcatagcttagtttcctgcagacagacaactgccggtttgatgctaaggaccaaggacttaacaatgtttctcttagacctgtcattcagaccccttacattccagataagaaaaaatggttgcattataacaggatacaataaaaaatgcacgacctacagcacaccccctccaataaggtttgaaaccggccttctacaggcaattcccagccaaataaggctgccatggcagcaatatgctctctagaaagtgttgcatcaaaaaggtgaacatacttttgggcatcttcgaaggaaatatgttcctggtcatcacaaaatcccagttgtctgcagactttagctgcatattcattgcccagttccgatggcagattagccacccttctacttctccttggattgaagtcattgggcatggtcttcctcttcttctttcgcttggtaatcggggggcaaccatcaaccttgcagctggcttggtaacattctgcatgaaatcttgtaacctttctgtcctctcaacatatgtcatct

SEQ ID NO: 16314 - DNA, 292 bp, Zea Mays
ctggtctacccacttgcccttcttgtcctcgaggagtcttttcttgattgctgtgaagatctttccatttgtgcgctctatgattctgttggactgtgggtggtagactgatgcgaaaacaacctttgtccctaaggaggcgcaaaatcctgaaagtcttggttgtcgaattgttttccattttctaccgttaattcggagggtacctcgaaacggcagacgatgttttgctagaattttttgagttgtttttgctgttatggtggagactgcccccgcttcgatccacttg

SEQ ID NO: 16315 - DNA, 686 bp, Zea Mays
cggcgatctaaagcagcttaactcaatcgaattggccgaggagcatcaggagaacctaaggatgctgaaacaagagagcagggagcacgaacagacctagaattcactgaccacggtgagggctctaccacggtggtagaaaacagaattgggggaaatgggaaattggagagttgtggtggctaatcagaggcagggtgctaaggcttggtgatgacctaacgcagcagactgtgccgtcaatttatagcggcgctaagcggtggccagtgaatttggtttggcgtggtggcggtcggagaagaaaggagtcactggcgcacgagattagtggctgcaaccgtggcaacctcaccggcgatctctgtataggtcagtacgagtctcggcagcgtggataaagtgttaaggcacgtggcacaagaccgtgaggtgtctaactccggcgagggtcgattcaaggcgatcagggtagagcggacacggcggccggacaaacagtgccttaagctcatccgggggggggagaagatcttttcaccgtggaatgttatccgagcgccgatgagcacgaatcacctcaccggcgtgaatccacgcgcggggtcgctgacggccggttcactgaaccaatagattcttctggtcactgtatcatcagattcttcttcagtctgtctgacaga

SEQ ID NO: 16316 - DNA, 485 bp, Zea Mays
agtgagaggagatacgctaggagagaagggcgcaacagcaacagcaacaagcaccactgcatccacctcctccaccagttccaccccaggacaagcaccagaagttcatgagccataagccaccgacgttcgccagttctcctgatccactggacgctgatgattggctgaagtctgtggagaagatgttgattattgcccaatgttctgaccaggagaaggttctctatgcttctggtcgtcttactggtcctgctactcattggtgggattcatacactgctgcccacgatgctgctgatactatcacatgggcagagtttgctactcagttcagaaactaccatattcctgctggactgatgaagattaagaaggaatttctgtcgctgaagcaggggagcatgtcagtcagtgagtatcgcgataagttcattcagctatccagatatgcaccgaatgaagttgctgaagatgagaggaag

SEQ ID NO: 16317 - DNA, 401 bp, Zea Mays
ggctggtggtagcctggtagggctgcaagaacagcacggtgacgtaccgctcacatcacagcgttgagcagtcaaaaaaggctagcgcgagggcgttctcatctttggccgtttctttcgcttggcctgggtgaaaagatgggggttcgtccttcgtcgtgggccggtgctggtgccgtacagccagacgagcagcaacaaaagagaagggacgacctgcacctacctgcagttagttgatgcacacttgcatatgcgttggcagcgttgcacccgggtgaggccaacaggacgaggctgcagacgatggttggtggacgaaggaccgagggccggccgaggacgacgacacacacacacacacacacatgggttgcccccgaaacgaatcccgatccatt

SEQ ID NO: 16318 - DNA, 750 bp, Zea Mays
taaaatctacccctgctaaaacactaaactgatggagttgagtctctcgtatctcgtgctgtggaggggaggggagcagggtccatgcatccattaattttcgcacggaattcacaagttgacacgcacacagtgttgaagatagcaacgccgtgcagcagtacaaaataccctttaccacactaccactgggtagagtggagtacgggcatgcaccccggtacgtgagcagtgattgatgaatcggatcgcttgtggcactggctggacatccctgcccgcctgtcgtctcctttctttctttcccgttgcggtggctctctcccgcggccggccccggtcgctttcgttctcctctctctccccttggcaatggcaaccacaacaacaaccaggcacaggcagcatcgtatcgtacgtgaaatgacgggtgtgacccgggagggcagaaccgtccgtcacgtgggccgacgtcctttgcgtcgctccctccctctggtccaggcgtcctcccctccgggggcccacttgcctcgcgagttgatgagagagcctgggaggagacgagatgtcgcgagatgacgcgtgctgtgctgtacgtgaacgtgaacgtggggctggcctggtcctagtacgagtgcgcgcatctttcacgtctgcaagcagtgcaggcacacacacacacaacatgccagctgttaacgggtcaaaagtttctcctgcctccgcgtccgcaccatctaccagtgt

SEQ ID NO: 16319 - DNA, 358 bp, Zea Mays
ccgagatatcctctgagaagtcgaagatgcaagatgtaccaaagcagactgcaagcccttcttcgtcttctactgctgaggtctcggagatattgaaggtaatgactgagtctttcccatttgcactgctaagtcctttgaggttggaactgactagcctcttacatacaagggaaatctcttcggctggcaaggggaaaatgggggctagaagaaacgacgtatgatgaatatactggaagccattgaacagaccccgccctcagcttcggcagacaaagctactaaatctaatgatgccaaagctaccgtcgcagccgaagacgaaaatctcacaaccacgctgttagaaattgac

SEQ ID NO: 16320 - DNA, 745 bp, Zea Mays
cgatggtgaaaagatcttgacgctggataagcctgggcacggtcatcgggctggccaccgtaccccctccccccttgccttacggccggtccagataagctcgccggagttggccgcttgccgatcggatgccacgtgcctaggtgctctaccgcgtcgcagtaactcgtcttaagcgtgcccgttcatcgcttgtgaccttgccacggtgaaggccacacatcctttgcgccagtaactctcttcctctccggccgccagcgcgccattccaaattcaagagccaccgcccatggaacctataaattgccgccccagtgagctctgctaggtagttgtgcatccagtgaaccagccctcacctccaatcgtcccccacagctgcccaatttaggatttcccccaaatctgtcaagaacaccgcaaagtgtgagctcatcgcggttagctcttcacaggtccgatcacgccctcctagctcttgttttagcactcttgtgtgctcttgatgcttctcgacccggccaattgaactataccacgctagatcgccggaaatgcctcggttcatccgcagttcaccccatcaccatggacagagagattaggggctagaaccttgaaattgattgaggggtaatgatcattacgggtcgaattatgtgtcaaccgcatcggagcaccggtcattgcgttttccagctggttttggctcgccggagtcactgctccaccgccatggtcg

SEQ ID NO: 16321 - DNA, 759 bp, Zea Mays
aacagtctttccttgtagacatctgtcagcccagaattttgcagtttcaccattgccgaccaaggtgattacttcaccgctgctatccccaaagtttttttacttattaatagactaagttcttcatttttgcgttgcatttactgctgtctctgcagtttgcaatattacttcattctttgaagtgtttcgtcatttctggcaattgtacaacaaattttttttgccatgtgtaaataagaaattgttgcaactaatagaggggaattacgaatacttggtctccttactggatttgagaaatcccttaaagttggatgtggcaatcttctagcttatccaagtttattgactcatttagaaagtacaaggtagacacactcagcatacacgtgttgttggtcctctacacactggaaatttaccgtttgactcagaatttagggattgaacttaggtggggtggatgcacagttctagacctagccacaggggcagaggttaggtaaaaggccaaccttggacatcccccttagcttattaagttgtcttagttgccatatagtaaaccatggttaatttgatgagtaaaatataattctagtccttatacttgttcggttgtaccaacccgatacataaacttttaaagtatgtcttttaaggacccaatctctattcgggccaccattacatcttaacggattgttgtggcccacatgtcagttgtcatggtctgttgaatcccgtttacccttc

SEQ ID NO: 16322 - DNA, 540 bp, Zea Mays
caggtaagaccaattggtcatctcaccaatcggaagagacaacacatcacaatattcatttaagacccaatgtacctacatagacacctccacccccatacacacctatgacatatcagtatgcatacctacctccacattataacccaaatcaaatttggggcatgccaccatatccatatgggatgccacaataccctgcttgggggcaccccaaacttctatatatgataggttggcaccccccagtgcaaggtcgattgagtgcacctcaatccggtcatcagccaacctttccaaaagattgcaacatttgttcttggcagtagacttgtccctggtagcttctgtattttgcgtccgaagacgctcaaccttgtcctctagttgtttcttctcagaatgaagctgtgaggtcgcgaggtccactagcgctccaaatgccacttgttcagcaaaagcagcaacctgacacatacagacttcgtcacaaaaaatgataaagagagtcgcttacataacgcagcatccttacagcag

SEQ ID NO: 16323 - DNA, 664 bp, Zea Mays
accgcacactagtttctaacatgcttttcagataactcgtaattcaactactcactaacaataaatcacgcacgacaactaccacatcaaccgatttatttatttggaacaacgcctgcctagcgtaccactagttcccacattttgattcaagctcaacaatacagccttcattcgattatacaacagcgacctaaacgtcgcgttacccaaggcatacatccctcctcgtcgcgagtataaccatatcacggcatatacccgcacatctcaatcaaatatcttacgccaccaccactataatacatcatggcacacacgcacatacgtgccccaggttacgcacaaggcatcaacagcatagtgactctaaccggattaatcatactcctcattcgcctcgactatcccaatcatcgatcacatgcataaaacaagtacacttatctcttatttttgcgtaggcttaacacctttcgggataaagtgttactataaacaccttacacatatttgccttaggaacctatcagttcactcgaagacatctattcaagtcataaacacaatcatacacttatttgcgaagcacaacttaaggaacgcctaacgcgtatagacttgacttataatcatagaggaagtgatgactacttacggcatg

SEQ ID NO: 16324 - DNA, 477 bp, Zea Mays
ccgcaacctacccggattcaaacagcgatatctaccaaaatataactccgaatcgagcacataagtactcgttggaaaggtatgaaaaagctctacatgattatcatactgattatcaccaattacccacgagaaatccccagaaactgtcaatattactgttgttcgcccacctgcaaatctgtttttttggacagcaacatacccggattcaaacagcgatatctactaaaatataactccgaatcgagtgcataagtactcattggaaaggtatgaaaaagctctacatggttctcccactgatccccactaattacccatgaaaaaattccataaatcactagaactactgctgttcgcccacccactaaatttctggacagcacctctaccaattcgcatacgtaacatctattcaatggaattgcagcacaaataaacaagagataataacaaaaataaccttgaattctc

SEQ ID NO: 16325 - DNA, 564 bp, Zea Mays
gtccatccatgcttgcatgtcaaacactcgacaccgccgcaaatatatgcataacagtaaatgctactacgactacatacttctgaatcagcgcgcggcggtcatgcatcctgatcgaattcattacgcatttgtggagacaggagacctgcacgtacaccggattgaacagggcactgttgatacgtacactctccttgccatgcctgccatggcaatggcaccataccatgcagagagcgagagggacagccagcatcgcccaacgtcacgcacaacggcacaaacctatctgcaggcagctgctgcctttatcttcgtctccattcgtccgtcatccagtccatgtgccaccagttccccgggcgtcgccatcgccggacgcgggtcacctcaacccccactacgcgcgccgtgccaggggccggagccagccgccactccctccctgcctcaccagtcaccactcgccagcctagtagcctacgcttcatgcccaccaatgaccaaaccaaccaagcaagcgctgctcgctcgcccgctactatatattctcacctgcac

SEQ ID NO: 16326 - DNA, 547 bp, Zea Mays
ttccagtgttgggggaaatgggaattggctttggagttggacggggagtctgtgagtctagtgtaccctgggtgacctgaaattcggctcgtcttttgctttttgactccttgagatggggtggagtccaatgtaatgtaaacaaactaagctgaagtggcacaatgatgttcaattcattctttgtcaatgcaaattaattttctgaagagcttctcccgcatatgcaacgaacgcctggtaccagcaattgcagcttgctgaaaggagaaaactatacaagtcatcaactagagtcattgctttccctggttctgtctctcacagtagtaaaatatgcttgacagagttgccgtatgcagataatttggaatatcgaggatctttcacatacagttagtgtggcgttaggagtcatccccttccctcaggaaaaaaagactgccctaactatttatggtcctagaagaggaaagccctagatacctgtgggtagcatacaaggttttatggtcctagtgattcctgaatctcacctaaaggaaag

SEQ ID NO: 16327 - DNA, 417 bp, Zea Mays
ttgcccgtgaccacgactccaatgagccataggggctacacacatcggccatcgatctactacccatacaacttatgcaatttcgtaggattccagatcatgtcaatatggtatcagagataccaggtgacgttgactctgagaagcagtcgtcaatcccaccaccaccgctcgccgacgccatcgtgaagtccttgacagacattgccatgaaagtggccaatgtctccatccgcatgtcgtggctagagcaccaacagacatcctcttttgtgggcgccatgcactaaggtttccctacgagatgtcgggatatggtgcaccaatgatttcgtccttcttcaccgccacctctatgcctcccaccaccaccctacccatgtgcctcccaccaccctcctgcacaccataatagcc

SEQ ID NO: 16328 - DNA, 426 bp, Zea Mays
gcagcataaacgctatattggctcagccttcgggataaggcctgcctcacgaaaattaaacaacatcaccctcaactcctcaccctaaatagactccgcagatcctcctccccaatacacgtcccggacgacgaagacatcaaatctcgttggccatcctgatctagccgaaggcgggtttgttccatccccatccgacgatgcctattactctgcgacataccaccaacattatgcttcgccaccacccttcgccggtggtactccctagtcctcgcctcagctggggaatcggatgctccacgcgcttccagccgcggcacaaactccgctgcgaccacatcgaacgcagcaaaataatccaaatcctcattcgaagactcctccgtctacaaaaacgggctcccaaactcatccccatcggat

SEQ ID NO: 16329 - DNA, 421 bp, Zea Mays
gtcagcagcagaaggagcacacccattagggtcagcagcaggtagagcacccccatcgagttcagcctcagtaaattcaggaacgggcacttcttcagcagcaggaaccgaaggaccaacatcccgatccaaactagatactcgtcggagacgtctctttttctttttcggctcgtcagcagaaggatcaagttgattggctcgggaagggcgccttgggcgagtactgacaggcttctgaatatccaaggttatatcagtttctgggggaagtgccaccaccaacgtcccagcaggagcagcatcagaagagtcctcagccagcaaatcaagcatagcacttatttatgcgtcactaggatccagaggcacctcaaaatggacctgccgttcatcatcaggaattcccccgagtgaagca

SEQ ID NO: 16330 - DNA, 496 bp, Zea Mays
gcgatgcggttgcctccggcgatggcacggccgtggggaggctcgggcgccgccgcgtttgtacgcggatgtggaagtctgcgctcagtcgttggacagaaagagagtggtcaggattagataaaaggggtaccgattcaatagattaggtcgggtcgttgatcagaggatcaagggtttagagcagtgccgggcgtgattatttgccgtccgtcgatctcggatccgacgcttgagagagaaagtgtgggtttaatagtagatgatctaatctgctgctcacgtttttaatctgacggtcgtagagactccatacccctgcgcggatcaaaattgcacaagagcccctgaagttttagattaacaacccgccgtccattacagctatacactgtgtcttgagattcttaccccgcagcccctgtattttacagaatttgatgcccagtccagagatttataaaattcagaaaagggattagaaaatgattttaat

SEQ ID NO: 16331 - DNA, 849 bp, Zea Mays
gcatatcgaagggctaagggtctgtgtttcaagtgtggggagcgctggagtcattcacaccgttgttccaccgctgttccattacatgtggtggaggagatgtgggagctggctagaaaagaggaagatattgctgaaggaactgaagaaaacaatggaggtggtattgagcagagtctagatagcatccatgcgatatttacggctgcagtcgatggcagtgaaggtattcaaactattcgattgtgggctttagtgcattgccaacaagttttaatactggtggattcgggcagcactgccagttttcttggaagtcatctcatgggaattatgccggaagtgcaattgctcaacaaaccactgaaaataagggtggcagatgggagagttctattaagcaaatactttgttccggattgcaagtggctctatggaggtctgactttctctatgcattttaaaattattcctttggggggttatgatatcatactgggcatggattggttggaacgtcatagtccaatgtctgtacactgggccgaaaagtggttggaatttgagtatggacagagaaaggtccagttgcaaggggtgcaacccagaattcagacatgttacagcctcaagtgtggtcagttggactctctgatcaagcaggaagcagtagagcagttgttgatactgaagaacgttgaaaatggtgaagttattatcgaattggtgccagaaccaatacagcagttgatcgatcaatatcaacaccttttcttgaaacctgaaggtttacctcctcgaagaccagtggaccatgccattgatttactacctggtgcccaaccattt

SEQ ID NO: 16332 - DNA, 862 bp, Zea Mays
tgggtacatggcggagctgggggcacagtcaatttatagaggccacgagcggtggccggggatttgggcgacgacgcgcggcggccagaggtagaagaaggtcctggcgcacgtgaattcgtggcatctaccgtggcagttactccgacgagccacgaagaggcacaagggttcacggcgatgcagtggaggggctgagccacgcggcgcaaggccgggaggcggctgtcgccggccagcatatccacatctgccgtggtgactgcagtacggcggccgggattgtttactgcccggagttatccacggcgacgatattttcgcgaccccgcagtgctatccaacaccatccgagcaccaatcgtggcgacgacggcacgaatcacggcggggagccaccggcggtgagatcttttctggtgctggcaatctgatcctcaacgatcactgtaccatgggctgcagcattcagtcaacctgacagccatagtttaggctcgattttatcacaaattttcatggcaacatacccaatgatctgcagcaaagttgtagaactacaatccatctataactttgatacaatgtgtttccacaaaaagtcactggatcttgcttaaaatcaagccctaagttcatgtcatcccactcttaatctgaatttcagacttcaagcagtctgacagtccaacttcaggctcaattatctccagtttttccttaacaactatgctcacacccttaaggaaagttgttctcctatgattaggctataattttgatgtggtgacctagggcaaactctcttttgtttagaagttacagggtcacaaagatgagcacaatacactgaaattagact

SEQ ID NO: 16333 - DNA, 689 bp, Zea Mays
aaagatctcacggcggggaagggataggattgcgccatggatattttcgggttgccatggtctcgcagtaccccgaccacgtgcatcaacaacgtggccgtgcggccgtcaccggagtttgcatcctccgccgcgattgtgccactcttccggtcagtgaccacgtcgccgtgaactatgatcattaccctgtgactgtcgtggcttctcatcccgtgaactgccacgaatcaccccgccggtgactcgcttcttctctgaccgccaccgcattcaaccccgaattcccggccaccgctcacttgatctataaattgagcctcccttcggcttcgccatgtatcccagcagctaccgcacccacctacatcccaaatccctctctggcgagcgctaatttcggatttcccccaaattcgctcaagaacaccgtaacagccgcctctccgtggccagcgctcctcaggttagaacatacccaatcgcttagtgttctagcctctgttaagtcccttattgctcgtgaatctgtccaattgcgctaaaccaccttgggtagccatgaacgcgagcgaatgtcctcgcggctcacgattaccgtgggcagagagctgtagggcagtagtccagaaattggtttgggggaaatacgcgggggaagttcaatccggtgtctgccacttgggagc

SEQ ID NO: 16334 - DNA, 568 bp, Zea Mays
cgctagggaggataaaaggcataaactctctagcggcaagcccatcgaagtggatgacgtcggggcaaatccttccgccgagcactggcgcatcccatccaagcaggcggtataccatttagagcactcactcagtctgggcgcgctcgggatgaagtcacgaggccatggtaaactatggcgacacaaagcagaaaccttgaaggcaaagaggcgcagagagctcgaaggcgaaagggcaccgcgagtgggagagaagcaagacatggctactacccgaggggtgaacccctttttaaaggcagatttccccgctcgcgcctgaagcatcacgggcaaggcctcccccaatgcgcaccaaggttcccatcttatgacatgggggcctagccacacatgtcatacaagctggcccgaagcgtgaagaaggcaaaccgccgcacaaggagcgcgcaaccgccccgtggttgtgctccccttcatcttcgccgcaaccaacggtcaagaaggtgaaccgccgcacaaggggcatgcaaccgctccgcggttatgcaccctttcatctttg

SEQ ID NO: 16335 - DNA, 547 bp, Zea Mays
caaatctctatacattttggtttcgctagggtgaacggtgtaaggcgttttatgagcttctctcaagatatccatcttcacctctgatttctgaggcacacaaagatggcccctgaaacaaaccaaatcattctcattaatggtgaactcctagggtttaccatcgccaaccctctttcgagcttccagcaataaacgatcctgctgctgagccacacgcactctctccatgagggaggattgaataagcattcgagtctcctcactagcggtgccaacataacacaaagcgatccccaaatggtccagatcaaggcaaggccacttttggaaccccagacctgctaagggcatcagccaccacatttgccttccccgggtgataatgaatggacaaatcataatatttaatcaattcgagccaccgacgctgcctcaaattcagctccttctgagtgaaaatatacttgagacttttatgatcggtgtaaatgtcacaagactcaccataaagataatgcctccacgattttagagcaaagaccac

SEQ ID NO: 16336 - DNA, 670 bp, Zea Mays
atttgatatttgccgtttgcaagtcatggtacttgatgcaggcttgatcccccagtttgtggatattgttattggggagtgttcgtatgagattcaatttagagttgaagaaaacatggatgaagagatcttgaacctatggatttggatgatataggctttggtgaagatgaggggaggaattttgagactaatgatccaaattttggtatgcagccaccatgtgataatctcagtaaagaaaagaaagaggcttcagattagtgtgggcatacatcaaagggaaagggtaagcaggtggtagaacaggatgcgcctcacatggatgttcgggatacccatgatgatggatcttgatgttgctggtctgtctgaccagggcaaaaaactgtgtaaccagtgagttttctcttggggctgttgactcgtttctctctgttcgggatccagctattgcaaatgacgacctgcgcactccggacgcgaaggagcttgcagcagttccggtggcttctattggttctgtggtgtcatacagaagtaagatgagagcaagaagttcggtgggggatagcttggaacgtccgtccaagctgaaggcgactcgcaatcttgattcagattttgaacgaggtattccttcctgatcataaccctttgcttgtttcct

SEQ ID NO: 16337 - DNA, 1386 bp, Zea Mays
gttctccttgtgctttccagtatcaactacatatactacatcatcaattgtaatgctggtctctgctatgtctgtggcaataataacctgcaacacaacatgaaagtcctgtttggattctctggtctcaagtttagttggttaaagttaaggactaaaactttagaccactttagctcacttgtggggtctaaagtttttgtgaggttgagtaaattttagacagcacttgacctcctgtttggagcctcaagaactgaagtgatctaaaatttagtggctaaactttagatcatgggattcaaacagggcctaagatgcagtaggtgtcagtttgtgggcctgtggggacaggagtggacataatcaccttgcggaagttatctggtggagactggaacactttcctttgatcagagggtccaagcagtgaatgtaaaggaaggatccaatcagatgatgcccctccaaatctaactaaagcagataatctatcaatcaacaagtcaatctctgcaactccctgtagcagcatcaatggaagaaaagggctaagatatatattagcaaacaaagcactaagctgatgtgatgccatcgtaaacttacaggaagaaaaacaagaatagcaccctgaggacagttctcatcaatatagcatatcaagtcttccaatagatcaaaatcgatgacatcttcattcaagcgtttctgtgttaacaacaaaagatttagtcagaacaaaaacgttattagaaccgaacaatgccataaatatagatcaaataatggaactcactagattttggttggttctctcattatatgacctatagtaatcagaaatatagtgagggttaacatagccttcggaaagcgttgactcatcaccccatgaggataagacaaggttcttttttcctcgtcggttgttcactgagctgctagcatgcttccactggagcagggtcaaatagattaaaggtaagtatagcattaatgatcagagacacaataaatgcctatttggcacagctcagctccaagattctttttggagctactcaaccctagctgcagaaattcttggggccggagctgtggacacactgaacgtactcgatagaacaatttagttattactttggatgaaaatatgtgattggaccactttattttatcctataaactacaaatcatgcatgaatctcagagatgaagctatgacaaacagggagtataatggatgtcaaatggttagctcttcagatatgaagggcagtgacagaatatgccgttgcaaaaaaacataacacactctttcccctaaagtagcactacgtatcaaacaggaaaaccccaacttaactacaactttattcgaaa

SEQ ID NO: 16338 - DNA, 382 bp, Zea Mays
tggaccgggtggcctaaggagttagctacttgggagggatggagctgtgatcgggcaaaagacttaccgtttgctcttgcttgctagaagggggtaatgtcagtgctcctatctctctactacgaccacagcggaggaaaggccaacactgacaagggaagggagcagcccaggaggagaggagtacgtacgtaagagtcatcaagcctgttctattatgttgcaggatcgggctgctaagaagacgtataagtaacgatctctggtgcgtaacaacctgatcctgcaacataatacaagaacaggctggcagcagaggacgaaagaatggcctgacgttcgtcgccgctcctgaccctgagcaaattccctgttcttcgcc

SEQ ID NO: 16339 - DNA, 405 bp, Zea Mays
agagcattgcggctaggtggtcgcgttcccggcgaccagaggattcttaattcaattgcatgcgtcggtgagtttgagggaagcttaaggatgctaaaacgagattagagagggcgtgatcggacctggggagggctggccgcggcgagctggagttcacggtgttcttcaactgatttggggaaagtttaaaattggagcttgctggtgattgactgggagaaatactgggtggcttggtgctggatgacctagcggagctggtggagggctcaatttatagggagagcgagcggtggcccgggaattttaacggcgacgcgcggcggtcggagataaggaagaaccgtggcgcagtggattcgtgtccacagtcgtggcgagctcaccggcaatgatttgacg

SEQ ID NO: 16340 - DNA, 564 bp, Zea Mays
gtcgggtggtcggggatctgtcgccaaagttgcaccaccaccgcggatacgccatcgccgcggtcgagttattgcgccgctggattcacggtggggagcttctcaatcatttcgctgtggtcaatacgtcgtgttgcaccgatcagcacacgtttggggcactagagagtgagaccggcatggctccggcgacgcgccgccgtggtactcgggcgtcgccctactcaggcggggaggggggagaacgatgcacggatgccgttgaggcatggatgaatggccaggattatgggttgcgtaccgctttgtggggattgaatctggactaatggattttgatcgggcggccgagatcgcgtaccgattcgttatgattctgattgaatcctgtccaccagttttagatcggacgattgtggtcggccgataccccttagaccgcgtacatttgcttaagagaccctgccattttcagaaataaacccgccgtccaaaaacaatagaaaataattacatattagtcctaaattttacagattgaaccttgagcttctttaaaatgtt

SEQ ID NO: 16341 - DNA, 329 bp, Zea Mays
caaaaagtgcatgcatatggtgcgcattggccggggcgggcctcattgaatccatgcattcgagacaacggcaaacacatttgcattgagcacacgtcataagagattaagcgcacacgtacacgtacgagccttaatgcccaagttgatgctgatagagacgtactccctcctagagctttactacttcgaagcaggcactctagtcgaattatatatgacacgtggttacggattacttgcacgtactgcagctcggccactacgacagaatcaattaagaatgttccttccagcatcactgcacacctaacaacgtgccacaaatt

SEQ ID NO: 16342 - DNA, 303 bp, Zea Mays
ctctgctttgcatcgccgtagttcaccatggccttgtaagttcatcctaagcatgtccagactgagtggatgctcgacatggtgtgctgcctgcttggatggagtgcgtcggcgtttggtggaaggattcgtaccgacggcatcccccttggcgatctcgccgtcggggagtttgtgctcttccgccggtgcctggcttcaaggatgttcatcagccttgtgggggtggagagcgagctgagctgcggctccatctcccgcatgaactgatggcctgtctccatggactggtcgcgccccggc

SEQ ID NO: 16343 - DNA, 364 bp, Zea Mays
cgaatcacaggtaagtcatacgccatcatgctcatctcgcctccatagttgcgaatccattgtcggtcgagaatggggcgctccgtggtgccggatcagatatctgcggtgaagccaccgccacgcttgctggtgcgccggcgtgttcaggctaggggttgaaaacgaacgtgggtcgttgatgctagagggaacgatcaggattaggtcatcagggatagggcattaggatgcatcacagacattgatcggtggtggagaggatgagagtggaccacaggtctttaacatctagaccattggatcgggtgttgatggacaggattagatcacgatcatgtaagatgccagttgttgatctctg

SEQ ID NO: 16344 - DNA, 553 bp, Zea Mays
aattctacccccaaattcagggcgttacatgtccatataatgttttttatcctttatcatttcatctttcgacatatgtgactctttaatggccaacaatcgaacagccatgtcaaaacattttagagtcatatcgagatttacccttaatacgtttggcaggtcgttgacagatatttctatcttaaaaatgttgaaacttcgcacccatgtcatcctgtaatgcagtatgaaaaaagtctatattaaaactctacgtagttggtacctataaaatagataaaacaatgagcacttactctaatgtcgaatcatcttggattgtcatgatgtaatcacatagaacatctattaaatcggctttggtcactggcatgtcctttgtggaaaggccactcagtaaaaaatcattagtgcactcatcggtcgggatttttataggagttcttttatcccaatcatgaactaaccacctttctaagtctgcttgagtgatggggccatcatcatcttccatcaatacttcgctatcttcagatacacaaagtagttt

SEQ ID NO: 16345 - DNA, 529 bp, Zea Mays
gcgtgggcgaagcggtatccgcgatctaggtcgtgcgatcaagatcagacgggggagatcataccagggagggacgaacggctgcgggcggcgctgctcctctccgcggcggtgaggtcgccagagttgaggcaggcgtgtgctaggggggttccaaggtcgctgggattgggcagagagggagagaatgccacggcgaactcaatggcggggaaaaggccacgaatccaagggcagagaggggagaacggcggagagaaggcctcgggcggagcggaggaactccggtgaggtattccgaccacggggaggggacttgaggcgcgctaaggcttgggaaagcttcagcagaggcaagggtgacataggaacctacaccggggaactagaccgggctaaattggcccggtgaccgcgcgagcacagcggaccgccgcggccgagcaccggcgatgccaaaattggctgaacacagagcggaactagggaaattaagcacgatcaaaggtgtctcacctcggggcgaagc

SEQ ID NO: 16346 - DNA, 629 bp, Zea Mays
caatttgcttcttgagttccaccaactctggtccggacactcgataggcgctcttggaaataggggcggtgcctgggataagctctatggcaaagtcaactttcctttcaggtggcatgcctggtaactccttagggaatacatcagggaattctgacacaatcctaattgcctcaatcggattggaccctttgtcatctactgataaatggtgacaggctccttcttctagtttaggcaagtatagcttagttactacttcatttctggatggggacaccaacttaactgttctcttgtcacaactgacagtggtttggtttctgtgtagctaattcatccctaggatgacatctaacccttgagttcccattactactaggctagcggggaagtctatcacccttatttcaatccttagattcgaacaaatcctatcgaactgaaattttcccccaactgaattaactcttaaaggtggaatcattggttctatggggatgttatgtgattctacccaagatgtagaaacaaaagaatgtgtggcgccagtatcaaataatacttttgatgggtaggattcgactggaaacataccaactgccacgtcttaagcatcctggattgct

SEQ ID NO: 16347 - DNA, 938 bp, Zea Mays
tcacaatcatgaagatttgcaagctaaaccctgaattttggacctatttgcaaaaggaccctatttgagttctaaagctaagtctgaaattcagtgttttgagctcatctttgtgaccttgtaacttccaaacaagaaggattttgccctagatcaccacatcaacattgtagacctgtcaaaggagaataactttgcttaagagagtaagcatggttgttatgaagaaattggagaaaaatgcacccaaagatgggctgtcaggctgtttgaagtctgaatttcagactaacagtgcaactgcaagaactttgggcacgaattcaggcatgatcgagcaagaattttcctagggttgctataccaagattatagctggatcctagagctataactttgctaaagagtgtcgatcatgttactacataaaattaagagaaaattcgccctaaactttgactgtcaggtgcactgaatgaggaatggccatggtacagtatctgaagtagatcagaccgccagctcagtttctcgccgccgacaatctctccgccgcgattcgtgccgccgccgtttcgattcgtgctcgggttgatcggataacgctcggagtcacgctgccgtggataagcttcggccagtaaattatttcggccaccgtaccgagctcgccgcggtggattaagatgagttcgccggtgaccgccgccttccagccttgtgcagcgtgtctaggcatctccaccgcatcgctgtgacctgctttagctctccgttgatcaccggagtgaatgctacggtataggacaccaatccactacgctagtgaaattccccctcctcggaccgccgcgcgtcatcgttccaattcccggccaccgctcttgcttagtataaattgagccctccataagctccgcaagatcatcacgcaccac

SEQ ID NO: 16348 - DNA, 342 bp, Zea Mays
ctggttagtttgtggcttagatgatcacttgacttgcttatgcgaaagttactagtccttctgcccaattcagtgcaaatgcataatttaacaagtgtgggtaatgtgtgcactattagcttatgatgtttttccttttacaatctgcattttggactgaaactagaagataaagagtaagcccttagcccagcatcaaactgcgttactttcatgttagttatgtgacaatcattgtaattcccaaacaaatagcttagcataatagtgcattttatgacagcttactgtcatgcttttaaggaaacaatggcacacttcattttagtgtcagggcctcag

SEQ ID NO: 16349 - DNA, 717 bp, Zea Mays
ggaggtgcaagtttggagatgcgtcgtgggaggaagaccgagtacctcgacattccactcaaggacagcatcaaaggctggcgcctggaatggtttatcgtagagaatcacgggaattccctccccctcggtcagggagacagccagatgttcgcactcccagttggactgaatcccccacggacttggagatagctgaggctagggttctgcttgcagaggttggcttgttgagggagaagggtctgactgccggggctgtggtcgccgatttcgtttttaagaacattcaaccgctgaaggatagagcgtacccaacttacttgtatcgtggtgttactgattcgacccgggttaccaatagaaggattcctgctgtggacctggtaagccggcttaagatgaaccttagaggcaaggtgtcgaatgttggtgctcctgttgcgtattcagcctggaatctgcctcctcccaagacgttcatcagttttgtgtcaaatcctcctgctggggatagtggtttgggccttagagtgcagccctctcccgaggaggttgaggctttggttgcttcgcttggtggaatccccaatgacgagaggcaggttcactttgagatgcctactagcccgagcgacgcagaaataagtaccatgctggatatgttggctgaggattcctctaactcggctcctgctgaaacactagttgtagcac

SEQ ID NO: 16350 - DNA, 309 bp, Zea Mays
tgatgatataggttatggcgccgaggtactgcccgtgttgacgcacgctggttgtcaggtggctgacctggcctagcgccgagcaagggaatatgggctagaggccttctttctcacacgtgctttgtcttctctcaaactcgtcgtgcgccaagctagggaatatgggccaaaggccttcttctcacacgtgcttcgtcttctctcacactcgtcgtgcgcctctgtctctgtcctgtcatcgccaccgccaccattggacgtcgtcatgcctgtgcccctgctcactgcgcctcgcgcccggtcgcc

SEQ ID NO: 16351 - DNA, 464 bp, Zea Mays
aggaccctattgttacatggcaagagatgaagcgagaaatgagaattcgttttgtgccgaagcattatcgacgtgatctttttgataaattgcagaatttgaggcaaggaagtttctctgttgaggagtattataaggagatggagaaggccatgattagagccaatgtgtatgaagacgaagagcaaaccattgcatgtttcatggctgggttacaccgcaacattcagcgtattgttgagtttcagccgtaccaaagtcttattgatttggtacatcaagccaccaaagctgaacgccagctgcaacaagatgctaagaacagcaagcccttgtcatatggtgcacgaaccatgactggaggaagcaagtcaatctcaaggtttgctgctgcatcctcagcgacaaaaggttcaactgggggcttgcgatccaatattcaaggcaattctagtggaaagaac

SEQ ID NO: 16352 - DNA, 660 bp, Zea Mays
aaaacacatgcatgggacacacctggatccgcatgaggaggtcactagaatgcttgcgttcgaagcggtgctcggcgaagtcccgtcgtgccttgtcaacctgggctcgctcctccggcgtgccgaggtcgggatcgaacacccactcttgcctcccgaggaggttgttcaatgaccgaagccatgggctgctgctgcgctccgacactttgagcctccacatgatgcaatacgatgctcggctaataatctagctaatagagatggacaatgcatgacatgaggcatgtgtagtactgcagtgttcctgtcttttatagagggccggagggccattccctgtgcagagcgctcatggttgcaagtctactactactctataagactgcaaagagggcgtccacagtggtatgcccccgcctccgcagatctcgcctgcactgctcccgcccgtgacagcctgtaaggaggctgccccaacctccgcagatctcgcctgtgctgcccccgcccgcgatagcctgtacctcacgcccagcctcggcgctgccctccaccggcgccgtctgctccccatgttacaccatgccctcttctccgcagatctcgccgtgacagtaagtgagctctctcgacctcttgtggcaaccagcttcgtcg

SEQ ID NO: 16353 - DNA, 1889 bp, Zea Mays
cattttttctgtagcagttctttgtttggcacttagcacattcatattgttttcagtcttatgcaggaaccttttcggcttctaccagtgatttggcttatacatgaagacactcttggacaatatcttagaagttatgcaaagttacatgattctattcaaaatgtcattgaagattggaggactcattttaatgcatgcgcttatgttgtttttccagatagctaccatcctgtatgtaccaccatcaactcaatactgtataataatttatgaaatgcaatttatgtctgacataaagctatttgatttcagttgttgtactcgcctcttgattctggtaactttttagtgatttctggttctccagttgatatctggtctgctaaaagatttggctcatcacattctgacgaaactacaagaaagcagcatgggattgaaaaagatgatgttgttattttggttgttggaagctacttattttttgatgatttaccatgggattatgtcacagtcatgcgtgcatcagctacacaaattttggatatagcaaaaactaaaaatctgagggtgcagtttgtttttttctgtggaaatggctctgatgcctacaactctgctttccaggtaatgaatattccacaaattagacagtggcctttgggagaaataccttgctattgaaaaattccaagaaataccatttgtacttcagtgatgggttttctttatgtcatctgcttgaggagacaatatcattaccatattgtgcccatggaagcatccttttaaagtcaaaagtaactggcagaacttggccagaccttcatatttttcctttactacatgatttttttggcatttaaagtaactatgcattgcatttgtgaacttcactaaagcaagatcttgaatttcttaagccttcaagcttgtatgttttgttggacatgcttttagctggctaacctttttatttctaatgaatatttatcctctagttaattacttgggcactttactttgcggtaacctcatatgtttttttgtcaaacaatgcagaaagcttgacatgacacacacaccagccttttcacaagattacatggtgaccacacatattagatgaaataaacacccttcttgtccctgctctctccctctatgttatttttttcttcaaaaacattttagaatgggctcttgttcgtctgtttagtaattcattcttcccgtgtttacaaattcacgtgctaatataatcctaatgtctgttttacaggaacttacctcacacatggggttacctgatgtctccataaagcgattttctgtgactcatgatattagaaacctgttaatgtttgtggatgttgttctctatggatctttaagacaagaacctgtcttccctcctttgttattgctgtccatgtcctccgaaattccagttgttgcaccaaatcttactgttataacaaaatatgtatgccactcgatcgaattcttaataattcacttgtaaatctttgccactacttttgacaatttgttgttccaggtcagtgatggtgtccatggattccttttcgattctgctgacccaagcacgatttcttcagctttcatacaaattttaggagaaaaaaagcttttggatactgcctattctgttgctctggaagggaagctactttccaagaacatgttagcacatgattgtatcaaagctcatgttaagcttcttgaaagtgttattcattttccttcttatgcaaaattgccatcttctgtttctaaagttcaagaacgaacatggttgtgggatcctttcgagttgaaagctgcactagaaaatagtttgttggaagatgaaagccatgcca

SEQ ID NO: 16354 - DNA, 1278 bp, Zea Mays
aaggttaatagctttcatgagcttattttatttgaatcaatcacattggtagcttacacagaatatggtatcatgatgcagtagaagatgaaaattttgtgtttgacacagttatgaattaaatgtctcaacaacaactggaagtttaaagcaatacctgtagttccataataaattcggttgatatatcagcactcccatttttaacactgtctcctctaatttccttgctgggggttgacaaggacccatcatcttctcttactaagtagacatggtcattccttgatgctgaataacagctatcatcaccgagagagatacaggaatccaaatattcaccattctgcagcaaggtattgcattgtcaaaagaccaaaaagccatataggtgtggttattaaaaagcgagaaaaaatgaaaactaaaacgccgaatattaccactatagtgacattccgaaattgcaatctcttacacccaagcacatgaatgaaactctcagtacaagggcttgagagaattttcccctcactatccagcaaatataactttccacccttcccatcatatacgaagtgatcaaatctttcattatcaacaatcaagggcttctgaggtgaaagactaaatgttgaatgctcctggaaataaatttgatcattcaatactactggagtgatcatatgtaaaaggtccttgtcttcatcattggatagaagactctgagcagatggcacaaagaattcgattactgctagtaagaagtcaagtgccacaagaaacttgggccgctgaacacagacagagacggatgacgaagattttcggaagatggcatcaagaataagcatcgaggggattggctcaaggcctagatccttttgtattcttcgttcacctgaatcaagttcattaggattatcatagccatcaacagatgatgtgtcccgaacagatgctgatttcccaatggcaagccttaactcatctttggttccttcacgatcatcaaaaacagaaaatcctttgagagtagcatacataaaattttctccccgtgtgtttgatttatagaaaagccatgctccactcgcctgcatacataagattatacggtaatgtaaactgtctccaacaaagagttatatcctcatgtgaaagacgtcccagaagggaaaaaagtcttattcgaatctgacctacactcagcaaataggaaagaatacttcaacaaacatgaaaacagcataaaaatgttacatgattctcaactgt

SEQ ID NO: 16355 - DNA, 433 bp, Zea Mays
gatggatagcgtcgcggggtgaacgatcttcgccgctggtgagctggacgccactccggctagccgcggtaccgcttccctttattcaccgccctcggataaggattttcaccgccattaagccgtcgccgttgtccgccatgtggctctcactttccaccgcatcgtcgtaagccttagcggctccccgttgatcgccggagcaattgccacggcgctagccacccagccacttcgccagtaacttcttcctcctccgaccgccgcgcgtcaccgttaaaattcccggccgccgctcttgctccctataaattttgccctccaccagctccataaggtcatcacccacccagccaccgcgaatcgctagcaattgttcgccagagctcgcgaattttgaattcgccccaaatcagttctctgccaccccgaa

SEQ ID NO: 16356 - DNA, 358 bp, Zea Mays
ctcggatatggacagtctttaataaaatgatcagactttctacaattgaagcagtcagtggaagaactagggagagtgggaaaatgagcaccaagggcactcggctgatttgtagaagtgggggcagtggcagggcgaatgaaaacaggctgtttgaacggataggagggtggacgaggcgaagaacgattctgattaaatggtcggatgaccaacctggtttgcttctcaggtccctgattggacctgtcacctccgaatcccttcgattttccttggcctgtattcttagcttctactgccagcgtcgtgctaacagccctgctgtaagtgagatcaagacaggtggccattttcc

SEQ ID NO: 16357 - DNA, 455 bp, Zea Mays
cagagacccaagctaagcgacattgtagctactccgatgggtttctttctccaggcacaaaggtactaaattgaacgagacagatgcacttgattgcggtaccttaggtcaacacacgccaacaggccctcagaatgggagatacggtgctaacgtcgaggagcgagggtgctccgcccagcgagcttcatcggcgattcccccctttttctaggacgattgcttcgctgctctcgaaacggagttggcgaggctggcctaggatgaaggaacgcaggtgggcggctcttgggggcactatatacttggcgatggagtcccctgcaatcacgcggacgttggagctcaagcggttacgacgactttttctcgaccaacccagctagccaggggaaagggtcccaccaatggcgatgtcgcagcaacgagcacaaccggatttgggcaaacggtgg

SEQ ID NO: 16358 - DNA, 382 bp, Zea Mays
aggtggaatggtaggcaggcgacgtgcaggatggggcggtggaaacagcgagtgccgatgccgaagcttccttgttctcggtgccgaggcgaagttccttggcacggagcatgttggtggcggacttgaagttgggtagcggtgacgtgttggcgatgatgtcggcggtgttggcgaagcgagggttgaggccgcgcagaagattaagaacgagctgcgcaggggagatagtgtggccgacctcccggagcgcatcagtggtgcgcttcagttgctgggcataggcgtcgatggagaggtcgccctgggacaggttgtggaactcctgctcgaggacgacggcgcgagactccttgttcgcctggaacagggcctcgatgga

SEQ ID NO: 16359 - DNA, 856 bp, Zea Mays
tccatcttagaaaataccaaataacaatgattcctctgacctttcaataatagcatagaaactacacctttcagaccattgccttgattgtttcatatgttttgcctaaaaatgatacaacttacatctagaatttttgtgtggattttatttgtcatatctatggtctgcaggcttccagctattccagatcagaatcttgtgtgttcaaattggtgccttcctattctgtgtacaaaaataattgctaaatactgattacatgacaaaaccactttgtcaagactctacatagttcttgtgtacgtacttggcttcctattttgtgtgtctagcagtgtgttttctgtgttttcagttatgactattgttagtgtatttcaaaattaatatacttcttacattcttagacatataaagtcacattggggcactagatatttcacacatggaaaacaagcagatgaatgtaactgatctaataagagtaacttcctatatgtgcttgtagtttccagttaatacttaatttagtgtctttctatggaaacgggaaattaaccttgcaagttgtaacaccatttggttaacatggatgtggtttgtagcacgtgaggggtagaacgatgtccgcctctttcatttatggttcatggtacaagtctatgagagatgtctgttaattgaaaatcatgatggttcatatatgaaacagaataccaatctctctagaaatataaaagtatcaggggtcagagattaatctcgttggggactgcaactagacatcactcggttctagatcaaagtagatttattagggttttaattttttggctgagatgtgtcaagttac

SEQ ID NO: 16360 - DNA, 567 bp, Zea Mays
ggttgaaccacttgcgcgctcgagttggcctcgaaatatgctgaggttcgattcattgccgccgtcattgtaacgagggggtggattatgcacgctcgacaatttatcaccatagtaagttgttgtgaagtttgacacctcctctagaatgtatgcctctgcaatggaagcctcgattttgcatttatttctacatttctttcgaatagttttagacatctctcgattggatagcaccaacgtccctgcacgggcccccattcgtgcctcatacgggtgatgaagaatcaaatgctgcattggattgaagaagccgggtggaaatatcttctcaagcttacacagtaacacgggtgtcaatctttccaagtctgcaaacacgatttgagataactcttttgcacaaagctggcggaagaaataactcaactctataagcgctagccagacatgctcacgaacatagcctcgaaccatcgctggaagaatccgttcaatccatatgtggaagtcatgactcttcatccctatgactcgcagagtagataagttcaccccctactcaag

SEQ ID NO: 16361 - DNA, 764 bp, Zea Mays
gaatacttggtgatggtagtcggggcccggaaccgaggagggaacgacaccatgcggagggctctgctgaagacctatgggcccggtggctcagaagaagggcttcgatcctccctgctatcatagcggccactttgccaagggtggtatccgcgcgtctcgtgttgttggtcgtggtgtcgaatacgcctgccgaggcagtcgtggaccccttggggctggcggttgtccaggaggcggtctcgtaccgtgggtgccctctcccaggtgggtgtggtatggatcgagtcctctcattcgaggcgagagggttccacttggtgatccgaggtgacctcccgaagccgagaggctgaactctctgcctgctggacagcagcgcactccaagagttcccgaagcttgtcgtggatacagcgtcctttgatggttgagggctccggcatggtacagagcaagatcgttgtcgcagaaaggctttggctggcccggttgagggccgggggtgcgtcggcatcggcgtcttccataatgcagcgttgtacatcacgtgcctttgagcgcatgcccccatcgagggtcttgttggcggcttccttctccagcgcctattgcaactgttgtagccattgttgttccttcccgagtttggcatgcagctcacgaagttgttcgaggtgagccacgtggctcccaggaggggtctgggctctgcctggctccctcgcttcccaaacgcgtgggagtggttggttaccttcccg

SEQ ID NO: 16362 - DNA, 540 bp, Zea Mays
gcgctggttctcgaggcttctagtgaggacctcaatgagtcgggtttggttagccagaacttgggctaggtctaatggcagctccgaaggtgcggggaggtgggtctcactcccttctccaccgacttctccatcagcacctacgggagaccttgctctaatccctgaggcggtaggcgtggttttatccgaagccatctgctagaggggagaaaggattactactatgcttatgccatatttttcttcaacatgttattttattcagcactccaattcattacaagcatataatcaccacagatcacactacacgcgagtgttttctaaggtgtccccaaactacctgagaagatcatcaaggctagccagggacacctcctcaacgtcagaaaagttttctatccctgggggaggcagtgttggcggggcttcctcctttcggtcagtctggcatccttggctcttgaaccgctttcggatcttcttgatgggggtgagcttctttaacttcttagcatagtccatcttcagagtctg

SEQ ID NO: 16363 - DNA, 476 bp, Zea Mays
gaaattttgttcacatagttatttccaccgccctctctcttccttatcttctccatgtttcttgagtattccaccgccacctgatatgttccttgcgtcaaacaccagccaacctctctaccctcaccgtcgctctcaggccagaggccaatgcccctctcctcctcacggcgcccttctcaagcatcagcagtgggctcgccgtcgtttccccccaaccctggcgtgcatcaccatccctcatcctcatctcttcctctgctccttcgttcctcactagctcggccagggagctcccttcctctcgcgcccatcttctccctgcccagacgcactcgccctggactccatgtgtctccccagcttcatcttcctcagctcgcccaggccatggacatcagtgagctcaccctaggtcccacctgcattgaccctactcctctccatccatggctacgctcggcatccacatcaag

SEQ ID NO: 16364 - DNA, 471 bp, Zea Mays
gatgctcttatgactggtgtgcaatatatgagataccgtaagcgcgccatagcagctagttagttgctattttattggctgatttatttagttgctattttattggctgatttgttgctgggttgttgccagccggctagataggattagttggagaataatgtggagatccacctagatatagggaggttagtttatcagataagttaagttagaaggagactatatataccggctgttagcattaatgaaagtggtcaagcagggcaacccttgtctttcccagccgcatctctccctgtgccgcagccctctatccccctctctcgctcacgcccaggccaagatcacggtgaccagacgccatgtccaggacctcgctcgcctactcaccatcactaccaactccgcaactcgagctttaccaatctggtatcagagatgcctgattccgacaaagtcccgccagcc

SEQ ID NO: 16365 - DNA, 778 bp, Zea Mays
cttcgacccgcccgaacacgcgtgggaggaaacggccggaatcggtagaggacgcacgggaacactccaaaggtagcggtcgaccgtaccattcgctaaaatagcaaaccttatagcggatgttgggcataaaaagtagccaacgaaacgctatatttatcgtacataatgttttaccgtctattgttgggcacagtctcatgaatcttgaaagaaaagagcaactgccttgcgtttgttcttgtctccagatttcttatgcattgatgagccgttctcgatggtggagtcaacgaagtgctccattgcattgagctggggctcagtgtcgttgtctggcatcatcattgttattgttacgttgtgttctggactgtctcgatctgatgagcattcctagacttttttaggagaaatcaacgaccaacaaatgagagagaaagatatctaatttcagatttaattcggggcaaaacctcaattccccacacaattcgtgacaacgagctggttcttcatcttactaaatcgataccctagtctccactcgcaacagacatggagtagatagagaacgaaaaggtcgaaggcgatggcgtgccagtagtgattcttgtagcttgttgttcatcttacagtagcagaaaactagcatttaagccagaatagcacaagagagcatgcatgtagctatctagacctgcactctagaatgttgaccaggctctttaaactttttggctccatcactgtgtgtgtatactgtattggagaaaat

SEQ ID NO: 16366 - DNA, 513 bp, Zea Mays
agtcccctacctggcatgccaactattggtgttttgtacctcgctccgacaagtaaatttattgtgcgcgtttcgggcttcggaggatgtgtgcggaaggcgcaacatttatattggttcgggcagaatgtccctactttcattcatcagtggcttgcactatcggcaccattgatgaccaaactcatagtagaagttacaagcagtcgagagagggaggagaggctcccagatctcttatcggggtgtaagtggagcttagaagctacaaggtagaatcctagctaagtcatggcttggcgaggcttcagcctcctagtcctcgtcgacgctcgtccctgttcgtccttgtgggctcgtctccatttaaaggtcggggaggggttggccagtggtggcttctctaggaaggagctgtaaggcagaggttggctagtggtggcttttaagtgaggccacgcgtacttgtggggcctaggctatctcgttgtcgtgtatttatcatggtggatg

SEQ ID NO: 16367 - DNA, 395 bp, Zea Mays
atacaatgctctatttttctctctctatcaggctatagaaagagtaaatttcacctaacgttcttaaatttgtcccgagttctcattctagtccgattacatgcaaattaaacttaactcccttgttccgaattctcatcccgataccattacctttaagttgtgcactcagctccctaaacatgttatgagttctcattcccatactcgtatgccatcccagtccaccctctccccctgcatcgtcgccacacatatgcacacctcacctaagtcgcactgcaccatgatcgctctaccaccccatgcctacatgtgttgatgccacacccattgccatgttcacttgcaccactacttcgagcgaacctagctttctcaaagacaagtctagc

SEQ ID NO: 16368 - DNA, 840 bp, Zea Mays
ggggacttgggctttgggtggattccttccttcgagctaagcttcgagggctgcaattctggcgtgtgcttcttcaagttctctatgtacccttgaaagatctagggtagcgctatccaggtcagtgttaagacctgccaccacacctacaagggtgttgaggcgatcttttccagcttcacctagaacaacagtggtctggctttctccacgaagacatataggaagatgtatgtacctcgtgtcatgcaactgttgtcgataaatgtggctgagagaccatagagctttcctagcagcattgctgaccgaagcagcgtaggtagatagtggcgtcagggactcatgggacgatagagtcctaaaacctctatctcctgcatccatcacccagatatgcacacgactgatgtagtagcaagcctggggaggctcagacactcgtcttgtgtcatacagaggtcgggcgtaggttcctaacgcatgcagaacatcctgcagcaggtttgggaagtgtcccgtctcgaacattgaagtgtaatgctccatgataggccatatcccgacgaagttctcctcctgctcatcgttggcttcttcattgttgatttcctcttcttcttcctcttcctcatcatcatcttctccaccatcaccagaatcatctagatcgtcgcctccaggagtaggggcttgggctactggtgctggcggtgctgaagatgaagctccagctgcaaaggctagtgattctgacaacggggtgggtgtcgctagaatctcctttgagctatcctccagaatcactccattctccacatgaaggtgatggagatccac

SEQ ID NO: 16369 - DNA, 667 bp, Zea Mays
tgtggaggcagactcggagatcgacccacatccggatcgacaaatggcggccctttcccttggttggtttggagttgggaggaggggggacgactctgacgagggaggggcgcggcatcattcgttccattacattacactgggacagtgactgcctgcaaatgaggtggtgggggcggggccccatgcccccatgtgaggtttgcgtccccgtctcatctgaccagctgatggtgcctgcactgtcctggtgaaaatcgtcgagagagagggcgaaaaggaaaaagacggggatgggtcttggaccggctgagcctgacctgtgctgtgacctcccatcctccctcactcatcactcactcactcactttcctgaagatcagtcagtgctcagtggcgacggaggcagagtagcgtggatgtgaatgcgatgcccctctccctcctcccatccatgaaccatgatccaggcgctcgtgcagatttcaagtcctcaacgcttgcgtggcgtgggtccgatcgatccaagcccatctccatccctgatccgtccttgattctctcatgtgaaaaacgccggaggagaggagaggaacacgtctacacacagggatcgtctctgtcctctgcagtggggacggacatcgggacatgggatgggcctccg

SEQ ID NO: 16370 - DNA, 670 bp, Zea Mays
ggaggccgaagccaccgagactgccccaatctctaaaattatgaggcaatcgagattggttgtgatggaggaagttatcgacgaagatgcacctactgctgaagctgaacaagctgacatcgaagaagaaaatgctgatgaagaagaggaagactacaacactctgaccccatcaaaacccagccacttggactttgaaaaatctactgtgtctgaggctgatgtacccatgatgatgaagctgggttactttggagaagctgagaagaaacttattcgttttgccagagaagaaaccactccagagcccaaaaatgatgaagtagtggttttcaagagcttttttagagcaggattgcagtttcccttgaacgagatgattggggaagttttggataattatggtatctatctacatcagctgacccctaacgctattgttaggctcagcaacttcatctgggcccttcgaagccaaggaatggacccgaatgctgaagctttctgccgagtgcatgagctacattaccagacgaaggctagagaagacaggttacatgaaaattttggctgttacaacttcgtgtatcacaaggatacgaaggctctggtgctcagctatcgcaccaagtggccaaccggctggaaaagtgagtggttctatgtcaag

SEQ ID NO: 16371 - DNA, 386 bp, Zea Mays
gtcgtagatgggaggggggcgggtaggcacgacgaagaacccacagagatgtgagtggaggagggcaggcgtgatgtgtggcccccaggtgtagagctttagagggcagtggcgacgttggagcaaggggtcagccccttggtgagctcctcaacgatgaggtcgttgcggaccttgtggaaagatgggaacaggaccgagcaagtgatccaagtgtggaggtgatcgtagagctcgtcatgggcgtagctactaggtggtccaggtgggtcgcggcataccctaagccggcccactagtccaccgaggctcagacaaaactgacaccagctacgcggctatgccattgcttgatgtttggactatttcacgtgcaactaggcccg

SEQ ID NO: 16372 - DNA, 396 bp, Zea Mays
tgagaagagtacgaccaggatcacggtgtaccggcacgcagccgtgctactagaaccgagtcagcagcggcctccaccaatagtctagccccgggtcgatcgaggcaacacgatgttcactcgcttccctaggaccatcgacgtgatcatcgccgggaggacagggggacgtgtggagtatctgcccttacccctgactctgggcgacctaatggccgccgaacttcaaggtctccaacgtcgacaagtacgaacccaagcaggacccgagtggctagctggtcatctacacgaccgttgcctgggccactaggcgatggaagacgtcatgacagcgtacctgaccatcgtcctggggcaggacgcgctgcagtggctccgacatctacatcaaca

SEQ ID NO: 16373 - DNA, 1256 bp, Zea Mays
ggtacataaaatatccacagaacaccatttgagatgagttgtatgaactatgaatcaagtaattaatgcgaatggtgaatctatcgtgtattgtcaggctgcaatacatcggtgttcgttgatatcactttatacttttcagtttgcacaaacccatgtgtcaatgaacataactaagttgctaggttccaggtggcaagagtaaatttttatcctgttaccctgtccagactagcaaccatgtctcctaggtaaaggtaacctaataacatggatctgaacgatggttcatccttttcagtatgtgagtatagatcataaaaatagaaaccacaagcaagatggtgaattcacctgccggccaacatgggcatctaatgcactgagtggatcatcaaatatgtacacatctgaatcagaatacacagctcttgccattgaaactctttgcttctgccctccactaatattaactcctctttcaccaatctctgtcagatcgcctccctgatagaaagcataaccaaatgcattatttgttaatgtacagtagcaagttaaaacagtgcgccagtattaaaaaatacaaaggcatcactggattaaaacattccaaatgaaggaacatgttctccaggaagctctttcttcatcaaatgggtgccatagctttccaaaatttccacctgaacagtgaagttggaatacttgtatttaaaacttactgggagtaggtcaaggtcatgccgcaatgaagtggcatcaattgctttctcgtatcgtgggggttgaaagggagacccaaacaaaatattgtcacgtacctgtggggtcacagttagatctctgcagaagttatatagggtttgatttaacacaacaaagcagcagagaatctcacagtagcattgaagatccaggaaacttgaggaacgtaagccaccgatccacgaatgaccactgaggtacctgatccagatactggtggtatttctccaagcattgcagatatgagagaagttttaccctcaccagtgcttcctactattgcaactaaacttccaacaggtacatccagattgacatttgataaagttggtctctgagcctgccaacattcaaaattttggtttttaaaatccgatgaacttcacagtaatagatgtacactcatattggcaaaaaggactttgatataagactacaaggggcaaaaagagtagcaccttgagtcttatgatcaactaggaagacat

SEQ ID NO: 16374 - DNA, 282 bp, Zea Mays
tggttactggcaagtgggtcaggacacataagcagaaggcagatggctctctagacaggtacaaagcctgctgggttcttcgaggcttcactcagtgtcctgccgttgactacgatgagacgttcagtctcgtcttgaagcctgttaccatctctgcaattctcactttggccctctcttgttcttggtcaggtcatcagttggatgtcaagaatgtgttttctcatggcactctcattaagattgtctactctagtcagcttgccgactttgttgacccta

SEQ ID NO: 16375 - DNA, 446 bp, Zea Mays
gtgcaccccaggacgctcagatcccaatccgacggtcccaatagacttggcaactactcgagctcctcaccctccgatcaaggatctacagtcaccacacgctcggccgaaatggtacgccagatttaatctccgtcgcacatccggatttcgaccgccgacacttgtcttcccaacccggccgaactccggtgacccacagagctgccgcgatggcgatgccatggccggtcggtggccaaacacgagctctaggttagcagcacgtgactaacagaaaaatatggagagcagggttcggcgagtcgtctcagggggtcataccgggatttgtggctgtgacgaggccggtcgacggtgaaccgcggatccgagattgagcccaactccggcgagaaattcggccaactcccccgacttgcccgaccttaatctgccacgatcgt

SEQ ID NO: 16376 - DNA, 741 bp, Zea Mays
atgagaactacatcacctaaaatgcaacagctaacatgtctgaaatattatcagaaaatttccttagaaaaaccatgttgacagagtggtttacaactaatgtccaaaatgaaaatgcatgtaatctaacatacattgacttcccatcaaaatggcgatgggacgacaaaacaaggagctggaaatctagagaacaaagagaaggcaaaataggccgtatatactacgtccatccatccgcaggcgaaaaatactacctacgaatgttgttgctcactgttaagggtgctacaagttatgaggacctcagatcatacaacaacacactacatccaacttttaaagaagcatgtcgagcacgtggtctactaaatgatgataacgaatggtatgaagcttttgacgaggctgctaaatgggctacttcagatcaactacgtcaactctttgttaccatgttgctctattgtgaagtgggtgatgaacacatattttttgaaaaggtctggaagcttctagctgatgatatccaatataatatgcgtaggacattacatcttcccacttatcaaatgcccgaagatgaagtaaaggaccaactgctagacaatcttaccattctatttaataggtgtagagcaaacatacatgactacaatttgcccagaaaaactatcttcacatatccttgctgtggaaatcgactgcttgaagaagaattatcatacaactttgatgaac

SEQ ID NO: 16377 - DNA, 598 bp, Zea Mays
atggtagcctaacctcagatctatctttgagaacacactggctcctctcaactgatcgaataaatcctcaattctgggcagggggtacttattcttgatagtaacctcattcaaagctcgataatcgatgcacatcctcttcgtgccatccttcttctccacaaataacactggggctgcccaaggcgaggtactcggtctgatgtagcctttttctgacaactcatcaatctgcttcttgagttccaccaactctggtctggacactcgataggctctcttggaaataggggcggtgcctggaataatctctatggaaaattcaaccttcctttcaggtggcatacctggtaaatcctcgggaaacacatctgggaaatctgatactacactgatagcctctgatggtttaatctcctcaatatgagcggtgacttggtgacaactccctttcctcggtcctgacaagaccaactccactaacacttattctcctgatagggatactaacttcactgttctcttgtcacaactaagactggcttgatacttggttagccaattcatccctaggatgacatctatagttgtatcctgg

SEQ ID NO: 16378 - DNA, 390 bp, Zea Mays
aatgccccctgcttaccatggggaccatgatctgaccgtgtaaaaaagcataaaatgaacagtgtaaattacaaaatcataacaatgtgatatgttccatttaaaagaaattatgtttggattatgaaatacgattgttaccgctttgcattggtccaattcatctgtctcaggcaatgaattgtctagaagtgtgtggagtacagattcatcaaaaggttgagggttgcgactgtgtcgttcctgttcctcaaagttgagtagtgactgcaataaacgatataaatggagtgagtatacttgggttcatccaatttgtatatgaatatggtgtatgtatgttacgataatttaccccaacattaacatcaagaatcaaactgtttgaac

SEQ ID NO: 16379 - DNA, 985 bp, Zea Mays
aagcatcgtagacttaagggaaagcttcaacgaggaagaggaggagatgaactgaccgaaataaggctggtcgcggtgaggttgggcttcgggtggcggagaacagatttggggcgaacgtgaaattggagagctgtggggagtaatcggagctacgcgtgggttctctggacgcacaattacctagcggaactggctgaggctttaattaataggcatcttcatcggtggcgcccaatttgggtcgagcaacgcggcggccggagataaggaagaggtctggcgtcgtgattacgtgtccccagccgtggcgagctcatcggcgatgatgggacaacagtagggaatcacggcggtgccgtggaaaggctcgaacacgcggcgggcacagagatggcacgacggcggcgagtggctttatctacggcggtgagcaaagggaaggggtaccgcggcggaatccactgagtcacggcggccgccggtgagtaactccggccgagctcaggagatggtgccacatacgagttactcttttcctggcgttatccatccttcaccgtgcacgaatccgagcgacgatcaatggcggcgagatcaagctggcgttctgatccacccaaaacactgtaccatggcactttccttattcagccgcctgacagagcaagttcaggtcacattttctctaaaatttgcatgtgaacttcatcaaacctctgtaccaaagttgtagagctatagttactcttcaactttgccacaatgcttaccatcaaatagtcaatgaatcccattcaaaatcgagctcaaagttcatcccatcacattgttactctgaatttcagacctcaagcagtctgacagtccaacttcaggctcaattatctccagtttttccttaacaactatgctcacacctttaagcaaagttgttctcctatgattaggctataattttgatgtggtgacctagggcaaaaac

SEQ ID NO: 16380 - DNA, 982 bp, Zea Mays
gtttgggcaaggcgaatcaggcaagagttgatgacgagcggctaaactaatccaagagttgatgacgaccggcttgttctttcacttgcaacgacttagagtcgggcggcctgcaagatcaaggtgcatggtcgtcgaaggatggcgacggcgtatcctcgatcgggcaaggcgaatcaggcaagcatctatttggaggttggttagttatcccatgtcatcagacatcacgcaggaatcaggtcatccatcaggaagcagccagctctgcctggactaacccagggcaaaggcaaacagcaaactttccaggataagtctctgactttgttatactttcctgtgtgcaggaggtcttgaagatctggaactgcaggtgcagaatgctattgcagcagcagcagctgcagctccacccaaggaaagcaatagtgtcagcagcaacgatcctggcagctcgtcctctgtgatttttccgtctggtccagctgatcaagtccctgttcctgctacctctccagaaattgagccccgttttgcaaaccaaatccctgctgcttcttcgaaggttaaggcaccatgcctggcaggtctgttgtttgtaagcgacaggaacgagaggaactttaggttgcctagcccttctgataactgtccatggaacttattcgaagctagccgtagcgcagtcagctttctacaggagtatatgctttccggaatcgtgccactgaagttattcagcatgagatctatggttcttagactgggcatattgctgaataactatagttggtagatggtctcgctacagtagacaggaaaggcaccatgcctggcactggctgttctgcagcgaacaccgttgtcgagttttatgccaaatgtgtcgagttttattttggtatatgtaactttgtaattgggcctaagcgtattgaagcactctaagttaacaggtgcttgaagctgatgatgaaat

SEQ ID NO: 16381 - DNA, 686 bp, Zea Mays
ggctcaccacggacaaaaggttcgtgatttccatcaccacgctcccacaggttacaattattttcttgaattttccattcgactctatcactttctaaatcccactagttatgtacatgagcaagatttttatacttaaataaatattgcttgttgttcttgaattttcagtagaattatttagtgatttgttccctaccggttctaatattgattccattctttctttcggagaaactattggttgtgttgtgtgcttgtgtgtatttctcctacttccaatcacattttcaacagcctagctaactgttgttttggcggtgtaataaatcgcagaggctacaccaaagctcattcttcagttcatgggccatgggcgctagggggctcaccatatctcacgtcaagagtcatctccaggttaattgtttcacttcttcatccattgcctggcatgtacctgtaggcattgactgattgttttcccgttggagccaacaaccacgtgcaaatagactcaaaagcttctaaattactaattccccgtttgcttttttcgataaacagatgtacagagctctgaggcttggcataggaagaagaggtaagagatgaaacacgccctcgtttgctggcttcttccactactaaattcttgcttcctttcttcctttctttactccttg

SEQ ID NO: 16382 - DNA, 577 bp, Zea Mays
cgtttcctctttttgccttgtttcttaccgtttcctttctttttggctttagctttgtgccctgatgattgttcttcctccgaatgatcctttcctttgccatacaaaaaagttttaccatccatcatcctcaaaactgcacttccactcattgttacgggcgctagttctttctcctccataccattgaagtggttccttctacgacgatagggatgggactgaggcaaccaccgacgatgacccatatatgaacacttgtgtcccttcttcaaataaattgacctcgtcaaatcagcacaagatggacatgcatattttccctttgtgctccaaccatataagttacctaatgcagggaaatcatttaaagtccacatcaaaactgctctgagagagaacttcttccttgaagaggcatcaacagtttcaacaccctcccacaactatagtaattcattaataagtggttgtagaaatatatcaatatcatttcctgggctatctggtcctggaatgatcatagacagtataaaagatgtttgcttcatgcagatccagggaggtagattgtacg

SEQ ID NO: 16383 - DNA, 477 bp, Zea Mays
aactcgtaattcaaactaatcactaacaataaatcacgcacgacagattccgcctcaaccggttaatttatttggaacaccgcctagcgtaccactagtaccccgcattttgactcgacttataaacatagaggaagcgatgactacttcggcatgtcaccacctctctattcaagcaaagacaatttccacctagaacgaccgaaccttcccatcgagcacaccttatattttcccgtctcacatataaccatgtggcggcgtccactcgagacatttccatttaatttaacgcaatcactactacaacgcatctaagcacacacaatcacccacaggctcgcccttcgtatacgatcggccaacatttttaatttttgtcgccacatatgacgagcacaactcgacggccctcaaattttcctacacgaccatgccacctttttcacatacatttttctcttatgagaactccaa

SEQ ID NO: 16384 - DNA, 357 bp, Zea Mays
gtggatgggctatactgttatgttgtaatgccctatggtctgaaaaacgccttgccaacatttgttcgggcgatgagtaagaccttcggggacctgattcgggacaaggtggagatctacgtcgatgacatcatggtcaagactagggaggggtcgactatagtggaagaccggaccctggtttttggcaagctgcaggcaacccgcaccaagctaaacccagagaaatgcatcttcggtgtctccacagggaagttgctggggttcctggtttcataccggggcattgaagctaacccagagaaaatcaaggctattgaggtgatgaggcctcccgcccgtattaaggacatccag

SEQ ID NO: 16385 - DNA, 330 bp, Zea Mays
atgatatatgtgttgttcattttcatgttattattgtgcactaatatttatcaaataatttatacgccgtcacaacgcatggacacatacctagtattacgtaataagactagctttgctcgatatcgtttccaatttttactctattctatagtagaacatgttagtcctttaaaaaaacgctacaaaactatatctgtcgtcgaacctggcctaattaagtgtggacaaggaaggatggcgagaggcagcatgttgacgtacgaaggctacttgaggcagcacatgcacaggacgatgtcacggatcgatcagacatacacataccag

SEQ ID NO: 16386 - DNA, 400 bp, Zea Mays
gccaatatgccaccaatacatccactctgttaaagcaagcgattctcaatgagtgttcatactttaaagcatttccctataggaatcatttggcataacccggccgtcatcagtatctactttcctaaaaactgatgaaaaatgcttcgcaactgaaaatactttcagagataacagaagtgaagaacaatgttgcgcaaattggcactggtttagatataccaaatattgagaatcaaatggaagtcatttttcacagctatcttcagtctccacaccaaactagctaacactagcagccattgataccagccctgtgtaaacaatgctcttttacttgcaagaaaaccccaacaaccaaacaaagcttcaccagcatatagcctgctgcctgctgccg

SEQ ID NO: 16387 - DNA, 557 bp, Zea Mays
actaagaatttcctcgaaagcttcgacctcgctgtttatccattgaataacttcatcgggattccacgaatgaatttctgctcagaagaaattgcaccaactttagaaaagctattcttgagatttttagcacattccatagctatttcatagcatttttccttagcagcatgaagcttatcaatatttttctgcgcccttgatctttcaatttcacatatttcgtgttttactacttcaacattaaaattctcagttgcttcggcaactttcttctttagctcttgcatgtcgacttcatgggcttcagcttgagcagaaagcctggcttcgctagattttaatctctccaccaaagagagtaggatcttatccttttcaagagcttcgtttctcaatgttatgacctccgaacgaaggttcccaagcgctattcggcagctctcatcctctgcatccttttgggccttcagagccttgcttagaattaagccctgcaaacgaagagtgaacaaataacgacgataaaaattaccacaaaagtagttcaccatagc

SEQ ID NO: 16388 - DNA, 416 bp, Zea Mays
ccggggctaagtcaccgtcgtacccacttgccgcgcggtcggtaaaatatcgtcgccggtgctcgccgtgatcacagcaagggacacgtagttgcctgattcaccacattgccgtgatcgtggcatccccgagatagtgatggtcgcaaggtgaacgcatgcgctccacggtgtgcctcggtgattgcctcaccagggagataagctccactctcctcccaaattcggagccgtcgcctaaagcttctataaattgatgccccactctacttcgccaagttattacaaacccaagacactaactctcatctccgattagccaccatagccgaagaatttgggttttcccccaaattgatcatttgctccaccgtgaatcaccccgtcgaggctagccgttctcaggtccgcactca

SEQ ID NO: 16389 - DNA, 314 bp, Zea Mays
atttaagctggcttggctattaaatcttctttggcgccaacttctagagttgggtctgcttggttgattcctgctcatatggcggacagttggagtctggctcattgctggctagttctggtttgaggatgcttaaaactaggatatcctttgtgttgcttctgtgggggcagtatttggccttgaatttggctatggaagccggagatccgtggccaagatgccacctgaattgggatctaattccgccgcacacgtgtgtaggctcttgggttttttgtgatgaacatgaaaatatctctttccaggatgca

SEQ ID NO: 16390 - DNA, 395 bp, Zea Mays
gttcgtctgatatgatctttacgtgcgcatcggagttgacatgtcttgctagaggccgttgtcaattattgggccaagtaagagtacttgggcatgtctatatgtacgtgaacttatagggtcacacacttaaggggaaggaagcctaactcggattagatccgaaattagacagggctttagggttactgatgggcctcggagtcagaagcccaccagaacgcctatataatgaggggcaggggcgtggttaagagaaccctaattcgccaccagtaaacgagcagccgcccgcccctcgcactcgcctagccgccgtcgcgaacctagcagttcggaacgcgacgcttcctccctgtacatgtggttacctcggagtgccgcatctggagcac

SEQ ID NO: 16391 - DNA, 457 bp, Zea Mays
attatgccatctttagtagatatgcctggactcgggcacagtactgttcacggtgcgagcttcagactgctcatgaaggtcgcgttgttgctgaggttgaagatgcccttctggctgttgatcatgacttggggtaggcgccagtggtgggggtggtggtagttgagcccaggaagcttgagagttacttgctgaagcagttgaagcctatgtattctgggatatatggagagtagcacgaagcagtatggaggacctgcttcggctgattttgtcgtgcctcggcttcagcgatttccttttgattttggatcgtgacctgacacgtcctcgttgtgtgacccttgtcctcgccatagaaaaggcaaaacaacttcctgggctgattactgaaccttcctccactaaagcttcttcctcctcagcctctcagagctggtggtctgtaagaagtttg

SEQ ID NO: 16392 - DNA, 480 bp, Zea Mays
gcgtgatcggacctatggagagctggccacggcgagctcacacacggcggaattcttgactgatttgggggaaatctcaaattggggagctgtgggggacgattgaaggtgagggctggttcactgggtgcacaactacttagcgaagcaggctggggcaccaatttatagtatccaagggtggtggctcctaatttgggcatggcgtggtggcggccggagatgaagaaggtcactggtggctcagtcgcggcgttcatcggtgcagcggttctgagatggtaagcctaggcgtgccacagttactactgtgcagtaaagagccacggcgtggcatacttgaggttgctggagcttccacgacaacaccggcggttcgaccacatcgcttggttacagacgcggttgataagcttcaccccacgaccaaatccactcccccttcgatcttttcacacgcccagtactttcctacctaag

SEQ ID NO: 16393 - DNA, 1245 bp, Zea Mays
attttttttcaaaacaaactagaggtgcattccttattgatttacacacttcttttataataaataattatattttctaaatgaagagaagactttattcatttggagtctcctttcctaacaaataattctattcctaatctctcttttctaataaaccagatcaacctaatatgtctgacactctacttctcataacactactctactcttccacaatagctaatcctcgagttgtgttggtggctatagctgcagatgtcgatgttccccaagatacacaagacttggaagatctccatccagacaccagagttgcatgtataaaaaccatttggtcccattgcatagtccggtgggtgtcgagatttgggagtggttgccgcaacgacaagcggagacaccctcatggaggtcggtgatggaatacggcggtgctatgcaatgtgtgcttgcaaggaactccatgcccttctgcctgttagatggttgctgatccacgccacaccgacaagtcctcgaagccgaggtaccctagaggttggaagagttgcctcaggagccgaaagaagagttgccctaggggtggaatagatgccctaaggacaagcacaagaagtactctgagggtcagcacatgaagtgtcctgagggtaaaaaggatgtcatagaagctagcgtaagaagtgctccaaaggtttgacgctagtggttgatgcatgaagtgatccaaaggccagaacagatgccctgagggacaaaatacaaattctaggagccagggcatagggcggacacaagaattgctttagggaggtggaacaggtgtcctagcgagtgaacgctgcctataaggaaactgcttgcaatagttgagccagttcaagggattctccttaccgtcataggtgaaggacatgaacatcgtccatacccccatcatcccattgggaaagcttgtggtatgacgaccaccaatgaggacgcctagtggctccccatgggggccagatgcaaaagaacggtgacctgctgcaccttaaggttgatcaactgtagcatggggttttttctaagggcggatggtggcactccctgcggtgtcggtggcatgttgtgttgtgctatgggagaagaagtattggcatccgtcaccgcggtagcgtcaaaacctgagatcttcaataataccatatgttatggcggcaactggtattgaggacgaacaagggagactgttcccac

SEQ ID NO: 16394 - DNA, 773 bp, Zea Mays
tttttgtgggggatttttgcgtgtatattacatggctccgcctcattaaaaacctcaccccccgggaggaaaagagtgtgggccggaataaaactgtttggtgaattacaagggcgtgttagccctgaggattcaaacaaaaaatttacggagattgtcaatattccatgaatgctctaagtcttcgtcggatggcgttgttagcctgtacgcgctgggggacgccttcgtcttgacgatgaagggaccctcccactttggctccagcttgcctcgtgactctgtccgagttgtccggacgagtacgaggtctccttcgttgaattctctcgggacgactgtgtggtcgcgccagacttttgtttgagcttggtatttgttgagggcttgcagggcgaagacacggtctccgtcgatgaggtccttcgaagttggttcgtctacgtcggggacggctgaagtgcttgtccgtggtgacccatgttttatttcgtgcggggtcatggcctccgatccatatagcaggcggaaggagtgaacccagttgcccggcactcggtcgtgttcagcgcccagactgcttcaggtagcaggtcagcccatttgccctttttgtcgtcgaggagcattttcttgatggccgtgaatattttaccgttggcacgctccacgacgtcgttggattgtggttgatatactgaggcgaaggcaagtttggtgccaattgagaagctgaagtctttgaagtcatggctgtcaaattgtttgtcgtt

SEQ ID NO: 16395 - DNA, 807 bp, Zea Mays
agtagaccttcccaaaggagccaacaccaaaataggtctaggtggcaaagaaatggcataataagggaactgaaagagtcaccctgatgaaatctacacaaaggtaagcaagagtggaaatagcaaggatggtgttggttatatgtccatgtttgaggccataaaactcaaggatggaatgagtgaaaccaaagaaagggaaatggatcccgtcaacaagatgagcatagaaaagtatgtactcaccattgtcttcccgtagagtttgaattaggtgtaccatgggtagtcatcgcctgagcgtgatgatgacacccaatcaaggattgcgcagaccttgctaaggccctcctcattaagcacttgaggcttggggagatgtttaaggatcattgtgtttgccatgaaaagcataggggaggtaaagtatagcaggctgaggaatggaaggagaaaagtagtaacatactaaggaaataaggaggcaatggttcacataaaaggtaaaacctctcctaccctttatttagaagccttaccgccaactttctctttctctccccactcggtggatttttgagtagcatggcccatgtcaaaaagagcacctagattctaccaactaaattaggaagttacgccgactaattcaccataatggccctctcaagtcggtcatgggtttcaagaagtactctccaaattctaaatgaccaaagagcagtcaagcacgtgagagtaatgcagcctgccgcatcgcaccaacatagttatggttgtggagaccagtgggctaccaaatcctgc

SEQ ID NO: 16396 - DNA, 864 bp, Zea Mays
agttttctgccaagaaccgacaaacagtaaactcatatatatgagtacccccgacctatcactgcattagtacaagggaaacagtctctcagaataaaaaagaaatgtgataagacggaaaagttaagtcagacaaaagattcattttggcgtataagtcgaacatcaaaagttagtcgtcaaggctaaaggcgaaagatactggaaaataagcaatatagagagctcaatactagcaaccggaccacaaacacagagtgggataaagggaaaaagaaaggactcagtactcaaaggtggaagatgacaactttatttatataaagtggcgtcattgcctaaacagaatcagttcattatgaactgatcctagcaaaaggctaacaccccctacacctactacatctactaattaagccggtggcgcctcgccaccgacattgctatcgctgttgccgccaccgtcgttgctgccctcgttgttgctgtcgtcaccgccaccgttgctacacttgcccttgtcgtagtcgccttccttgccaccaccgctattgttgcccctgctactgctgtcatcatcgccgcccttgcccttgccaccatcgacgtccttgtcgtcgtcgctgccgatcgtgtcggtcgcattgccttcgtcatcgttgtcctcgtcctcctccatggattccttcttcctcctcctcggaatcctccgagtcattgaggccagcacgctcgatgccccaaaggtatgcacgctccctcaccgagagccccatggagtcgtctatgcaagcagacgactgggagacaggggacggcggaggagtctagtcctcaaaaagctctaaattaccaaaggcctcg

SEQ ID NO: 16397 - DNA, 272 bp, Zea Mays
gatacaagatgaggagcagagaactcaggagctagaacaagagatcacgctcatgcaaggggaaggcccatacaacctgcaacatggcccctcgcaccgctagtgcctttccagcaacacacacaggccggagacccattccactcacagcgcgaccccttcatcccccagctgccgctttctagggaatcaactatctcgatgagcgaagtcctctggctccgcagctccaagcatcaccctggccatccaacttcagggttggtgcctac

SEQ ID NO: 16398 - DNA, 629 bp, Zea Mays
aaccctctcttggtcttgactacgatgtcatcgacgtatacttccaccttgtccctgatcaggtccccaaaagtcttactcatcgcccgcacaaatgttggcaaggcatttttcagaccgtaaggcattacgacatagcagtaaagcccatccactgttacaaaagcggtatgcttcctatcttccctagacatctggatttgatggaaaccagaataagcatctaagaaagacaaaaggtcgcacccggaggtggaatccatgatttgatctatttgcggaagtggatacgggtctttgggacaagccttgttaaggctggtgtagttgatgcacatccgaagcttcccattcaccttggggacgatgactaggttggccagccatactaggtgatgaacctcttcaatgaagccagcgtctagcagcttctggacctcctctcggatgaagtcctgccgctcgacggactatttgcgaggcttctgactcaccggcctggcgtcagggttgatcttcaggtggtgctcgatcacctccctggggatcctaggcatctacgacggctcccatgcgaacatgtcggcatttgcctggaggaacgcgacgagcgcgagttcctatttctc

SEQ ID NO: 16399 - DNA, 751 bp, Zea Mays
gaaagggacaagagaattcacacctgcgtatggtgaacaacgttctttctctcctccggttactgcaatcgcccaggggactccccatcttggaacctccttgcgccaggataagtgaagagaaccgacatacacaaaggggagaagttgagtcatgtgtttacatagaggagaggttatgggaagacggttgtgcggtgagttgcgcgtgttgggggtaagacgaggttagacggaaacaaatggaattagacaaagttagacggagctgacacacgggccaggacgacaatgagaggaatgggtgagtgggaatggcggttacgcgcacagcccttgggcgcggcgggacgagacaaggaaatgtgggggtagacaaaggtagccgccgagaggtagacgacggggttaagaccgtgtagacgcgagtaggagtgacttggggaattatcgagcgatggttggggtggacatggtaaatgtgtggagcaaagcggaggttccggtgttccgcagagcgtagagaaactatcgagaaaagatgccgagcgtagacgagaacgacacgagctgagattgatggatggggtagatggagggcatacatgggatagacgaagggtagacgaggtagacggggatagcaaatgcaatcaacacgctgttcgcgagaagttgttcggtgatctcgcgaaaaaggacacgagatctggaacaggctcgatgagaggaagaaatatatattatcgtg

SEQ ID NO: 16400 - DNA, 1306 bp, Zea Mays
gcggggcgtgttttctggagaatccctatctagaccgaggtcccctcaccccagaacaacggtgtccgcctcgcccgagccgcgtcgggcaagaaggacaagctcagggcaagatcatctgaagtccgccgggggacagccgcattcaatgtgcatacctaccccactcaggcttgtgggtgtatagggacaataaaatcgcattaatgtcaaagattcaccaactgtgattatgtgtgtgggcactgtacatgcacgtcgtctgccaactcctgacgggacgtgtaatacgacatgggcgcaagccagcccttgggcgcaaacttcgtctctcccgaagcagaactcgccctcaggacaacactctaccttgcccgaacctagtctcggctgcctactcccccgcaaatctcgcaggaggccactacttcaactatagcgcacgtcttcaaatctcagaacgagttcggtcgcgacctcaggcggacttccgcctcgctcgagcccggctctaacctcgatatctggaaaggggaacgccccaacatcattagatactgcagagctgacgcaccgcttaagaagatttttcccatacataacactgtgtcaaccactacggtatgggcaacccctcgctaggggggctccggtacgtgaccgagcccttgaccttggccttggctcttagaagaaaccaagcaggcacgagtcaaaaataagtacaagaccataccacaaggcatacccacatgggtacaaaaacatctcctcacagtacgcgaccaacttccgtcctctaggaatagggtagcctacaacttcagaaggcaggcgaactcttcacaagtttactcctccacacggtattggcacttgcctcaatcaactctagggtagcctacagcttcagaaggcaggcaaactcttcacaagttttctcctccacacggtattggcacttgcctcaatcaactctagggacttaggatccttccctctcccgctctgcttgtactccctactgcaagcaactagttgcgagtaatataagtctcatccccctctaatggaattagggcctctcctagcccaaaccaggataaaagacttgtgtcaacttgcatcaccatctgggtcagaggcacacgacattatttcactagttggttaggtccacggatccaaacaccgaaagcctccaaagcttcccatccttttctacattggaagtcggcttcgacaaagtcaacttaggcagtttccagtccactcaaattgctaggattcggaccaccgcaaaaat

SEQ ID NO: 16401 - DNA, 426 bp, Zea Mays
ttcgccggagggtgttgatagcctgtacatgctgggggatgccttcgtcttgacgatgaatggagcctcccatttcggctccagcttgccccattactctgtccgggtggttcggacgagtactaggtctccttcattgaaatctcttgggacaaccgcgttgtcgtcctaggccttggtttgagcttggtatttgttgagggcctacagggcgaggacacggtctctgtcgatgaggtctttagacgttggttcatcgacgtcggggactgctgatgtgcttgttcggggcgacccatgctttatctcctgcggcatcatggcctccaatccatataatagacgaaaaggtgtgaatccagttgcccggcattcggtcatgtttagggcccagactacttcaggtagttggtcggcccatttacc

SEQ ID NO: 16402 - DNA, 303 bp, Zea Mays
catggctccgcctcgttaaaaacgtcacccccgggaggaaaagggaccgaaataacactgtttgatgaattacaagggcgcgtaagccctgaggatttaaacaaaaaatttgcggagattgtcaatattccaagaatggtctaggtcctcaccggatggcgttgtcagcctatatgcgatgggggacgccttcgacttgacaatgaatggtccctcccactttggctccagcttgccccgtgactctgtccgggtggttcggacgagtacgaggtctccttcgttgaattctcttgggacgac

SEQ ID NO: 16403 - DNA, 419 bp, Zea Mays
atcacggacggtccaggtacatgtccggacagtccgtgcatgagtcttttgaggaggattgttacctgaatcctcacccgtcccagcaacacttcccatcatactatgcaatgcatcagcccattaatacaaaatccagagcccaggaaagttttctggccccgcctagaaggccgaaaaggaacgatcaatcctatgagccatatagggcaaacgacaatgcaccacatagcttaaaccagtgggggaagacaacacgctaatatccagccaaccccacctatgtttgaccagagagccggtggtctcgcaccggctgccattgatatagtgagagaggaaatagtcggggcgttctgagataagctcggagtaagcatggtacctagggggcaatcatatcggaaaccttatgacaa

SEQ ID NO: 16404 - DNA, 544 bp, Zea Mays
cctcgaagctctgccagaaacacattagcaaagtcacacaccacccggatgtcctgcgcccacaaggcagcctcaccctccaccaccatggagaaaaagattcccgacttcctcgaccggtgatccggaagcaattgcgctaacaaggataacgtgaacttaggggaacttcccaagaataccacctccctacctaacggcgcctgcaataacactgtcttccaaaaacaggatataactgcgcgatactgggataaccaatccatacccaagataacatcgaatgcccccaaggaaatcacaaccagattggccgaaaagacctcatcagcaagaatgacggaacacccctgacaaactgaatagctactaatggagccattagcagaactaaccaaaattgggtgacccaacctctgcaccgaaagaccagcccgtgacacaaatcctctgaaacaaacgaatagccagcgccagagtcaaaaagagcatgggccataaacgaatcaactgaaattgtacctgccaccacatctcctttctc

SEQ ID NO: 16405 - DNA, 467 bp, Zea Mays
agtgacagaccacagattactcgcagctgcaagcacaccgtagcaagtacttcagcgacaaggagtaaaagaaaacaaacacaacacaaatgggcttgacgcgagcaagacaacaacaaccgaatttttgaggacctaatcatcaaacaacgtactcgtcggatatctcaaaccaatgtaaaccacatcaccccgtcgtagcaatgtcgtgcagttgtcttcctccattgcgcacgacgaggggaggaatccttgagggatgagggaccgcccaactgagagtggactaagagtgagggagcacaccagttgaagcttaccaaagaactaccatctcctttgaaattgatgacgagcaccccatacccagcacatccaggcaccataaaccgccatccaacacccttagaggggaggaatcctctaaggagagagggcgagatcttgactgcacctgcataagattg

SEQ ID NO: 16406 - DNA, 1012 bp, Zea Mays
gaaaaacagactcccatggaccgcggccatcattttgtaaaagttcaggggctaaactgctaacatccaggacctgagtttaatgctttaacactacacacagactgcgggatgaatactataaatattaggggctcttatgcgaaaacacacgaccgaagaggtatgaactgatttcggccgttggatccgaaatccacggatcggattagatcccgaaccggtatgcactgagcaccgctgatccccagatctgcggcccagattttatgaaacccaatcaacccaccaccgccagattcgaaatctacggcccctgctgtccggaatccagccaccaatccccaccgttgattaaccccatcaacggccactggttttcttccccaacgaccccgagcagaggcgcggcctccaaacaacgccggtgagccacccatcctcacccgacgccggagtacagtctccacggcggcgctactcgccggcgcgctggccatcccccgcgccattgcccaaatctcgacgtctactcgttccagagaatactgtgacaagagcggggcttcttaccgtcaatcgggactgcatagtcgctggaccacgacgcgaggtgggttcacggcaacccatgaacgtcgtcgagaaatcgccccagccacgacgcccagaccatgcgaccgaagcccgagcggcgcatgcgtaggttgcaaccgcggcggccaaatcttctccctctctctcctgcactcgccctccctcctctaacaccgctcggcgtggcacaaggtagatggcgagatggtacgggggctcggtcttatagccgcgaggtgaggacacgccaggccggcccgagaaaggggggagaaaagatcggattcacgacccgggagcttcggcggaggttgttccgaagccgcgcctgtgcccggattccgtccgtttcggtggagaggaaggagctgacgctccggtcccacccgcagcggcacaacggcgcgagagagag

SEQ ID NO: 16407 - DNA, 1006 bp, Zea Mays
caagcacccactacactcattttcacaaatatatatctatccatgaagtatcggctcaattccaagtcatgtcatgccccatttcgaatttcaaactctctatggcgcagttcaccgttcaaacgccgttctcgcgccgtttgacctctgtttctccaaatcactctgttttgtgtcataactctctgtgtatgtatttattcacatctcatatacttattactatgtgactaatacgtgctcacctcttctgtcatttcagtgatttcgcctgctcgcctgcacgtctcctgtcctgcctagttcttttctctctcgagaagttcccaggtagctatcactctttttcaggccttacctactgctctccactatcgcttatctcttctccttatcttgcagcagtcaattcaggatggtgcgaacgaagaatgtcacaccgtcagggcgaggagatgatgaggaccctcctcgccccttcagataggtcaagggcaagactttctatcttgagcagcaagagggcagaaagaagaggcgtctggacagagtcgctcgtgcagcacttgcagcggcagcagcggcagatcaggctgagcagggagggcggttaaggatttcctcatcagatcgcctatccagttcgtcgcctcgcgtctcggcctcgctcctccactgctcactccactccttctgacccagtctccactccacctcccactttgctagctcctcttgatcacgagctgtccaccacacccgctgtgtccaccacctccaccactctagcttccactgctcccgctcccgcttccgctccgcctattcctccacctcgcttcagggagcgtgacgagaccgaggcaagaccgcttactgctgatcctcgtctgcttgatcttcagtgagccactgttgcccgggtacgtcggttcagacaagtacccgtggattcttggttgccagctcagagagacccagcagctgcgccactcttcagcaccag

SEQ ID NO: 16408 - DNA, 512 bp, Zea Mays
ggctggcgatcggtcaggggctcctatcaagcatctgtgccatattgttggctttggcggggaggacggacgatatcggcggccgtaatcattcaccgacaccataacccgagctaggcactactagaacctgggtaagaaatcgctctacgagttcgccatccacttaatttcaattcgcacccgagatacgtaggaatcgtgtaccgattagcgttgtaggcatctcagccatggcgggccaccgtatcgctaggcgcgatcgccggagttggcagcaaggtagaagaacgctccctgaccgttgatgcgaggatggagggttgagattagatcccgcgtaccctttcaccacgtttcgatctggttcgtcgatctggatcggatggacaaagatagatctaaagtaataaaaccctcaccgtttgattcggatccaacggatgcgattccgtaccggttcgcatgaataatgatttaatctggcacgcccgtatctaatccaacggcta

SEQ ID NO: 16409 - DNA, 453 bp, Zea Mays
gcggtgcccgtggggcgaaatggttgttgacacgacagatgggcggtcggcagccggcgacgtcggggccaacacccccaacatggcagtggatttgtcgaatacgacacactcccaatgcttggtcacttttcccacttccaatcgcaagtcatcgatcgtgccttctatgctggtacgtcaatcatcgaacaccccagatgccttctccagcgcactaacgtattgttgctgatcggcgacaaacccagagaaggttgcctcccagcgcgattcttgctccaccaggcactgatcaagctttggttcatggtcggtgaagcgcctcgccagttcatctaggatgatctgcatgtcggggttcatcgcgagttgtcgacgatgaaggcgagtatcgtactgatgaaccgacacccgatctagatcgtcgtaggaggaagtcccagatcgttg

SEQ ID NO: 16410 - DNA, 375 bp, Zea Mays
tgaggggctacgacggttatcggcgagctggtgcggctagaagcaacgtggttaaaggcctggggcatggcacaaccgcggtgaaagacaccaactccggtgacggccgtaaagccacgtcgccggtgcaagcgattgaggaacagcgaggccacattaacttgaacccatcctcgacgagatcttttcaccggcgaactcaatccacagaccagacgcacgaatcgcggtgagcggcacaaatcacggcgaagggtcaccggtggctagttcactgaatctgttgatcttttggttattgtaccatcgcaaagctctattagtcagtctgacagaccatcttgtagggcttgaatctcgatttttcatgtggtg

SEQ ID NO: 16411 - DNA, 396 bp, Zea Mays
ttttggtaccctgaatcaggggtaccccttactacagtatgaaggcacggtgcccgtacgacgatctctagccgcgcgatgaatagcacccaaccccaccacgtggatggctcaaggggtgccatgtgaccagaaaagaggatatatcccatggtgccatcagttggaccagacctccacgaggaaacgccggacccctgtacgcacaacctggacccccgaatacggtcttggactcctaagtagcgtgtcgggtcccttggatggggtccggatccccccgagtaaggtccagaccacccataacgaggtcccgggacaggggatatcctggtctaaagcaagggtccggtactggcacgtgtcctggccttatcttgcacttgcgctccccgc

SEQ ID NO: 16412 - DNA, 353 bp, Zea Mays
cactgacaggcagtgccgccacaaaagggaacgtcctgcagctcaaaactgactgttctgaggatccacgagaggaacacactaccgatagtccaagaaaggatactgagggagcggtgtcagtgagaacgtggtcgtccaggttgtagcactggagggtaaatacaaggtcacgccagtaggcgtaggtggaggaagttgtgtcgaggatgacgggaaccaacgcccacctcctagcgtggagattggcgatgatgacaccttcgtactcggaaggaggggcgaccacaggaggccccgtgaggggcttgatgcctagttgccgagcaggtgacgctcagccttggcaagct

SEQ ID NO: 16413 - DNA, 495 bp, Zea Mays
gttttctgatttttctagctctctggactgggcgcactaatacagagaagttcaggggtcccggtgtaagttttcctaagacacagagaatagttcctatggactgtgggttgattagctaatttatcaggggctctttaataaaagtgttagcgcgaaggggtatgaaaagacctcgaccgttggatcttgatctgcggtcaggattagatcggaacccagatcaactgacgtacgctccgagccgtcggatcgagcatgcacggtcgagatttaaaatactacggagcaacctagcgcgttggatcaagatcgcgcggcacggacccgatcccaccgaaccggtacctaacttctaatcgtggccgtccgccatcgatccaacggagcacgatcatcgccccaacagggcaggcacgcacggcggcgccgcccaccgggccgcgacgaagctcgccggagaatcccaatctaccgcgctagtggataattcgc

SEQ ID NO: 16414 - DNA, 451 bp, Zea Mays
caaatcctgtaaagctgagcagaccttttcctctccatgtgcatctgaaacactggatctggttgccactcctgagtgagcatgaagttcatttccaaattctgaaagaattgattattgtttggccccccatcttgggcctgtggtggctggccagcattaacaggaggaggagccatctgaataactgggccatcaacctcttgtggcacattaaaaggggcaacattgaaagtgagcccatcccctagcaacacaggtccatcttctaaaaatgtggccattctagaggggagcatcctgaatgggaccaatggagctgtccgatgacaagctcgagtgttggttgctgagttgctgttcatccagttgaatgtgctgttcatctggttgaatgggctgtgggatctgctgatttggttgaatgttttctatccattgatcctaatcc

SEQ ID NO: 16415 - DNA, 497 bp, Zea Mays
acgatcccgtcttcgattagatcggggtaggcagcgcgatttactatcctcgacgtccgggacgtgtattggggagggggacttgcgaaatctgtttgagggcaaagagttgaagatgatgttgtttaatttccgggaggcaggtcttattccgaaggctgagctgatgtagcatgtttgctagcctcgctctcgtgttgcaatagtgagtgaaaatgctgccctcccccgtttcgcaatagagagggagggcaacaaaatgtgatttgtattattgtgcgatgtggccgacgggcccttcgttttgtgtatgtaaactatgatgacatcgcgtgctgcgcttactataagattttcttgatttgtaatcgtgttggcgtggcacttaggtgggatggggacttcgcttcccgtgggcgatgtcgagcgcttctggtgcgtgctcggctgcacccttaggcggcttttgttcggacgtgtctgatagtaaagacttt

SEQ ID NO: 16416 - DNA, 504 bp, Zea Mays
ttggggacttaagtgtaaacttttgtttctgtgatactgaacctcggttgctgcgcagattccgacgtttgggcctgcgcaagcaactgctactgacaatactgattatgtggcgacctcaaccgtagtgcctgccgatgataatttgtttggctctgtgtaagagtgttttgagtctgatggtgaatctgggagtttgtttccttggacggaggagtcctcagatgaaggcttggattattttgttgtgttggatgtggctgcggtggagacttcgccgcatgtggagggtgccggggatcttcctagtgcgagtactgggtataggcggcgaagggtggtgggaaaacatagtgttggtgaattttcgcgagtggtaggcgccgccgtatggggatggagcgtggccgtcttcgagtggaccggattggtaaacaagaattgttgtcctcgccgattggggcgagcataggcgaaggggatctgcgaaatctttttgagggt

SEQ ID NO: 16417 - DNA, 1097 bp, Zea Mays
atcattggcgggtggttgagcctgacaagaaactgattttccttggcggtcagtgagaaggacggtcttgcttgcgcaacttatgatgcccttgtgcttagttagccaatccattcctaagatcacatcaatcccttgggatggcaagacggttaagtctgccaagaacactaccccacttaaaagaattctgacttgggagcatttgagctagcatagaaggtctgaccctggggttcgggtgaccaataggatttctaggtgtgtagaggggatgccatgcttttccataaaactagtggctataaatgaatgggatgctcctgaatcaaaaagtacagtagcgggagtaaactcgacaaggaactcaccaagcactactcccggagcttgctgagcctcttgaacatcgacgtggttaactcgtgctctgccctgatactgggtcttgctttgctgactgttggaggagagtgccttggaggcgggtgctgaggtattcttggggccattcaccgagttggagtaagtaggtcccggtgccttcaactgggggcagttattcttgaagtgactggggtctccgcagtgccaacaggcatttgctggtggttggttgcttacgaccgacggggactgaaaggagccctgactctgctggctgaaacgtgacggagtgggtccagctggtctattgaagcttggtcccttgggtggaaacccgaaggatcgagctctctggtgccgatcttgctgctgagctcggagaacttggaatttcctcttgaggtgacctttttcttcttcctttgctctttccacttgtatggatttattggagaggtgcgagaagttgaggaaatcttggctggcaaggatggtcttgagttctggtcttagccccttcagaaaacgggccatcctcttggcttctgtgctgacatcgtcaggcgcgtagcgagccaattctgtgaatttgtgcacgtactcactaacagatcttccaccttgagttagttcccgaaattcatcttccttgagctgaacgatcccctggggtacatggtgctctcggaaagcagtttcaaattctgcct

SEQ ID NO: 16418 - DNA, 394 bp, Zea Mays
atcaccaagccctttgatgtatattgtgatgcatcaggcagtggactcggctgtgtgttaatgcaagaaggccgagtaattgcatatgcttcaaggcagttacgccgacatgaggaacattatcctactcatgatctggagttagctgcggtggttcatgccctaaagatctggcgtcattatttgctgggtaatgtctgtcatatttatacagaccataaaagcttgaaatacatcttcacccagtcagaattgaatatgagacagaggcgatggctcgagctgatcaaggtttatgaattagaaatccattatcacccaggaaaagcaaatgtagtggcagatacgctcagtcgcaaggcttcctgccattgtctaacaatgaggacttctc

SEQ ID NO: 16419 - DNA, 586 bp, Zea Mays
gggggagcagtaaagctcaaggcatggttgcggcggcaagcaaggagtgcaacccaagttttcgtctagttaacgctgcaaaagctccgattcctccggtccgactcccttcccattattattattatgatgatttgcgcttgtttcgcagggaggagcggatgcggagctccggtggaaccaccatcaggtgcgcggtcactttttaactcctccgcgctcgcttctattaatttcgcccggatcgctcgttcggtgccgatgcgatccgccacccgcagccgtcggtggcactgcctgccatcgtatgacgtacaatccagggacagacagggtatgtagtagcagagcaacgtgtccggttcagttcaactgtaaacgcagtacattagcacgattacatgcttgtcctcgtacggcacgacatgggtcgggtcacgggccagaacgaaatgaacggaggtgaggtgtcaggtgtgctgcggaccggttaggcaggcgtccacccccggcccgtcgactggtgcacgcgatctacgcaaggccgctacgctacgcgtccctttcgactcaatcagtcaccaag

SEQ ID NO: 16420 - DNA, 302 bp, Zea Mays
agaagatcgtgtctcaaatttgtccaaattccctgtttgaggacaaagcatttgtaggaaaacaccctaaaatgacttaccttgggtggttgtccaaatcacaactcataagaggttttgttcaagaaagctcgaagaaaaatgtgattggacacatggtagctagtgttgaccgcttttgcccaaaacgttctaggagtcctatgctcatggagcatcatcctagctgtcttaacaagggtctgatttttgcattcaacaattcaattcgatttgagtggaaaactaatgctcaagtccca

SEQ ID NO: 16421 - DNA, 785 bp, Zea Mays
tccccaagctaacaggccagctaatagtcagcaagccatagcttcggtttggtctcccctgagtattggtgatagtagtcggcgcttggaaccgagccaggaacggtgccctacagatggctcagctaaagacttgcgaactcagtggctcgggagaggggcttcaatcttccccactatcgtagcgaccaccccaccgagggtggtagcggtgtgtggtgtgttttctgtcgttgtggtgtagccgtccaccgagacggtcgtgaacaccgtgattctgacggttgtcgaggaggcggtcttgtactgcgggggctctctccctagtgggcttggggtggatcaaggcctccctctctaggagagagggtcctgtccagtgctttaaggagggctcccgaagccaagaggcagatctctcggtctgctagaccgcagcacactctagaagtccccggatctcaccgtggagattggcgtccctcggtggtggatggctccggcatggtgcggagcaagattgctgctgcgacgaggttctaactggccctgtgaaaagccggagggcctttggccttggcatcttccatgatgcgacgatggacgtcacgtaccttgacgtgtgccccctcatcaagagccttgcccggtgcttcccgctcgagaacttgccgaagctattgcagatgttgttgttcctctctgatcttggcgtgcagttcgcggagctgctcgaggtgggccaagtgactccccgaggggtctgagcctcaccctatttcctt

SEQ ID NO: 16422 - DNA, 546 bp, Zea Mays
ccatctcgttctcccgcgtgctagcccatgcgccgaggggcgccccatcccgttgtcactgccaagcggggcccacctgtcatccctcccctccaaccgccccgcgtgactccgcgctcgcccacgtcgtcgagaaaaccgacttcacccccacttccatggtcagaggcatctcacccctttttctccctctctgcacactcccttgcctcactcaactccccctcgctctctctcgccacattgcgcctgtgcaccgccaccgctggtccaaccccgagctcgacaccatcgtgaccgtgcacctcgccgaggcccgcagctgcgctgtacctcgtcgtgctacctcgcgctcggagctccgccgccgaccatgccttgccattcaccgcccgttcaccggattcgatctccaccgagccaagctccgtcctcgccggcgaccccatgggtgagcacccgcttccccctctccttccctcacaccatcttcccctcctctgttgtccccagtcgtaaccacccggtcgatcatccaaaccccca

SEQ ID NO: 16423 - DNA, 574 bp, Zea Mays
ggagtttgttggtttggtagggtttcggtgtgattgagtgaatgggcgcaggtggagaccgcggaggccgaggttcagggttagggaccggaaaaaagctcaacctcgacgaccgaggtcgagccctgtctgggagcggctcgcgagcttccccgtggctggacacaacacttctctactactattaagaacatacagcgtgattggttgagtggctcccgtgagccggtctcccacgcgcctggctggccagcgaaggccgtttactccatctccgtgcgtgcagatggatggtagaatattggtctagcctgcacctgcacatgcaggtcggtatcgttacatacaagcaaccaatcacaatcttgtatccggtcaaagcgtgtggagagcctagttgtttctatacaatcaaccaatcacatagatagtgtagacgtccacactgatatggtgcacggttctgcctcccactcgcacccgcaccgccatccgcgtcgcgatctcctaccaacaatggccgccatcaacggaatctatactaccaacaacggcgccatgcacggttctgccg

SEQ ID NO: 16424 - DNA, 305 bp, Zea Mays
tagcagacatcaaggtttgatacaaaagctgattgatagattacttctgttgaattgctaacctactaaaatgcaccacatatgctaatcaaactgatttccttatggtaccctgataaaaagcgtgctaatttttagaaaataaatgttaacatgttatctagtctgataggtcctaggatgattttaggtgaaaggaactaatcaaaacaccaagagaaataaatccgtggatggcagctcatgttttaatcttgtaacaatgcttttgctagactcaactgttttggactaggtgtgttcct

SEQ ID NO: 16425 - DNA, 422 bp, Zea Mays
tagaatagatagacaatgtgtctctgttcagttttgcagagaggatggtcagctatggtggttttcttgtgtttatgggcctcaaggagatgccgataaaattcttttcctccaaggactaaggtagtgtttggttccagagtatagggtcacaaagccactccattctagtatatagggtgtttggtttgattctatgtagaatcgagcgacaccaaaaaagagaatattccttcaatatactgcattctctaggctcctgaaaaatgcacgaacctatacgctcgagcgttcagcacttatgttcttctccagttacgtcctcttcctccgacccggtcactccccacctcgtcgccgtctactgcaaccttctccgccgccggccgccgtgtctccaccgccctattattgtgcccctg

SEQ ID NO: 16426 - DNA, 508 bp, Zea Mays
taccgaagggagaggcacgagaaatcctgctagacaaagctcacaactcatcctattctatccacccagggtctaccaagatgtacctagacctcaagaccagatattggtggagaggaatgaaaaaggagatggcttagtatgtggcccagtgtgatacttgttaatgaactaaggcagaacatcagaggcctgcaggcctactgcaacccctcccagtgcccaaatggaagtgggaagaaataggcatggatttcgtaattggactgccccgaacccaaaaagggaacgattttatctgggttataattgactgtcttaccaaggtagctaacttcattctagtggagactaccttcggaggagccacccttgcccggatatatctcaaagaaatagtcagacttcatggcattccacgaagaatagtgtcagacaggggaacacaattcacctcaaaattttggatgagccttcagcaagctatgtgcaccaagctagatttcag

SEQ ID NO: 16427 - DNA, 609 bp, Zea Mays
ggggggggggggggggaggtgttggattgttttattcttggactttgaaccactagacaaagatatggttgcggtaacggaaagggagtggattggatcctgtcgtcgttgagagcagaataggacgtctacatgagcatgcaaaacatatgaaagtatgaaacgaaatcgaaatgcggtggtggggaatatatgctcccattggtgggaggaagcaagagcgcagaaataacggtccacgtgtgccgggagtaatccgaatgaatcgctacactttgggggaaaacaatttggggaaaaaaattctacacaacctagatgcaaacgtggcctttaacagccccgcacatccaccactccatgcagcgccacgattttactacgatggagcagcgtatcattcatagcgctagttttctccacgcatcgaatgccacttggattttctatgtccccgtgcatgcatactggatgccatgggacatcatagctttcgtcagcattgaagaaggccttttttttagttgcgaaaggccatgtctgccccgttcgccgcggcttcatcgcctgcttccttttctctagaaaagagaccaaagcttcgctccg

SEQ ID NO: 16428 - DNA, 987 bp, Zea Mays
gagaagggtccgtcactaaaccgcacacacattgaataaacccccaagcaatccacatggattactggggggtctgaggctgcatataacagatgcacttgccgcacaaaaaaacatagtctcaagcaaaagcctccgcataactccaaggagttgcacgaaggctcgggggctgctgtcggatacctgggaacagggtatccaaagtaggcccatgacctccatccagcccatttaccgagcaaacctgcgaggcggagtggacgaccaagtccccactgagcaaatctgcgaggcggagcgactgaccaagtccccactgagcaagcctacgaggcggagcgatcgaccaagtcctcaccgagcaactcggcggggtggaggtcctagtctagtgctactaacccacgtcagctatgacatgacacatcatcaccaagttacgttcgaacatacgtgcagcatacctaaagagtgtcgggaggtcaccgtcaacatgactgcatgaccctatgaaaggtctcaggtgtatccccactaccccgtgggttcagtcaacctcagccgttggaggacctcaacacctgagtctctatagtgacccatatatccggaaagacgagacagtatgccataccgagtgtatgccaatgcacgatggcaggtaacacaaggctagtgacgactggcgaagccgcccatgcacgaccacaccataagactgacctgtgggacccgccatgcactactacgaatagatcaacaacagattcactacagggacctgtatgatggacgagcaaggcggtacaccataccgggagtacaacaacgcacaaccctacagacaacctcagggataccacgtcaaccctggggcaacagacctctcactctagtagaaaacatgtcatctctctaaggttctttccttgagctatataagggaaaaccctccttcaacacacgcacttgttgtaacacggt

SEQ ID NO: 16429 - DNA, 420 bp, Zea Mays
tgtcagtcgtcgcgtcccactcgcccactccacaacagactcccgcccacttctccacccacaagaaggagggcgccagtctagataaggttgcatcggcttctcctgtagctgccactgccgaatggcgattggttccaataattggtgggagctttcctcactaacctaaccggccaacaactcacggtcgagtattcgagtgtcatcccgccagatgctcgtccacaagctcgatgacgcctagatgaagctgacgctgaggttccgcttcgccgccaccccacaatgctgacatcggcctcaggtccagatttggacccacaatagtagcagcagccaccgtcattcccgaccacgaggcaccatcactggcaatggcatcgccgaccagcggtgagtctccccgtgacgtccaaa

SEQ ID NO: 16430 - DNA, 376 bp, Zea Mays
ccgtttgtgacctaccgtaatgaaccacacgttccaataaggtcccacacaaagtctcccgagaggctaattaagcagaaaagcgaacaaaatgttgacctctttgtagccgaagcggcggatcccgcacggcatgagaacgcgcgtctccacggggcagcgacccggccgcggcgccgtacaacggctgcagcaaaggctccgccgagcccgcgccacggcctcgaggaggccgccgccacggcgagcgaggggtcgaacggtcgcagcgacgtcatcagtcttcgtcctaatcctcctcggccgcaatccgacgaacaggcgggtgtcgcctcgcttgtcccaaactgggcgactttgagatatagaggagacg

SEQ ID NO: 16431 - DNA, 634 bp, Zea Mays
cacgggtgtgcagtcaaaatgatggcatgagagttggtatgtcaaaacacgagcgtcacctattaggtgtggagagtagcacccgcttaaccacttcgtagctaggaagttagcaaagggcatcaagtaaaccaaagtgtaatgacaggcactggggcagcattggtgtggctacagtatctacccggagtgtaacgaaaggcaccaaggtggcattggcgtggctagagtatcctgatggaggaaggggacgtcatctagggcgtcccatagccggtgggaaccttaaaggacaccatgctacgagacaccacttacctttgctcgctttccccgaccctgtgactcatgtaactagatctctctcacgttcgcctataaaaggattggaaggaccactattcaaggagggagcaatcatcactcgcatcaacatagagcacttgtaactgcagcactcactcatcggacactttggaacttggtccgtcttacgcatgtttataacccttctactacaaactagtgtagggtaataggaattgtcaattaaacgtagggacattctactcgaactagtataacttccgtgttcactttgcccatcatttgccccaaggcatgtcaagcatga

SEQ ID NO: 16432 - DNA, 675 bp, Zea Mays
caagcagtactttagcctctgttatctacgaaggggtcggagattctatctagctcagtgtgcgaacatctggctgcctccctgaccgaggggggactgacttgcagtggttctccacaatgaaccactcgagacgccaccctttaatgctgtccttaaggggaatgtcgaggtactctactttcctcccacgacgatgttccagacttgcgccaccaacgagctggtgctgtcccccagccatcctgggtcgacaatgataaaggtatttccagagaccaaaatgggggagaatcccaagaaaggcctcacatagatatacaaaaatggaaacttgtaagatggagttagggttcagatgagtcaagttcaattcgtagaaatcaaggaggccgcggaaaaagggagagacgggaagagcaagacatctaataagaaaaggaacgtaaacgacagattcacgggtaacctctgtcggtatggtgacaccgcggcaaattcgccaagagcagagctctttcgggagcaaaaccccaacgtcgacaagatgaaggaggtcggattccgagatgatggacatgtggttacccgcgaatggcaactggctgttggggtcgataggcgggatgatggccgcaatggagctctgcctcttctacttcggcgccatcacag

SEQ ID NO: 16433 - DNA, 1062 bp, Zea Mays
tagttttaagaagggtgatggccaccaaggacaagctcaaactatcgccgccttgggagggtcccttcatcatcgcccaaactctacgcctaggggcttaccgactcaaggacaacgacgacaacctcttgagagacgcttggaacattgaacatttgaggaagttttatccctaggcaaacttcgcccgcctttggcatacaagcagcgcgtcccgaccatgtcagcacaccctactcaggggctaggatgtgggcacccaccgactggcacaggaaacagaaaagaaataatgcaatagttgaaccaaaaagttaacgacaagtgtcttacaagcaaataaaaatagtccaggacacccgcaggagagtcgccggtggggcttccgcattcagggggctggttaggaggagcttcacgtcgttttgtcttgcgagtgagcagacatgagggctgacttgttcttcaatggcatctagctcctcctcgctccatccggcggcataaccttcgacgatcatgatgacatcaatctcatcgaaatgagagaccatctgacctagggctatgctgctcctgaggtacatgccttcaaggaccacccgcaccacgtgcctaggaagcgcccgaagccgcttagccaaaggcacctcggtagatggtgggggcgagaggcggttgcacacctcgcccatgagctggcgaagtccctggagctcggtgctccgctccttaacggaggtctccgcctggatttgcgcggcgatggcaccgtcatatgcaagcgagattttgcgtgcctccgcctccgttgtttccctcacctcctgagaaaccttcatcgtgtcccaagccacgtaaaaatccttttggagtgctgccccacaggatgcgatgagcaagaaggtaacaagaactagaagtcgcacaaggagaaggacggagaggcctgccaagggaaaatactaactgtcagccgcctgacgctcccgtgaaagctcctagttcgcctcctccaaacgcgcgttcgcgaccctcacagtcgatccaccgtcctcggcc

SEQ ID NO: 16434 - DNA, 1057 bp, Zea Mays
tacgcaaccaatcttcggcgtccatgggatcggcagaatggacaaaatagggggatggcccctcattaactctgcccacttgtctctaggcacttgaggcatctggacttgcactggaggctgaggcagtggtggttgttgttgcacctgctgcatagctgctaaggtctgaccaattgcctggactgcttgggtctgcatcaggaacattttctcaatggtcatcggtggtggcggtggcaaatgctgttgcggggctgcctcctcttggggtgcttgctgttcaggctgagcacgcctcgcacctctgcgcctattctcatacatctatagaaatcacacacatatatcaaatctgattctgcagtctttcagcataagaaaagatgtatagaaaatcttcatagcactgaacaattgaccatcttcactgacagcttctcagataaagaggaaagtggagataaatggattacccaactaaataactaactttattaataactacaccaagttgtaggggatacccacagcttgatgacaatcattacaaagatccaacttcattacatgtccatcataacaagcatccaacatacgataagcaaactaactcgaactaagactaactagactaagacactgaagtaagcattattacagactccgactccatcaatctatggatctaaatctatgcaggtcctgcagtctggggtaccatagtcgaagcgaccacgggacggtgaacgataagggtgctgaatcccgacaggggcgggagaaccaccatccagatagtggcatgctgcgcacttagcacgcaattccgcaacctccgcccgaaccttgcccaactcgtcgagggcgtggtccaactctgtgttgagcacgacagccaagttgaccatgttgttcagcctgggattgccctcaccaactggcgaggcaatcacacctccagcaccgccggtcgaacggtgagggtagtacttcaggtcgaggccatcagctaccccgctgaacaacgagcaatactgagaaagtgcccgtcgtg

SEQ ID NO: 16435 - DNA, 366 bp, Zea Mays
gttgaaggggaggttaacctccgcaacgtcgaactggacgttctccgtgcggaagttctcctcggtcccgaatgttaccgggagtgcgatgctcccaaggggatacaccgattgtgggcccactccggagaacgggcgagagggtcccagccaggaccctgagatctgcatctgcttgaatgcagcatgactgatgacgttgaggctggcccctccgtcaatcagagcatggtgcagcctcatgttggcgatgataggggcggtgatgagcggtagtataccggcccctgccatgttgtcggggcagtcggatgccccgaaggagatggtggtgctcctccaccgctgatgtggagcacccttcgg

SEQ ID NO: 16436 - DNA, 405 bp, Zea Mays
aggtttgtcttcttcctcccacctcaatagacggcggcgcaagcccgatacacggcagcccttgtgctggcgacaggatctaccacacatcggagcactgcccgaaccccgcctagtgctacatgaagaggaaactagggcgaacccagctgtggcccaaaaatggtgaaccagcgggttgctgagcctatccatagtagcacacgaagccgccacgaaatgcaaatttcggtgagagattcccagtgctcaattaccccatcccaagtcctggagtgttaatcgcgattacagtgacgagatgaacggattgcgaggactcataccagcgccaaagctctagaaacgattgtccacaacggcgttgtttctccccctctctgattctctccaatggcggcgagg

SEQ ID NO: 16437 - DNA, 296 bp, Zea Mays
tcaggtggtcgcgggacgattccggaacattaaatctcgactgtcgatattagatcctacgactactgtgactttaccggttcatgggaaacacattttaatctgggtcgtgtgctccacatccgacgaccgagatcttaggataacccttcggcctagaagtcttcctaaagaacccctgagtttttactaaattaacccccacagagtaattacaaccgagcccaagattttacagattaaaccacgggttctcgggaatttgcgggcacaatccaaattggtttcaggtttaa

SEQ ID NO: 16438 - DNA, 653 bp, Zea Mays
cgcttctctcggtcgtgggggaactagtcgtgacttcacggaaggaagggaccgctcgattgatggtaattcctcaccggaaatgcagcactgccactgatccgccatagcgtgtggatagcctcgtcctcgccctagtgcagggtatgaaacctcccttgatgatcgtcgtggtccgctcttcgaatatctagcaacaattcgcgagtttggggtgctctgggggctgcgcagggcctttgccggacatggcgccgtcgggggatggccctgtgtcgctgtgtcggccacctggggagggagatgatacgtaagtcgtggggtggtaaacggacggctgggattcggtcgaggatgtagttcggccgtatccgatatctgccgttggatcggcaatggatgggcgaggggtcacagaccggtgatccatccgtgaacggtcgagattaaaacgtcgacaccgtttcgggtagatcgcttccacacggttgatcttcacgtctagggtcgggatcgggtccatgttactttgaatcgccaccctcggttctgtatctatgggttcatataagcatactacggtgatctaatcggggtcgttcaattctgatctggcggctgagattgaagcataccccttcggccatggataa

SEQ ID NO: 16439 - DNA, 508 bp, Zea Mays
ccgaggggctcataagtaagaatgacatgcaaaggggtatgggacgattacagtcgtgcgattggtaatcggtggtccagattatatctcttttatccgaaccggtatgcagcccaggccgttagatcttgattcaacgcttagaattttatacggttccagactatccttgcccgcccactagcagatctgcaatcgcgatctatcccagccgaaccggtatgaggcttctaatcgcagccatccatcatagatccgatggttgcaagcttatcccctaccccaggtggtctgaccacggcgacgcgttggagctacggcggtgcgcccgccagagttggtcaaaactgtgacagatggccacaccaccccacctgactagtgcaaaacaacgtggaagcgatcgcgagacagaaggtgggcttacctctaagtatcgtggcgttcagagtcctgcccacggtgtggcgcggaacaccggcccctccccaagtccgacgagaaattg

SEQ ID NO: 16440 - DNA, 459 bp, Zea Mays
ccggtaatgacccggctctggtgggtagcgcaagctgcaacccagcccctgagggtgttgccggtagtgattcggctccggtgggtagcgcccgagctataatccagcccccgagggtgtccgagcgagctctccatctcacacctccatgaacgtccacgtcgggtcgtctccaccatgatctgatggagtgatggcgatgtatacttctttagcttcgggcaagcgggtcgccttagaggtcggcgagccggatgctagaattctgatatctgctagtggagctgaatcaacccccgacgatgctcttcagattgttccagttgatcttccttcgtcaagcttcaacatggcttctcatgacttggggttgccttcattcttttctaatcttcaggtaacttagctcttctcgttctatcattcctcctggtgaatcactttctttgtactcatttg

SEQ ID NO: 16441 - DNA, 542 bp, Zea Mays
aaagtaaagcacaaggaacaacttcgaggccatgataattttattcttgcacaccagtgcaagcaggtctactatatgtcgtacccaaacccgaagtttaaagcatagtgggtagttcacaaggtgaaccctatggaatgtttacatactccttgcacgactggttatcaattcgaagacgaccaggccgatgaggtttaccaagaagaagaattgctaaccacatttactgtcgatgagggtgttgcactcaactcactagtcggagaacgtgacgatatcactgttgatgagggtgttgcaccgaaacgaaacaaaatccaaggaacaaaaaacacattgcgagctttggatcgaagaagactccttgatcgtgattccgatgaattttgatgtgtaatgcataatttacttttaggaaaacaaagcacactgcgagggggtttcttaatgcggctagcaggatagtccctggtgcacgttcccttttccaagagagttcttctagccagagcaaacaggaagcgttgctgagacacgcc

SEQ ID NO: 16442 - DNA, 586 bp, Zea Mays
acgtggcgtcgtccctccatctggaccgcatgccatgtctccaatcgctgctccgatgctgcccgctccattgccaagaatagaacgtactccaatcgtatccatagggagctcaaccaaccaaccatccatccatggattggtgccacaaacaacaagaccggccaagagggaagagcggaggagaggcggctcttgcagctgtcgggccggggaacaacatcggaggggctagtcatggtcttggctaggggatttctgatcgcctcctctcctctcctgccccgccgtgccgcaagccgcaatgcaactatgaaatctgagctcgccgcttccctccgccattcacgtcggtgacatttattcatttccttcattcaggtaacatcctcgacgccccaacatctatatgtttcgaaaatgcacactgccagtcagtctatagctgattgcgatatggatcatggatcgacagtccatgcccttcacacaatcaaaatcgaatcttggttgcacaactggaataacgcacatcgttttcccccctcaacataggatcgtctctgtctgaaagcacagcaagttg

SEQ ID NO: 16443 - DNA, 444 bp, Zea Mays
cactttttgaggtctaccaccaccctcctcgctgtccactttgtcttcaggaatcaggaggaagaatcgatcaatcacttgctctgtgcttgctccttctcatgggaattttggtttgtgttgctgcaaaagctcggcctgcaagctctaatcctgcagattgacgatgtctgttttgatggttggaagagggtagaatccttgatcgatttccaaatctgaagaggtctcaactctattataatcctaggagcttggacaatttggaaacaccggaattgctgtttcttatgaggcgtttctaaatttagctggagttctattgctcgctaaagaggagctgctggaatgttctttggcaggggctaaaggaattgcccaacttcttgccattgtgccggatgggcaacattagcaagcttaggcttggtttggtcatgtttg

SEQ ID NO: 16444 - DNA, 342 bp, Zea Mays
ctttctgttctcttggctgtgcactcctccatttccatccttttgcacaactttcaattccctgtgaaatcctgtgaaaccaagtggccatttgtgtgtctctgtgtgtcttgagcattcctgcaggttcttagctccttcgggagggttttttcacctcaaacagccatttccccgaaaccctaaaccaccgccctccacgtgttcggtgaaatgcccaaaccagccaaaaatgctccaattgaacccaaatttttcaggcaccttcacaacacttccagtaacatatttgccaaatttcacgccaatccgagattccaggctttaatttcaccaaattcc

SEQ ID NO: 16445 - DNA, 411 bp, Zea Mays
gaaaaacaaggcctattggtattgattttataactttaggggacgacgggtttattataacaaaaccgaggggctcttatgcaaaactacgtatccgaaggggtattgttgcttttcggccgtccgatcagtaatggactaccacgattagatcgccaaactggaatactcctacgccatcacagccacacgcgacaagatcaatggctctgatttaatgtgcgggagagaatacgcaaacaaccgatctggccatccgttgaagatcaaacggctaacgtgcttcttcctcccccgactatcaagcacagcatccgtttcaaaccactcccatccgacctggacctgacgaggacagtgagaccggtggtgaagatcgctgtgggatccccaacccccaccgcccacggc

SEQ ID NO: 16446 - DNA, 1690 bp, Zea Mays
cgtgtcagtcatcctcgacgagttcccagtttggtgcacgacgatctcgccggcgtcgacactatctctgtccgagagccccgacgatagcccggtgcacttgcactcgggagcgctatgtcaagctagggtaagagacttttcccctggtaatccatgctggaaaggacgtggtgcgcgggtgtgttgagtcacataggcgaaagtggcaaaactgtggcgtatttcaaaattcgttggcaatgtgttatggacaatctaaaactggcatttggagagttgacatccgtaaggatggcaaagagttaattatctagcttggggaacgtggtcatgttccatggcactaggtggcggcataggcgtgttatgctttggtggcggcacgggtaaggtgagcgcggcgtgacaacctctgcggtgacttgcgcgaggatttgcacaatagtttagtttgcacttgctgatgtcgatgacgagagcgcaacatgatggattcacaccgggggacgacggtctagagtctaacaaccagatctgttcaactcagatcggaatcgtttgtcggagatgtgctttcgagtgacgaccgtgaagaggcggtcctagaggagcttgtggctgactcaggtgtggtggcagttgcgtggaggcggcgggaggccacgcatgcacatcgacgactagaatgtcgtgcgagcgcagtgcctgcacgaaggccatgtgtgtgcaacgatcgtgcgaccatgatgtgaaggccgtgcatgatttgtggtgggtgtgcgtgagtggtggaggcggtaggcagtgcgtgtgctgcggtggcgtggcaatggtgcggcgaggccaggaacaacaccaacacagaggtgattgagagcacgtggtggcggtgcgaagttggcatggcgaagacacgaaacccacacatgggcaatggtggcaatgaggccgtgggtagtgaaagtgagcaggtggcagtggcacaacagcataggggccgcacatgctatggagggcgcaatggctgtgtgatctatagtggagtagcaacatgtggttgcatgggctgtggcgacttggaggctcaagagttgtcatcctcgtcgttgctattatgactgatggtttgccgacgatggtccaactcgactagatgtgaatcattggtttctctgcctcccctctgctatgatcgtgctatcaggtgctctattttggccgacaaagctaggatggttgtggtcagggcgaaatcctagatggcgacaattgtagatgtcgcttcctcttaggagacgtccactctgtcctatatgatagtttcattgtgtgaaaacactgtctatttgtgggccgacaatagcaccaccaattggtgttgcaccttcttgaaggtgttgtcttttgtgtctagcgccccatgattggtggtggcaaccacttgtggcctattagaagttggaactgctatgtccaggttgatgagcttgacaatgatggctcaaactcaaagttgtgtttggtttgtgtggtagtggttggcaaggagaaccatgtagactttttatctagtcggttattggacttggtggcatattggtgcttgacgagctctatcgcttgtcatagtgggttttggtggtaatgaccatacaattagagaattaatgagatttatcaagttgac

SEQ ID NO: 16447 - DNA, 645 bp, Zea Mays
cgaaattctccggctgtggtggctaatcgaggtcaagggttggcactctagctttgtaacaaactaacggagctagttgtgcactcaatttatagtatccatgagcggtggctccgaatttggaaaagggaagctggcggccgaagaggggggtgagtcaccagcgcgaactaccgtggcgttcaccggggcaatgtctcaggcgatggacaggctacctacgggggtctactgcgacatggtaacacttctaagtacgtggcgtccaggtggcaagcggtagactccagtgagggtcatcttgaccggccgcggggcaagtgggtacgacggccaactcacggcctcatccgcggccaagaccttttcaccggggtccgttatccgcacccagagcacacaaatcgcaacgccagcgaggatcacggcgcatgcccacaggcggcgacaggttcactgaatccacgatctggttcagttactgtaccatggcaatcttcatcaaacgttttgacagagcgaattggagagccttgttctcaatttttcatgcgacaactcattctcttgcatgtatcaaagttgttgtccaatgtaccagctacaactttgttacaaagaccttactcaaacatccactaaatc

SEQ ID NO: 16448 - DNA, 811 bp, Zea Mays
gtcgccagacccttcttcatgctccgaattcgagcaccaccatagcgaacaaaacaccaaaatggtcgccaagtttttctcctgagttgccgcaacaaatttggttgggctcggggtcggggggatataaatctcgtgcaccgctaacccttccatcacatccaccttgcgtcggtaacctagggcccggctaccatcgccgtgaggaaggagagggctaatggagccgccacaagctactttggttggagccatcctcggtcgggatctaggggcttcaccgtgtcccaggagggtggtaatgccctcgccctgggatgttgggggctggtcttttcgggggcgctcgccagagcgcgcgctctgccgcggagccgcctataccgtgggcagaatattgcgcaacgtagaaatcggtaaggagcccctcatctagttcccctatgtcttatctacgtatagcataactcagattagaatttcgggcccgacatcggtgaatggtgcggtctagccatggcctccgtcgcgggggacgcgtgcgcgtcgccgtcttcgccccccgaggtgggtgataacctagatgccgtcggtttctggtgaacggtggagattaaaacgtgcgacggattgttatgggccgttgatctctacgtggacgggctggattggaaagggaataacgattcacgtgtgttgatcgtggctgtcgatctgtgattccatggtccctgtcccataccccttcgtgatctaatctgaactcttcgttttggatccagcgacgggatcacgaccgtgtgtaagccgc

SEQ ID NO: 16449 - DNA, 686 bp, Zea Mays
caaaagacgtgaaaacgacgtttgacggataaaatgtgtcataggatgtttggaattcgaattgaggcacgaaacgatatgggattgagccgatacttcacgaataggtttatataggtgaatgagagtgaagtgtgagcttggtttgaatttaggcgaagaaaaagagatttgggcactcggctcggaaacgatcgctcaaaacgggaattttggtgaaatttaagcctgggatctcggattggcgtgaaatttggcaagtaggttactggaagtgttgtgaaggtgcctgaaaaatttgggttcaattggagcatttttggctggtttgggtatttcaccgagcatgtggcgtgcggggagttagggtttcggtgaaacggccatttgaggagtgaaaaccctcccgaaggagctaggatcctgcagggatacacaatagggacaaaggaacacattgtaccaactggattcattggatttcacaggaatttgaagaatttgcaaaggggaagaaaaatgagcctctgctcacagaactgagggggagaggagaactgaggggggtgttctgctcaccgaggagggaagaggagggagacgaggtcgccggagcccagtcggggacggtggccgccggtggagggagttcgccggaaaatcgccaggagcagagggagtcgccg

SEQ ID NO: 16450 - DNA, 362 bp, Zea Mays
gacaatcatgccatcaatctgcatagtctggaataaatagccaaagtaattatgatagcatagcctcctatttcatagaagtataccacaaaatattttcaaacaagagaagaaattgggcatgttcccaattaatgaaagatgacaatcatgccatcagtctgcaacatttcttagattatcatgtgtggtagaaaacttaaaatatggggggaaatgcatgatcaagttcaaataacataatcaaaacaagaggtaatgatataggcaacaccaaatttccttgaattatcactctcgatcttagccttgaattgtcactctcgatcttagcctttggcttgagtcagaaaagatctgat

SEQ ID NO: 16451 - DNA, 275 bp, Zea Mays
cttcggcataccccacttcttcagcgttgggaacactctgttggctaggtattcctggactaagtccctagacccaatgtgttcagacacaattctaaattcatacacagcatcttggcatggatcccccggtgtcatgttgcattgaggtctagtcagcccgaagattagcttcatcaggctttgaactagcttctccttttcttcatcaattttaacataaaaccattcatatttccaaccagtcggccatttagtgcgatagctgaccaccg

SEQ ID NO: 16452 - DNA, 587 bp, Zea Mays
actagggtccgtgtaggtagttggaacgtaggttccttaacaggtaagttacgagaaatagtcgacgttgcggtgaggagacgggtaaatattttatgcgtttaagagaccaagtggaaaggacagaaggcgaaggaagtggaaggtacaggcttcaagttgtggtacacgaggactatagcaaacaagaatggagtaggcatcttgatcgacaagagccttaaagatggggtagtagatgttaagaggctaggagatagaatcgtcctagtcaaactggtcattggggacttggttctcaatgttatcagcgcgtatgctcctcaagtaggccttaatgagaactcaaagtgggagttctgggaaggcctggaggacatggttagtagtgtgccagttggcaagaagctcttcataggaggagatctcaatggccatgtgggtacatctagcaccagtttcgagggtgtgcatggaggcttcagctttgggactaggaatcaagaaggagaggaaatcttgaactttgccctagcctatgacatgtttataacaaacactttctttaggaagaggaaatcccacct

SEQ ID NO: 16453 - DNA, 1296 bp, Zea Mays
gccaggttgggacggagagaagttggcatccttgactgatggtccgggaagggcggcgtccaggggagctttggccgacagcggatgcaaagaggagggccaacggccaggaggtgggaaggagggagagggaaaaaggagagagaactaaacctagctctgataccaagttggagcccaatacactgagggtatgcaagtaactacacagtgactagacctaaaaccctaacaatactctaacattctcgataagcacatacaatgattgtttctattcaagtatgtctacttctatatgggcaagacaatgttgcgaacctctccttgcactaattgagatcaacaactttaaaaaggcctcctcaaaatttcgattggtatgggtattagtgccacctatagtggtaccaccattaggtatggttttgcatagtgcaactacattgtccacttttatcaattgtctggtactcactaagataacaagttatggtgtctatctatgacaaaacattaagggtggtatgtcaactatagattgaaattttgcattgcttgaggtacttttatattatgttgattgtgtagaggatcgtaggataagactatttgttcttagattgtcccattacacctcttagaatgctctaattattacacatttatgtccactagtctaggctctaatatcaaggcactatgccaataatagctagggaaaatcttatgtgtaaaccatggcgatttcaaggcatataccaatagtaccagcaacatccaatctttgtgagctactcataagttcaaatatagagaggctacctcagaacttgtgtctccttgccttgtatgagcacataattgtggctcaatagattgccttgggtccttttgatatattgcattatcaagatgcaatattgttaatgcataatattgtccaatcacaaacctatcaaaaaattcaagtttagtttaaatttttagaataggacacgtgaaatgcaaacaaattaccacatatgaataaaaataaataaataaatttgctctaatagtggctcaatagtgatgctcttggcataatttatctgagggaaatcttgcccttccactatagttggagcttaattttgaccatctggctatagagttagaatttttttggccactaaactatcaattctggccattaagatgttattgacatgaattacatgtgacagtgtgcccggaaaatggccttaattgcatattgttttggtgattttattgattcaatgccaatatgat

SEQ ID NO: 16454 - DNA, 420 bp, Zea Mays
atatgctttctgctgctagattaaacaccattggatccttggcgggtggctgagcctgacaagaaactgactttccttggtggtcagtgagaagaacggtcttatttgcgcaacttatgatgcccttgtgtttggttaactaatccattcctaagatcacatcaatcccttgggatggcaagatggttaagtctgccaagaacactaccccacttaaaagaattctgacttgggagcatttgagctggcatataaggtctaaccctggggttcgggtgaccaagggaatttataggtgtgtagagggaatgccatgtttctccataaaactagtggctataaacgaatgggatgctcctgaatcaaaaagtacagtagcgggagtaaattcaactaggaactcaccgagcactactctcg

SEQ ID NO: 16455 - DNA, 486 bp, Zea Mays
tgatctcaatcccaaaattcttgtccagttcgatcgggacctataaattgaggatgccctctgctccgcttcttagttacgcatccaacccatccccagctagctcctatcgtgcaccaccgcgccccaatttcgcatttcccccaattcacttctttgcgctcccgtgtgttgtcgtgtcgtggaccgccaattctaggttcgttcttgttctctttgttcatgtttcaacacctttattcactggtgatgctcgtcggttcaacccattaagctagaccatgctcaattgtctagaacacctcgatatgtccgtgaagttcaccgtcgtcgcgggtggtagaacctagggctagtttgaggcaattaaggcagggcttagattcgtatggggttgggggcgctagtccaacacttagtttggtcagtcgacgccgttcatggctggtcttagcaaagagatggccgacggcgagtgcgccgttg

SEQ ID NO: 16456 - DNA, 435 bp, Zea Mays
gtcgacgaggggaggcgtggcggccggtgacaacactaagatagaagacgacgggaggatgggaagaggagcagacggcgcgagggagatgagtgcatgaggaggaaccggggtacgatggatggaggagacaagcgcacggtgaggcactggacaatgccatgtggggtgaggcgctggaaaggcgcaacgtggagatgagcctgcgatgcgctgagggagatgatggcttagggaggagcagggacgctcgcacgtcaaggagaggaaaaatacgtgctgcctggtgcggatatgggtgaaggcagtgggtttggataagagaaggacgaaggtggggaaagaaaatatgaaaattttctctcatttttgcaaacgaaaagggaaaaaatacaaacataaatataatcctaggttctagaacttgggtttggg

SEQ ID NO: 16457 - DNA, 341 bp, Zea Mays
gaagatagctctgcattttcatcagcaaggaaggatggatgggagagacaacaggttggcaatatgagctcgaagtctggtgaagaatgcaggaggctctgacgtctggattgcagcctgtgtagtggtaccaccaatatgggcgtgtaataagaatagtatcgttactagtagttaagtagttaactgtgtttacgtttctggtgatgtgagccggttgggcctgaattgtctggtacagctgtgttggtgtggttgtggtgccggttgggtgaaccctctgcgttcatcccagtcccaactgggcaatttcctaggatggctcagttttattccacaaa

SEQ ID NO: 16458 - DNA, 384 bp, Zea Mays
gcggcgtgcgcgcactatttggcacatgcgtaatcatatcgctgctcttagatgtgatcgttgtcttgtccaccattgtgcttcactgccacagtgcaggttggtgcacgcattaaatgcacttgtcccctgcccattttcgagtgcctttgtcctatctgctcgaggctagcttgggcgagacggactgggctgaggcaacctcaggcgaggcggagtgagtggtgtcgacttcgggcgaggcggagccccgctcggggtgagagaccctcaggggatgcctcagcttttataggtgcagtggctcggttgtcacccctaggaagtttagcccttatttctctgagtgtgtttgttagggggtaattcaggtgtccctaatta

SEQ ID NO: 16459 - DNA, 622 bp, Zea Mays
ctagttttttagaccggatcctacatgacaacaccggcggcacacgtacagtttccaaatgatggtactgtgagagctgctgttgcccggccggcgtgactgactacacatatgctgcagttgcttgcacacacataagtctcgacttctcatattcaagtgtgaacccggccctgatggtacgttgcccgtgcgtctcgatagttcgtctactagagtagtagtcatgcatgtagcgtgcagtgtgggctagcttagctagctaggttgttaaacctaacctactccacctcctcctccaaacccatcgagcggcccgtcctagctacttggattctaccgggccgcaaccaccccacacagttgccgatcgacctggcgctttcgtcgcctcatcttctttgcctagcccgttatatattctgacgagccgtcagtttcatcgtcctcccgtcgtcatgtgcaaaccaaggcgagactgtgtcctgtccctgtgtgtgagaactacgctatatattctctctcaatgcggaaggccggtgggtggccgggcaaagcaacacactgcagccctggcacaccaatggaggttctggtaggagaggcagatctaacgaacctc

SEQ ID NO: 16460 - DNA, 515 bp, Zea Mays
cgtaccagagagaccagagtttcaaactttggacgaaatacttgtaatcttctgtttttctcagcttcgattgccacctctgatccatatgatacataagagtccctaaaatacatgaagcgtcgaaaacattatttctcaggcaaagcacataattttaattaggttagtaaattacctcttgatcaggttacgcttaagacggtgccagaaattaaatgtcatagacgaaatatcaaattccagaagtgaagtaacttctagcaatgcgttcactatttgaattgaatcatctgaacctggtaaggctcaaacattaaaagtaaataaatgggtcattggaaaaagaagggtctcgatggtgatcagcataatcaataaaatttacctgtggcaatcaagtcaacataggattcacccatgtctgcatataaacgagcaatagcttttacatcttcttcatcctaaaaatgtgccaaagggtcaaaatagaagcaaaacaacacatgcatttc

SEQ ID NO: 16461 - DNA, 425 bp, Zea Mays
accgcgccagtgactcagtccctctctccggtcgccaccgcaccatgccgaattcaagagcgaccaccctcgggtcctataaattgagcatgtcatcggctccgctcagtagtcacgcacccaacacaccagcccatgcctcagatcgaccaccagagcgtcccaatttgggatttcccccacatctgtcaagaacaccgcgtgtgagagctcaccgtggctagctctccacaggtctgatcatgccctcctcgctcttgttttagcatccatgtgtgcttgtgatgcttctcgacccggccaatggagctagaacacgtaggatcaccgggaacgcttcgggttgtccgttgatcgcgttgtcaccgtgggtagagagattaggggataaaaccttgaaattggttgaggggtaatggttatta

SEQ ID NO: 16462 - DNA, 759 bp, Zea Mays
catccctagagcaccagggaagaaagccgaccgcgggtgctgctgcgctagcgactcagcgggaggaggaaagagaggcggggttcaccgtcgcactcagagagtgggtgtcatgcgagcgtggccgattccccaccaggcaggggcttcaccaccgaacagatcacgatgctaggacctcgggtgagtagccacctcggactcacctccttttctcaatcctatggcttttgtgcagtccatggaggagcagtagccctgagcgaagtttaggtacggatcgtgattggtgcgctgccggagaacggcggtgtcgtgtactggtccgggctgtgtgcacgccggttgaccaacgggagagagagagagagagtactggggagggcatgacgtctacgcatgggcggtgggaggttgaagacgccagggcgttcgtggattagaaaataggcggtcgggattgatcggggctggcatttggggtggagcgcgatgacgcgttcgatcgcgatcggacgattccagttgcgcgcatgtattttaaatctgaaccattgatgcgggatcctgtggctatcgtggcataccgctttggggggttgagatctaatcctaaccgctgaaaccagatccaatggttagaaaccctagatacaccttcgcgattgcgcattatcatatgagcccttacaatttacagttatcaacccgccgtccgtaaaaggggtcgcctgagtcttagtaacatttgcaccagag

SEQ ID NO: 16463 - DNA, 541 bp, Zea Mays
gatcatttggctgccaattcagaaatacaaactctttgagttcattcaacgtgagtcttgagagacttgcagacttgttctttcaattcccgagggagttgtagaacaccgaactgcggttcacccagtttgtgccttcacgtctatacgacgtgattgcgtgggctggcttcatcggtacgtggaagggcgattgtctcggttgttcgtcgcgtgtgcaagatctcgtggtgcgcagcctcttcgtcaggtcacgtagcgatatttatcaagtttcgaagatccttcgagaagatcgggccacaacaattgctcccgcgtaatctgtacgcatgcgcccatcatctggtatcaaagcctcggttgactcggtaggatcattcttgcttttggtaggctagatttttatatacttacagtccacaaatagtcgcaaaaaagaatatatatataatgcctttcacttgtgcagctgattcgtagtttgcattatcgagttttcaatcgtctgaaacttgtctttttgctggtctgatttttt

SEQ ID NO: 16464 - DNA, 791 bp, Zea Mays
ctcggatcagttagataacgctgggggtaagtaaatatcacaccgtggatacactccggccactattttactccggccaccgtacccgagcagatcacggttgcttcggatgggttcgctggagatagccacttcgcggccttgcgccacgtgccttggcacgttaaccacaccgctgtgactcacgttagcccgtccggtggtcgcttgggagcttgccacagtaattgccaccaatcgcgcgcgccagtaaccccctctttctctggccgccgcgcgtctccctcaaattcactggccaccgctcaagcctgctataaattgcgcacacccacggctccgttaagtagtcaagcccctcatccagcaacacgtgcctcgaatcatccactagagctccccaatttgggatttccccaaaatcaaccaagaacaccgagcggtgtgacctcgccgtggccaacgagtttcaggtccgttcatgtccactgtcctcttgtttcagcacccttacttgctcctgatactcgctgacccatctgattaagctaggaggccctagatcaccaggaacgtgttcactcatccgattgttcacgctgtctccgtgaaccagttgatgtagagcctcattggtgaaattgagtgaggggaaatgattaagaagggtccaatttggtgtctaccgcacgggagcaccggtcgttgtggaatccggccagtacaagctcaccggagctcggcccagcgctgttcgtcgtcgtggactgcgaactgtgaagagatagaag

SEQ ID NO: 16465 - DNA, 369 bp, Zea Mays
caaagacagaaccaaatgactagagggagtcgattatcatatatacaaaaaatgaggaggagccggatgacaaggccgccgcaaagagtattgcaaggcagtcagctcactatgccatcatagggggtctgttgtatagaagaggtgccacaggagtcctcatgaaatgcatccactcaactacggggagacatctgctggaagaaatccacgtggggcaatgtggaatacacgcagcatcaaggaccttggtaggaaaggccttcagggcggctttctattggctggcagcaaagaaagatgtgacagacttagtccagaagtgcgaggcatgctagttcctatccatgtaacaacacctacccgcct

SEQ ID NO: 16466 - DNA, 372 bp, Zea Mays
gtgactgtcgccgtggccgccctctcgtaccgtgaatcctcaacctgagggtgttgggtgatactagcggtggccgcgcggggtgattcttggaccacgacacataggttctacaccagcgacgtctaaattgctcaccggacttcatcctgcgccactgtgccacgcgtctacgtggccaaccctctccatcgcttgtcgcccggtgagtagtatcccctcatatccgcagtcctctccttcacatgttgcgctgttctgggggtcgaatggggcgcaggtgtcccaggtcgtcgtatgccggcggctttgccgccgtgagggacttgcggcgccgccctctggtgtcaccaggatagttctgagctcgac

SEQ ID NO: 16467 - DNA, 488 bp, Zea Mays
ggcggtgtggggggcgttgcctcggtgcctggggtgcggtgccggtgcatgacttcttcgtggcgagacagagagacaatcagacaaattaaagcgcggggacctgggttgggctgtttcggggcagtacaggcaaagctcgcttctcgtcaaaaggcagcatccattcaggttttccatggcatggcaaggcatgcaacgaaagctgcctagtactagttagctaggctagacttgcgtcattgtcgttcttggaatctggagggttggggcctcccccaccctgtctggctgcctggctggactctcttcctctccctctcactttctccctcaccattcaccaagcattcgagcagtagtactgtttgcctcctgtgtactggtgccctgtatctggctggcgtacttgccggcgtgagggaatgtaataagccgaggaaaaaacgtggcatgcatgcaatgcaatgcagtgcagtgcagtgcag

SEQ ID NO: 16468 - DNA, 350 bp, Zea Mays
cgcgattcggcagcatgcagatacgtcgtcggagtactaaggttccaccgtgaccaaaagcatcccacgatcgaaagggagagagttggagggatgatggggatcgttcgtccctcgcgtggttacattaccgtcaactagctataaacaacggacacgttccctttatgaccgggaggagtaatataatagatcgaggatccccgcacacgactatgcaggggggtcaacttcagtaccgtgcaaaacagaaacagcgggtggctgttatcacacttctgtgcggctagtagaggccggtgccaatggagcctgcagcgtgggcaagacggtgacgacgctgctgcccc

SEQ ID NO: 16469 - DNA, 373 bp, Zea Mays
gtttggaaatacaagttatgtgaggattgaattagtacacgtatgcgtgtgtgtgtcgtggtgtattatagttgtggtggcgtaagatatttgattgaggtgtgcgggtatatgtcgtaatatggttatactcgcgacgaggaaagatgtatgtattgtgtaacacgactttaggttgctattgtataatcgtgtgaaggatgcgcatgatggtcatgtgactaaagggtggtgtagtggcaaagcgtgaagtaagtttagtatttttaaacggttatctgatagcacctatcggtgtcgtcataatttctgttgtatggcggatcgatgctttgctttgtcaatcattgcatttcatgcccattggataaat

SEQ ID NO: 16470 - DNA, 495 bp, Zea Mays
cacgtttgtgcgcgaagtggaggctgaggccgcaaatattgtagggtgatatgtgccgaagactgagaccctacagagttgggatatcagcggttcgaatgttcggttgaaccgtgtttttgagttgaaccgtctgccatatgtcggctacccgggggacgatgatgcagttgttggtgaccgcagggggaaaagggtggtggcagtggttgacgaagaccctttgcagggagtagtgccggctatggctgctaagaaaaggaaactaggtacaacaactaaggggttgggggattccgatcgttttgttgtggatttattgggaacttgcgtgagctctgggaatcttccacgcgaatgctgaaggttaccgggggtcgctggcctaggagtgttccgatcccccgggcggccggcgaggacatgtgtacgtctcaattagctagtgagatgaagatttttccttacggacggaatgttgctactgttgtaccg

SEQ ID NO: 16471 - DNA, 619 bp, Zea Mays
ggtgaccatggtaccgtacaaaaaaatcttcagatacatcacccttcgccactggtgacccccgttccatgattggtgccgatcgccacgattcgtgcttcgggtttgtggattgagctcgacggtgaaaagatcgcatcatggatgagtttggactactgtggcctcgctgttccccgaccacttgcgccggcgatgtggccttacggccatcaccagagtccacgtcgttcaccgcaattgcaccacatctcaggcctttaaccacgtcgcaatagctcgggtaatcgatatcgagtgatcgccggagagctgccacggtagatgccaccaatcgtttgcaccagtgaccccctctttctccggctgccaccgtgcgagaccaaattcattggccaccgcttaaaggccctataaattgatggcccggtctgttgcaccatgttatcacaaagctagagcacccatccccaccttcaattagccaccatagacagagaatttcattcttcccccaaataatctatctgcgccaccgtgagatgtcgcgttgtgaccagccgcctctaggtctgccctcgctcttcttgtccgtgttttagcacccacacatgcttgc

SEQ ID NO: 16472 - DNA, 712 bp, Zea Mays
agaatcaatcttgggttcgctgacgagcgcaaaactgctatcatcagttccagcctggatgacaaataggaaggcgcactcgtccagtttttgcaagataaccgagacgtatttgcatggcaacctgcggatatgtcgggagtcccgagagaactggccgagcacaaattaaaggtatacccccaggcgaggccgatctgacaaaaattacatcgcttcacgtccgacaagagagaagccatccgtgctgagctggctcgcttggtcgcggccggattcattagagaggtgttacatcctgagtggttagctaaccctgttcttgtactcaaaaagaataaagtggattggcgcatgtgcgtcgactatacagatctcaacaaacattgtccgaaggatccctttggacttcctaggatagaccaggtggtggactcaaccgccggatgttctgtgttgtctttcttggattgctactatgggtatcatcagattagcctggcaaaagaagacgaggaaaaaacagcattcatcaccccgttcggagccttctgctatacctccatgtcgttcgtcctcaaaaacgctggagcaacttatcagagagctattcagacatgcttagccgaccactagggcaagcgtgtggaagcttatgtggatgatgtggtgattaagactaagaattcagaaaatttcattgaagatttac

SEQ ID NO: 16473 - DNA, 636 bp, Zea Mays
gaaatataacagacaaaaaagtaaagagtacattaggtatgagaattttctaattaagtccctgtgtgacttcagtaaatgtgccttgactcgggcacattgttattgactgtgcgagtttcggattcttcacgcgtgtcgcactgttgctgtggctggcgatgcccttctgttatgagccaaggtaggtgccaatggtggtggtggtaactgagcccatgccgcttgagaatgacttgccgaagcaactaatgtcgtgggttgctagttgcccacatgttcagggatatatggcgaataacacgaggcagtatgtaagacctgcttcggctgattctgccgtgcttcggcttcagcgatctcctctgcttttggatcgtgacttggcacgtccttgttgtgtgtcctttatcctccccatagaataagcagaacaatctcctaggttgcatgctgaaccttcctccaaagcttcttccccctctgcctcttggagctggtggcctataagaggtttgctacattcccaaagattgtgatctttgttggctgccttgggtgtgatttgttctattatcatttgtgttgggattttggattgttctgacatgcctggggtggaatcttcctctgaag

SEQ ID NO: 16474 - DNA, 562 bp, Zea Mays
gaggatgcttgcaatcgtagaggtgatggaaataatctatatgaacttggtggcgatggttccacagctttgccttgtgttgattttttgtagcacgagaccagagttgtctatgactctaatcatctagtgatggaggttggcagcttgtatacatctatgactgaatttaggctggcaatgagacaacatgccatagacaaagagttcgagttaggtattgaggctagtaccccgaagaaatatagaggctattgtcgtggaggcggctgtccttggagcataaatgcaagaattgagagggatggttcgccgaccataattgtatgtttttctatgtcaagaacttaacttttatttatattgttgtggccttcgaagaaatccaatgagagtgttattgttgttgctatttttgtaggtgactgtgttgaatgatcatcacacttgtacttctagtggacggaggaggactagcacaccaacaagtgcttgggttgcttccaaagctcttcctattattgttaagaaaccacatattggtgctaaggaattacaaact

SEQ ID NO: 16475 - DNA, 708 bp, Zea Mays
caaggggataagcaaatgagcaagatccctatagcagaattgtaactggtatatagagctacaagtttgttacagatggattagcaaattctcacacaaaaatccaagatcttggcactgcaattctggctgtcaggcgctctgaataaggaatctgatggtacagtgctatacaaatatccagtgagccgtgcacccggattcgtgccagacgctgtgattcgtgcccagcgcaagtggataacagataggagtaaaaatcttggcgctcggattagttcgagctcgctcaccgttgtgcccgccgtacccacttgaaccgtggctggctggaatcatcctcaccggcgttagccgcttaacgatcgtgcgccacacgtcttggaagtctagcacgtcgcaatgaactggtgttgcaagcgtgtccatcgcctgagaacttgccacggtgaaagccatgaattccttgcgccagtaacctcccctctccccggtcgccagcgcttctcctccaaattgagctccaccgccgttgagtgctataaattgaagcctcagggaactccgctaggtaattacgcgtccaacgcaccagcacttgcctccaattgtccacaagagtcgcctaattgcccattcccccaaatcggtctaaataccgccgcgtgagcacctcgccatggccagcgtgctacaggttcgttcatg

SEQ ID NO: 16476 - DNA, 284 bp, Zea Mays
cgttgccggcccgcggaagggaacagagtcgcggcggagtttcgtccccggcgagaaatcgcccaacaacccaggcctcccgcgcacagcagtgacccaagacacgaaccacgcgtagtcgcgatgctccccgaccacatgcatgctttgattgatgacgaccacgaggaaatcgctcggcggcatggagaagggagtagagatggggcacgccgagcggaggctgctggggagggagctcggggcactggagggttgaagggagagcccgcgcacaacttggt

SEQ ID NO: 16477 - DNA, 877 bp, Zea Mays
ggtacattaccttttacaaatccttgaagctgaactggtctcactgcgcatgcatatcaacacgaaggccttgtttgtataagctttctgcagttgactttattgtcctatataaagttgcacttagctagcagagagcatgccatggcttatttccctcgatctgttcactgctctgccatggcttatctccacatcctcatagtactactctcctccctgcatctaatccttggaaaccatgcaacgacgacgagggacaccatctcagctggccaaccgctacgcattcacgacaagctcgtctcccagaatggaaggtacgccctagggtttttcgaggcgggtagctcccaaaacacaagcaactggtaccttggcatatggttcaatagcatccccaaatttaccgtagggtgggtagcaaacagggatgccccaatgaagaaccacacctcactggagctcaaaatctcccacgacggcaaccttgttgtcgcaaaccgggccaccgactccattgtctggtcgactgaggtcaacatgaactacagaaacaacaccattattgctgttctgctgaacagctcaaatcttgtcctaagggacgacgatgcctccaactcgtccagcattagtatatggcaaagctttgaccacccgacagattcgttgttccagtgggctaagcttggttgggacaacgccaccggtctcaaccgccgcctcgtctccaagaaaaactcaatcagcccggctagtggactgtaccgagaggagctagaccctagtggcgttaaccaagtcgtcctcgcgtcactgatcaggtccaccaaaccatattgggccagcggtgcgtggaacggaaataggttta

SEQ ID NO: 16478 - DNA, 611 bp, Zea Mays
atcctctcgcgtgcataagctttcgccgtgccactggcgggtgggacccgctcgtcaggggcgtttcttccccgtgaatttcgctcgcgtcgcactgagctctccgcaatggccgatctcctcgccgaggaacccgcgcccccttggactcaatcctcgcggagctacccttccgactttggcgcatcgcttgggtataagtccggggccgtttcaccgtcagccgccaagcgccgtgaaccctcaccgttgtagcacccctctctgctcgccgttgatttaccactcgtggggcgtccaggttcatcctggggtccgtagaagccggagctctgggcgtgcatgctcgtggtcatcttggatgcggcgaattgctcgttgggggctcacgtgtcgcagccgagccacccatcttcgtggactgggagttctgcgccaacaacgccgtcagcatcgtccccgtccacgactgacgtttgggggtctgcgatgagtccagaagcttcatgtgctggccagtggaacacccgtggccgtatagggaagaattgaccctctggcggccgggattcgtcgtcgaacgctgggatccgccgctccccgtggatggc

SEQ ID NO: 16479 - DNA, 854 bp, Zea Mays
gcgaaattaataatcaaatatgccttgcaacactactcaaatattgatattccctacaaaaaataaatgtagagaataacacatttaaattcccattgtccatatggtagtgttcttaatcacttttatgctttttcttactgagaggttcagaagaacagggagaaacatgagaggtataaattatatgggtgttccttagtctattatcgcttaatctcaggaggtgatcagaaggtttaaaacagatgcccctaacaacctaatagaattaattcattgctaacctattagctaataaacttggaaagaaaccaacttaaaggtacaacaaaccaatcaaatctgtaatatgtaggcttatgttgaagccatgctaaaagtctattattggaccactggctcacaattttcagataccatacaagataaaagaagacataagtgattcaaataatcgtgcacctatttcattattgtagtagcgcgatgatacatgtatgattttatcttcttaaagctgtaagactttcggctcagtgtaaaattcgggtttcattcctcataatatgttgagtatgagaatgattaattcgtttttcttgtttcgaggtgaatcccgggaatggttcattggtagtgagacgatcccaagcatctgggacaccttcactcaccaaggttcacgaatttaagtttttagttatgctacttagaagacaagtgccttgtacaggtctgacttcatgaactaatctagcattgtttgtcaaaacagatgtaaagttttttttctttgacaagaaaagttaatttaattttttatacagggtgtacatttaactcttcgtcaa

SEQ ID NO: 16480 - DNA, 784 bp, Zea Mays
ccgaatcttagcaacctaagaaatctccaacgactgtaagacccttagctacgtaattttcaaggtcatcgacgaagttgtatgtgtgtctgtactctgtacattacttagaggagggtttatcttgtaggcacttgcaagaaaatcagctatctggatcggtacctgagacattgggtacaatcaatacattgcgtgaaatgtgagttaatttcatcactttgtgcttatagcttgttattctccttttcaatttgacatgatttttttcatgttgaaacaaattatcagaaccagcatagagtgttcatgatcttcaatttagtcgtgttttcatgctttgaattgctgcacatctattctgacaagtacatatgtcaatatgtgccgcatgcttgaagaacacaagaagttgacagtagatgtaaacttgtgacattagttaatgttatatgatgtattttggtccttactttgtatcagtatgcatttcaagtttattattatgcatatagcggaatgatataacatatctctgcaagtccaatagcatatatgatcttactaatgtgctccctaattcacaatatctgtccaatttattaggatttacttcttacagtatctctctgttgggagtatgccaatggtttgagcaagccattgaaaaggagactagcatgttataacattttttctgttagttacttcaattctcttatcaccactacaattttgaatgtgatctatgtgctagcattatagcacacaaaattcttggtgc

SEQ ID NO: 16481 - DNA, 692 bp, Zea Mays
ctgacagtaaggtcagatgaactttggagtcagatttgagtttaaaccagtgattgtttgactagggatgctatagcaaaattaaagatgaattgtagaccaacaactttgttacaggtggattaacaagttgttatataggaatcagagatctaagcttagcaaaatgctcggtcaggcgctctgatgagaagtctgatggtacagtatctgaaaaatatcccaggtgcactgaacctcgccgccagtgatcccctgcctaaattcgcgccggccgtcgcgattcgtgtctcggatgtgtggattacgctcgacggtaaaaagatctcgtcacggatgaactcgggacactgtggccgctctgtcgctcgcccacttgcaccggcgatgtggccaagcgaccgtcatcgaggtatgcatcgtctgtcgtgatcgcgacacgctatgaccctttaaccacgtcgtagtgaattgccttagcatgtctattcgttgtcggtggccttgccacgttgaaggccatgatattacctgcgtcagtgactttccttctctccgaccgcctcgcgtcttctccaaattagccgccaccgctcatgaatcctataaattgccaccccagtgaactccgctaggtaattatgcatccaacgcactggtccttacctcggattatccaccagagcctccca

SEQ ID NO: 16482 - DNA, 910 bp, Zea Mays
gcgagggatgatggcattccattgcagcacattacttaagtctttacccccgcatgagacgtaagatgtaggcaggtcaaaggtagtgttccttgaaaccatgtacacacataggcagcaaagacctttttccagttcatgaattggccagatgtcgatggaatagaggagggcgtcgcagcatgaggtagtagggttttgtggggctgtctcctagcaggagagcagcgccacgctggtgaagtcaagcctgcaactcagcgaggagcaagcaagtgacggcgacagcagcagcaacatgatggtgacgagcagcgaaacggaggaggaggccatcgacttctctagtatgtactagtgggtaggatagtggcgattgtgacccgaccgtccctatcgattgtggtggtggtccattttatagcccatgcaaacagccgggcgctgctgcgtctgcgtgcaccattcatctctcgtttgatcagggacgcagagcagagcagctagctggcgtcactctcatcactagtagtactatcgtacaaccaacccagcagcagcagactccaatcattatcgtaccactaccagcccagcagcagcatagcctaccggctacgctactgctgcattcccgcatgcttgagcaagctgtagctgtagggagacagaatcgcatcacaggagagctgacgtggagcgccgagatgagaggatacgcgacatctccatttcacctgtgctgatttaattagtatgtgcacggttgtaataataattagttaattcataaattgaggggtggacctgctagatgttacctcgcgctttggccgatggactgcaaaaccaggagtagtagacacaccatccgaggaagcctgcaatagccacacatgctacgactacc

SEQ ID NO: 16483 - DNA, 619 bp, Zea Mays
aaatgaatcaactgaaatcatacctgtcaccacgtctccttgctccctgtcatccgcagcgggtagcacataagctccagaaatacccgcagaagaggaagctcccggagtgaaattaacagaagaaccccactgagccaccagatgaggcaggcgcggagctccaaactgagacgacataggagtagacggtgcaggagtaggcgcggcctaatactgaggaaaaccctacatcggcacgaactgagaagtcctaggcacatagagctgctgcggaggaagaggaactgaaaactgctgctcagtacttgacatcatgttgatagtgccctgagaagaggaggaagtcaccggctcccatctgagcttcccattaggattcctcctacacaccacatccttatggtcctgactgcagatagaacacctgccactccactagcactccgcacggtgatgcacatcaccacagcgaaaacacaccagccccaggccgggcttaggaacagcccgaaacctctgagtacttcctcccaaagtacccgagtcagaagatttgccacggtaaggatggtggcgctggtgctcagacttgcccctcttgtgggctggacctccc

SEQ ID NO: 16484 - DNA, 659 bp, Zea Mays
gtcggtggagcaatacattcagcagtgtgctgtttgccagcagcataaagctagtaccttagcaccagctggtcttctgcaaccattaccaataccgcaacacatttgggcagatatatcaatggatttcgtagtaggacttccaaagtctgaagggaagtcagctctgttggtcgtggtggatcgcttatccaaatatggtcattttattgctatcaagaggcttgctacagcatctgtagttgcggatattttctttgaccaagtggtgaggctccatggggtgtccgagtctattgtttccgatcgagatccagtgttcactagcgccttctggcaaaatctttttaagcgttgtggcacacaactcctcacctcttcctcatatcaccctcagacggacggccagacggaggtggtgaatcgtactattgagatgtatcttcgctgtttagctactgagcgaccatccacttgggctcaatggttaccttgggcggaattttgttataattcctcgtatcattcggcacttcggatgactccttttgaattagtctatggtcgcaaaccccctccattggttccttacagccagggcaccactctggtagatgcagttgatagcaggttggtggatcgtgatgccttactgaatc

SEQ ID NO: 16485 - DNA, 360 bp, Zea Mays
ggtgaacggtgtaaggcgttttatgagcttctctcaagatatccatcttcacctatgatttctgaggcacacaaagatggccccctgaaatgaaccaaatcattctcatcaatggtgaactcccggggtttaccatcgccaaccctctttcgagcttcctgcaataaacgatcctgctgctgagccgcacgcactctctccatgagggaggattgaataagcatccgagtctcctcactagcggtgtcgacatagcacaaagtgatccccaaacggtctagatcagcaatcaaaggcaaggccacttttggaaccccggacctgctaagggcatcagccaccacatttgccttccccggg

SEQ ID NO: 16486 - DNA, 487 bp, Zea Mays
gcggtggaggcatgcggcatggcgggggcgcacggagctcctagatcccatcgcggtggccttgctgcaccttccatggagccggagaggggcacgaggctatgggcaggctgggctccagcggcaggctgcggaatggtggagggaagagcgagggaagaaggcgactgggaggaagtgatatgcgcaggagggcaagtgcgtcgggtaccacccccttccctcccatcctcctttatctccctctccaagcgatgattgcggggaatggtagagaaggaggaagacgtgggatgggggcgcgatcatcgcgcggtgatgagggcggctcgcgtggtgatgagggcgatgacatttttggaaaggaagggcggcaagtgcgctggagacggacggtggcaggggagggggcattgatggagatgtggaggcagaaccgtgcaccatatcctgtgaacgtctacactactgtcttatatagtagtat

SEQ ID NO: 16487 - DNA, 548 bp, Zea Mays
taaaccataaaatttacgcagactcagaattcctctgctgtggactgcgggttgaataatagagatcctaggggctctatagcaaatgatctcgggcaaagggagtatgagtggattctggccgcaggatcacaattcgacggtcacaattagatcaaatcacttaacaaaccggtactcaacatgagctcttggatctggatcccatgaccagaaaccatcgacgctggtcactaatctgatccatcgattgaccattcaacggacacgattcttccctgagcaaaacgccacccagttctaatctcaagcgttcacatctcatccaacgtccgaagcgtatccccttaccctccggtcgagcagatggcagcgccatcaacgaacgcggccgagctccaccgggaaaatcctgatctagagcccacggttcccaaaccccgatctaattagctcaagacggagaccaacccttcccgagcaccttaaccatgcatacgcagttcgtgagcaccccgaagtgcccaaccccgacgagacacagcccc

SEQ ID NO: 16488 - DNA, 976 bp, Zea Mays
tggtatctagctgactaaattactgtattcaatcgctcttcttccaatacatcaatatcctctagtctggtagtctctgcctcagctatgttttcgaagaccagccttggtgccccaaacttgaggttggcaggtagcactgcctccaaaccatagaccatgaagaaaggggtatttccatgcagagctcgactaggttgagttcttaggctccaaactacatacggcaactctctgatccattttctcgcgaacttttcattcttgtcaaagactttcttcctgagtgcatccagtattattccattagccctttctacctgatcgttagctcttgaatgtgctactgatgcatatttgatctggatgctccattgttcgtagaaatcaaagaattcagagctagtgaaattggatcctaggtcggttatgatgctattcggtatcctaaacttgaatattatatcttgtatgaattccactgccttggctgaagttagagaatcaatgggtttgtattctatccatttggtgaatttgtcaatggcgaccaacacgtgagtgtatcctccctgagctttcttgaagggtccaatcatatccagttcccagcacgcaaatggccatgttacgggtatggtctgcagttgctgtgctggtaaatgctgctgctttgataagaattggcaagcttcacacctctagactaactcgattgcatcactctttgttgtcggccagtagaaaccagacctgaagaccttcccaactagagtcctggatgctgcgtgtatcccgcactgtccggcgtggatctcatctagcagttgcttcccaataaccgaaggaatgcacttcatgaagactcctgttgcgccccttctgtacagtgcatccacaatgagggtgtagtgggttgactgccttgcgatgcgttctgctgcggctttatcatccggttcctcttcgttcttta

SEQ ID NO: 16489 - DNA, 1014 bp, Zea Mays
cgcagaaggcaagagtgagtttttctattcttctccggaaacagtcttgcattggaccatgtgacgtttccactgattatcgtgcagtgcagtgcagtgcatgcatgttccatcaggcatgaatgaatgactgactgactacattctgattgccttgctagctaccaccaatgcaaaagaagaagacagcagcttttctcggatcacccatatgcatgcatggctctggtactatgttattattactgggctccccgttttttttcttcttctaatgatgatggaaaattagggtgtagctatcttgttgggtgcttaattaggcaaagaggagcatggagtactagattccatggcgcaccagctagcgtcaaatccaggccccatggatatgtcgtcgtcgatgcttttccgtgttgccgcgtgacgatcgccaacaagtcccaggagccggttcggttccagggacagctgtcgtcccagtagaggaggggactcaagagagagtgaaatattcacctcagtctagagcagtagagcctttttgtcacaatgtcacccacctgatcttcacttgtgacaaaatccacgctgattaggctatattggctacagattcatgaacaaagtgatgcttcacctcgatatactcgctctgcccatgaaatactggggtcttcttcaacattgattgacgtgtctctctccttatacctgagatagccatattgcttgacatttgtagcagtgatatatctaccacctttttgtttcatggattggaacgtaactggaatattggccattattccagatgtgcttttcccaccatcaacatcttcagcgaaccacaccagtgttgttgggatcctctactaacatctacgcctggcccccttcttccttccaaaccaccaaatagcaaagaattcctccccaaaaaaacaaatgcaagatcggaacgaatcagcctgaaagcataagcatacattgaggctgacccgtcgtgacgca

SEQ ID NO: 16490 - DNA, 353 bp, Zea Mays
caagagcagcaggcagatcgccaatcagactctggccccacctgcaggctcgcctcctcccctgaggcgggcccgggggccactgtcagtaccctcaatcaggggtaccttctgctactgtataaaggcgccgcacctgtgcaacgccttaagaccacgtagagaatggcgcccaatgggcaggtccaagagcgtcgcgtgacaaggaaagggagtacatcctgatgttcatcgctagattcggacccccgcagaagaacaccagacccctatacatacatgtccagggccccaagaaggtatgccggatcccttagaaggccccagcgttggcaaggtcccgggacgaggag

SEQ ID NO: 16491 - DNA, 406 bp, Zea Mays
cgaaaggcggataggtattgcttaatagcttttaactttgttgtttatttttgtgacttcaaacttatttacgttttctaccgcagccgaactatctcctcccctagagcccttcgagtcattggtcgacccagaggcaaaggaatcaacagaaattattaacatggccgaaagcattatggacgaagtcgttactcaactgctgaccgaagctgcagacaaagttttgaaagaagaagaatatatattataaaaatattgctagaatattaatgtaacatttgctggactatgcttgtaatatttggtgctcatgggttcttaatgtaatgtataaatggctttgtaatttatttctttgcgatgcatgaaactttttatgtacataccgtttttaagctttcgg

SEQ ID NO: 16492 - DNA, 325 bp, Zea Mays
atcgaatcgatccaaggggcattaccgatggctgggaggctgggtgaagctgtccatgcggcacgacgggttcatggcgtcgctgcgcgacggcgagaaattcccccgccagcacgcaccccttcgttcgaaaatggccatgtacatctcccacatggtttgccgccccatctggaactcccatcgaggcaacatcgctagcgaatgcgcaaaacgacggtggcggtgaatggcgcgcggcgccgaggtcgggtgctccctgtttacgagctccaaaggttctcggatcaagggcacgcgcgcacgcagtccacacaggttgatg

SEQ ID NO: 16493 - DNA, 347 bp, Zea Mays
ctcgggctctacacagcccacgaaatggtatgaaaacaattccacttaattatgcttcttgttgaataactacgttacatagatcgccaaatctgttcctttcacgtccatcagcagattaggcgcggagaagctgtagctctagtttccttttccagaagcacgacagattaacacacacaagagacatgatatagggttgagcctttaacctctttctcttctctattccatatgaggggtataaattctatatatagagatgtggtatcccttaggggtatattcagtatgagcccaccaaaccttagagttaggtttcttaacactcccccttgggcgaatac

SEQ ID NO: 16494 - DNA, 324 bp, Zea Mays
gcgaagttgaattttagtccggcctaccatcctcagactgatggacagaatgaagggactaattaggtgttggaagacatgttgagagcttgtgccctttagcatggtagtagtgggacaagagtctaccttatgctgagttctcatataataatagttaccaggccagtctgaagatgtcactgttcgagactctatatggcaggaaatgtaggattcctctacattggatcagactggaggaagacatttttttggatctgaacttattcaagaggtagaataacaagtctgtataattagggagaacttgagggtagctca

SEQ ID NO: 16495 - DNA, 1033 bp, Zea Mays
atactcagtaaaaagcagattaatcaagtagccaaagaggaaagagaggcactaaccaacatttgtcatctccaactcagatacccgccattgaagtaccactgggattccaatgcatcagagacaaagctctttctaggacagaaatcaccctgtgatctcagctgatcagccatctcgtcaaccaaagcctggtattgaaaacaagtgagtgcaaagacaatatttcgcccgaagtatagccaaatcaggaaaaaccaagttacctgaagattggagaagaatgaaggaagccccaaatcatgagaaaccagttggtgactcgatgagggaatatcagccgaggcaatctgaagagcatcattggggatcaactcaacatcattagcaggaatcaaaactctagcgttgggtgtgccggtctctaaggcgacttcctggtttgaagcacgtgctgctgccatgcaatcagaatgtggaggagaagacccgacgtggacatccatggaggtatgagaaggggagcccgcttggacaccctcgggggctgggtcgcagcctgcattgcccacccgagccggatcattgttggcaacaccctcgagggctgggtaatcgctggcgccatccttggggaccgggttctctgcagcagccgcctctaaggctgaaggattctcagtcaccttcatgggaatggagcaacctagacgaacttcttgactctgaagaccgcactccaaggtcgacgaggcacgagacgctgctcgggataactctaaccccacatccggaatgtcagtgcaaacgtccatcataccaccatctgttggctcggacaacagatcttcaggaaccatatcctcgagagcctggtcaaaatttgctatggacaactcttgcagaccaacgagagcagacaaagctggagaaggaatatcactactccccccactgactaggtaacgccgactgtttttccgaattaaggggatttcctcctctccttcctcatcctcatcaacaatactaa

SEQ ID NO: 16496 - DNA, 521 bp, Zea Mays
tctggtgtgttttgttatgctgtgctggtgcgattatagtcggtcttggcgtggacggtttgatgttgtcgtttctgcttttgttgtgctagtctggttgcgcccttaggtgtcttctgcacggacagtcttcgcggtagactttggttttttcgcacttgttgtgctagtccggctgcacccttaggcgacttctacgtggatagtccttgcggtggactttggttttttcgcacttgttgtgctagtccggctgcacccttaggcgacttctgcgtggatagtcttcgcggtagacttcggttttttcgcacttgttgtgctagtccggctgcacccttaggcgacttctgcgcggatttgtcgcacgcgagggtggctagcgcttagcctcgcggtgacctcgaattggtcgaatgtcgaagaccgtcgtcgcggtcttttttcgacgcatgcttttgcgggggatttttcacacatatattacatggctccgcctcgttaaaaacctcaccccccgg

SEQ ID NO: 16497 - DNA, 451 bp, Zea Mays
caaaattttatgatagctcttattgcattttacgcttccactaaaaagcaagtgccacattcgtcgttacaaaacagatcattgatttacgctaaaatttgtatccatttgcgctgtttcggatcacgttttacgcttaaatccacctgacctagaacccgagcacgatcggagcgcgattttcacgtcataatttaggccacattcgtcgttacgaaatagattgatgatgtacaataaaatttgtaccgatttacgatgttttggttcacgttttacgctgaaatttgaccaagccaaaatccgtgcacgaacgaacgtgatcaattttcacgccgtaattttcggaacccattcgctgttacaaaacagatatatgatttacgctaaatttcgtactcatttacgctgttttagctcatgttttacgctggaatccgcccgagcagaa

SEQ ID NO: 16498 - DNA, 329 bp, Zea Mays
ctgccataagaatatgaggttcgttctgattccagaacagaacagaaagaacaaataagttgctgttaccactgtgcctaattatcatcctcactgaaagcagcagggcaaaacataaatttaatatgaaagataaaaacatagagcaaagtagataaactaggatggtaaatgacaaattctgtgaagtttccagtaaactgatgtttcttttctcttcttttagtgcaaatgatgttcttaaagtataagaaggagaccatattatacctaataagaaggaaaacagagatcaggttcagtgtaagcagttgaaacatgaaagacta

SEQ ID NO: 16499 - DNA, 446 bp, Zea Mays
gtcgatgctgggctcgtcggtggaggcgatggggaggacgaatctcgtggggttgcctgacgaagcgaggtcctcgccaccgaagaatccaccccagttgtcgtcgacgacggatggtcttgtgcggtactgctcgccgtcgaagcacccgccccaattgtcggcgacgacggatggcgacccgtagtactgctcgctgtcgtcgaagcacccgccccagttgtcagcgacgacgtcggccccaacatccacagacggggtctcgagcgcgtccgcggtgacggtgttgagcagcgcgttggggtcggtggaggcgacgagcactttgacggagtcgtccatggctccagagttggcggggcctaacacggtggtgttgttgaagatgagcgcaaatgcgaccgatgggtcatcctgcggttgcggctccatcgacggcggaggcg

SEQ ID NO: 16500 - DNA, 590 bp, Zea Mays
cgggcaggatagtaccgggagggtgaaaagatcgggaggggagtggatttggtcgcggggtgaagcttatcaaccacgcttgtagccgtgcgacgtggctggaccacaggtgccatcgtggaactctagcaacccagttacgccacgccttagttctttaccacgtagtagtaatcctggcgcgcctggacttaccatttcaagaaccgttgcacctgcgaacgccacgactgagccactagtgacctcccctctctccggcagccagcgcgccattccaaaattaggagccactgccctgggacactataaattgagcataccgctagctctgttaggtcatcacgaagccaaagcacccgctcctgcctctgattagtcaccagagagctctaatttctttctctccccaaatcagttttctgcacgccatgaaccaccgcgtcgtggctagccttctgcaggttagctcaagcctccttgattgatgttctagcctccctcaagttctctggtactcatagaccttttggattcaactaggtcgccctggataacccagaacacgtcggtgtgttctcagttttcgc

SEQ ID NO: 16501 - DNA, 622 bp, Zea Mays
gcaagtttggagatgcgcagtgggaggaaggccgagtacctcaacattccactcaaggacaacatcaaagactggcgctcggaatggtttatcatagagaatcacgggaattccctcccccctcggtcagggagacagccagatgttcgcgctcccagttggactgaatcccccacagacttggagatagctgtggctagggttctgcttgcagaggttggcttgttgaaggagaagggtctgactgccgaggctgtggtcgccgattttgtttttaagaacattcagccgctgaaggatagagcgtacccagcttatttgtatcatggcctcactgattcgacccgggttaccaacagaagggttcctgctgcggatctggtaagccggcttgagatgatactcagatgcaaggtgttgaatattggtgctcctgttgcatattcagcctggaatctgcctccttacaaggctttcattagttttgtgtcaaatcctcatgatggtgacagtggcttgggccttagagtgcgaccttctcccaaagaggttgaggctttggttgcttcacttggtgaaatccccgatgatgagaggcaggttcattttgagatgcctttga

SEQ ID NO: 16502 - DNA, 1042 bp, Zea Mays
ccaggtttgcccttaaatttaggtgtgacaaaggctcatgattgtgttggtttgttatttttcaaatcttgttagactttctagtattataagccacacctagtcctagttactagactggctagctctaaacctctagctaaggaggagtttcagtgttcaaactccacttgaatattgttataacacgccatcctattcacaaaactatggttggtagcccctcttggtgacagcaagagtgtggtatgtgtatcctgaccccgtcatctggtaggcccataggggatagcttgatttttgtttggtgtgccatctatcaccccctaggcaccctcgagacctcataatctcactcaaagcaagaccctaccttgtgtttgtttatcaatatgttaactatgaataatcctttgccgagtagtaggaatatagttcaaatatctatctcgctcgttgttttcccaagaaactttatctagttactgccctaggttcccaatttatttcttccgcatatacctagttttgctactcttggattgcacttacccccatctaaatactagtgtgtatatttttcaagtttacacttcatttcaagtttgagttagtaagttcaactctagcctaccacttccatgtggagattatgatacatagaatacatctagtgaaaggttatatcggtctttgtgcgcttgcaaagtaaactcaaattggcataagaaccaccaatacttgcacaccacaagccaagagacatgttgaacaaacacacctacacctcggttagtccacatgactcaacccaagatgctacacttgatgtcaatcactcatcacagcccaaaatacaagggtacatatcaaacttgtgttcacatcaatgtttagagagattgctcaataattatcttaatgtgtgtcttgatattatcgttacttttatcgaattttgaattcaacgtattcaaatgcatgagaattataaggttagcatgttgaatcaacaaacatatgccttttatgttggtgaaca

SEQ ID NO: 16503 - DNA, 470 bp, Zea Mays
caacaattttttccgccgaagctgagggcagggtcttttggatagcttgcattacgtccatcattcgtcgtttcttctgacccctggcatttcccatggtagccgaagcagtctcctttcctcccgagctttgttcaaatcccttttcctttgactacaataggctagtcagatctaaccccaggggacttagcattgcaaacgggaagggttcagtcattaccttaagtatttctgaaacatcaacacaagaagatggagaaggtcccacagtctttcctggtacaacttgtaccttcatctctgcagcagccatcctgacaggctttcgctttttgggagccaaactttctgcttcttaacagccctctgatcttctttgacggaccggatagcctcccttttcagaatactaacaaccctctttctcttcgctcccacggccccttcgtcaagcctgtcgtaattag

SEQ ID NO: 16504 - DNA, 984 bp, Zea Mays
gctagacctagaggtatccaaacagggtctaagtaagtactactcgaacagagagattctaggagcaagtccactctttctccatggataaccaaacccacaaaaaataggaattgaaccgttatgttctcgtccgctcaccaaccaaacacatctttatagacttttagcaaacccagcgcatattaattacaacggctaaatttagctgacataaattagtgtgcccgacattgatttggcttgttcttgtagtgattagtagttgtcatatcctagttaatcaatacattccactaacaacgcatattaattgttgtcgcatcctatttaaacaatggatgtcgctaacaacgcatattaagtgttgccacatcctagttaatgaacggatggtgctagcaacacatattaagcgtttccaccaccctaataaattaatggatgatgcttgcaacgcatattaagcgttgcccactaatttcttacaacacataatacaatgtgttgctacggatgtgttgctatatggggatttgtgttgtagtgttacgtctaaataggttagccaatcgaaccctattatcctccacagttaaacacgtacggctgttgtgaccatcaactatgccacatttctggcacttcttgctcatcttcttagctcctttcgcacccaatttaagaacttgttgctcactacttttgattgttcttcccttaggcttggccttatctggtcttgctaagtttacaccttccatatgaaactccagtttctacaaatcaaagatattaagtcagttttcatattcacatattcatcatatactgtagcaatgttattacctttctagcttccacatccgtagcaccactatcaaccagacgcatatcagtgttatgttccaatgttaatatcggcatattacattgatcatcgttagcattgcattcatttgtattagaccccattaaaatttc

SEQ ID NO: 16505 - DNA, 614 bp, Zea Mays
tgtactatgagtcattgaacacaattgatgcaattcttggatatgtgttctctggctcagtcaaggacgaccgaaactgagtctatcatccttaacagaatgtgccctcatcaggggcacaactctagcgtatctagttgtggtcttcggtcataggacaccatattaaaggtgcagggcactagcacaaaagccaatgcttcttgactccataaacccaagccgtcatattccctatgtctcgatcacctctagcacccttagtggctagatttggtcttcctatggcatcgattgagccaatgaatcccatgcaccgtccaacaatgtaccaccgacaaaccctaacgcataaggagaacaaggaataaagggaggaccctaggccccgatcacctctagcgcccttagtggccagatttggccttcctatggcatcggttgagccaatgaatcccatgcaccatccaacaacgtaccaccaacaaaccctaacgcataaggagaacaaggaataaagggaggacactaggccccgatcacctctagcgcccttagtggccagatttggccttcatatggcgtcggttgagccaatgaatcccatgcactgt

SEQ ID NO: 16506 - DNA, 624 bp, Zea Mays
acattatatacctaaggttatacgggccatgtgttgggccgacatgccaaagaaggcaagaaacttgtacttcgaggctccatggggaacccgcgggtggggattgaaattcgccccacacttgttcctattcggggccccaaacctgtggatccgcggggataaacgtggacccgcctcagcacctatcgggtccaaaacctatgcggacctgccctgaacccgcctcgctgccatccctataggtgtgcggtctgaatgacagcgcgggagttggtgtgtcaggtcaaaggcgtcatttgccacgacgtggaccttgtcaacagaccaaccaccctgtcataggaaagttaactaatgacgatgagtaatccgctgcatgacaagatggcacataactacaaccataacttcgctacaatactctgacgaaagaaagaaagatcatccacagaagtccttcggttacaagaaacctagaggacaaggagctacgcgacaagacccgacccctcctcccttcgttcaacctctcgggcatacatgaaagtcaacaaaggacgatgggtaatctgctgcaagacaagacgtcacgtaacaacaaccacaatgtcgctattgtac

SEQ ID NO: 16507 - DNA, 454 bp, Zea Mays
ggctattcttgcgaattagtggaacttcttcttcctcttcttcgtcctcgtcaaagatacggacaatagatggtgcaggaacacacccattagggtcaacttcaacagaaacacacccattggggtcaactggtgcacagtcacacccattggggtcagtttcaacaggcacaccaccaatgggattaactccagtaaaaaccactgctgatacttcttcagagacaggaacagaaggtccagcgtcctggtccaagcatgacaatcaccaaagtcatctcttcttcttctcctcctcagaaggtgcagttggacgactgacctggcgaagacgctttgggtgagtaccctaaggcttttaggtttccactgttcgatcaagctctggtataactgcaacaaccattgtttcagcaggggccgagtcagaagactctccagccaacatatcaag

SEQ ID NO: 16508 - DNA, 640 bp, Zea Mays
acaccctacaatacactactctacttctattacaccattattcctgcttgccattactcttggcggcctcatcgtcaggtgtgggagtccagacgtcaaccaacctcaaagaaggaggaggctcaaaaaggtctaactccccacctagtgcacgtcccgcaacgtgagatggtccggcttccgcctcagcagggtgtgtaggctcactagggtgtaattgtgagtatagtatatggacttcctcatgcaacgtattgcagtaaacctgcaggttgtcgacagttgtgttaagttctttaattcaggcctgagcccttgcttccttagcacatattagcaaacgagactgtacggcccagtcaagtgctaagtctcgatcagcgagctgatcctgcagatgttggatgtcccttctcagttcattgattctatctccgtcggcgacccaagcatcggtcctgtgttgaagcgctgcttgaagtcgattcactcgggcttcaaggtctccgatggggtcattacttccactgctgctgctttcatgtcggggagccaattgatgccaaggcaccccaattggtcccgtagacttgcgtgccgttagtctggtgcgtggcggcatctttttaagggggaaaat

SEQ ID NO: 16509 - DNA, 382 bp, Zea Mays
aaaccagcagtggtttatggtcggatgtttgcctgggtagagtggtgagggagttggaggggaaggaagaggtgtgggagttgttcacaaaagctcgatccaggcgagctaatgtgggaaccgagcgcatgttagaccaggtgaaaaggtagtcctgtaactggagttcggcaacgccaaggcagtcaattgtgctattgaacagggagcaaaggtggttgtccaggtggccctggtttttgtcagcaacgcctctcaacatgttgaagtcaccgaccaacaaccaggggcctgagatactggggaggaggtctgcaagttcaacaaggaaggttggagagtcttggtggttggatggggcatagacgttggtgatggtgag

SEQ ID NO: 16510 - DNA, 516 bp, Zea Mays
atccatgcaaggcatcggtgcttttgttatgaaggccaaagcaccgggagaacaagccttaataagttaatgagaaccccattagaaccaattgaactcacccaagaggaggggagtccaaatagggtttagggttagactgcacatgcagatacaacatgtgcagatggtacatggaaaccactccaatgacacttcaccctctggtcgttacttatacctctcagctcagcaatataagccagtgaatatggctgcttgccagcggtatggcactacaaaagattttcactgcgccagaaaaactgcactgcactgcgggtgggagtagaaatgggcctgcacgttgggccacctgcattgcctacatctgcagaacacatgattcacgctcgagcacagcacacaccgaaaaggcgaaaacccttgacctcgtatttgggctacttgcgcacaccgagcacagcgggtttatttgtctaatgataatgtttaatcgttttcatcgtcatcgtc

SEQ ID NO: 16511 - DNA, 435 bp, Zea Mays
gctccagcagctcaccagatgcatctgctccagactggccactgaagctcctgctctggtacgtatactgtattcatcggcagcgcagaggaaactgtttacatgcatatgcatggggtcgggtcgggtcgtatgtattcaacgtatgatagatgtttgttaatcacagatcgaatcaaacgccgtcaaccagaatggagaaaccatggacaagattgatgccctagacaggatggttggactcgagatgagagaactggctcaatgtgttttccgcagcggtggcagctccgtggatagagagacgaggcagacgtttctccatgtgaccaagagttactactacgttgcactctgctcgcctgaaacagttgagcatcacatctccaaagtcttgtttgaggatgtcgtctagcaacgatgtttatattagag

SEQ ID NO: 16512 - DNA, 447 bp, Zea Mays
ttgaagtcctcactcgaagtctggaaaaccagtgcccaggtggtggaaggccacaggacatgatgggagaatttttaagactcaagcctcccacgttcgcggggtccagcaatcccctcgatgcagatgactagcttcgcacgatcaagagaaagttggaagccattggatgccccgaaagtcagtgtgttcaattgacagctcatcagctttcaggaatggctttagcatggtgggacactttcagtgaagccgtcagagatgctacctgggcagaattcgaagcagccttccgtgagcaccacgtaccccaggggatagttcaactcaaggaggatgaattacgggagctaactcaaggcgggagaacagttagtgagtatgtgcacaagttcacagagctggcccgctacgcgcctgaggatgtcagcaccgagtccagaaaga

SEQ ID NO: 16513 - DNA, 568 bp, Zea Mays
ggaaaagatagctcaactctgaaagcactagccagacatgctcagggacatagcctcgaaccatcgcaggaagaattcgttcaatccatatgtggaagtcatgactcttcatccctaagactcgcatagtagataagttcaccccctactcaggttagctgcatacccatcagggaacatcaacatcttgatccactgaagtacttccttcctctgggccctgcttaggacaaaatcggccttaggccttctccacgtctttccgccacttggcggcttcatctctaagtgtggtctatcacataacgctaccaaatccactcttgccttcacgttatcctttgacttatcaggaatattcataatcggtgcccatagtgcctcggcaacattcttttcagtgtgcatcatgtcaatgttgtgtggaaggagcaggtcgtcaaaataggggagccgagtcaagccagacttacgtgtccacatatgcttttcaccatatcccacaaaaccaccttctgtattggccacgagcccatctatctgttgacgaatttcagcaccagtcatc

SEQ ID NO: 16514 - DNA, 942 bp, Zea Mays
agaagccaagggctagagctaagcgcaaaatgcatctgcaacatgcacgagctattgtatgagacgaaggctactggaaagaagcagtatcacaacaactttggttgttatggcttcgtgcctcactctgatgtgagttatccagtttcgacgtttcgaaaaaggtggccaggggcctggatggaggaatggctttatgtaaagaataatctgattgaaagggaggacataaaggggattattcaacgccctaattggtcttagcttcggcatcacgagaccgactactgcacttgggaacgatattgaagcatgccaaaaggctttcaacaatgtttgcgcctttattggcataagagacctagtccagaaacacatagcctacagagtatgacctcttgtgaatgactaggagatgccgaaggaagctgctgccgggtctagtcagggtggcctggtctatctaaaatataccttcagatatagaggcgagtttgatgagccaaacgatgagtggttgagcagtattgaggcaaccagtgacaaattgcttggggcctatataagggccaaagatgatgcaatgaccttggccttcgaaggttgaggcaagaaaaggttgaatagagttttttacgtcattggtttcgtataccctgattatagctatccctcgtgaaagcagggaaagaaaagaaaagctgccacttcggccatttctactgtgccaaagggtaaaaagatcaaggttttaacgcaccggcctagatacattgaaacggccacagtgtcgaagcttggtgaagggacatcttctattgctgaggcagaacaacctgctcttgccagccccagggaataattggctgaatagccgaaggttcctgtaaccaggtcggtcgaaacaccaaaacatgatgccgaagtcaaaggagaggcagc

SEQ ID NO: 16515 - DNA, 547 bp, Zea Mays
gtgttgtgttcctgccacagtgtcgctgcgtggaaaaatgccttctgccgtgtcgaacagctccccccgatcgatttccagtcagcagccggcccgagattggtcaacgaacgaaccagcaggcagcagcaggagactccctcagggcaacaggagaatccacaaaacaacactactttgagacggcgtttagaaaacagcaactattttgagcgttggatcgcaatctgggttgacctgtgccgcatcaggatgtgacgtcttgatggcttttgtggtacggccggtgctgcaatcgaggacgaggagcgagctagcagaaaggaggttcaggttcaggcttgcagagaacttttttttatagcctctcctgccattttggcctctctagcaagcaaaacaaccagccgctgggggagatgcatgcatgcatgcgatgcgatgcgagcgcataaatgcctgccgacgtcgagtctagcactgcggcggatctcccgtctccatgctgcatgcaatgatacattacatctttcctgcctgctgcctg

SEQ ID NO: 16516 - DNA, 280 bp, Zea Mays
gtcagcacagccctatctgttgaagcaaaatatgcaggatccagaaagaacaagggatttggtggtgagaagactaatcagggccaggcaaaaaggcaacgatttattctccggccttctaatcagactcctccacgtgcaccaaccttccctttcaagcagccgataattattcgtcccaacaaagcccccactgccccaagtcagccgggtgccccaggcactcgattccctgccttgcctagctcttcaaccggatgttttaattgtggcaagtctg

SEQ ID NO: 16517 - DNA, 933 bp, Zea Mays
ggaaatataagtttatagtgtaattggtgtcattgatatttccgtgttcaaccgtcttcgcccgcaggcttcgggaccgtgccattctgcttctaatggaagaactggtcttcctcggttcttggatcctattcgtactggggtggctattggtagcagactctataaccgttccaattttcaaaatttgaaatctggtcggtctcgtccctgcaacctgcaatggagaccggtgcgtgctcgcgggccggctgggccgccgggctctaagactttatgttgtaagttctgtaagggccggggacacgtggatcctttttgtcccagcaagttcacttccttcggttctcctctgacttcgttccctgcctttgggagtcgggcccttttggtgggaaaccaaatttctcctgatcgcagttcctggtttcgcacaccggatgtttctctgtccggtggaccgcccactttcagttgcttcgaggagttcgccagagaagtattaaaaaaatctgaatcggcacctcctccgtccctgacgctttctctgggcgtcacttcagcaaaaccccaacttgctccgtcttcgcctgctggttgccgatcctcgcctcctgctccgatggcgtttaggcgcgttgatcctgaacccttccttcctccgggcttcagcgcctcggtggtccttcaccgggaaattatggccaggtcagtttctcggcgcctcccgccattgcatgaggactgggctatcatcagcatccaacctttacctgaccatgagattgctttcctggcggtgagggatgtggttagagaataccttgtggagcaccgtcaacttggggtgcgtgatatccagcggtcgcacctgggacaagttttggttcagttcagcagcattcttgaaagagacaaccttgtccttctcgg

SEQ ID NO: 16518 - DNA, 524 bp, Zea Mays
caaattcccatgtaaaccagatatgttctcttgtgtatatatgcatccatggtaatgcaatagagcagttagttcactgcagcagcactctcatgcagcagcaccagcactttccttgtgtgtgtgtgttctgtgctcacctcactgttcctcttctacctctagcctagccaaagtgttgtgtgtgagtttgagtgaggtactcacttgtgtgggccggcttgatcctaacacatgtgagcttgcatgtttccttgatcagtacagtttttactccttatgaacatcttgctgcaatgaactcacctattctagtcactactggtcaaatggtcctgattggtatgcatggtagtagccattctttaactggacatggaatcagtctcttagtctctgttgagatggtacactaaacatattgtcacagtagctagtaaagctgtggtgcttatgcttcttatagttgaatcaaatgaaggagatactagtcttactgttatgatacactgttactgctgctg

SEQ ID NO: 16519 - DNA, 639 bp, Zea Mays
aatctatccatgatgacccaaattgaatcgtggtgtcgggaggtattgggcaatcctacgacaaaatccatgcaattatcctcccatttccaagatggtatgggaaggggctgtaaggtgcctgctaccttcaaatgactggccttgacactctggcaagtgtcgcattcagatatatacttagtaatttccctcttcattctggtccaccagtacaaagatctgagatcatgatacatcttgttactgccggggtgcatggaaaatttggaaaggtgagcttcatttaatattttctttctgagcttggggttcttgggaacaaccaatcggtctccaaaccatagaatccctttgctgtcctgacggaaacatttgtatttttccaccttctgttcgatcatttccttaataacttgaacacccttgtcaccaatctgtgccataactatttgctcatgtaaggtgtactccactgaaatataacttaaagcaccggaggaaacgacttctatgttcagcttgcacaactcatcacatagggtggtgatttttgcatccatattcatacagttgcactgggctttcctgcttaaggcatctgccacaacattggctttgccaggatggtaatgcacc

SEQ ID NO: 16520 - DNA, 574 bp, Zea Mays
gtgattgaatgcatgggcgacctaatttcattatatggctttgggaccgtgtaagtctcaattatgtggctctgagacctcattttagttaactaatattacagaatttgctaatgctttgtggcataattgacagtttggggaggaaatgaatttgaatgatgacttacgtcagttatctattggaagcgtaactgccaaaagctatggacgttacgacgttaatggatatcgctttcgttcaagcattttcgaatctagtcatcctatggatgccactcaaaatagtggagtcgttactagggcaactgacatagaaggacacgaagcctgctattacgaaaaaatcaaaaatataatcgagattacatttgctggacataagccttaagaactagttttctttgagtgtaaatggtatgacccgaagtattataggaccaaatttgggatgacacagatccaacctgaaaaattgcttcaaggacacgacacgtatatccttgcccatcaagcagaccaagtttatttctcgacatatccatgcaaaaagttgtctacatggagggttgtg

SEQ ID NO: 16521 - DNA, 491 bp, Zea Mays
agcgcggcagagcagaaatcccgcgacggcgccacccatggcacatcgccggagtggcccacccaagctaccctgatgccccaaatctaaaacgaataggctgtaaatacttcggggaagacggcgaacccatgtgcgtacctcactcccaccacagcgatgcagaaccatcaggccatagtggagggcggtcggtggcaagttttgaacgccgatgagcaattaccccccatctgagcacgaatccaccccaagcaaagcctcgaatgtgttgcgcatggcatggcgaggcatataggcccgattccgatgactcgtcgtcgccatgtgcttgaatcaaccgcggcggcacccttctttggttcttggttcctctctcttttcccgggtgaacgacgacattggctggcttatattgcccagtggcggagaccggatgccgggtgattgggagggttgttacgggtctgatcgagattcctggaatccca

SEQ ID NO: 16522 - DNA, 314 bp, Zea Mays
ccgccgccgcaatggaaggtcgtccgcgctgtggatccgcaacctcaaatcctcctagatccgcgcctcgcgcgccgccgcctgcactcgtcatgcgcccgcctccaccgcgttgattgcggcgctctcgccagaaccgcgcatacggatctccccgtccgaccacagacctccacccacacctcgcctcccctaccccgtccaagaggaagagagacttgatggcgtccccccctagcccttccccatccgagatcggcgccgccatcccctaccaatcctactaactgccattgttgtttgccagggacgtc

SEQ ID NO: 16523 - DNA, 700 bp, Zea Mays
ctggcctgggcatttgaatatattcatctatgtcatatttcaaaaaaagagattattgtgctcaaattggactttgaaaaggcttttgattctctagagcatgagttcattcttcaggtaatgttgcacagtggcttcaggcccagatggatgagctggattagggatattctccggtctggcacgtcttcagttcttcttaatggtgttcctgggaaaacctttcactgcaagcgtggggttaggcagggagatcccctctcgcctcttctttttgttctcgcggcggatctgttacagagcatcataaataaagcgcgacagcaagacctactcaagttaccattggccgagaattgtggtcaagattttccgatagtccaatatgcggatgacacactactaatattggaagcttgccctagacagctcttttttctcagagctgtcctgaactcttttgcaacttcgacggggttgaaggtgaactacaacaaatcaagtatgtaccctatcaatgtcagtcctactaaaatggcgatccttgcaggaactctcaactgtcagataggttcaatgccctttacctatcttggtgttccgcttggtctatcaaagcctaaaatctgtcacttttaccgctcattcataggattcaaaagagattatcatgcacctctgccctcctctcccaggttgg

SEQ ID NO: 16524 - DNA, 358 bp, Zea Mays
cagtgagatcggtatcgtgagatagcgcagagagagaaccaccatcgaccgaggagaggaacatagaaagctggatatggccgccaccgttggagtgagcatcgatgttcggatcttggggctctagcaagcatgaggggagggatgtctgcgttaacacatataatggttgttttagatgtatcttctttggtcatgaagatctgattatataagacattaccatcaataaagctaatatttctattttttgatgcattattaatcaacatgtcggctatatgcataggatattcatctttacgatttgatctatttaaattgcagaaatcaatgcacactcaatgcacactctaag

SEQ ID NO: 16525 - DNA, 464 bp, Zea Mays
gctgcatgcgcagaggcttctcttgatgcagagaaaactagctctctgaaagcttatttaataacaaatgttgccaaggaaaaagaataagaggaaatcgaagattctaaggttgaaggtttaacagaggaaaagacttcattagcgcccggagaagtgctacccacacctcgcgaatatattatttgcggcgcttcgggtggaaagctgacttctaaacaaattgctgaagttcaggattaagttgaggatttgatgtatccttcgggctctcttgtatacggaggtaatgatgaggatgactatctatattgcctaccggatagcgtagagattgaagtatgtcacgagatgatggataaaatgggctatccgaagcttgaactcggattatctgccatgcctaaggaccatcatgcggactacttagcatataataatttataggttagcatacatttctc

SEQ ID NO: 16526 - DNA, 383 bp, Zea Mays
agcggaacaggagaaaaccgagacgaccgaagtgtcgaagcgttctgacgaagctaaggagaaaatagtcgaagatccagaattaaggaggtcgggagagcaaccgaaaaccctgagcccgccacaagagccagagctgccgaaggtatccaaaattcctgcaacaactccaaaaaggaggaaaatggccagcgtactagacactgttatggaatcttcaagagtacaaacccctgcttcaactcttgatagaaagggtgaaatcccaaagaaatgtagcaaagctgatatgacactagatactgccgaagctggtccatcaactcctatcgaggcatacgcttcaaaaactattcctttgaccttggaagaagaaaatgcgc

SEQ ID NO: 16527 - DNA, 554 bp, Zea Mays
gacgaattgatctacctgccaatccacacaatgggagagtacttagacaacaacaacatgaagagatgaatcctccaaatcctccaccagccggaactgacccactggttgtagcccagatgcgaatgatgcaacaaatggctgatacaatggcagagatgcatgcgcagatgcggcagaaacgccaagaaatgcacctataaaggcaagatatgtgggaggagatgcgttaggagagaatggagaaacagcagcaagccccattgccaccacctacaccaccacttccaccccgggacaagcaccaggaatttatgagccacaagccgcctaccttcgccagctctccagattctctacacgtcgacgactagttgaagttagtagagaagatgctaaacattgcccaatgctccgaccgggagaaggttctctatgcttctggtcgtctgactggtcctgctgctgattggtgggattcttatgttgctgcccatgacgctactgatactattacttgggtggaattcaccacactgttcagaaactaccac

SEQ ID NO: 16528 - DNA, 486 bp, Zea Mays
caactcacagtacatttgttgcatttaaatatttttcttaagagcttcgtgcatttgatttacttcaacattcatgtcatggtagtttccgaactggttgtggtgaataattttaccactgttttagacacacagcgaaccaagataaaatgtgtgcaaaactatacatgtacacaatagacaaacgatgtgtgtgaaaatatgtttagtttgttaataccactcataatccaataaccaaactgattagtaaaattgtgactgaaataggatataaatgtacttcaacatgtggtacgataaaactctttaacaggggtactatttggtactgttttctggttattggaaaagaggtggtctgcaaacagacaaaacgtttgtcttatacaacagtagtcccataccattcctaaaattgagttagtttgttcagtttactaaaccctaaataaaaatagaatagttcccttacgcagacagaac

SEQ ID NO: 16529 - DNA, 838 bp, Zea Mays
taacacaggtaaaggatggagagtagtactccatttttaacaaaatgaaaaattttaggacctataaatcatactacaagaggtcgagcataatgctacttgcgaacaatgaatctgttctacaggggatcgagcagaccactactttgtgaacagtgtatgcccctcaacgcaacacttaatcctagcccgacagccaagctctcgccaaagcaccatagtaacaagcaacagtcatcatgggaagagaactgataaaagagagagatagagcagcaggtagggaaaccataccttttatctaagtcatgtcatcggtattattttatcttaagcaaaatttagggaaaaggcagaattaaaacctgcaacttatatgttgatcgattggaaggcccaatatagaacttgcatgctgctttgaaactttgaaactctgccgcttagcgcgaagtccgtctacacatcctcgcctgctgctttgacagattcctgatgggaaagcagagcatgccaatgaaaaaactgggtagcgcatcatgtcgaaagatgactataccacaaaagcaatccacgttttagagcaatctaacctcatagcaaatctaattataccacaaaagcactccatgcaatcgcctaacaatgtgacccttttgttttaaaatttactgagacatcaagtttaacatctcaagtcgcaggttgactggtttataaaatgcaaaagatagaagaaacacccaaagtccttatccgtgtaacataacaaatatgaaggcacgcataacagcattgcaatccacattttagagcaacagaatagctactcccacca

SEQ ID NO: 16530 - DNA, 397 bp, Zea Mays
aagatgaggtccctttgactcggaagaacagtcggcagtatatcgctagtggggaaagtagtggagttccttctcctgctctgtctgccctcattgggctacaagagttgtccctggcaaactttgatcagactcttgaatacatggttccagaagacctgctatcagagccagcggatgatggtgtgatggaggtttgtgccgatgtgctcgacgccgggttgggatcatcccgggcagcgtcccgcgcttcgtcgaccttagagcgcggtcttgagggtcgggaaactgacttggatcgtcttgctcccatggaagtaattgagggaccatcagccttagaggcggctactacagagaacttggtcctcaaggatggtgctgacacttgcccagc

SEQ ID NO: 16531 - DNA, 492 bp, Zea Mays
aagaagctgaaggtgcttcgaactgataatggaggtgaattcacttctgtgcagtttggtgaacattgtgcaggggaaggcatccagcgacacttctcggcgccaggcacgccacagcagaatggcgttgtggaacggcgaaaccagatggtcgtggggacagcgcggagcatcctgcgtgcccgcaacatgcctggtcacttctggggagaagcagtacacactgctgtcttcctgctgaacagggcgcccaccagtgctcttgatggcataacgccgtttgaagcctggcatgcaaagaagccacccgtgcacttcctgaaggtgttcgggtgtgtggcctacgtcaagaaagtacgcccacatctcagcaagcttgatgatcgtggaatcaaggtcgtcttcatcggctaccaggacggctccaaagcgtatcgcttctacgaccccatcgccaatcgagtacatgtctcccgtgacgccatcttcgcc

SEQ ID NO: 16532 - DNA, 277 bp, Zea Mays
gcagcacagatgaggataatgcagcagatggctgacaccatggtggatatgcacgcgcagatgcggcaggaacgccagaagatgcgccaagaccgagaggatatacgccaggagatgcgccaagagcgagaagagatacgccaggagagaagggagcaacagcaatagcaacagtagcaagcaccactgcatccaccaccacctccacttccaccccgggacaagcaccaggaatttatgagtcacaagccgccaaccttcgccagttcactagatc

SEQ ID NO: 16533 - DNA, 779 bp, Zea Mays
aggaaggtgagccagtacaggggcgtgcggtccaatttttgggtaaatttctgggtcttcatcgtgtattttatggttcgttgatgggtttcctgatggttgatgcacgcctgcttggtggaggcgggaatggtgatcgatgattcgttgggtgggtggggggactggctgacagctgacagctgactgtgtattgtggtttggatggcaggtttagcgtcagtaatagctaggattagggttcaggcgatgctaagattttggggcgccaattgcagaatcactggattgattcatcttttaggggtttcctcgtactcggagtacgagggcaccgttttagttgaatgttgctctggtgtctaagcgccaggtagtcaattttgcagtttcagttggggattgtacgctggcatcagtttttaccttctactcgtttcatctcttaacaactttgtggtttgcagtgggcacaacaatttgttgctgcaaactcttgtgctccgtggggcgtgggctgtgcagcagttgtgcagtttaattgttctgtttatcataatacacaaggagttagtgtttgagcagatgtcaagatgttaattgtttagcagatctctagaggtaaggggtttatttatttgtttttgttgaacatagggtttaagcaggtctaagacttcagattttgtgtggtgacagtcttagggattgctaatttgctactaagatcgggatgcccacaattgtaattgtttttcgatcagatactgttggttttg

SEQ ID NO: 16534 - DNA, 359 bp, Zea Mays
aatgtaggggcatgacctaatcaagtgccccttttcaaagcattcactacacctcttaatgtgaagtgtggcttgatcaataccttggatgttaccttttgtagaggcgtggttgaggcttttggaggatgtattgaatttcatcatttgcttcttcctcttggcaatcctcaaatccttgacattttcctcaagggttttagtgcatgccacggttgttcccgtctcaagcttcttcaccatgtggtcacggttatcttgagaaggttgagcaatgcacttcccttttagttgtgtcaagctcatcttcagcctctcattttcttccttgagcttttgatatgaatcatcgtttgttc

SEQ ID NO: 16535 - DNA, 624 bp, Zea Mays
gcagattttccaactcaacttttgagattaaccaacctagcacatccatgacaactatgaacaacataggtgagagggggtctccctgtcttaagccctttttaagttgaattttttcaccagcaacaccattaagcattacttgtgtggacgaggtagatagcagtccacacagaacatccgtccaaatctgcccaaaccccagtttttgaagaacttcgaggaggaaaggctaggatactgagtcaaaagctttagtaatgtctagcttcaaaaggattcttgtttgtctttgctgatggagaagtctggcagtttgttgcacaatcataaaattgtcttggatgaaccgacctttgatggatgcactttgcctttgagagaccatagattgtagcttatcccccattctgttagctaggattttagtgactagcttggccatgctatgcactaaactaataggcctaaagtccttgacttggtcaccaccctccttttttggaataagggtgacaaaagctgaatttaatttgctaaagtgaccaaatttcctgtcccaaatagctgccaaaacctgcatcacattttccttaatggtaggccagcaagccttgtaaaatc

SEQ ID NO: 16536 - DNA, 776 bp, Zea Mays
ccggacccattgtcgcaaggagctgaggctagagaagctaacaacgaattggcttccatattgagggccaccaagctatcaacttgcataggtgtggtttggtttccattattgttggtcttcgtcacaaaagaattattaatgtttctctgcttgttagcagcatggtcggtattttcctttcttcggtcagcatcctcatttcctccattgtctcgcccactatttggggtaggattaggggttatcgccggtataaaatcttgtgactccggtgtgaatgtaatatcatatccaacattgtgaaacacaacatctgttgttagtggtagttggcccttgtctatgacacccactaataaacggataacccccttccttctgtaggtcagcatatccacttccaaagttgttccaatcatggttccaattgcccaaaaccccagataatgtcgccaagcatggggaacatctgttacgtgtatccaaatttcatcgaggtgatatgcaggcttaacatctccatgcatctaccatttactgatagtgattgtaactccgctcttcaaattatatcctatatcggccatccgcagaagctcttcttcagatgggaaaactgctaggaaggaaccatctccctgaggaagagcctctcaattccagtccacccttgaaagttttgcaagttccgcttggactgccataccttcaagatcacctccatccactttgatcaaagttgttggggctggttctggtacttcaatcttgta

SEQ ID NO: 16537 - DNA, 277 bp, Zea Mays
caggtgtgtcccacttgtctgtctcccatccgcgcttgcgctaacacctagcttgggtagggcacagacgcttgcatctgcaaccaaatatttaatagtatccgctgacgtgacatcatcagggcgtcatggatgacatcacctctacaccctacacagccactgatggttgggccccactccgtataagacgcatctactaacaaccatgggcgtgcgccgcaacagcttgccgcgatccccgcttttgcctggcctataaattcattggccctgg

SEQ ID NO: 16538 - DNA, 657 bp, Zea Mays
ctaaaaccttatagaacagccacacaagaactccaaaacagcaccatatagcaggttttagatttcagaactgaaccaaatgcagtaaaagcactgtccgtcagtacaaccttgagcaagctttctctccaacttttgtgtaggatcaaaccaaagtcacttaaggagacttattcaccataatatgggcttaaactccactatagacaccacatttcaaaactttatggattaggcccaaatgagctccaaaaacagctacaaactctgaaattcagacttaatctcctattcataatctgaaaattcagacacattggcagccccactttgaatcaccttttctccaaattccatgtaactttaggggtgtgatctttaaccaaacttacacaccaatacatgggcttccacctttatatagcactgtttgcccataacgatatggattagccacaaacagattccaaagttgctccaaatgctgaaattcagattctgaattccactaagtctgaaatccacaatttctgacatctttactttttatcagtttttctcttagttccatagagtgttaggtctaggtcacttaaccaaacttatattcctcatatatctctataactttgttataataaccatcttcaaaatttt

SEQ ID NO: 16539 - DNA, 315 bp, Zea Mays
ggtcgtcggtgttgtcctcgccacggctggcgtccgggggtccgcgacgagccgaggtgctttgggtggttgtcagtggatcgcctgtagctagattgggaggaaatcgaccctggggcggctggaattcatcaccgtacacatcgatccgccgcaccgcgtgggtagattggagtactcctggaatcgcggtgagcaacctctcccctacatcgtacggttatcctctacgtgttactaaaattgattcgaagttcgtgcgagtgggccggattttgggcgacaccggccatggcgccaccgcgggcgagacgc

SEQ ID NO: 16540 - DNA, 1093 bp, Zea Mays
cacaacttgtaatgggataactctctattagtgtatataaggccgagggggaacccctacaaaatcatctcatcacataccattccagcccatcctcacctatagaaactgagccatcacaaagctcatcctgtaaccctcgtactccaaaaatcaataccaagccacaataggaagaagggtattatgcaactctaagctgcccaaacatgtataactctgtgagtgattccgacgtgcctctgcacgaaccatcaagtcatgatcaacgacgtcgtcctgctcaaaagcataacgtggataaccccgtggtgcacggtcgggtcacaaacaccaacatctggcgcgccaggtaggggggtgcgacgttgatacacaacgactccatggccatcaccttcaacaccatgatcaccttcaatgccggagagatcttccactttggatccatcgcctgcgtcgtagatcaggagggtatcttgcaccgcataggggacccatccaggaagaaatcttccccagtggcgcaaaaagtggttgcaggtttgctttgaacaacaccataaaaaattccaccgacgggccccaaaacgcaagaacctcgataggttttcgttccgtgcaagatcgcgtcaaaattgggtgggcctagggacgttgtgacgcctgtggctcggccgaccgaggccacacctccgacgtgacaaacttcattgtccacatcgcccactcgggcatggactcggatcactcagcgaagagaagcatgtgcctccgggtctagcaaaaccccgaaggcaccactgacgaccatctcgaccactctgccctcaaaagagatggagggagcgtgaagcaccacaccaggctccttcttcccagacatcctcttcatccagggaagagtggaggatgcacctatttccgacgatgagcccaccatactggggaggagcccccatgcacgccgacgccgaaacagacgccataacgtacggcgtcaccacgaagccggggaatgggatccagcacaagctgtttcctgggacgaagcctctgaagtaggggaatccccctgacgacagagcgctcc

SEQ ID NO: 16541 - DNA, 413 bp, Zea Mays
cacacgattccctacagatggcttggattcaatcactacgacgagtctttcccaggatctaatcagggccgtccaatcccaaatctacggacgtggccccatcttctccctataccagacacgcggcggcgccgccccccgacgcggccgtgactcgccggagctattgcctcccgccacaccagtgccccaaacccgaccagaacagtgttacacatggaagagagctgggggaacacgacggacgaagacttaccgacgattggtgtggtagaagccctggccacggtgacgagtgaaaccgcggcacacacacagctccgatgagcaattaggccccaattagcgcccaatccacctgtgtgagggtcggataggcaccgcggggcatcgaagaaggtactggactcaca

SEQ ID NO: 16542 - DNA, 555 bp, Zea Mays
tgaagaccatccaggtcggcgcagacccctcccagaccacctgcatcgtaggggatctgggagaaaaataggaacccgcgctcgtcgccttcctccaagcaaatgtcgacgtcttcgcttgggagccgtcgcagatgcctgggatccccagggaggtgatcgagcaacagctaaaggtttacctggacgccaggccagtaagccagaagccacgaagacagtccatggaacggcaggacttcatccgagaagaggtccggaagctgttgcacactggctttattgaagaggttcatcaccccgtgtggctggccaacccagtcgtcgtgccgaaggccaacgggaagcttcggatgtgcatcgactacaccagcctgaataaggcatgccccaaggacctgtatccactaccgcgcatagattagattatggactctacttcggggtgcgacctcttatccttcttggacgcttactctggtttccaccaaatccggatggctaaggaggataggaggcataccgcttttgtgacagtagatggactatactgtt

SEQ ID NO: 16543 - DNA, 744 bp, Zea Mays
ctcacctagatggattcgcgatccatgctgccgcaatttctcgccagtggtgaagctgcaccgccgtccgcctagtgtcatggccgggaggaaccactccgaggatttcggtgaggaccatctgcactgctaatccatgtcctcaatttcgtgttgcgtcgtttaatttgagtatgggggtgtggagcgccggtttgagctccctccggcgaggtcgccaccatggccagcaaggtgccgtcgcggcgttgggaggaggaggaattaggtccttggccgtaggattgagatggacgactgggattagaagtagcatttaccccttcgcgtattgaatccaagcctttggcgtctgatcgtgtggatggggtttgagatcgtctggaaccgtggataccgcatccaagggttgtgggttattcctgttcactttgggggatctaatcccgtcggttgatgggcgatcggacgactctgggtccccggtacctcttcgccgttgccgagttgctaaagagcccctggaacctttataaatcaacctgcggcccttccacctttaagattcataacaagcgggtcctataatctttcacttcagaccctgttttctttactaattatacccacaatccattttaattcataataaatgaataaaaccctggaaattgatttttggaataaaaataattcctagaactttgaaaatcaataacttgctcattttaagtccgtttcaac

SEQ ID NO: 16544 - DNA, 388 bp, Zea Mays
gtggcccaaatgtacacctatacggaccaacatgcctctcggttgacccattgcgtgtcgccgtggtgcgcgataggatggccccacctgtcagagtcccgggttgtcgtgcttgcactggccaatgggggctctacttcctgttgttctcccccctcgcaataacctggcgccgaaacgttaggcaccgcggggaagccaggattctgttgcttgactcaccgaaccgacctctcgtggccatatagctgactcttggggctttcgcttctcctttcaccaccacgaaccaccaccgaccgagagatcgtgtaatacccactttgtaagaaaagtctaaaaggagaaattttattcctttatatatggttgttatctatatttgtta

SEQ ID NO: 16545 - DNA, 287 bp, Zea Mays
taccatgttccattgtaagtgatcgggacacggttttcactagccagttttggactgaactgtttcacatggccggggttaagttacagatgagctcagccttccacccacaatcagatggtcaatcagaagtggtgaaccggattataactatgtacctccgctgtctcgctggggatcgccctaaatcgtgtttgaagtggcttccatgggctgaatattgctataattcatcatatcagtcggctctaaagtgctcgccattcaaagtagtgtatggcagggac

SEQ ID NO: 16546 - DNA, 521 bp, Zea Mays
gtgctatctgtttcctgttgatacgatcgcgtggaaccgctgcgcaacaggcaggaacagcagagcatggaaaacaacagcgcagtcatgcagtgctgtgctgcctactgtggcctgtgggtgctgcgtgcactcactcaggctgcaggctggcatcatggcatgcattcagggattggagggatggtgttcggtacgtgctgcggtcatagctgccttcccttcctttcatgatgtgctccttttctccggccttgtgctccaccaccgccggccgccttctcgccgccggactggactggatgatagataattagatatataggcgggcagcgagcactgagagcgaccggtgactgagtgagtgagacctctggggcctggaacagtgcagcgtgacgaccgcgtcgtccttgcttcagttctgagctctctctctctcgccggctcgcgtggtgacgggctccgattccgggttgcattctccattcaatttactcttctcgcgtaacgaactctgc

SEQ ID NO: 16547 - DNA, 636 bp, Zea Mays
gaagccgctcgtgtgtcgaccggcatgcagacgagtgccttgacgagtcggcgattgattcggatcgatccttggcccccaccgcagggagccatggttccagtcatagtcttccggcacctcaactcttcttcgtgtcgtagggcgtgcgagagtcgatgtcgctctgagtgtcgcgtcaggcgttgaggcgatgacctaggtatccctccaggtgaattagcgggaggagatggttcggcacccgggtgaggatttgcatgtatccatcccccttaggtgttgatggcagctcattcgcaaggcggaccgggcgcaccctcgacttgactcacgttctggatggacggaatgaactcgggttgcatgttgcgagggatgggtggatgatcgcgagggagctgggcatggtgccctaccagctcgtgaccacgctcttcggtggctcggggctgacgccgatgagtgttcctttgcatacataatccccgctccacgggagttttgtcatcctcggacgtctcgtcccgagaaacaggttgagttggatcctgtcctccggtggcatggtgtctttggatgttgccttaacgattcccgcggcgacgagcttcacgctgcggggctcctccccca

SEQ ID NO: 16548 - DNA, 342 bp, Zea Mays
gagtagatgaccaagtctctgccgagcaaccccacgaggcggagcggatgactaagtctatgctgagcaaccccacaagcggaatgaacaaccaaccctctgccaagcaatctcacgaggcggagcaaatgactaggtcccatgccaagaaacctacgaaggggaagggccaatccaatgttgctaacccgcgtcagcatgacaagacgcgtcacccccaaaccacgttcgggccacgagtatggtgctgaaaagtccctgtcaaacacaacattacgccaccgcatataatctcaggtgaactcccagttatgtgtaaaacccggtcgtagggaccccagc

SEQ ID NO: 16549 - DNA, 513 bp, Zea Mays
cacccacacgacaccacgcccgaccgcgccctcggaagtgttctacggactacgggtgatgtcgaacacttttttaccactcgctgaggtcccacagcgacgaggctcgactctcaacaatggcgattctctccctgttttctaatggcgagggcaatcagagacttcagcacaaccggacggaggggtgaggggaggactttgttttgtgccccagacagaaggggactggcgcgagccgtttggattacgctcaggaattctgcagcgcaacgagcgcctacatctttgctggatgccacacatcggacggtgaagttgttacggtaggagatagagccgacagatgggccctacccgacagtggcaatactcacacgtgaacgcggatgcaaccgactggcgctgggaccctaagcgttagtggagggatggcgcgggtcggacgggttgaggggaagtgggccacgcgggcgaattggtagtgggccgagcgggatttggcctagggtg

SEQ ID NO: 16550 - DNA, 1132 bp, Zea Mays
cgagtatgctacgcaatgacaattaataagagccaaggacaaaccctgtccagggttgggctttacctcaagaaaccggtcttcactcatggacaactttatgtggccgtatctaggactacaaccagaggtggccttagaatcctgattgagaatgaggacggttcgtgcggggtacagactcgaaatgtggtgtaccacgaagtcctcgctgtcgctgaagcggcagccatactagccacctaatttttcatccatcttttgtgttgtacatagcaatgatatgtaaatactccaacgctgctgctactcagacgattgtgtctcttctcatgcttgttatctttgttttttcttgctgcgtgtacagtatattttgctttgaggtaaaattgttctactaatgtgcagtacgtatactggccttatctacttccctgctgttgtattctctaatgtttatgccatttttggtgtcaacactgcagatgggagacgtgttgattccaagcctgcagtgtgggaacttatttgtgacgatatgcgtccgtgtttctcgtttttgggacttttctgatcctcaggatgatgcaaggctgctacactgtgatatggtgctgctcgatgaagaggtaaagtagcaacaacctctactagcttattgttgcatctcaccagtttacttcagcggtttttccccttaatatgataatagagagcctaatgtgcctttttttactagctgaattgtttctactcttactaaagttgaatctagatcctcaccagtttgcttcagcattatttttccccttaatatgataatagagagcctaatgtgccttctttttactagctgaattgtttctactcttactaaagttgaatctacatctttctatatccagggaaatagcatacacgctacgatatacccacccttcatagagaaattcaggccactcataaaagaaggcagcgtgtacaacatgacatactttcgagttcgagcatcgaacaacttgtacaagccagttccaaatgatatcatgattaccttcacgaattggacaaagttagagcaggttattgagattcctcctgcatttcctacacttacctactccctcac

SEQ ID NO: 16551 - DNA, 584 bp, Zea Mays
gactaaccaagtgctggaggatatgttaagagcttgtgctcttaaacatggtggaagttgggataagagcttaccatatgcggtgttctcttataataatagctaccaggccagtttgaagatgtcaccatttgaggctttatatggcaggaagtgcaggactccactatattgggatcagactggagaaagacagttctttgggcttgaaattatacaagaggcataagaacaagttcggatgataagggagaatttgagaattgcacaatcaagacagaagagctatgctgatacccggagaagactactggagtttaaggagggtgatcacatgtatctgaaggtgtcaccaatttggggtatgaggagatttaaagttaaaggaaagttgtcccctcgctttattagacccttcttgatcttgaagcgagtgggagaagttgcatatcagcttgaactactcgatcatcttgcggatgtacatgatgtcttccatgtatcacaactgaagaagtgccttagggtacctgaagagcagctaccaatggaggatcttagttttcaagatgacctgacttata

SEQ ID NO: 16552 - DNA, 337 bp, Zea Mays
ccgcgcccccgctccctctccagacgccacagacactatcctgggcccactcgcgcgtcaccagacacctcggctatcctcgccccagtttgcgccgcgcccgtcatggccaccccgtccgtggtgcaggcccctctatgcttcgtttctccacagggtgattccatgtcccgctcgcgatggcccctgcactaccgctttcgattcaagggtcgcctcgccgcagacaaagcccacgagggcgcacaaggagagccccgacgtacatgcccctcaattctccctctgccctcttggttccgctctgctctcaccttgccaggcggttgaggtgtct

SEQ ID NO: 16553 - DNA, 578 bp, Zea Mays
gaggcggcggaggagaggcagggctgcagcgcgacgaagcgcgaggccggcggggtggtgacgcgtcggtgactgtggggcctcggaaatggcggattgtcgaagacggggccgctcgatgcggtggacgaggacatggaccccggacgctgccgtcgctcgagctgtgacgcgacgcggacagcgtcttggcgaccgaccctgtgggcgccaagggcttggacctcctttgctggtggagctcgcggcggatgcttcgcatgtcggcgatagaggagcgaggagacagatgcatcacgatcgcgggcggaggagagctgtggatggattcgatcggcgaggagaagagagaccgggttgatcgcggaagccgatagcgagcgagcacggagtaggcagtagaggaagatggataattacgcgccaggagaaaggaatggaagggagggcgttggatttaagcagctggactgcatccagatttgggcccagccgcacgctttggagtccggcccgaaattggatggataatgcatgagccagtttccgtagcttttgagtctgacccaaaattggaa

SEQ ID NO: 16554 - DNA, 700 bp, Zea Mays
cagagaaggtaacatataccgtgataccgtcggtggatccgaacccccgtgggaaagtgccggaccccagcatacatgacctgggcctgcgggtacgacccgagaccttcgcgttaccccgaatgggacctggacccctctaagtaaggtccaggccacccacgacaagatcccgggacgaagaataccctggcctaagtcaaggacgtacaggggtccagcacagacacttgtcagggccttgccgagtgtgcttccgctccccgctcaggcgggggcccggtgctgccacgtggcctattgcccgtgacgtaagctggcgggcagagcctgatgtaaggcctctgggccacccaatctctgtatttattgcagaatagacgtgccgcctgcccgccctgcagacaagcgatgtgccatctcggcatttaatgtgccccgtccactctgatggcaggcgacgaccagaccaccctacaggtggcgtgcctgtccaatcagacaacgggcagtacgcccatactgctgcgcgcgcaatggtcatcatgacttgtacgatgccggggaaccttctgctacacgccaatgctactcaagcggcggaagtcggggcacagggagattgcacaaggtgaccgacattagttgctccgggtattccatccgttatgtccctgggcccacaagtcggggttcagtg

SEQ ID NO: 16555 - DNA, 577 bp, Zea Mays
tagtccaaaagtgccttctaagcttgatctaaggtaaataacatgtccagttgagtactggcatgtgactttacactggtgctctcttttctaaatttattattattattatatctcactttaagatgtccattttttgtgccttctcactttaacatgtgactttacacagggtttgtccttggctcttattaattgtcattgcgtagcatactcgtactgggaattgccttctctggagtgtgaacggccattttacatcagtagtattaagggttattcttggtattaaaaccgcagcacccacattagagcctgtgagagcaatacatctcaatatacgttgtccaggctcggtaacgagtagtcgtgtaccattgcagaggcccatgctttgattaaggtttctcaacaacataattatgacaccctttttcagcataagctcgtgagatgggaaattgtttgcattaatcgaatttaagaattcagtaggatagagcacatcgaaatctggtattctttctgatgactttgatatagtatcacaactaaggtagcgcacgatttccccagg

SEQ ID NO: 16556 - DNA, 398 bp, Zea Mays
gccacttttgttaatcggaccacaatgacccagatcgaataatgatgccgcgaggtgttgggcagacccacaatgaaatccatgctgatgtcatcccatttccatgaaggtcttgataggtgttgtggggcaccagctgactttaggtgacttgccgttgtcctctgacatgtatcacattctgccacatacttggctatctctcttttcatccttgtccaccaatacatgggtttcagatcatgttacatcttggtgctccctgggtgcatggagaatttggagaggtgagcctcatccaaaattttcttcttgaggtccccattttttaggaactaccagtcagtcttcgaaccataatatccccttactgtcttggcagaagcacttataattct

SEQ ID NO: 16557 - DNA, 472 bp, Zea Mays
gcggatatgtctagggttccgccgccgcgtgcgtgcgggtgaggtaaactaggaagcctgcgagcgagtgggtgggatcgtgggcctgatgcacgtattatgcggaaccatatcttctcgatggcccatagaccgacacgtgcattactgttgagtaaactgaaacataaaacatcgtaattccaatatttgtgtggggactagtacagatgcccagattgtgggagcacaatcttcttgtcggactggatactcgaatcgtgcacaaactatatttgcataaactgatacacacatcatcataattcatatgataatttggcgtaagcagttgggtacaataagccaaaaaggggcctggtgcggtctgcacacctggtcggcaggcccggtcggtaggtggtcggggcttcatgtagttaaacagagccagggctctaaatacatatactatatatatattgtgatatcc

SEQ ID NO: 16558 - DNA, 425 bp, Zea Mays
caggaagaagctctatagcaaactcaactttccgcttaggtggcatacctggtaaatctttcaggaacacatctggaaattctgacacaaccttgatagtctcgagtggatctgtttccttgctatcaatagtcatatgatgacaacttcctttccttagctcaggtgagactaactcggctaccacttcttctcctagtggagaaaccaacttaattgtcctcttatcacagctaataattgtttggtacttatctagccaattcatccctaggatgacatctattccctgagtacccattactatgagaatagcaggaaatgctatcccccttatttccacacttacattcaagcaaatgctatcggctcgaattctaccaccggctgaaccaatttgaataggtgtcgacatggtagttatt

SEQ ID NO: 16559 - DNA, 735 bp, Zea Mays
ctcccatccgcactgcgctgtgacttgcctcctctctcacttgtgccgaccgtttcatccaccgtgctccatctccattaatggctgcggctgtttcttcgattaggtaacactgttcttcaatctgcgtcaatggagtattgaatctggccacaaaccactctcctccctcgcctataaagctcgcgtcgttcttctcctcttccccacgttctggacgccgccagctccgttcctgcttccgcgttgcgttcacccttctgcacgcctgctcaccattacgttgtcggctcccatttagtgaatgcgccacagctccatgaaccgcctttgtgcctcatcgtggctcatcgtgctcaccattaccttgtccaccaccactcgtcgccgagttttgcttgcttgctgcgcaaactcaccgttgcgccgcggcgctagcttgcgtcgtgcatcgatttggacgttccccggctgttctctgccacgcggcgagtgcctctcggcctcctgtgctagtgttataaacctgtccaagacgaactccctttccccacagctagcgcagcttcatgcttttagtctgtcgcctcgtcgatctcctcgtcgtcgctcactcgccatcgtcgaggcattgtggtgtctggctaccccgtgccggagtcaccacgtcctcgtcggcaactgtgcccatgccgtcggtgtctcacaaccgactccccttgccagttcactgcg

SEQ ID NO: 16560 - DNA, 371 bp, Zea Mays
atgcttcggcggcttcatcgatttcaaccttcggcttacgaaggccgaagcgagaccatatgggacgcgtaataacctccttaacatcctccctcgctaccaaatcgttcttcacataaaaccattcctccatccaatttcttggccatcttttctgaaatgttggcactgggtagcttgagttgggacgggcgataaatccataacaaccgaagttgttgtggtactgttcttttctagtggccttcgtttcatacataagttcgtgcatgctgcagaagcattttgcgcttgggtctataccttggctccttgttgcccagacgaagactcccatcctcaatatagcttcgggggtcagttgatgaagg

SEQ ID NO: 16561 - DNA, 716 bp, Zea Mays
gaggagccctcgcagcatgaggcgtgtcaccggtggaaccaccgccgcaacatcctgcgtcatcacactaccggggagcgagacccaactcaacctatttctccgaacaaggcatctgatgtcggggagactcccgatgaacggggttctcgcctacaaaggaactcccggcgcaggaattgctgtctcgcccagaagcgtgaacacgaggcagcctagcgccacaccgggacctcgtgggaacatcttcctctcccctgcgacctataacccgagttcgcctaggccatgcaaaccctgagtcaagctggtggtgtgtagctcagatggcaaacaatctacctcacacgcccggcaacgagtgataccaataggtcctcactaaggcaacaaaccaccttctttcgccatcccacctagatggcaacatgtgtcaccacatcaatagccggcgtgacgtgcgaacaagcatcgatggattgcgtgcctaattacacgaggaggaaatgaaaccccatggggaatacgagcgggagcatggaatcccacactagggagccatgggccgggttgactccaccgcctcgataaatagaccaatgtctcaccggtcggctcgagatcgactggaggatccacgtcacccgtcaccgccacaggaccaccgccacgatcgtgtccgcgatgactgctcggaagcccgaggagtgtttggg

SEQ ID NO: 16562 - DNA, 364 bp, Zea Mays
atctgctttagcgtctgatttaaatgcacaacagccaaattcgaatacatcatgcacaatttcttgcaatcttttagtcgtctaggaggcattttaaactgtttggtcgaggtggttgaggttagtctgtgaatgcacattttattgctaatataggctagcaaaagctcatctgagatacaaatgacctacataaatcaatcctaggtcctagaatgacatgttatttaggaattacattctgctttcctgggtaaataaaatggttttggggagagttatgattaatgatcgattaccacctctatagataaaggcaagagcaaaggtccacatgatgtgaaaactattaacattaggaaaa

SEQ ID NO: 16563 - DNA, 478 bp, Zea Mays
gatcttgtcctccgccgaattctaacgggggaggggcggcacaagttgtcacctctatgggaaggaccattcatagtagcagaagtcactcggccgggatcatatcgtctcactcagatggatggcacggagatcgggaactcatggaacatagaacacctcaagaagttttacccctagctgtattccaaaagctattgggacgacaatgtactctgtaaactgggaaatatatcatcaataagaagacttcgagagcgctcaaattgttcattgtcgacctgcattcttactaaactcagggtgaccactatgccctgctaacggagcaatcggcttaagtcggtgacgacttaagacgatgcaacatgctcgcgcttacttcactcagggtgaccactatgccctgctaatggagcaatcggcttaagtcggcgacgacttaaaacggtgcaacatgctcgcgcttacctaactc

SEQ ID NO: 16564 - DNA, 1125 bp, Zea Mays
tattgacccaactcaaggatatagaggaagcgatgactacttatggcatgtcatcacatcgctacacaaaccaaaattattattatttaaccacacgcctagataagcatgatttcaaatcaaattgcccatattttaaatctcgacataagcttggctattggctaacgacttgactattttctaattaccaacatacaccaccttttgccatttttggatacttgcacgacacatagctattctaatacatcacaagtacattcaaccccatcaatagagcaccagcacatttccaaaaatttcccgagactacgacgacaaggcgtcgatcctaccacgcacataaaagcatcacaagcatatttacggaacctatcggttaacttgatcgacacactacacatgttcttcgcccttcaaaatttatcgcacaaccgaaatcatcccacttgctactgacaccaacaatgcttattgatctatcattcacaacacgaacatagttacacgccgcatactagtttctaacataatcctcacataactcgtaattcaactactcagtaacaataaatcacgcatgacaactaccacatcgaccggttaatttatttggacaccgcctgcctagcgtaccactagtatcccgcattttgactcgacttataaacatagagaaagtgatgactactttggcatgtcaccacctctctatttaagccaagtcaatttctacctacaacgaccgaacattcatgtcgagcataccttattttaccctgtctcgcatacaaccatattgtggcgtgcactcgagacgcatcgatcatcgtagcgtaaccactaatatatgaactccgacactcatgtcttaacaatacatcctccacacaatctagcattttctaaactactcgtcacatcaacaaatatatcccctatataatcacgaatcccatcacatggcataggatttgcacttcaatctctacttaattgcacgcctcatacttgtctattccacaattctttgcctagacaatacactacactctgcatacataggatccatttaacacactcgacgtatacacttaatagaacataattcagattgttttt

SEQ ID NO: 16565 - DNA, 399 bp, Zea Mays
ttttgttacctcttgttttcttgtgatctgtgtccgccgaagatgacgttgacttctccatcgacgcgcgggaacgctccacctcctcccccttcctactgctgaggttgttgaggttctcccggtcctcctcgtggtgggggaggtggtagaggttggaagggtcggccattcccaatgaagtgcttgaaatctctgcagttccgaagagtatgacgcatatccttgtggtacgggcactgggcgtcgaggatgtcatccaatgttcgttcgcctccgcggggtgcccctcgggaacgagagatgggtggtccagtggcatggacttcttcgcgaggccttttcgcccagcgcttgtcagtttgttggttcgtgttgcgccgtggtgcggacggagcc

SEQ ID NO: 16566 - DNA, 709 bp, Zea Mays
tgcgagtttggagatgcgccgtgggaggaagactgactatcttgaaatcccgctcaaggatagtatcaagggatggcgcttggagtgtttattgttgagaaccacggaaattctctccccccacggtcagggagacagccggatgttcgcactccgagttggaccgagtcccccacagatcaggaggtggctgaggcaggggctttgctggctgaagttggactgctgaaggagaggggtctgactgcagaggctgtggttgctgattttgtcttcaagaacattcagccgttgaaggacagggcatacccggcttatctgtactgaggtctagttgactcaacctgggttaccaacagaagaattcccgctgtagacttggtgaaccggcttgaaatgatttttagaggcaaggtatcaaatgttggtgccccagtggcatactcggcctggaacctgcctccttccaaggccttcactcattttgtgtcgaatccacctgttgctgatggcggtttgggccttagagtgcgaccttctgccgaagaagttagcgctttggttgcctcgctcagagaaattcctgatgatgaacggcaggtccactatgaggtgcctttggatcctagtgatgcagagataagtgctatgcttgatatgctggccgaggactcttctgatgctgctcctgctgggacattggtggtgg

SEQ ID NO: 16567 - DNA, 455 bp, Zea Mays
gttcttgatagtaacttcattgaggggtctatagtccacgcacattcgaagagtctgatccttcttcttgacgaagattgctcgacaccctcacagcgatgaacttggtctaatgaacccttcctccaacaagtcttgtagttgtgtcttgagttccgccagttgattaggtggcatacggtacgaccttctgaaaataggagccatacagggcttcaactcgatcacaaattccacattcctttccggaggcaacccgagcaagtctttgggaaatacatccggaaattcacacaccaccggaatatcctagatttcttgtactatggcctcaaaaacttgtctagatgctttgactgggacagctacagggatggacaattggacttcttcatgaccataactcaatttaatggtcctttggtccgcattgatgatggctttattctgggata

SEQ ID NO: 16568 - DNA, 447 bp, Zea Mays
gccgttcctccctgcagtctatggagtcgagcaggttgtggtagctcgccgagtacgaccgtcctagcggcggtgagtcgtgttgggtctcgaaaactgatgttgctgctagctccctccctgcaggttcatcgacaagtctgggactcatgtcatcgacggggtcaagatgggaggcaaggacgtggtttgcgtgtgaagcatctcaagggctctagccttatgtagagcaacgtgtagccctgctcaaggagctcgccggcgacaggttcttggaggattccacgacaaaatggcaagttctgacattcctcctctgaaatccctagccttgaggaatttttggctccgggatgttggggcagctagcaccatgggccaaaatggcatgttctgatattcctcctcttgtcttagctcatgttatttttttgtttttacttttag

SEQ ID NO: 16569 - DNA, 1518 bp, Zea Mays
aaggactactggaacattctcatccataaaactgagaatattagccttccaatcacattccattggactatgattctgtagccagtcatatcccaagattgcatcaaaagcactaatgggtaagactctcatatcaatataatagaagtgaccatttgcccaccattccacatttttaaccatttgatggcagttcatagaagctccatttgccaccttcacagttactggtgaacacgaatgtgtaggtaatgccaacttctgaaccatagtggaactaccagaatcaaccaacattaccatgatttgcttctgcactactgctcgaattctcatattttgcaacccaacagtaccagataaagcatgtgttgaaacctggtagcacaacccctgttgaacatcctcctgctcaagctgttgcaacaactcatctgttaaaaccatctccacattctcagtaataacagcattgagttgggcaggcctcgtttagtgcatttagtaatgtgtcccggctcaaacttttcaccacatgcgtagcacaatccattgagtcttcgaaactccctcacctgtctttctttggacagatcactctgcttcccttctcccttaaatcctaacatggtctgtttgttaatgaatggctgacgctaccccttaacttttgcctgctccaaaatatcatactgagtctgggctaacacaatagcacgatcaacagcagtaggcaactacattctgaccacactttggatatcatatttcagtcctcgaacaaaatgagtcataaaaaaatctcatcgaacaatggattgtgtacggctacaccatatcgaatccgatcaaaatccttgatatactgatccagagtatcagtttgtctcaactccaacagttttcttagagcatttggatacgcttccgccccaaacttcgtcaccactgttgcagaaaattcctgccaacctcccaaaccattacgcattttgtgaaactgccaccattgtgctgcagtatgttccaaattcatcaatgcaactgaaacccacatagcagctggcacactgaagatcgaaaaatattccaaacaattattcaaccataccactaggtcgccttcagagtacttcggaaacggcagcttcggtagtggctgatgatactgctccccatgtggacgtggttctccctgaccaccatgcatgccaccatgaaaacctcatggtggttccctcctttcctgtcgtggcctgttgaatggaggaactggtggctgatggtgttgctccccttccacagctgctcctggcgtttctccaagttctttgctcctgttttccagtcggagttgttccaccaacttctttgtttcgtccatcttctggctcatctggactcgctcggccgctgcccgctcagccaccgtggccgccaattctgagcgtaccatcaactgttgctgtgcgcgctccacatccttcagccgcgcacacactgcttccaacgtctcca

SEQ ID NO: 16570 - DNA, 355 bp, Zea Mays
gaaaaggagggggttccagtgacaggcccattgggtgaattgttagatgagttcaaggacatctttgagtcacccaaggctttgccacctgtcaggccatatgaccatcatatttctcttgtgccaggatcagtgccagtgaatgctcgaccctataggtactcacccttgcataaaacagaaatagaaaggcaggtggccgaactattgaaagctggacatatagtgccaagtgtgagtccttttgcatcacctgtgttgctggtacagaagaaggatggaacctggaggttctgtattgattacagaaagctcaatgaaatgacaatcaagaataggttcccaatgcctttag

SEQ ID NO: 16571 - DNA, 492 bp, Zea Mays
atcaagatgtaccagactgcgttgatcagtgtgtatgatgaattcgccccctaacagatacaagcgccaatgatccacagccatgagaatggctaaacattctttttcatacgttgacaatcccaggtgccggggacccaaggttttactgataaaagctattggatggcctgtttggtgtaacactgccccaatacctttgtccgaagcatcagtttctatttcaaaaggttgactgaaattaggcagagctagaactggagcagaagtaagagctgttttcagggccagaaatgcttgttgttgatcatccaaccatacaaaagcctgtcctttcttcagcaattttgtcaagggttgactgataatgccaaaattttggacgaattttctgtaatacccagctagacccaggaaactgcgaatatctttcacatttttgggtgtaggccatgatttgatcactgctaccttgtccgtgtctattgcaac

SEQ ID NO: 16572 - DNA, 405 bp, Zea Mays
tgaaggggtacccttgattttgggctgctcgatcaggttacaacggaagatatcagatcgcgactcaatgaatcatacgctcatcgtcgcccctaggatcagggttaacgctctagattttaaaatgacctaggctagtctctcccgtctaataaggatctaaccgcccagatcaatccgctgcccatacaatccagaccgcttatctacaccaccccctaactcgacgaccgaacccggcggcagcgccgccctgcccagacggtggagcatgccgacgagacaccgatcggccaccctagaacaccaaagccaaattggacggagctatcacgacgagaacggatggagaagataataggcagatccttacctcagttcgagcagtagagctcacaaaccatg

SEQ ID NO: 16573 - DNA, 576 bp, Zea Mays
cctgaattgtgtagcaaactctgcccatgtgatagtatcagcagcattgtgggcagcagtgtatgaatcccaccaatcagcagcaggacctgtcaaacgactagaagcatatagaaccttctccggtcagagcactgcgcaatgttcaacatcttctctacggacttcagccaatcatcaacatccagtgggtcaggagagttagcaaatgtcggtggcttatggctcatgaactcacagtgcttgtctcgggatggaactagtggtggaggtggaggcagtggtacttgttgttgttgttgctgctattgctgttgctgttgcgcccttctttcctggcgtatctcctctcgctcttgatgcagctcccggcgtatctcctctcgctcttggcgcatctcctggtgttcctgccgcatctgcgcgtgcatatccgccacagtgtctgccatctgttgcatcatcctcatctgagctgcaactgttgggtcaactccggctggtggaggctgtggaggatccatctcaggttgttgttgtggttgtctatatatcctctgagtgtgtcgattggga

SEQ ID NO: 16574 - DNA, 746 bp, Zea Mays
atgaagaagggggtgtttccatgcacagcttgattgtgttgagttcttagcctccaaaccacataaggtaactctctgatccacttccctgcgaacttttcattcttgtcgaagactttcttcctgagtgcttccaatatcattccattagccctttccacctgaccattggctcttgggtgtgctaccgatgcatatttgatctggatgctccgttgttcgcagaaatcaaagaacagagctagtcaaattggatcccaggtcggttatgatgctattcggtatcccaaacctgaatattatatcttgtatgaattccactgccttggctgaagttagagaagcaatgggtttgtattctatccatttggtgaatttatcaatggcgaccaacaagtgagtatagcctccctgagctttcttgaagggtccaatcatgtccagtccccagcacgcaaacggccatgttacaggtatggtatgtagttgctatgctggtaaatgttgttgctttgacaagaattggcaaacttcacatctctggactaactcggctgcatcactctttgctgtcggccagtagaaaccagacctgaagactttcccaacgagagttctggatgttgcgtgtattccacactgtccggcgtgaatctcatctagtagctgtctcccagtgatcgaggaaatgcatttcatgaggactcctgttgcaccccttctatacagtgcctcccctatgaggg

SEQ ID NO: 16575 - DNA, 910 bp, Zea Mays
ggaaagggaaggttatggtggtgcgggttgtgagggtgttgctgtggggggtatgcgctatggtggggttcggaaaagcctgggattggtgatggggggagtgtgggaagggtatccgattgatgggtatcggacacagagatgcccttcatggtgcatatcttcaggtgcgcccgtgagaacttcttagggcagttgaagcagggggctttgtgacggcgaatcatctcgtcgggcatcagcctggtcacgcgcttcccagcaagtggtcaggctatagtcggagcgtcaggggcagctgtcgtggtgggaagttctggaggggatggtgtagtcgtggtaatgctggtgtgacgcggtcgatgaatgatgtgcagatggtgctagtgccctagcagccacggtgttgtggtggatgtaggtgagccagggttgcttcctcctccagtttggcgagtgcgtcaagctcgacgtcggtcttcagtggttcgcccagacctacggtgaagatggagatctgttgctgctcggagaggtcatcgcagcgggtgaggcgctggtagaacacgtccatgtactcaatgagggacccctgaaggcagaggttacacaactcgctgaatgggttgttgcgtgtcgggggcgaagcttgcgtcggcgagcttcgtgaagcgtgtccaggacggggttccctggttctgctcctcctccatgtaggaggcgatcaggccttctctgtgtccgatgtatgtgctgcccggatgaactgcttgcagtggtggagccaggacagcggatccttggagccgtcgtacttgagcaagcataatttatgggtggcagagttgatgaaggcaaaagccctatctcccggagcggtggccgctggcagaggtgctaggatctgagg

SEQ ID NO: 16576 - DNA, 582 bp, Zea Mays
acccgccacccactccggaggagacagaggtgatttttgggcggcgactccagtccgacgctgagccagaagcaacactagttcctctcccccgagtgctgtcccgcgcccaccatgccctcgaagagactgaggcggtgatcctgcgagagtgggaggcgtttgaggccaaacaccagcgcctcagcgactggcgtacctagctggaggagcgcaccaaggcagcgtcccgccagtttgccttcgagcggtccgagcttgagcgagaccgcaaggactataggaaggacctccagaaggtgtttgcccgggagctggaggtgacccgaaaggagaagaggctggccaagaaggaggtgcacttggaccagagggaggaggtcatctcggagctccaggcgaagctgaatgcctacaacaagatgctggaggagcagcaggatcagcaggccgcgactgtggagaacatgcggagggtgcagcaagggcttgatgacagggccagcagccttgccctggccgaagagaacctcaaggagaaggatgcctccctggataagcgggcagcggatctcgtctgat

SEQ ID NO: 16577 - DNA, 908 bp, Zea Mays
atcccgcgccgtgatcgtcgtcgccgttacgatttgtgctcagtgaagtgcagataactatgtagggtgaaaaatctagcgctggggatgagcttgggacactgttccgccctggccgctatacccacttgcctcacagtcggtccagataacttcgctggagttggccacctgccgctcgggtgccacgtgcctaagcgcaataccacgtcgcagtgactcgccttagcatgtccggtcatcgtcggtggtcttgccacggtgaagtgccacggtaaccctgcaccggtaactctcttcctctccggtcgccagcgcgcaattccaaaaacaagagccaccgccctcgggcactataaattaagcatgccatcagctctgttgggtcatcacgaagcaagagcacccgctcctacctccgattagccaccagagagttccaatttctttctctccccaaattagttttccgcacgtcgtgaaccaccgcgtcgtcgccagccttctgcaggttagatcaagcctccttgattgatgttctaggctccctcatgtttcctggtactcatagaccctttggattgaactagatcgccctggataacccagaacacgttggtgtgttctcagtttccgccgttgtcatggacagtgagttcccaacccggaattgtgcaattaattgtggggttaatgtcgctaggggttgaattagatgtcagccgagtcaggggcccggtcttggcatatttcggccagatcatgctcgctggagggcgcgctcaccactgttcgacgtcggggacttgtgtttgtaaagaaatagaaataggaggagctttacgtaaatgtcagtgaaacataggaatagtgcgtaggactctttaagggttatttaaaagatcagg

SEQ ID NO: 16578 - DNA, 370 bp, Zea Mays
ctaaaagtgtagaagaatattatcagaaattacaaatgggtatgttgcgttgtaacatagaggatggtgaggaatctgctatggctagatttttggggggttaaatatggaaattcaggacatccttgcttataaagattatgctaacgtaacccgattgtttcatcttgcttgcaaagctgaaagagaagtgcagggacgacgtgctagtgcaaggtctaatgtttttgcaggaaaatctacaccatggcagcagcgcatgactacgtccatgaccgaccgtacaccagcaccaactccctcgccgagtcgaccagcaccaccaccttcctccggcgacaaaccacgtgcatcttccacaaattcagca

SEQ ID NO: 16579 - DNA, 536 bp, Zea Mays
gatgacaccccctcatctagtaatccagtcgggcaagaaatagcccggacagtttcccatacttcttcaacctttgagggtggcctagttcatgggaacacatcagctcctgacgttgcacgccagggttctccagctcttgtgggtacgattgagggtgcttcagctcccgaggatgctactgaggatgacccagcccccgagggtgctgccggggatgacccatcccctgagggtgccgagctcggctcctcttcggcttcttctatggatgtctatgtcgaatcaccaccagctcagtctgaggagctagtgttgacgggtgttcctaccgctcttgttggtccgatcactttagaggtcagtgacccgggcactgggaattcgctgcatgatgtcggagctgaggtttcactgagtactgccttgggcgcgagctctaatcctcctttagggctcgagtctcctctcaatgttgttcctgctagtaccccaccatttgacggcgcgtcgatgcctccggctttgggatttcc

SEQ ID NO: 16580 - DNA, 667 bp, Zea Mays
cgggagggctatcacggcggcgtggagtttcaatttggggaaaaacccaaattgcagcgctatggtgaacgaaaagagatgagagtgggtgcgatagcttgcggattacatggcgcaaccggcctggccctcaatttatagaagggcaaagcggtggccacgaatttgaggaggacgcgcggcggccggaatgacagggtgagtcatcggcgcggctgacagtggcacttaccggttgagaagctacagcggtcatcgtcgagctagggcggcaagtgacgacgtgtttaacgggtggaaacgtggcaccatcgcggcgcagaacggcaactccggcgatggccacgaagccacgtcgccggcgtaaaaggtgaagacagcagggctacagtagttcatacccatcggcaaggagatctttccaaggtcaacaaaatccattcccccgcgacacgaatcccatcgcccaacccagctccggtcacgcggaccatcggcgttgagctgtccgagctggcatcctcatccgtgtactgtaccatggggaaaattcagtccaatgcacctgacagccacatttgaagccaagttttctctcaattttgaatggcaacataaccgaggctctgcagaacaaatgtagagcaatacaccatctgcaatattg

SEQ ID NO: 16581 - DNA, 344 bp, Zea Mays
cgcggggacaactttcctttaactttaaatctcctcataccccgaagtggtgaaaccttgaggtacacatgatttctttcctcaaaatccagtggtcttcttctattatccgcgtagctcttttgccaggttcgagccaccctcaaattctctcgaattatacgaacttgttcttccgcctcttgaataagctcaggcccaaagaactgtctttctccagtctgatcccaatatagtggagtcctgcattttctaccatacaaagcctcaaatggtgacatcttcaaactagcctggtagctattattataagaaaactcagcatagggtaagctcttctccca

SEQ ID NO: 16582 - DNA, 540 bp, Zea Mays
acatgatcacgtggtcaaatcccgctccgttagcaagtaccaccagcagcaagccagcaacccaatgctgtgctcctcccacctcctgctgcgcgcacaagtcaactcctgtctgcggccgccgcgccccacgccggtccccatggctcgttccgctcccactttcgtcgctgtttttctcctagtcctcgtgcttctcaccatggacgcggcgcagggtcaacagccgttcccgctgtccaccgatccatccgacggtatcgatctctcgctccttctgtggcatctgaagttgtgtaatggcgacgaaatagttggcagctagtaaatcgtggatctcgtgttcctgcagcggatgctctgcacgctgtgttccggcagtggagactggagggcggcgcggcgatggaggacccgtgcaggaagggcgtctggtcagagtcgtccggaataaacgcgtccgtcgaatgcaactgcctcccctcaagggtgtgccgcatcacaagcctgtgcgtcttcttcactcttactcggttactc

SEQ ID NO: 16583 - DNA, 326 bp, Zea Mays
gtctcatctgttgagaactgagataatatggcgagtgttttcagtagcttacacagactacctctagatacggtagtggtgggcctatgcatttagattttcaaaaaatcttaggagctgttggggatggtacccatgtattggaattaagtgatttagggatatcctaattcccttgtatcgcaagatttatttttggatctcttagagatgctcataggccgtgtcgtatttttgcgccgtggacgagatcgttcatgcctgctgtagtttagggacggtgtatcggttactgttgaaacatttttttccctttttcctaaaat

SEQ ID NO: 16584 - DNA, 436 bp, Zea Mays
cagggacatggggaatcgagtggtagggcaccaaattgacagcgggtaagaaaattgggtaggaatccactgcgccacaagggaaaagacagggctgagtctgaccgcacatgtgctctttgagggctagtttgggagctacaacaccggaggggattggagtggttaaaatcaccttcttattcataatttgggaaatcgatcgcttggagcccagacaacttcatgaagaggggagagaggaaaagaggaggcagtgggcctaattggatctcttggtggcaacagagacagtggccctgtatctcccgcttgagcgctcctctattgatgtcagtctcctctctctcacttctggctatccgcacctgccgccctctaccgtcagccaccctcaacatgtctgttcgcccgctttgagtcccgcaggtccatc

SEQ ID NO: 16585 - DNA, 304 bp, Zea Mays
gttctgcaggacttcatctctgcgagacaacgcatcagcagctccattgagtttgcctggcttgtactcaactgtcatgtcatacccaaataatttgctgacccatgtatgttgagggatggtggataacgttggtctaggatgaatttcaagctgtagtgatcagtctgaactgtgaacggtcgccccagagatatggacgccaatacctgacagctttaaccaagccaatcaattcccgttcatatgctggcagcttttgatgatgaggggctactggcctactgaagaaagctatggcgcc

SEQ ID NO: 16586 - DNA, 546 bp, Zea Mays
tttgtagcatcaaatttgacatgctaatgcaattacaggaaccactaagtaccaaactatgatggcagtaattgccacagcacatggttttagcaatgtccgtgggaatctgttgacaaaatgacatgcagaaaatgggggacaaaagacaacaacatcgcattaaatgaagccgcggccatttcggtgccattagtataataataatacagtagacccctgggaaacgaatatatgtcataccatatctatgggcagtccaaaatggcattgaaatctactttttttttgctccctccaaaaccgccctgtttcatttctctatgaaaccaggagagggaaaaagtaaatgccagtccttgagggcgatgtctttactagttctagggagatttacgcccagaagaccacaaccaatctgtgattcccagttccattttggtaaaagtctcgcgatgacattatatacttaaactagctctgagaagattcaattctatttcgtacatttcagcaattcctggttcctgctacagtaatattttg

SEQ ID NO: 16587 - DNA, 460 bp, Zea Mays
ggtggcggatccggcggagttcttgacggcggcggctgatgtggataagaggactcgggttcttgcggagcaggctatttggagtagagataggggcgcccagaccttggttcttatacctagggataaggttggattgggggtcggacccggcgggcacggcgagctgttgcaacggactccgaaggaagcggaggtgagcacgggttggtagcgtgggagaaagaactgacagctgggccccggttgccagagggagtaaggccacgcgtggtgcgaagggctgggcagaagtggatgcgtgctgcgactggccaagggccccacatgtaagtgacttgggagagagggagttgttaggtgggctgcacggctaagggatccgcagatgggccaaatggttaccttgggcccaactgcgcacagttccttttcttttatattttcatttttcctttcc

SEQ ID NO: 16588 - DNA, 496 bp, Zea Mays
tgctccccatccgggggctcggaaggtgtaagggctcaatgcatgtggggagtgcggaggcatgtccactgcccgggcgattgatccctttttaaaggcggctctccccactcgcatcccaagcatcacgggcaaagtctccaccgacgagctccagggttcccaccctccgacgcgggggctgggtcccacatgtcatgcgagcaaaccagaaacagaagaagccaaatcccctgcacgcgaagcaggtaaccgccccacggttataagcgtccccccatcctcgccgaaaccagcgggcgaaagggtggaccgccatgcaggaggtgtgcaaccgcaccacagttgtgcaccctttcggcttcatcgcatccgatgggtcagcgtgaaggcccgggcccgcatgtcatgcaaccggcgcaacggttactgcatgcaaggaaaccgcaccgccacttgcgccaatgccgcgtcttctcgaatgaggaaccagtgc

SEQ ID NO: 16589 - DNA, 437 bp, Zea Mays
gggagagcgctgcgcgcgtaggagcatgtctgtagcccacatgcaaggagaggggaggccgcgcggctaccgctgcgctcagcctaagcatggtatcggccaaagtcctagcgcacaccactagccgtgtcgacctcggtctcgcccttggccccaaccctaccctgcttggcaccgcgcctgaattggtctgtgagaccaccagtgacctagatcgtggaacattgagcagcactagcagcattggccaacatatctacaaggatcggtgtgagggaccaatagcctggaccatgggacattgagcagcgctagcagcattgtctaaccgccaacacgtgactatcttttttgaggtctaaagcgtgtcttgaattagtgaatccatgagttaggggtatggcaacctaaaaaaagagtagcaaaatatgcgctcc

SEQ ID NO: 16590 - DNA, 405 bp, Zea Mays
aagtaaaggagagactaccttgagcaagatttttcttagcttgtgccaacttgttcaaatattgtgtgcacttgcctaggtgccggcttagtgttgtagtgctgccccttgatggtacaaataagacctatgacaaaacttgcacttggcttttgtctccataaccccaagttcctttctagaagcaacagtgaccaccttaaaatacttccagcaaccagccctctttactctatttgccttgcacttggagggggacaactcaataccagctcttgacctctttcctcctctctttgtctttttagtttttgacaactcatctccatcagttgaaggtggaaactcatcatgatgatcaaactcactgtcatctaattccgacaacataacctctaattctag

SEQ ID NO: 16591 - DNA, 395 bp, Zea Mays
aacaggccaaaggtgttggaaatgagactggggatgatgatgattctggttttaggaggaggctgatgaagacgaagggggactttgacatcctgaagaagtatagaatatacttggaccaactgacccctagtgcaattatgtgcattttggtatttatttgggtcgtctaaagctagcttgccaaagcaactatgaagtgtttttgtcgaatccataaattacattaccagacgaaagctcatggaaaataaggtaaccataacaacttcggctgctacaacttcctgtatcagaaagatgcttgagcaccgatgcttccatatcgcatcaactgaccaaatagttggaagaaagagaggttctactacagagtagatttgaacaagcagttg

SEQ ID NO: 16592 - DNA, 683 bp, Zea Mays
gaagatttggagctatctcggttgatgggacagaatacttgacgcaatgcacagcctgccctctaggggtcacggcatccttcaatatataggaacgaggtacacaggatttacatggtaacaactctagagaatcacggaggtgtagctccaagaaatcagggagataataacttcccaagaatagattggttcaggaaatcagggagatcgcagctcccaaggatggatatatccttctatcttttaacatcccccctcaatctggacgtagagatactaagttcagattgtttctaaaacgaataaaagcaggtgccgccaatggctttgtcaatgcatctgctagctgatcttttgtagcgatgggccgtacttcaagttgcttggtagctacacgttcacggacaaagtgataatcaacttcaatatgcttggagcgacgatgaaaaatcggattggccgatagatacgtagcaccaagattgtcacaccagagagtaggagaacgtggttgcgaaactccaagttcccgcaataaaacttggagccatataacttcagccgtagcatcagcaacaactttatattcagattcagtgcttgagcgagaaactgttgcttgcttccgtgaactccaagaaacaagattcccaccaaaaaatataacatagccaccggtg

SEQ ID NO: 16593 - DNA, 580 bp, Zea Mays
aaagagcaccggtaggtggtgcacccctagtgtttgaccccaaatagaagacaacacacttttgggcgactccgctgggtacaagaagtgtgacctaacatagatcgccccagatggtcggttcaaaggaccactttggtatctccccaagcaacattgtgaagccgactatggagacctcatcggctgaagatcaacaagaatttgatgagtacaaaaggcaaataatccaagaagccaaggcaaagtacttaactaagttcaaggtggacaggcacgagaaggtcatctagcaaaggaagactaacctagcatcacttcgacctactgcacctgcccccaatgtaagtaaaatggatgacatccaatctcttagaacttacatagatgaacaacaagagcaaatgcaacaagtaatacggggtatgcaagtggattataaaatgatggcgcgtgcatttgaaaaatatgtcattcccaatttcccatagtagcatttgctctagaaactcctactgtgctagaccatatcgggtgtaccgttgtggcatagtctggcacatacatgcatgaatatttg

SEQ ID NO: 16594 - DNA, 438 bp, Zea Mays
agaacacataaatagaaaaggattaaacctaacctgggctgattttaccccctggcccaactcccagcagcctaccagcccaaccgcgcactcgctactcacgacaactgacttgtgggacccgtgctccagtcgctcaacctgggagctcctggttcctcgcccgacgttgcttacatgtggggtcccggccacctgcccctcttcctcctccgttcaccgcagctggtgctgttgggatcgaacgagatctccgctaccagattctacgaaatcctcggcctcctcactcagcgcgcatctggtcctctagttccgacctgtgggccgggcgcgtcagatgcgtctcgtccaccgcatcccaacacattccgccatctgtgcttctgggttggctcaaatctccaccggccgtgattcgcgcctaccactccgcgc

SEQ ID NO: 16595 - DNA, 327 bp, Zea Mays
cggggggttagggtacggtagtaggaaccaagagggggatgaggttttgaacttggtgttagcttatgacctgttgattgcaaatacctactttaggaagagggaatcacatctagtgacctttcacaatggtcaacactcgagccagatcgactttatccttgcaaggagggaggataaacgtgcttgcttaggttgtaagatgatacttggggagtgtgttatccctttacacaagcttgtagtggcggactttcgttttcgggtacatgtccatcgggacaaacatgtcaagattgcgagaacgaagtggtagtagcttaaagg

SEQ ID NO: 16596 - DNA, 520 bp, Zea Mays
gcaattatctatgataagatgggggaacaaatctatcatgcatagctaccttaagatcttcccaagtcgtaggtgctctaccatccccaactagaccagtccaccagacaatagcaaaatctttaaattcactagtggcttgtctaacttgatgtcattcaggtacaaggtgggcagcaaatttctgttctatcatcatctcccaatcaagatatccctcagcatcataatgacccaaaaaagaaggtatagaaaatttaatcttagcataagggtcgtcaggagcacgattgttattaccttgctggttgtgtggcataccttctgtgttttgatgaagacggcgacggaggcacaaatctctggtgaccgcttcatcataattaccttcttcatcaaacaccgcatcatcgggaagacgtggatgaggaggtggtggtggcggtgcttgttgttgcgtctccaacacagcaagtctgtcgatgatctgggacaatcgtcgatccaacctctcataagt

SEQ ID NO: 16597 - DNA, 507 bp, Zea Mays
gccacatatctctctcttcacaaaacgggaaaaacagtatccatagaagcagaaagaccctaaaaaacacaaccattgcgcatcttccagataatccaagatccaagaatgactaatgaattgaaaccctttctagtcagcccctctgttctttgttcagcttgtgcccaccaacaaaaaaggagttgtcttcaggtttaggggcaagggggtgtagaccatatagcctggaaatctcgaaccaaaaatctcttgcgaagataaaagagaggagcaaatggttaatattctcctccccttggtcacataaaacacatctttcatgatgtgggaggcctcgacgtgccagtctgtccgccgtccagcatctattgtgtgcaaccaaccacatgaaaaatttgcacttaggaggagcccaggcacaccaaatcctcttataaggttcaaaggagactgagccaacaaagaaacctttgtaaactgcctttgcagagtatttcccatttg

SEQ ID NO: 16598 - DNA, 296 bp, Zea Mays
attgacctgtgtctacctgaccacattttacaagcaacaaagtgtaatagtgcacgcgatttggttgtgatttgttccttcacccaattcaaatattctacatgattctgcaaaacataggcacatttatccactcacttagatccagttgcatacaagattattctcatagcactcctgccgaaggggtcttcctgtaccactatttttgtttggattgtttttgtttggtgtcctcatctagcacttggtgatctcctcatgtccaccatatttggcatcaaggagccaaggac

SEQ ID NO: 16599 - DNA, 386 bp, Zea Mays
gacacagtgggtgggctgcgccgcgatgtgtaccgtgtacgcgcgtcgtgggtgattgcgcgtgggagaattgagtgggcggggaataatttcttgtgggcccgggaaaccagtggcactactgtacggagtactgtggcttggtgctttctgggactggaggtgcatggaaacgggtgccgggtctgtgtgcacggctctatatggcatctcttctgtcttctccctcgtcctctgcgcaccacggcaccaggaaacgccatctgccgcacaccacactaccgctggtactcgtactctcggagttggatgagatttcaaaattcgaacgcgccgtagctcaataccacagcggcatggcggcaatactgctgcctcatttacta

SEQ ID NO: 16600 - DNA, 729 bp, Zea Mays
ttccagcgcgaccctgctgatgtcgagtagctcatacctgtagaaatgaggctagggctccgcttgaaggcggatgtaataacttttgtttttgtaagatacttttgggaactatcaattaaacaactcttatctgtatggtacttgttcttgctgtgtgtggcgttaccaactcctctcctggtacttgacccccctgggatgtaggctcgacgtgtcgaggctggataccagcatacctaagaaagagttggtgacccgaccccctaggaggtagtctcgactgggacctggacctgcacacaaccttggctaggaagctttagtagtgcacccataggacccactaactggtatcttttatcctttgattcacgcaacaggacctgcaggatttagaccgggaagccaatccgtgtgtccggaccccctagatcacagctccgaatactagggcacctatcgcatagtggtggagcgtgtaggattagggtacgggaccaggctaagcggctacacagctccggaccaccctaggggacgtgtgtccgttctatagaaccggaccccaggttgctggacccacaggactatagttccaaatactagggtacccatcacagagtggtggagcatgcaggcttagggtatggaaccaagctaaacggctacacagctctggaccaccctaggagacaagtacccattctctagaactggcccccaggc

SEQ ID NO: 16601 - DNA, 1373 bp, Zea Mays
gaatcatttactaaaagctcccttttgtatacatccaaagacaggtaaaactcaagatgtgttaaattcctgtattagtttgtaatgtgataataaggtggcaggctcttatgctcaggagcgggtggcatgtccttttgaacatctagattcaataacagatgcagtcccttaaaatccttgacattgttgatttagtttattctaacagctgcaggaataatgtttgtcacacaatgttccctattgctcacaactgactcttcttccaggccgtgtttgtgttccgattgaccccagtaactgtgatgattttgatcctgcggctgttccgactctatcacaggtatggtccatagagcctagcatgagaagcactaacatttcatatccttctcccaagcatcatggtgcaatgctgatatgctaaaacaagtgcactcatacagcttttaggagagctgaatgctactggttttcagacagatcctgaaaatagtaagtgattgtagccatgctccttttgtgattcgtgtaaaaacttattatttcataaattgcagaagtaaaggcgttctagtgccaagatgcagccttgcgtaacaggctaacatgctctccttttgacaatcctatcgagtttcagattgggaaagaacgtcccttgggaaatccatcagttttttcagaacttccttcctgcacccattgctgaaagcatgcaaggtatggattctttcctatttcatttctgtggcaatgccggcatccatatgcattatgtgaataattgaaacactgcaaaatatcttaagtagcagaaccttaggagcatatattatagttctcttcatcccgcagcaaccacctgaagagaaaaaaaagttcggatgcacacttactttcagttaaactcttatctcatggttctgacatttcctgaggcataactctgaatctttctctgccatgtaattttgcaggaggaactggaaagtgcatatagcgcgaagcttcagcagtccaagaattccttggactggtaaaatctacgcatgtttctgcctctgttttatcatcagcccccgttcggccctccctgagcatccaacgggtaacatggacctggtgctaggtggaatatctatgacgctgccaacccgtgttgcatgcctgggatgcatgcaaccatgtcagtttgaagttgcgtcttaggattcatgttaacatggaacaagtccgagtacatgctttgtggtatttttacctttggattagtttattaggttgaagggttataatgacggtcaaacactcgaaaatggatgcatggagatctgcctcggtcatttcatgcaagttcgttgctcagc

SEQ ID NO: 16602 - DNA, 549 bp, Zea Mays
tctggagtatgaagattacaagtgagctttgtgggtgttcaagtgttgtcgatgagggcaggtgtaaagtgagacggggtgagatgagatgatttttaggggtccccctcagccttatatacacgaccagagaggtatccctttacaagttgtgatcactacctattcaacttatctcctcctttatcgcggtttgtagtcctacatatccagagtttgatcaccttctcagccgagtcatcgctgaatgcctagctctttatgtgtgtgcaactgcatcacctgagataacagtgctttggcagcgcataactcagatgtcggtctttgtcttcttggatcaagtttgcccaacctgattataacctactggcccatcccgtagggcaaaccattgggaggcccattaggtgacccatgatacgatttagtgttcgtgaggacccaggggatatctatcccccacactgctagtctcttgtgatgaggaatccatgactaaagaaactccaaccaaccgagaactccacatacgaaggaacgcaagac

SEQ ID NO: 16603 - DNA, 349 bp, Zea Mays
gtccaaacataggttatagttgtatgtcaccttttttccaccatacagttgtgaaaaggttgtaatacaaagaatacaaaacaatagatcaccttttaaacctcaaatgacgtttctatgatattgaggacattgtattcagacgagtgggtattcgagaacaactagtggatgaagacgttattgggctagctaatgaccttttgtgatactaggtttcctataatcccctgtattaaaggcatacctagatggtgtttgtgtccactcaagtaaaacatcgcacatcattacgccacatcgtttctaaaaataaaataaagacaataggaaatttagccaaattggg

SEQ ID NO: 16604 - DNA, 673 bp, Zea Mays
ggcggcgacactgctgtaggtgcgcccgcgacaattgcattcttacaattgcctctgattattgacaacgctctgcagatcagtttcctcttgcaatataacaaagttcaatcctggtagatgcacgaaaagacactccgcagaggaaatttaccatgaaactcaaacccgaacagcctccatgtatcctcacagcaagaaagatatctagatttcatatattcagcaatttcatcgataccatcagagctagtcttttcttgatctactgtaccgtcaccctttgtagattctgaagcagatgactcacgattcttgaacctcattctatgcacagtcaaatcctttgttgacatacttaatagacacttgatcagataggtttggttacaggcctcaacatcaatatgtgcctggcatttcttgagcacagtgcacagatagactatgtggcacaacccatagactatctacttgtacattccctttccaggcaagaataccatttttctgcgcctgtatagtgggtagccagcttcgtaaaaaaaaaactgtttcagatctaaatgacttaggccttttaaacaatagccatctctcgtgcaaggactatttggattagctgaaccacacgggtcttgtatcataaactcttcaaccaggaagaatccta

SEQ ID NO: 16605 - DNA, 657 bp, Zea Mays
ctcaagaaaaggtaagggtattccctcctcagagagtcctcactttcccaggtagcttcctcttctccttctctgctccactgaactttacaaagtcttacttctgagttgcgggtctttcagactgctgagtcaagaatctttattggcttttcccggtactggagatctttttgaatctgaattgtctctgcctcaatgtggttttctggtacttgcaggcacttatggagctgggacacatgaaacacattgtgaatatctgacatggattctggtaattcaaggcggtatgctgcgggtcccactctgccaatgacgggataggggccgacgaatcgcggtgctagctttcctttcatttggaaccttttgaccccacgcatcggggagaccttgaggtatatgaagtctccttcctcaaatctgagttctctccgtctattgtctgcataacttttctgtcgactctgagcttcaagtaacctcttgcggatcagggcaactttctcttcggcctctttaaaaaggcgggtccttccagtgtcctttcccctacattggaccacattaggggggtctggcactttcgtccatacaatgcttcgaacggtgacatcttgatactggcctgatggctgttgttatatgagaatt

SEQ ID NO: 16606 - DNA, 1056 bp, Zea Mays
cgtgtcattgacatcggcctcgacaacactggctccttcatcttctctgactttgttgcatggcgcggctagcagcgtgccaggggacaaccacatgttgtttctgtgcctctttgcctgcacgtcgatctctgtcggttcatcgtcaccactactgattgggaggatctgccatctacatcaccatcgccgtcttcgtctcgtacacaatcggtctagctctggctaactgatcacacgcgcgacctcatcctcctgtgacgtctatcgtccgccacgagtttcttaaccaagcgtgagggttgctgctacgtcgcctcttcgggcagcagcatcgccgtttgtcgtcaacccccgttgttgcatctacatggttgtcgactccatcggtgcacgtcttctgcgcatggtctgcgagctgtttgacacctgcaagctgcgtaggcataaccgtcgatctgcgttgtacctgcatgatgcgttgacaccctccatcactggtttgcaccacgttcgtcatcgagttcattgacgacaagtaccaccgtcgtgcttcactggcccactgcatcgtcgagtctcttttttctgtgtgtcgtgggtctcaccaccgcaactccaggatccttgatacatctccacgcttatctcttctcctgcttctagcacaaacatgttgccatcatcgtcgtcttatcctcaactacttcgtctactccgctttgaaaactatgagctatgacggtactcccgccataccacaccacaaccgtcgtggaggtcttatctgttgatccctttagacgctgacacttggctggggccttctacgtacctagtacatgtggtactaacaacaccgacacgtgctttcgtctatgacgcgttttccaggcgtggaaaaattggaaacgcctcatccacgatggtttgacagcatcatcctcgacatcagctacttcctctatgactgcctcgaccacatcaccgtcttcatctatggcgccctccttctgcgccaccatcacctaggtgtctcctgttgcgccgcaggcc

SEQ ID NO: 16607 - DNA, 579 bp, Zea Mays
agttgaatgaaatctgacataaacgaaaaaaaactttgaggtgaaggaggagaagattgtggacgaagctgattaggggtttcctgaatcttttatagatgaaaccctgcaaacaaatcagactccagtcgagagaggtgaagaagattgaggatcaacctggtttggggatttcctgaatccagtatgggtcaaaccctgcaaacaaatcagaatattccggtgaagatcacatgcattattggaagacagatgcaatgggagcactgctgtgcttcgtactggaagtgccttttaaatgaggagttgagtggtcgtagtgggaagctatggggttggtttggtgcaaggctactggactgtcccttttgcttgtgtcgagcttgaggattagtggactgaaaaataatagagatggcatggaacagcctggttgagagaaataggagttttctgtaggaagggaggtggcattggttgccctgaggtgtgggagatgatacatgttcaggcagatgtgattgcaacctcatgattgaactgcatatatcttactagtgtcaaatatatgggccgctg

SEQ ID NO: 16608 - DNA, 974 bp, Zea Mays
cgcacagatacagcctgagtgaacctgagactcttaccaaacatgatggccagcacacttcatagttatctattagagaggggggaaatgcccttttccataatacaatggagaacaacatgcacctggactctattaactgacatgagtatgcagttattatctattttccaaaggaatggaatatttattgcagattttggttacactgatagcagtgaaacatgctttgatccatcaatcttggtagatgatctaacacatccatgctaaatttcactattcttgctttacctgctcgatttgctgctgctgaaaacaaacatagactaacatgaatggatgcctagtggtttgcagtgtagtgtgtcctgttctggggttagtcaacacacactaatcattaccgtatctccatacatctgtaaggtaagtgctaaatatgtttttcacattcaagcagtatttgatgaattgacaaagtaaccacagggataaggtgacagaactaagggcaggtgttaataatagctaacttacatacccagtccacacgtatagagcttgaaaagcttggcattttgttccaatgtcttatcccattgaaagtagcgatcagataaggcagaaacatcctaggcgtgctacctggtccaaaagagtgtggaacttctgctcaataccttcgcaagcatgtcgagaagcaccatagttcgacgaaccctccactggaacattttacgaaacatatcctgatgctctctaaaatgcacctacgccaagatcaatcctagttcgagctatactctaatccaacccatccggagcccaacttgcggattaaaaaattatcaaagggtaatcaagatgggcacacgctctgggaacataataagcaacacgaggagagggaaggaacgaaccaagagcaaaaaggcgcacctccttcttcctggcgaggttccagatcctcc

SEQ ID NO: 16609 - DNA, 411 bp, Zea Mays
cacacggtgtttaggctccatcttcacaaagccatcaccttgccttttgttgtccaataggtaggtaaggcaagtcatcaagtcctcatcagtgaaacctggaatactcatgcaaatttgatacagatcagggtggacatttatggtctggactacaacaggtgcttggacagcttcagccaatttgttcacagctccagtaagccctgtcataatccccaactcttcatcattgagtctccttttctttccatatgatccataggaactaccagcaccagcaccactatgagaagggttggcaccagcagaaccagaggcagtagtaccaacaagacatggttcttcaaatgcaccagcaccttcagtgatatctgagatggtgccaaggggctcatttgaggccatggc

SEQ ID NO: 16610 - DNA, 557 bp, Zea Mays
gggcgaacgaccgagtctccaccgagcgggtctacaaggaaggaactcgagtcgacgctgtcggcccacgatagccgcgacaagacacaacgtcaccaaaccatggccagattgtacctacaagtaccaaaaggcgtcaaacagacacaatggaacgcccccacatgcacccacggataagccctcactgactcgcggggccggtcaactccagtcacaggggcctcagcacctaagtttctacaatggcccatacaccagaaaggacgagacaatacaccataccaggcgtatatctacgtgtgcttgatagtgacacaaggggtatgacagaagatgaagttgtaccagacatgaccttgaaccttaccataatccaactttgcaggacccgccagataccataaccagcaccaagcaagctacagggactcatataccgaacagacaagatggaacgccatactaggtgtacggtagtgcacgaccctacggacgacatcaggagactacgccatccagagacagcaagccgagctccccctgtagaatataag

SEQ ID NO: 16611 - DNA, 383 bp, Zea Mays
gccagatccttgtattccttttcgtttccttcctcgtcttctctggctattgcatggtgccccaccgccaggccaagtctatccaccagccatgcacacagcttgcagcaagtgcctagcaagaacgtgatctgctgaccgccactgccgagcaaggtccggctgcccagcgaccgccactgccgcctccgttgatgagcgtcggtaacagggagacggatcagaactagaacagcggcaagaaacacgaactagtaggagcggggagcctaacctggtggcggagcagccgtggcgaggaagctgtacctagcgacggagtagctgtacttggcagaggggaagttggacctggaggcagggaagtcggacctatgtgtgtt

SEQ ID NO: 16612 - DNA, 462 bp, Zea Mays
cgggtgtgggagagtgggtcgacgtgagtgcgctctcggaagtgtttcgcggcggcgaggtgatgttcttgatgccctatcgaggtagtgttcaatcggttgaaccgatgagctacgttaacattcaaggatgctaaaacatggcatagaggggtatgaacagacctgggaatggctgatgacggcagggtgtctcacgacggcgggagtgacctgatttgggggaaatcaagtgactgggggctatggtgcacgagagaggctaacttagggtggtatgagcgtgtaacaaagaggcagagtgagggtagtgctcaatttaaaggagctggctacgtgcttcgccaatttgagaagaagacgatcacggcggcggtgggatattccactggacgagttcgtcgtggcgcctgccggtacaacgactcaagggcagtaactcccggctttccactgttatag

SEQ ID NO: 16613 - DNA, 647 bp, Zea Mays
cctttagatctggatcggtatttcgtgaaagagtgttataaactcaaggagcgttgctgttgtccagaagcatcgccgttggttttttatggtgatcttaaacaacaaatgtcctctgtgacgggtctggatttggaaaaaggacttagaaaaaaggtttaaaaagttacgaagcttgtggggaaagtacactatgactatgcaggcatcacttgcacatgagggaactgtctatggtgaacaagtatgtactcacttaaccactttactgtatttctctgttttaacattttgctgtattcctctgtttgaaccactaagtttggctttccattgcagaagaaaaatgagttgtcctcagaaaagtacgcacttattgtggaatttgaaactgagttggatgaaatcttttgtttctgtgatgagttcaagacatcagcggtaatggcatgtagaaccatgtctcctacacaacgcagcagcagcaacacagggtctattcagcccttcaccctccagactcggcggaggagctcagaagttggtacgcctgagtcatcacatcgcatgacccactcaagtgcaatgaaatatcttagacaaaatgatattaaaggcgattctgatcagtatgctatagctaatga

SEQ ID NO: 16614 - DNA, 841 bp, Zea Mays
aaacaattgaacttgtacatgtcttttgatattaaattatctatagactatagttattagcacttaataatttcgcctaggctgtcagtaattcctgggtccgccactggctaggagcgcccggtgatcgccggagataccgccacggtagaagccacctagcgcttgcgctagtgccttcttcttcctctagccgccgcgcgtctcgcccgattcaccagccaccgccgttgagccctataaattgaagcctccaccagccccacaaggtcatcagctacccagtctccgagaatcgttagcaatcgttcgccagagctcgcgaattttgaattcgccccaaatcagttctctgccaccccgaaatccacctcaccgcggccagccccattccggtcagttcatcctcccctctccctcgtttaagctttctcatatgtctacgatgcttgccgacccacgcaattgcgctaggagccctctggtcgccgggaacacgactgtctagccgcactgctcacggtcaccgtggccagagcaaacctattggtcattagtgaaattaggttgggggaaaggtttgggatgggtccaattccgtgtttgttgctcgggaaccctagtcattgccccagtcggccggtacagttgctcaccggagcgcggccgcgttcaccgtcgtcgtggacttcaccccgcgaaggaatagaaatcgaaggacctctgtgcaaatcgttagtgactcagaaaaacagtaaccgaactcgttcccagttagccaaaaacccgaggcccttttcgcaaaactgccatcgcgcgcgcgggcgcgggcgcgctttcc

SEQ ID NO: 16615 - DNA, 600 bp, Zea Mays
tcaatctgtcctggagctttgaaataacaaactcatccttgctaatattcaaggaggcccgaagtgttgccgcagcgttcgcttcatcaatattaaggggctttccaccacccaaatttggaagaccatatctgatggatagtctgtttggtgattttgagttctttgtctggaccaatacgaagagtcatgtctctggggtctagcttctgcatgagccaacaaagaagtgttcgacatccaattgcatcaattgtcatgtcaagaatactagagaatcattttctgactatagcttgacgttgcctttcattcaatatctgaatggacgcaagaacatctcctgggttgcatatgatgttgagtctctgtaatgaaaaggtagatagatggataaatatgttaatacttaaatatcacaatttatgcgttcttatttatacaaagttccttgtcctatgactgttttggattaatgagctaagataatgtagaaagctatatctttcagcacataaggtatgtattgtgattagatgcatgattaaaatattggaaacgattaatttctgcaatgttgtaaactcacctgcgtcttgt

SEQ ID NO: 16616 - DNA, 462 bp, Zea Mays
acagccacaacgctgttgcctgatgcctcgcgtgaagaagaagggtgagggccatcggatcctcgatgaagggttgaggtaagtcgatgtgaacagccgtgggatcggagataagcggtggagatttgatcttgcgtaccccttcgtcaaatgaatatgagccgtaggatggtagtttgatgaccgagattagatcccatcctcataaaaccctagccgcaggattttaatcggaagccccacgttatgtatcagttcgtagtgaatcgggatctaatccgcaccgtccatttgcgatctggcggcccagatttgagaataccccttcggccatacacttttcctaaagagcccctgttgagttacgaaatgaacccgtggtccataagcagtatagggagacttaatctatgcccctggaacttacattttagcccctgtaaaaccacagaattgtgcgcg

SEQ ID NO: 16617 - DNA, 1623 bp, Zea Mays
gatgtgcaaataatcagtttggtgtttcactcgtctagtcgataaatgttgttataaataattgcgctaaaacttggtcataagagtgcactgggcacgtggtgtaggttggatgtgataagtagattggaagtgtgggtttgttgagcactgtattgttgaaagggtatatcgaagtgcatggtagtggtaattgcatcaagttaatcagtagtgtctcgagtgcacgccaccacatggttgtatgcgagacagggcaatataagatgtgctcgccacgatagttcggttagaataggtagaaattgttttggcttaagtagaggggtgatggcatgccaaggtagccgttgcttcctctataattataagtcgagtcaaaatgcggggtactagtggtacgctagacgggtggtgtccaaataaattaactggtcgatatggtagtcgtcgtgcgtgatttatggttagtgagtagttgaattacgagttatgcgagaatcatgttagaaactaatgtgcggcgtgtaactgtgctcgggtggtaaaccctaggtcggtaggtattattggtgtcgttggcaaatggggatgattcttgttgtgcgataaaattggaaaggcaaagaacaggggtagtgtgtcgatcaagttaaccgataggttccgtgaacacgcttgtgatgcttttatatgcatgataagatcgatgccttgtcgtcgtagtcttagaaaatttttctgaaacgcgctagcgctctactgatgggttgaatgaacttgggatgtattacactagttgtatgtctcgcaggttatgcaaaaatggcgaaaggtggtgtaggttgataattgggaaatagtcacgtcattagccaactcatgttaagtaggagtcgatggcgtaagtgattgtgatataaatagatgtggtgtctcggactgcgataataataggcaagccgacgtgtacgctgtcgagcggaccgtgtcgttgctctagttagccaaattgttcgatggcttaggttaagctcgtagttacgatgaattacttattgtagtctaaatgtgtatggttatgatcgcgggtaaaaattagtagtgctcaagtgatgtctaagttaaaatacaaactagtgtataaagggcgcgtcgatacacgcatatgtaccgggtccgattattgtggtggatgtgtttgtaaaaattgtgtgtggtgattctagcgtacaaagtaactcggataaaaattggtaagttgacttgttggttctcatttgattaatttaactctaactaatggtaaagctttagagtaatttaagtctctcgaacgcagcgattcttgaattatataggagctgaaatttattgattgctgttttgggctgcacgcgctgtttttgtcgtgttgtatgtttgatgaactaaattgtattttctgtagatatgtgctatagaaaagtggtagctaactttattatcttgctggtgttaaaatttgacagacataagtctgatcgtttaggagttatgatttttacaaattcagtgactgaatctgtccaaattctgtacagatttcagaaactgcattgtttgcctaatgtaatgttagaa

SEQ ID NO: 16618 - DNA, 837 bp, Zea Mays
gctttatatgatgtttcagacagcaaatttgacctgaaacttcatatgtagatgacaagagggagtatgtcttagagtgctgtcttcctccattttttagaccaaaggcctcatggcccagcttatattgagtgctggggttgctagcttacagtcaaggcacataccaccacaaaataaaccctctaaacaccaccagataaggcatcacagcacagtctaaagataaaacaagaaaaactcctttacaactgccaggataaaataagaaaagactggaagccccgctaggtgcatttcaccagcttgaaagcccttcatcttctgcagcagcccttccatcctgttccattcctccattgccagcttgatccactgatttaggaaaccaagagttttgtaagctacatgtttaagagtttttacaatcatattcgaaaacacaaggccacccgtagttttctaaagcacctacctaactgccactaacacccaccacatcaaactatttctgccccaacaagcactctccaggaaattatcttggaaattcttgatggatgttgttgtgggagagctagcccaccctaggctattttctcacccatcactagactagagtatggattaggcttagtccaaaattcaattggactttggcacgtggattccattgggtttgaactcaattggatgaggacatccattccttgcacatctaatagttttggattttgttgaataaaaaagttggataaatattgacttcgactcggcagcactaaccaccatctcggcacacgagggtcttctccatctctagcgacatgccaagac

SEQ ID NO: 16619 - DNA, 372 bp, Zea Mays
gtctgcttcagaaaaaacaatgaactgtgggacttcttcaagagaagtgacacggacacgaagcaacgtcctggtgacattatggcggtcctcctcccacagaatcaacctgccaaaagaaccaatagctacttgcaggtactctgaagagcggtagtccagagggaagcccaataacatcagccaacattcacgattggaaaaaagagtccggtgattccaagcatcattatgacgaagagcagtgaaagtagcatctaggtactgttggggaccaagcaaaacaagattgtctctctccaaaacactgtgaaactgcaccagcacctaacccaagtgagaacgccgaatatctctcacccctatccttcg

SEQ ID NO: 16620 - DNA, 358 bp, Zea Mays
tgttccattggggtaaaggtgaatgacaaatagggggagcaacctatagtatactatcgaaagcggacgaagaagcaggggagcaaccacaacctgaacgtgttgaagctccagtcccgtatctctcttcagactcctctccagatccagatggtaatgtctctccaatccctgtttctcccatttctgaacatgaggaattacctcttgcacaaagaagagttcctagagtaaatgctgggaaacctccttctcggtattgttatgaacatgaaattgctaagtatgtctcatactctagtgtctctcttgcatatagaactttcattgcatctctgcaaacaatatctattccaaa

SEQ ID NO: 16621 - DNA, 482 bp, Zea Mays
gtcgatttgggggaagaacggagttagggcgctacggtggctaatcagaggcgagggctagtgctctggcttcgtaacaacctagcgaagctaacggtgcactcaatttatagcatccgagagtagtggctccgaattttgaaggggaaagctggcggccagagagaggggtgagtcactggcgaacgctatcgtggctttcaccgaggcaatgttccaggcaaggagcaggctaccaacgacaatctactacgacgtggtaacacttctcagcacgtggcacgactacaaagggtggcgaactccggcaaggacacctcagttaatcgcgcggcaagtgggtacggtgaacaatccagtgataaggctccaactcttccttgcgatgagatctttcaccgccgatcgttatcctcacaccagggtgcacgaatcacgatgccggcgaggatcgcggtgtggggttcaccggcggcacgttc

SEQ ID NO: 16622 - DNA, 485 bp, Zea Mays
tggacgaggactccgcagccagactccggtcgagacgaacgcaatcagtagcaggtgcacaacatcgccaaccagcaccccgctggtgacgcccctcgccgccaggaatatccccctcagggccgcggaaatggaactcgtggtaggggactggggcgtgcgcaaccgccgcgccgattctactgtctttttcatggcgaagactgcgcccaccaaaccagagactgcccagagacgaaggccaccaaagataggatggcacgggcacagccagcggacaaccctagggttgtcgcgcacacttatcagcaaccccctccaccatacatccacgcccccgctctgcatccaccacaccacgcataccaacaccaccaggaagtacaaatcgtatctcccccacacccacctccacaccagcaacaaaacatcccccacccccacgccccaaaacaagaagacttcgccgatcagccgtatcgcgg

SEQ ID NO: 16623 - DNA, 616 bp, Zea Mays
gttaatttaaactccctagattattttgtggaatcccaacagagtttattcatttgcttgtactctatgaagtggaagttcttgagatgccaaaaaagcagggaagtgcggacacaacagtcaagatgagctacttaaaagtgaggataattcaaaggagcgtggtatcccgagaatatgaacactccagagatgcaatatttgaggttagtatgcagtagtcgagcctattcatagattattgttcctgttttctaatcttggtcttatgactaataatttttaatgagtggttctaactggactgcttccaaatgtagtcattggctaagccaaaatttgaatttcataaagtaactaagatcagtgtttgtccggattgtgacaaggctatagcttttcccttaatcgatcagaccatatcctaggattaactgattaaggatgtgcaacagaacccttttgttgtcgacgatatcaatgagcttcgtttttttttcacatccataactatataccaagcctttttgccacatttgcaagccacaccatcgctatgaacagaaaaactattatgctagatccatcttctatccgcatatcataaccataacga

SEQ ID NO: 16624 - DNA, 336 bp, Zea Mays
gacgagcaaggttttcgcctacacaggaacgcccaccgtcggagtcgccacatcgcctaggagcgtgaacgtgaggcggctgggcataatgttaggcctccatgtgagcatttacctcttccccgcaacctgcaacctaaattcgtctaggccatgtagactccaagctaggttggtggcgtactggatcagttggcgaacgatctacctcgcacgctcgacaatgagagttaccaaaaaatcctcactcggacgacgaaccaccttcttccaccagttcacctggatggcgacatgtgtcaccacatcaacaaccaacatgacgtgtgaaccagc

SEQ ID NO: 16625 - DNA, 983 bp, Zea Mays
tacaactccaggtattgctggaataatatctataataaagacaatggagttgtcttatcatgtgcatgtttatttctgtctaccaccacatgagatgtttttattgctggacccacttcagtccttgaatatatgtacatcagtgtttcctttcttagatatcgttgtctgttattttccttactgtagttgatcagggcatggataggtgctgactgctgaccaaaagaacaagtcgggatggagtagtaaaatatctgttatacaaaagcagaggaggaaaagaaaagataggcgtaggataagctggcaaggcacatagcatttcctcgatttgaggggatcaagatccatcaatggacgatctgaagataggcctgaaaactgacgacaacacctagtcctgaatgataagacctgaattattggaggggactttgcttgtgctttctccacatgcatagatgcatgaatgtatcagatgcctgtccacaccagtcttcaaagttatgtcacatcacgaataaaataggtagggaaaagcaatcctgtacctccatcaagtgatacaataatgttagataccataactagcttatcctcttacacagtttactgtagagtgatttgtgtgcaatggaaaacataagattaaaatgccagggcagatgactagtactagcagtacaccgtgatgcatgctttctttttctaggccaaagatgtacgtactttaagactttatcaagtccagcatttcagattaaaatttagccccaccttttcatttttgcattgtacttgctgcatgctgggccctgaacttattttagtattgttgagtataatatgcgatttatattatgactaatagtttaatgtttgtttcctgatgggctaacaaaggttacactttaagaattgaagtcaacatgatgacgctaacatgtaatcaaaagtaggtaaaatatattcacgattga

SEQ ID NO: 16626 - DNA, 533 bp, Zea Mays
gccccgcctatcagctccctcccctcgcccgtgatctgcaatcgacgcgatcaccgccggccagcgccccgcctcgtcgcctcgccattactcctccccagcaagacttggtgccttgcgcctgccccgagctatcccatcacccccctctgcccgacccatcccgtcgcaattgtgcgccattttcgccgtcgcggcaagtgtcgtcgatgtgcaccacctcaccccccttcccctccagtccgcctataaaagggccgccccgagctcctgacttcaccgcaccaggccttagccactccaccttcctccctcggactcaatcaagctcgacgccgtcgtccctcccctctccggtgagctccgctctgccccctctgttgagttcgagtcaaattagtgtagctatggacctccaccacttcactacgagcacgactcaccttttcccctcgcctattgcatcgttggcctcgccggcgacctcaccaccgcgagcaccccgccaccgcaccgtggaccggccaccccag

SEQ ID NO: 16627 - DNA, 313 bp, Zea Mays
atttgttttgcttcgggtaaggacaatctttgatgaaatgtccagactttccaaagttgaagcagttgtcagatgagttgggtagggcttggaaacgagtactaggggcacccggctgaatgatttgagtagggacaatagttgtacgaatgaagaccgactgcttaaaaggataggaggatgggcgagaaaaagagcgatttgggttaaaggaacggatcacttgccttgatcgctttccggatccctgagaggatccctcacccccttcacgtccaaacctttttgtcttctcctgccccgagttcttcgc

SEQ ID NO: 16628 - DNA, 632 bp, Zea Mays
tccgcgtggcccagatcaggaaccagtcgcgtgggtgggtatgacacgtgggtccatttggtcagtgcaaccgtgtccgcatgcgtatcgctgagtgtggccacagggtcggactcatcttcttctcgatgcggtctggtgtgcatttccggccagagatctctcgccgccttgagtccgctcggctgcgtaaccgatctcgcgccagaatcggactttaggaaaaaccaccgaacaccctcgccaatcgggggcccactcgtcgggtctatcatcttcttcttagcccctcgtcgtaaaggattgctaactatgcgcggtcgtcgttgctgctcgtccgggatccgcgctaactgaccgggtctcgggtgacggaataaaggcaggaatatccaatccccagcctccatcctcaagaagccctcacctctgccgcctctgtactcgccccacccttatggcgcgcgctcctgcctgcatgtgcctgttgccgcaccagctaccgtcttccctgtgcgtggagccgagcggctctatcacccaagacctagagaaatcgcgggaggtgagagaagagatctacaccggcggtgttcgtcctggcgccggatctcttgtcaccggtggcgagc

SEQ ID NO: 16629 - DNA, 804 bp, Zea Mays
tgctgaagctgtccccaatgggtgtaatcctgttgcagctaagcccaatgggtgtaatcctgcaccatcctttgtccgcattttttatgaagacgaagaagaagaagttccactaattcgcaagaatagccggcgttacagaggtagtagaggggatagtgatattccttctccagctctgtctgctcttattagcctgcaagaattatccttaacagattttgatcaggcccttgaagatgttgttcctgaggatatgctgtcagagccgactgatggtgatatgatggatgtttgctctgacattccagatgtgggtttagaggtatcccagcagcatctcgcgcatcgtcgaccttggaaggcagtcttcggtgtcaagagattggtccagattgcccgactcccatggaggtgactgaggatccttcagccgtagaggtggctgttgcagaaaacctagcccccaagggtggtgctagcgattacccagccccgagggtgtttccggtaatgatccagctcgggtgggtgtcgcaagctgcaacccagcccctgagggtgttgccgatagtgatccggctccgatggacagtgcgagctgtaacccagccccagagggtgtccgagcgagctctgcttcccatacctccatggatgtccacgtcgggtcgtctccaccacattctgatggagtgatagtgatgcatacttctttagcttcaagtgagggagtcaccttagaggtcggcgcaccggatgataggattctgatatctgctggtggagctgaatcaacccccg

SEQ ID NO: 16630 - DNA, 460 bp, Zea Mays
cttgtgtagcatgtggtggctcgaacgcatatctcggtaactcattgaaaatgggaccgaccgttgctggcacggacggtccgctctcacgggcggacggtccggacatgtgtagatcgactaatttattgctgatgtgcgtaggaggttgtggttgctcagggtatgtgtccatcggcatcccataaaggggttatgactggtcgtgacaacctacaaccgatgaattacgcgtgttccccccaattcaacctcgtgcgaaggagaatttgcaacagtaaatttatcaaacgcatgtactagccttttataatccttttgtataccccctacgatatgttgcatttgttctcgctgttcatctatgtaagctttaagagattggagctcgttggtgttacttacgttgggggtatccattgtgagttggagcgaagccagatgagtcgcccattgccaa

SEQ ID NO: 16631 - DNA, 445 bp, Zea Mays
gcgaagcatcacattgccatacaacaaaaatcatgacaacaccgatagatactatccactaaccgtttgaaaaactaaacttacttctcgcttgccactgcatcactcctcaatcacatgaccatcatgagcatcctccacacgattatataatagcgacctaagcgtcgtgttacacaatacatacatctttcctcgtcgcgagtataaccatattacggcatatacccgcacacctcaatcaattatcttacgtcaccaccactataatacaccacggcacacacacatacgtgtccccacgttacgcacaagacatcaaccacaccagtgactccaataggatttatcatattccccattcacctcgactatcacaatcgccgatcatatgcataaaacaaatacacctttcacgtagacacctatcgatgcattccccaac

SEQ ID NO: 16632 - DNA, 1722 bp, Zea Mays
gtctggagtgagtctggaggaggccttgccgcattgaggacggttgcttctgggcagtaggggtggttgctctggatcattgccattgtgagctaacctggccgccctcctcgcccttccctcctccattactttaatcccctctcctctccattactttaatcaccacctccgaattaaaaaaaccccaattaacaatcaatcaggtaagccccagcacggcagcacgtaagcgctaatagtctaatcacaaaagagggattagccactaattaagtatgtcgctttgcttttggttggcatcgagggcacagtgaggcgccgtgtcgcatggacgggctgcctcctctcgttcctcgccattgtttaatcagcctcttctccgctggtacgcatagatccagcacatgctagctaaggcaggctttcatcagatcagatgagctgatgagcatgagctctcgtcgacaaacacccggcccttggcttggctcctctcttcggcctttctttttcatctgacaagtgacaagtgacaggaagcttgcttggctgtgatgtttacttgtatttaggcctttagggttccaaggcaggagaatccggctgtttcgtttcatccccgcactggagtctccttctcatagatcgatgcagcttcattcgtagtatatagagtattattatttttcccttgccttgtatcttgcgtgtgtaggagtaggctacaagcggcatcccatgcatctcgtctttccttgcagctctatcctactactagagattagagacacatcagaggtgcattgggaaatggtgacatggattctccacctgtcgcagctgtagcaacattgccggcagctgttctgctgtggcctgtagctgttactgcaatcgtgttggggttgcagtagcagtggcagcagaacaaggtagcctgtgtgtatgagagagagacacacacacacagagatggtcgccgttcgtgtcctccggggggtgctgccggccggcctgttttgcagctggacgtgcagctgcactgcagccatgcgtttgcagatttgtgtttaaggttcatgctacacactgtggaactgttctacgccactggctgtgccaagctgtgtacgacaggagcataggctggcgtcttatgtaggctgcagtacacaggttcagatgtttcttacaacaacagaacccatcaggaagtcaccagaccctgaaaaccactacccccctgccagcctcagccctcagccattgacgatttagtttagttacatctgtctgtttttgttgatagaatctaaggaggtcaatttgagattactgcaattgatacgacaataacagacgcagccacgcaggaaattatccattgcttatgttaaggcatgtgaactatagaaataaactccctgttcccgaatacaactttgactatatcttgttacaacaacgtttttttataattttttttcctaaattatggtttaattttgctctgggttttcaactgcaaaagcaataaaaaaaatgaagatcatttcatgtgagtgactagttcagatatctaacatgaagccaacaattattatggctgtgcacttctccaaaagtttcaagtgtatcttctatacaaatctatgcactcaatattagatcttgtaataggaatgtgccggttcttgttgctaaagtttaagtttttcc

SEQ ID NO: 16633 - DNA, 631 bp, Zea Mays
tgggtggtatgcactggtaagaaaggagcagtcttggtcaatctgtccacaataacccaaatggaatcatggtgcctggaggtattgggcaatcctacgataaagtccatgcaaatgtcctcccacttccaagatggtatgggaaggggttgcaaagggcctactatcttcaaatgactagccttgatcctctggcaggtgtcacactcggatatatacttggcaatttccctcttcatcctggtccaccagtataaggatctgagatcatggtacatcttgttgctgcctgggtgcatggagaattttgaaagatgagcttcatccagtatcttctttctgagctcagggtccttaggaacaaccaatcgatctccaaaccatagaattcccttgctgtcctgacggaagcacttgtattttttctgccttcaacttgatcatgtctttgataacctgaacacccttatcctcaatttgtgccctgactatttgctcttgcaatgtgggctctgccgagatataacttaagtcacctgaagcaacaacttctaggttcagcttgcacaattcatcgcacagggtggtaactcttgcatccatgctcatacaattgcactgggcctttctg

SEQ ID NO: 16634 - DNA, 1129 bp, Zea Mays
ctggttgatggaggagggcgccttgggggcgggtgctaaggtattcttggggccattcaccgagttggagtaagcaggtcctgatgccttcaactgggggcagttgttcttgaagtgactggggtctccgtagtgccaacacgcattcactggtggttggttgcttgcaaccgagggggcatgaaaggagctctgactctgctgactgaaccgtgacggagtgggtccagctggtctaatgaagcttggtcccttgggtggaaacccaaaggaacgagttttctggtgccggtcttgctgctgagctcggaggacttagaatttcctcttgagatggcctttttcttcttcccttgccctttccacttgcatggctttgtttgagaggtgcgagaagctgaggaaatcttggctggctaggatggtcttgagttctagtctgagccccttcaaaaagcgggccatcttcttgacttcggtgctgacgtcatccggcgcgtagcgggccaagtctgtgaatttgtgcatgtattcactgaccgatcttccatcttgagttagttcctggaattcatcttccttgagctgaacgatcccttggggcacatggtgttctcggaaagcagtttcaaactctatccaggtagcatctctgatggctgcgttgaaggtatcccaccaagctaaggccattccggaaagttgatgagcagccagttgaacacgctgattctccgggcatccgatggcttctagcttccttttaatcgtgcgcagccaatcatcagcatcgatgggattgctagatccagcgaatgtgggaggcttgagcctcagaaaatctcccatcctgtcttgtggtcttctaccattcgggcgttgattttccagacttctagtgaggacctcaatgagtcgggtttggttggatagaacttgggctaaatctaagggtagctctggaggtgcggggaggtgggtctcactctcttctctaccggcttctcttttagctctttggggaaaccctgctccaatcccggaggcggtaggcgtagttttatctgaagccatctgccagggggagagagtcactattatgcatatgtcaatttcaaccaagttattt

SEQ ID NO: 16635 - DNA, 502 bp, Zea Mays
ataactataaattatcttatattagaggcgtgttgttgttatacctttaagcgcagctatgtattcttcaggaaaataaccacatgtcattgatgttctgatacttttggtaggacctaggttattgtattgtcagagacagcagaccaagtattaacgttgttaggcattgtaattatcatgtattctttggtaccttgagtgactaattgatgttgttccaacgctcttttacgttgttgtcgtgcaagtgcagcatttacgtggtcacataagaaatctttctccgaggagttaaagcccaagtatcagttacatgagaagccacaatagaagtaggaggatctgcttcatcattgacatccatttcctttgttgctgaagaatcactcatttggtaaattaagttttatatgactggacaattactcgtcctataacatttagtcgaggtattatatgttagtttgcgcatggatgaaacactatgcgattgaaaaat

SEQ ID NO: 16636 - DNA, 551 bp, Zea Mays
ttgcgatccgacccggtcaaatcgtctctgatctccaatctcatcccttcgatacccatccaatggccgaccgaggcctaggcacaaaacaggccgacggcgacgagcttttacgatggcgcccaccccctccggcaacccatggtgaggcccaccggtatcccaacctcgcaatggaacaatcctactccgagaggagacaaaagcggagatgagggaatggttcttaccgacggtcgtgcggtgagcagggcagtccatggcgtgactagtcccgcggcggggctacacttccgatgagaaattcctccgtcccccggtgagtaacacgccaaccgcacacatgcaccacgcgccaaatcggccaccgaatctcggaagaagagttcaagccgaggtgtggagtggctccgaatcgggacaccccccgtcggtgcgctaatggcggcgagtcacgcctaggtggttcgacgtcctatcggttgcgagcagtagattagggtcgagaggagagtagggtcaacacgatatttatccccccacgaggtggg

SEQ ID NO: 16637 - DNA, 325 bp, Zea Mays
tggatctcggccattggatctccacgcgacggctaagattagaaggtcgttttaaacgaaccggtatccattccacgccatcggattcgaatctgaccgtggttattttaagaaagcgagatcggatcgggtccgtgagatcccatccaacggttcacgatcaataaccgaaagggtatccccgtgctctatctcgaccgtaagatggttatcggacggtcccgatcactgcccgatctaatcttctctcctagctctctctcacggccacagcggtgacccacgacggcgccatggccggctcccacaatccaggtgccccggc

SEQ ID NO: 16638 - DNA, 342 bp, Zea Mays
gcatcaaatagttattacagaccgattgttcattacaaaaataaaggggtactgcataaagggtactgcataataaactttctccccctttttggcaacaagaaccaaaaagagagagagaagcgtcaatccaatgatcaccagtggggaggaggatgatgaggagcaaagaggtggtgcgccaggtcagaggcaaagtgttcctctccagactgggtcggaggaggagcactgccagaagggtcctggggcggagggtaagaggacgattggcccggatccccgtgatacggaggcgggacaaactgctccggatcatcaaaataagtttcttcttcttcg

SEQ ID NO: 16639 - DNA, 1329 bp, Zea Mays
ctcacccagggattctgggtagcagggattacactccctgggtgctgactcccctgggctcccttcccccagctgccaaaggaggcctaagggctaggagcctcccttaggaggagcttcataaggttagaagccccagctaaacaccacatctggaattcagtagccactgagcaataactgcctgcagcttgggttgagctccatcgaacacgcaggcatttctgtgcttccaaagctcccaagtgaccaagatgactaaggaattgaaccttttttaaaaatctttgggaatagcagcggtggccatacaccaccaggaccaaaaccgactcaaataattggggtgtggaaccatgtcaaaattaagtttccttaaaatcactcccacacttctctgggcagcacacaagaggagaggactatgtccagatttgcaactatagaagcaggaaagaaagtgcatgataccatccttttaaccggattttggagctcaattgaggattgcttgagagtttcacaaccccttattgttttgttgaggatagttgatggggataagaggccagcaatgccagaggtttcattttgtatggaacattggaacatgcacagaaaaagattaagaaaatttccctactatggcaaaggcaaacatgcttaagcctatcttggaaattattgaccggtattgggaagatcaaatggaccaacaactatatgggcagcgctatatttgaacgcaaacaagtattttgagctgaaaacagatgatgttcatgctggtaagctaaggtctgcatttagacaaaattgatgaccaagctttggaatatgaggacctaagggctagcttcagtaacaaaattgcaatcaacatcatcaaaattcaaaaccaagacttttagtaagttcttcacagatcatacaatctgaattttttagtctttccaaatttctaacaagaatttttttttggtcacttgatctagttgaatggtggcgttcatatggtggcagagtcgtagagctccaaagatttgcaaaacatgtcattgggctttgtgcttcatcttcagctgtgagcgctgttagagcacatttgagtccgcaagtaatttgtcaatctacttgtgtttgctgaaaatttcttttctttgcatttttaccattgcagatttatactaagaaaagaaacaatttagagcataagaggctgaatgactttcagtatatccgaaggatggcagtgaggttctaacagcgacatgagaaaggagcagacagctttgattctttgtgtttggaagactttgattagaacaa

SEQ ID NO: 16640 - DNA, 962 bp, Zea Mays
gtggatttgcttgtgcttggtgctaatttttttgggggttcctcttaggaagtttcttctgtttggtgggcagcttgggggcaacctctgtgcttggcgggcgcttgcctgcaaaacctagaacaactatgttttctacttagctgaatggcagagcttctaaccttttttttcccttaaagaagagagaatgtatagttgacagtctgttgttggtagtattggtttacatccttgagatgttgttgtacacggcttgttcagatgatcgaacttatatgtgcttatttttggtggtactggactggcaaggaggtgcagttgttttttgttttcttttgatgcttaggtcactgagttttggcggtggaggtagactaggtgaaatgctgtggtgttcttggctagctttgcaggatggagccagtgagccaccgaggtgggaaatgtgccttggggggatgaagccatctttgtggaaattctatgaccgccactttcgtgaagtgaaagccatatcaccttagtgccttttgcacttgtgccttatccttcagaccatgcagagcgttagagccacagagcagagtgaaacgatatggatgatgttggtaaagatgtccagtatcttcgagcgttcttgtgcgtgcgagcctgtatgttcgaagcggtggtattcatggatacccttcgtatttcgaattcggtcaggtgtttttttgtaactctaggctgcctaatgatgcccagcagcccaggtacaaggaaccgtacctggtgtgaagttgtggatatgtttttttttggtttatgcagcttagtgttcgaatatgtgtgttacaagtgatagtaaaatttatgtggttctgttggaagcactcgacttagggggggggggggggggggaatcaacactgttgttttttgatccaatgtatccatctgtgctgctccaggtgtgg

SEQ ID NO: 16641 - DNA, 475 bp, Zea Mays
tggggaccagggccaagcgcaagcagccaagccgtcatatcatataatatactaataacagcttagcaacccccaggaaccacccaatccagattatcctgaatcccacggggaattatttgcacgcaggcaggcagatggtgcagtcccccttcttccatgtcatgtcatgcagtcagttcagtgcaggcctcagcgttatctgatagtgcagccgcagccattgctctccgagtatattattagccgccccgcccatgatgttattttagtgcatgacacggtgctccaccatgaggcgctaatccgctaataaaagacatcgttgttagtgttgatgcgtgatgaggtgggatcgatcggctcctggacaatcctcatctcctcgtccctccaagctggacagcactagtttatcctcaaccaccggtcccggatgccggctgcccccaggccccaccagcagcccagctac

SEQ ID NO: 16642 - DNA, 312 bp, Zea Mays
caaaactgcaggacatggaaaatcaaaggggtttggaggtgaaaggtcaaatcaagggcctgagaagagaaccaggttggtgatctgaccttttaatcaaaatcgctcttcgccttgcccaccttcatatccattcaagcagcctgtttttattcgtcccactactgcccctgctcctaccaatcagccgagtgcccctggtactcgtttccctgctctccctagttcttccattggttgcttcaattgtggaaagtccgaacacttcatcaagaattgcccatacccgaagcaaaataaaaccaatttcca

SEQ ID NO: 16643 - DNA, 308 bp, Zea Mays
atcgtacgtaggtgtctgatgttgtcgtttcgctgggtatcgcggggggtacgtagggaatgcgatttctaggtttatcctttcatataagtgattttgattggggggatgttacatgatactcgtgatttagacgtaagttgtctatgctgtaaggctgatcttaatattgagctccctgatactaccatccacgtgcagcttcatctgttccattgtctgaaatgcaaacttgcaaagtatactggtttcacacccgactcatccattagggatcctgaactgctgatatgcatgttcaataccta

SEQ ID NO: 16644 - DNA, 492 bp, Zea Mays
gaacggggagagaacttctggcagtcttcgcacgacctcgtgactcgatttgcggcgcaggttatagcgggccagtagaaaccttgatgaatcaccttggcagcgagggccctgggccctgagtgagagccacaagtgccgctgtggacttcgcgcacgatctggaggccttcggtctctgtgacacatttgagcatgggttgactgatccctttcttgtatagctggccctcaataagtgcgaagtcccggcttcggtgtttgaggtgtttggcctcgttgacatcacctggatggtaatatccttgcaagaacagggttattggggtccgctagtcttcggccatgatgaggttgacaatgcgatggccctcggcgttggtggttatttgcagaccctctgggttgcggacggctggtgtgccaatgacgtggtagaacacgtcggagggtagggcttcgcctctggctgctgctttggctaacgcgttg

SEQ ID NO: 16645 - DNA, 460 bp, Zea Mays
ttcagcagtacccgatgtcgacgagccaacttccaaagacctcattgacggagaccgtgtcttcgccctgcaggccctcgataagtatcaagcccaaacgaaggcctggcgcgaccacgcagtcgtcccaagagaattcaacgaaggggacctcgtgcttgtccgcacaacccggacagagtcacagggtaagctggaaccgaagtgggaaggaccatttatcgtcaagacaaagtcgtctcccagcacatacatattaacaacacaatctggcgaagacctggaacattcctagaacatagacaaccttcgcaaattttttgtttaactcctcagggccaactcacccttgtaattccccaaacagctttattccggcccgcactcttttcctcccggggggtgaggtttttaatgaggcggagccatgtaatatacacgcaaaaaatcccctgcaaaa

SEQ ID NO: 16646 - DNA, 870 bp, Zea Mays
cagattttgatggccataaaccgaaaaaaaagcctaaacaaagagggctatcataccatgttggcgtcatgcatgctcgtgcacgtggcctcggaaatcacaggcatctgactggacagtaaacttacacacgcagcacgcccttttggctgctgccacacgtacgggcaacttcagagacacatgctgagccagtgactgacaaggaccggactgatagtgtagtaaagtagcactgctcaatgctagagcaagcgtgcgtagagcccgcgtgtacataaacatactacagcacatcgatcggagggaccagatggcctcagccatgtctctatttaggccctatagattgtattagctcaatagctccggttctttctcacatatatgcactgtagtaatatgcaccattctagcactatagcaacactactctttataggagtctttctttctctctctcttctctcttctctcttctctcttctctctcttttgtctttcgctgatgaaaccatctttttggacattatcactacagtagctaaacagtgataaagccgattggaacccataccaagcatagaaaaaaggacattagcctactattgctgctgcgcgcgcctcaattccagcagcgtgtgcccctacatcatttaattctttatttagtactgtgtacgtgtatggtatacggtgtcttaactctcaaccgatcgggccagccatcgaaattataagatcaagtttaataatatagctaaccgctggttgtaagtaaggaacattatagtctacttcttagcctatccgtatagtagttagctcttcactgttaatttatgatttgcatgtctttctcacaaaaaa

SEQ ID NO: 16647 - DNA, 414 bp, Zea Mays
gctgcaaataatgacgccaacgatccacagccataatcagggcaataaactccttctcataaatcgacagcttctgattagtaacgcccaatgccttactcaagaaagctataggccgctcctgctgcatcaacactgctcctaccccatcatcacaggcgtcagtctcaacagcaaaaggtatgttaaagtcaggtaaggccaataccgaaatggagaccatagcctgcttcagacgctaaaaagccatttcagctgctggtgtccacttaaaagcccctttctgtagtaacttcgtgagtggccgagcaatgatcccatacccttgcacaaagcgcctgtagtaccctgtcaaccccagaaagcctctcaaatccgtgacattctgtgggtgcggccacttgagcatagcgt

SEQ ID NO: 16648 - DNA, 548 bp, Zea Mays
ctcgtgtaccccgactatcctaactatatgtccttaactcgaatggcacctccaagaagaaagaccaaagaagaccaaccatgtcaaaggaggataagcatcaactcaagtattcaaagatcaagttgagtcgccagaagaatcaaggtccagagtttaggatgaagtctttccttattatacccttgccacaacccctacttgccataaccgtacctcatctgacccaatatatggctagacatacaatatccatatgttccaaatcgtctactaactgttatgtaaaaacttgaacaaaactttgatttccaaaacccaatgagaaactaaaattctaaaccaaacctattgtatcctttttttacaaatctcggggacgagatttcttttaaggggggtaggatttgtaatacccaaaaattatataagagtcgatctcattatgtgatttgccatccgcataataaggcatgttaaaaatcagaaagtgaacaattaactaatagaatactctatgcatcatgttggagtttatttgtttgcgc

SEQ ID NO: 16649 - DNA, 293 bp, Zea Mays
atgtactttgtgcactaaccttttcttgcagtttgaaattgactatggcctctttcttcaaaaaaacctgaaattgttcagtttaccaaaaaatagtttcatggttgtacaactacatcatgatttgtgcttaagtgagttacataattgataattgggtacatcttccacaagtaaaatttcacaatagtgatcaaaggtggtcatgataattttaggtgggagttgacttgctcatcgtgtagaattagggttagggccaaagattggctttggtatactcatctttatcc

SEQ ID NO: 16650 - DNA, 675 bp, Zea Mays
cgaccacgcagggcaagaagcgtattttgaaggaactgggtattgtgaatgctgaagaaactgaaactattaggccagaagaccttgatgagtatgccagagttttcagcaaagggctttcagaggtgcaaatcatggccatggcagcgctattcggctggtctaggcctatggagctgctgcagggtggaccaatctgctgatttattgggtccctcactggtagtcgttcttctttcatcccttatggatccttcaaaaattctaatttggaatgtgcgaggccttaatgggtctgctaggcaggatgctgtacgcactttggtggattctgctcgagttgatgtggtttgtcttcaagagactaaaatggtggacgtttctcggttccttttattgcggatgctaggaccagcttttgaaaattttgtattcctaccttctgttggtgctagtggtggcatcttggtggcttggaaaaatagcattggtgtttgtgctggcagtagggtggatgaatatagcgtctctatgaattttcattctagcaccagctcaccgtggtggcttacatgtgtgtatggtccacaagggaaccgtgagaagattcagtttttgcaatctcttagagaaattagagctctctgtactgggtcgtggcttgtgctcggggac

SEQ ID NO: 16651 - DNA, 504 bp, Zea Mays
caaaagagtcaggctttgacacacatgtatggttcgaatgacaacacgagtgttgttagcatacgagctctaacattgaggagagatcgaatgaccattctagaaaaggcacaaacaaatgtccatcacctgcacaaaagctaatcatggctaaaccactcaatggcctgaaggacaactaaggacatgttgcaagacaagacaaggcacatcagtgtggcatgtgtggctacgttgatgtgatggaaggggacaatgtcagcttgcttgggaggtcctttggtcaacaagtatccaagaggacaagaaacaacatgacaatgctaggcctccgtctgtcccgcctaacccctagatttatgtaatagcacctcccttctgcttggtctccaaaaggaaggggaggaacacaaaagggcaacaagctagcacaagtagccaacacctataaccgcaccaatcacttcactcgcactccacaccagaggcttgggcatcgagccc

SEQ ID NO: 16652 - DNA, 823 bp, Zea Mays
aaacccccagccaagggcggttcggagctgtcacaaggtagggcagtcccagtcactactccccacacaaggcgaggcccaatgctatcacgtgttctacgacgcgtgacgtaagccattggggaaaccccgacgtcagcctctaagtgtgaagcgcttctgcattaactacgacgagatgtatacccacccgccccagtgataggcagtgcgtccacaatgcacaggtcgcatagtaactcgcgcgttactgaggtaaaaccattgaccccctgcgccgcatgggcagctatcatcatgactcccattgtagcctgtgcgctatcgaggcaaaaggagacatgcatggaagacaggttgccgccgcctaagcacccctacgagcggtagcgcatcaacctacgtcgcaacctactcctgcaccctgctcctattagacaggacaagggcatgacgagtcaggagatctacacgatgactaagagaagatatacgttcttcacagaccgccgctccacctcctccgtatctagcaatatattactgggccacttttcggggctcgttcaccatgtatgtgcctccattgggatataaaagggagggcacacacacggtaggggacaagtatgaaacgagttcaactagagactaagacggagacggatacacacaaagactcctaggcaatacaactaacagtggatatagggtattatgctccggtgcccgaaccacactaacccttgtgttctcatgttcttccaactaatcaggcaatccctaggccccctcctcatcttaggatcagggcgagtgcact

SEQ ID NO: 16653 - DNA, 435 bp, Zea Mays
ccgggagctagaggtggcccagaaggagaagaaggtggccaagaaggaggaacacttggaccagagggaggaggtcatcacggagctccaggcgaagctaaatgccttcaacaagatgctgtaggagtagcgggtccagcaggtcgcggctgtggagagcctacaaaggctacaacgggggctagatgacagggccagcagccttgccctggccgaagagaacctcaaggagaaggatgcttccctggataagcgggcggcggatctcgcctggcaggagaaagacctcgccttcagggaggagatgtttgaaaggcgagagaagctgctggccgatcatgaggtcgaggcggaggagaaggagcgagcgctggaggagcaggtccaccagttccatgcggcgtaggcggcacaggcagcactggcccccaggcg

SEQ ID NO: 16654 - DNA, 801 bp, Zea Mays
cagagatgctacctaggcagaatttgaagccgccttctgagaacatcacgtgccccaagggatcgttcagctcaaggaagatgaatttcgagaattaactcaaggtggaagatctgtcagtgagtatgtgcacaaattcacagaattggctcgctatgcgcctgacgatgttagcacagaagccaagaagatggctcatttcttgaaagggataagactagaactcaagactatccttgccagccaagatttcctcagcttctcgcacctctcaaacaaggccatacaagtggaaagagctagggaagaagaaaagggtcacctcaagaggaagttccaggtcctccaagctcagcagcaggacaggcaccagagaattcgatcctttgggtttccacccaagggaccaagcttcaacaagccaactggacccactccgtcacgtttcagttagcagggtcaaagctcctttcaggccccctccgttccaagcaaccatccgccagctaatgcctgttggcactacggagaccccagtcactacaagaataattgcccccagttgaaggcactcgtgcctacttactccaactcagtaaatggccccaagaatgccccagcaaccgcctctaaggcaccctcctccaacagctagcaaagcaagagccagtatcatggcagggcacgagtaaaccacgtcgacgttcaagaggctcagcaagccccgggagtagtgctcggtgagttcctaattgaatttactcccgctactgtacgttttgattcaggagcatctcattc

SEQ ID NO: 16655 - DNA, 613 bp, Zea Mays
gaaattttaggtaacgaacatggtgtaattaccaaggtaagatcgagagatgagaaagctaaaggtaatacccaaccggagcacaacaagggtggagttaaaaactcgcaaatgacaaggaagaggatacgaccaagtttaaaataggtaaagtgtatcactcagattgagatgaaaagaggagatttaaaagtgccggtataagataaacatcaaggtaagatatataggtgataaggatgaaggtgataatgatgaaaagcatagtccatggacagagttaaggcaagactcgcgaagtggagaaaataatcaagggtaagatagatatggttccaacagatgtgttgaagtaaaaattcattacccaaggaagttacaagaaaacaacgagatcaccaaggatgtgcaaaataaaatgactgctcatggatcattaagaaacaagggtggtcaaagacatgtaaactgaaatgttttaaatagacagtagaaatttaggggcaagtaattgaaacaagagtatggaagggatacgagcatgtcaataccaaaggactagagttcgccagatggtagcaactaaatgacaaaagaggaaaggatcccaaga

SEQ ID NO: 16656 - DNA, 463 bp, Zea Mays
ggcgattttccagcgcccgccggcgaccttctctcaccggcggtcaccatctccggccaccatctccggcgacctcgtccccctcctcggtgagcagctcttgctcactccctcagttcttctctgttctttgtgggcagtgaagctcttccctctctccctttgtgataaactcaaatttctgtgaaatcctttgcatccagttggtggattgtgttcccctgtccctatttcatatccctgcaggtccttggctccttcaagagggtattcctacctcaaatggctatattcctaaaaccctagctccccgcacaccacgtgttcgatgaaatgcccaaaccagccaaacttgctccaattgaacccaaatttttcaggcactttcaccacacttccagtaacctacttgccaaatttcacgccaatccgagatctcaggcttaaatttcaccaaaattcc

SEQ ID NO: 16657 - DNA, 413 bp, Zea Mays
gtggaagatagatatacctgcgtcctgggtggtgtggtaggaggcgccagagtcagccacccagtcagagatcgaggtgggcggggccaatgtcatcgtggagaaggagctggcgagagactgcgcgtcccacccattagtccagagcccccacatgggctgggctagaggccccgggagtggaaggagcccctgctgaggatggggaggagccgagggcgccgccggcggtggagcggcaaataagacctgctgagaggtgatggggcgaggggtcgaggcacctgcggacggcccatgccacatgtggatggtgctagtccacgggttgtagaaggatggccactgagaaccactcggagagctaccccagcggcccgatgtgccactgtgaccactcttgcgaccgtagc

SEQ ID NO: 16658 - DNA, 605 bp, Zea Mays
tccagcagggcgtctgaggaaagccccctccagctctcgtggacatgctgctgccggtccctcgcgttcctctcctggtcgcggatctcccacaccatgtggtcgtggtcgaggtcgtggtcgtgggatgggagctcgactggcccatggtattgcaaccttcttttccatgtgcaggaacatatcttctgatgtgcatgagctggcgaggcgtcagcgggagactgacgacaaccttcgtcgtcaagcctcttccatgggtatgccatttgctccccgctcacctgatgtgcctcttcaccctcctccactagaaatcaatgaatggcaccagtagacctatggggtgcccttcatgtccgctgaagatgaagaagaagaggaagaatattttgatgatcgtgagcagtttgccccgcctccccaccagggggatccgggtcaatcctcttcatatcctcccccagctcagcctggggaagaaaactttgcggctaacttggcgactcaattctttggtccgcctcctcctcagtggtgatttgtggttgatggttctctccatttttggtgctagttgccaaaaagggggagaaggattgcca

SEQ ID NO: 16659 - DNA, 423 bp, Zea Mays
agcctggatccgcccatcgccgcggcctacaccagtcaggcgtccatttgcggtaagatgcatacctgtgtgctcgttatactccgtactccgtaaaaaaaccctgagacccgttggaattggtgcaccatgtggccgattcaccttgcttcggcgatcccccgtcgagaacggtggcggcgccgccgaaattggcgtcgggtagaaggggggtggctcctggccgtccgatctggacgtgtggtcaggattagggagggcgtgtaccccttcgtcccattaagtaacagccgtggatcccaaatcctgtggctacgattagatctcgcgtaccctttcgccacaaacgattctggtcgttgatctgttggcgtgcggtggagattagaagtagtgtactctttcgccgcggctcgatctggt

SEQ ID NO: 16660 - DNA, 331 bp, Zea Mays
gcggatggtgctgccattggtgcctttctcttcttctctgcccagtgagctacaatgcaatcttcctgggagatggccatgttgaccaactcattgaagctatcagcccggacagtgttgagtcgttcccgcagcttggtattaagacccctacggaagcgatctctcttcttttcatcagaatcagcatggtaccctgcatactagcataagtcgttgaaggcttgcatactgcagtaccgtgcgggttccttgattaagggccacaaattcattcaacttccgatcaagaatgccagctgggttgtggtgtcctctgaaggcagtcttg

SEQ ID NO: 16661 - DNA, 619 bp, Zea Mays
agtggtcatatgaatgactccgcaatacgactgatcagtgaagtcttcttgttttggtgcttgggggtgatttgggtggtggatgtttggctgatgcgggtgtggaggcgggagtggaggtggtacgatttgtacctcctggtggtgttggtatgcgtggttaggtggatgctgagcggggtcgtggttgtatggttgtgggaggtggtgttgatatgtgtgcgcgacaactcttgggttgtcagctggttacgcctgagacatcatgtccctggtggccttcatttccgggtagtccctcgttgagtgcgcgcagtcttcaccgtgaaacaggcagtaaaatctgcgcggctgctgcgcccgtcctcggccccgaccacgagtgccattgccgcggccctgggggggataatcttgacggcgaggggcctcactggtggggtgctggttggcaatgttatgcacctactgctgactgcggctgtcccgaccagagtcggactgcgaaggtcttgtccatgttcggcaggactgtggagggtccttgggtttcctttgggactcgaccttgcgctggaggagctcttcggatctggcgtacttttcaaacagttgatag

SEQ ID NO: 16662 - DNA, 490 bp, Zea Mays
ggaaggtaaaaagaggggaggggtagattagggtttcaaacctggtttagaattttgggatgttacaaacctaccccacttaaaggaatctcgccctcgagattcagacggggctcgagaaaaggtaagggtagtccttcctcagagagtcctcactttcccaggtggcttcctcttctccatctctgctccactgaaccttatagagtctcacttctgagttgcgggtccttctgactgctgagtcgagaatcttcattggcttttcccggtactggagatccttttgaatctgaattgcctctgccttgatgtggttttctggtacttttaggcatttgcggagctgagacacatggaacacattgtgaatatctgacatggattctggtagttcaagacggtatgctgcgggtcccactcggctaatgacggggtagggaccaacgaaacatggtgctagctttcctttcatttggaaccttttgac

SEQ ID NO: 16663 - DNA, 377 bp, Zea Mays
ttggagtagcttccgctagatgggcggtgctgcaagagcgaagagtcccacccatgtgagatgagcgagtgcatcaatcaatggtagggcgcaaacaagatatgaaaatttgatttgaggatctaatacatgatagggtaaaatcgatgaataaagaactcaagatagaaagaaaaaacagaaaacgacaccttgagcgaagatccatggttgcttgtggatcgcgtcgagcaggcgggtggaagggattcggggggcagacgcctctataccgtgagccggttcatggagaggtccacctcccggagctgcgtggccacggaccacgaccgcgtcatggaggtgctgtagtgctgctcgacattcctagtgctgac

SEQ ID NO: 16664 - DNA, 729 bp, Zea Mays
agatggagtaaattttcattcattctgggcatgtcgcgttgcttttggcggttctggcggcggtgaaaaaagctttcttttttcctttctgggggctcgtgaaggtgaaacgcttatctactactgtctgccccgtgccccgccgacgctgaggcccgacctcagttccaaaatccgtactcggctcggcgtgcctgtccttcggaggattggagtccactgtgctggcggctggcctcgtgcgtcgcttcctggttcgtggctgcgtgtgattgggactggatccaggcagcgagcctctcgtggatttggtaggtgcgctatgcgagagtgggacgcttggtgaatgctgatgcgatagtagctcgtcgcgtgatccattgccagcatgccaaatttgaaactctgttcttggcttttccgggaagttctgaggtttcagtggctcggccggagaatcagtgcgcgattcttgccttgctccatttgtggaatctgttgtttgcttttgcctcatcccagtcctcccctccctccgatgtggctgtttcgaccagaatacaagttgcttctgtctggaggcgctaaagagcgcgtcttgactagagtcagcctattgaaatttgcaattttgctcggtttgatctgttcaaaccaatcactatgccaattttgatgtcctgtgtccgttgcgtgcgtccagaggtgttcgacttgtctgtttggtca

SEQ ID NO: 16665 - DNA, 577 bp, Zea Mays
gtgggatctagtgatcaattaagtatggttgctatagcaagattgtagcaggattgtagggctacaattttgttacagagaggttaacacattcccacacaaaaatctgagatcagggcactgcagttctctctgtcaggcactctgataaggatctcgatggtacagtgcctatagaaatatctcaggttcaggttcccccttgccgccggcgaccttgcgttcggattcgtgccagcgttgtgattcacgctctgttaagcgcagataacaattctcgggtaaaaagatctcgccgtggatgaacttgaagcacagtgaacgctctatcgcttatctggttaacggcgacgtggccgcgcgaccctcaccgtcgtaccgctgttcctcgtggtcatgacacgtcgtcgtccatctcaccacgtcgcaactaatcacaacacatagcccattggtcgcccaagaacttgccacggtatcatccatgaattgcttgtgccagtaacttcttccctctccggccgccaccgcgccatctccaattcataggccaccgccctcgaaccctataaattga

SEQ ID NO: 16666 - DNA, 324 bp, Zea Mays
catcttcctcctcacggctccctgcagaccagaccccactaccctcctttgagccagtcctccaagtgcttcgtatctatggactcgccaccgccaccgggggagcgaggtaatgccgccaccatggtccggcatctctgcctccattcggtgtccatggtggggtctgggagaatcgccggtgcacgtggatggtgatagggcatgtgcttagccgcggtggccttcaaagtccagtgaatcgctcgccggagaaccatccccgccgtgttgccgccttctaccgtggacaggtatctccgcggcgtaattggtggtatgagc

SEQ ID NO: 16667 - DNA, 1330 bp, Zea Mays
ttcgattctagtgaatctgctgttgcttctccgtcgcgcgagactaagacactggagttgaaatccgaggcacgtgggaagcctctctctcaatttttttggggattcaaaagagttcccgatgcccggagctaaggtggcccaagctcctggcggccaggccaggtgttcgacgaaactcccctgagagggatctgtcatgttcttggccaaacgaccgccttggtcgtctcagattagcaggttctgcatccttcccttccacgctgttccctggatcgttttgtggacaaggcgggtgcgatacagtggcggcagcggcgataatgccactccagtggcctctgggcggctgtccaagctgttttggccggctcggatgcacgtggctgacgttattgggcgagttctggaacgggggcagtcgttggattcggtggagctggagctggagaggctccatgtcgacctggacccctttgttgtcaaccgggtgctccggagcatctcggactcggagatggcagtgcggttctactggtgggcagagtccaggcctgggtttgatcacacccagttcgcgatagcgtatgttgtcagcctgctctttgtagacagcaactttttcctgctgtcggagttcctcgagagagtgaggagtcagggggttgcattgcatcgctctctctatcggatcctcttgtcgggctatgtaagggcaggcaagttcgattctgtcatccatacatttgatgagatggttacatctggatgccgtgagtttggtgtggactacaacaggttcattggtgttctagttaagaattgctgctttgatttggtcgagaagtattatagtgtggcacttgataaaggtttttgcttgacttcattcacttattcgaggtggatatctgcactgtgccaatcagaaaggattgagctcgtagagagactccttgccgatatggataagtttggctgttttccagatatttgggcatgtaacatatatgtggactgtttgtgtaaacataacaggttgcatgatgccttgaagacgcttgagaatatgtggatcagaggaaccaatccagatgttgtcacttacacaacagttgttggatgtttatgtgataacaagcagtttgcagaagcggtcgagctttgggaagaaatggtgaggaggggcctcaaacctgatatcgttgcctgtggcgtattgatatttgggctgtgcaagagtgacaaggttgatgaggcttttgagctggcattgaggatgctgagtcttaatttagaactcaatgtctgtatttacaatgccctg

SEQ ID NO: 16668 - DNA, 894 bp, Zea Mays
acctttgtgcttggtcaaccaatccattcctaagatcacatcaatcccttgggatggcaagatggttaagtctgccaagaatactaccccacttaaaagaattctgacttgggagcatttgtgttggcatagaaggtctgaccctggggttcgggtgatcaagggaatctctagaggggtagaggggatgtcatgcttttccacaaaactagtggctataaaataatgggatgctcctgaatcgaaaagtacagtagcgggagtaaattcaacaaggaactcactgagcactactcccggagcttgctgagcctcctgagcattgacgtgatttactcgtgcccttccttgatactgggtcttgttctgctggctaatggaggagggcgccttgggggtgggtgctgaggtattcttggggccattcaccgagttagagtaagcaggtcccgatgacttcagctggggacaattgttcttgaagtgacggggatctccgcagtgccaacatgcattcgctggtggttggttggttgcaactgagggggcatgaaaggagctctgactctgctgactgaaccgcgatggagtgggtccagctggtctactgaagcttggtcccttgggtggaaatccaaaggatcgagttttctggtgccggtcttgctgctaagctcggaggacttggaatttcctcttgagatggcctttttcttcttcatttgccctttccacttgcatggctttgttggagaggtgcgagaaactaaggaagtcttggctagctaggatggtcttgagttctggtctgagccccttcagaaagcgggccatcttcttgacttcggtgctgacgtcatccggcgcgtagtgggccaactctgtgaatttgtg

SEQ ID NO: 16669 - DNA, 376 bp, Zea Mays
acaagactccacgcaaaatacgcctacgggtgcagccggtctaaataaacgtggaaaatcaaagatttccccagaaacacccggacacaagccgcctacgggcgcggccggatcaacgaaggcacgcagcctcatcatacaaatcatagttacacacagcgagggcatcacacattacaacggctcaacttcgggatgatacccatctccctatagttgaacaacattatcttcaatccctcaccctcaaaaagatttcgcaactcaccctcacctacactcgccccagccgacgaagacaacaattcccgtttggcagtcccgtccactcgaagacgaccaccctctacctcaccatgacgcctatcacttcgtg

SEQ ID NO: 16670 - DNA, 501 bp, Zea Mays
ccgggggtcctgaaggctactccacatcagcggtggaggagcaccaccatctccttcggggcatccgactgccccaacaacatggcaggggccggtgtactaccgctcatcaccgctcctgtcatcgccaacatgcggctgcaccatgttctgattgacggaggggccggcctcaacatcatcagtcatgctgcattcaagcagctgcagataccagggtcccggctaggaccctctcgcccattctccagagtgggcccacaaccggtgtatccccttgggagcatcgcattcccggtaacattcgggacctaggagaacttccacacggagaacatcctgttcgacgttgtggaggttaacctccccttcaacgccatcatcggcaggccgaccctataccggttcatggccattgcccattacgggtatttggtcctcaagatgccgtctccggccggggtcctcaccgtgcgcggcgaccgcgccgctacgcttgcg

SEQ ID NO: 16671 - DNA, 705 bp, Zea Mays
tttctagaatttcctataaatttcctaagcctggtagaaaaagaaaacaaaaaagattaaaaagtaatgggctcaaactagccaaaaccggtccacggacgggggaaacgcgcccgtgctggtggcttgcacagaggcccctggctatttgaaaacccataaagaggtcacgacactattcatgtgtctctctgacatttgcgtaaaacccctcccacttctattccttcgcaaacccaggtcctcgttggcgaacggcggtgagcgtgctctccagcgagcttgtatcggccaggatgcgcaacgactgacgccctaactcgatcgacacctattcctacccgtggcgatcataatccctccattaattgcataaatccgggccagaatttgtctgctcacgatggcggtgagagccagagacaaaccgaggtgttcttggtgattcagtgaggtctagctcaatcaaacgggtctacgagcaacaggagacttaagggaggctagaacatgaagtagaaaagcttgaactaacctgtagagggctggccacgatgagatgtctcacggcggcgttccgaccgatttgggggaaatttgaaatttgcgagctacagtggctaatcggaggcgagggctggtgcactgggcgcgtaacaacataatggagctagttgaacgctcaatttatagtgatcatcagtg

SEQ ID NO: 16672 - DNA, 1056 bp, Zea Mays
ctttggcgaaatggggcgagggcagcgttttcgctcatcgtcaccaaagaacggtgatggcaacacacattattacattggttcttgtttcagaataagaccgacttctcagaaattaaatagcatcaaactcaactctttgccgtcaaaaagagcccacagatccccctccacgaagcacgacccggccgtcggcgccagtataacacgataggtcccttgatccaatagcggacccatccaaaggcgtgacctctccattcccattcaacgatgtcttcgagagactttaataccttgcgaagactctcctaccatcccgacactttgtttcgataccccaatcttttttcacccccgctgttcaccaggggctaccccgcccgaagtcgacggcgcctcaaggggggcgaccctcaaaggagactcgactgcagttaaatctagcgtcgcaaaataatctaaatcatcttccaaacattcgtcatgtatccaagcaaacgggctccccaacttttcaccttccgaagaccacaacccaacatcagattcaccagacacatttgcatccaccaaaatatcatcattcacgttatcatcacggttcgcatgtgcaggcccagacgccggaacctgtgcaacaaccaatcttctgtatcatgcacaaagcgaacactgtcaggctattcctattacattctttcaacctgctcagaagcacctactgttgcaggaccctcagctccgccttcttggagcaatgattgcccctccgctcctgcctccactacaacatccttccggaccaccaagctctcgaggccgacgagctcccttacctcttcttcccccatcgcctacgaagacagcacaataacatttcagacaatgaacacacataacacattcgccaagcccaaaacatacttgtaccagcgctcggttggccctctcccagacaacaccgcggccatgagggccccacatcctattgtaaagtgcccccacagattgcttcaacacgtcattttcgatatggaacacaccagcatcgaa

SEQ ID NO: 16673 - DNA, 825 bp, Zea Mays
ctggggtaaatagtagtcacgacgtaaaagatggtggagtagcttaccagagacggtagagctccgacgaagggtcgggtgagatttgggagatcctggcagtcacgtcgatgtgcggatcagcgtcggaggtgaccagagttggtctggccacgagttcaggcggtggtgctcgtcggtggcgcctgtactggccaaaatacggtggtagagttcaattaaaccgcacgagaagcttcactaggtggtaggggtgtgtgtgcaaggaatcgaagaatggcttgctagattacctagaccaggaacgtcggtgggtggaggaagtccggtgaggtgattcggtgtctccggcaaagtagcattcggtctgaaggtttgggaagcttcactagcctcttggaagctaacggtgaagctagactgggcgaagaggggctagggtggtcgtaccgcggtggccgaggctcagcgagcttgcgggcggtgttgtgctcgatttcctggtgatcactgacgtttaggcttcgactaggttgtgagacgtgcgggagagcaaggccaaggggttgggccatcttataggcgaaggcacgggcacggtcgcggggttgggcgcacggtcgtgccgaccgaagcttgggacacgagtgagcatggacaggtcacgttcccgggtgttagccgaggtcgagcacatggtggcttgcttctgcccttgtcgaagtgcctgtttagctgccctaacatgcatatcttggcaaagatctcgtgtatggtctcttcaccgagccaagctctacctctgttgtgcaagttccaagtgta

SEQ ID NO: 16674 - DNA, 537 bp, Zea Mays
ctgtagcacgctgaagatcaaacaaccggggatcggtagccagtggtcgcacctcagtctcatctcgctcccggaagtgggcaggtgggatgggtggagcggaaaagggagcgggaggaggagcagtggaagctagagtggtggaggtggtaggtatggctgaggtggtgaatggcgcaggagtgactggagcgggcgaagtaggaggtggagtggtagcagtggcaggagtggtaggtgcggaggagcgaggccgagaggcgtgacgacgaactcgataagcaatctgatcggaagatatctgcagctgaccacctctctctgcctgctcagctgctgctgcttgagctgctcgggttgctctatccaaacgccgcttcttgtggccttcctgctgctcccaagtagacagtctttcccttgacctgcttgaaagggcgaggagggtcctcgtcatctcctctccctgacgccgacacattcttcatgcgcggcatcctaacttgaagactgcatatgagagagagaaactaagca

SEQ ID NO: 16675 - DNA, 553 bp, Zea Mays
gcctggtcgttggctggatgttagggagtgctcgatgacttcacatggaacccctggcatgtctgcaaacttccaagcgaaaatgttgtagttagccaggaggaagtcgctgagcacgccttcctatttgctagagagggcttgtgggggatggatatcccctgggtccactcaggggcgaaaacttcgctcggggccacatggtagttgcccctctaaggcatcccaccgtgggccaggcaaatggaaacagtggaagtaggccgaccctggagcacgaagggcccacacccgagctagtcgcggtttggacgtgatcatgttaaggtcgttcgcttttcccgcgcccgacatcctcaaacgccggagatagctcggagcggaggcgccgggttttcctcgggacagtgaaagtcatttgctagtaattaggagataagcaggaaaagtacgatcaccatgtatgcgggaagcaccccacggtcgtgtatataaggccaaggggggatcccctccattttcaacatcattagcatcccacggcttggtatac

SEQ ID NO: 16676 - DNA, 490 bp, Zea Mays
taatgtgcctgggaaaggcgtggtttagacgaccgtaatgagaaaggtgggaaagcacggggcacggcaatcatacatcgcaggagagagagagagagagagagagaggatgcatgcgctttgccatgaatgatcctccccttgctaatcagcaccgtaatgcactttgccatgaacttttttttttcttccttcctttgaggactgaactgaagaaacaggcattcctgtcctgtacccgtccaagttgccgtgcagtagcagtggtggccctcgccctagtttgagagagtaacaagtcttgcacatacatacccagcgctagcgttccacatggcgcacagcagttgcaactttcgcgcgaggtgaaccggcccgccacagtttcccccctcatccgatggccacctgcatcgctcgaacaacacaacacaacccacaaaaagccttgcacatcgcctcaagaacagaacagaacggcacggccgct

SEQ ID NO: 16677 - DNA, 574 bp, Zea Mays
atataccagagaacaactattatcttggtggtttgagaaccttcggaagaagaaggcccctaacactcctcctttccttctcccctaagcaagcccaattaaactctaaccctagcacttgtctataaatcgaagtgctccccttgcaattggagtcatttttctagtcccactcctgaaaccccaagctgccaccggccacttcctcctccccccatgcgtagcttctctcagtcgttgttccttttcgtctgctagctctgtggtctagaagcatcgccattccctacctcttctctggtctaggtgcccaccatggacatcagcgctgccaggactcgacgaccattgacgtcttcttgctcgtccatcggacctcattgggactgtcgtcagatgtctaggcctccacctccgtgctccagtcctatcgttcgctcacctctcttctagcatgagtagaccacgcctctcttcactctacctgcattcacccttgtgtcatctcctatcttgtcatccgtgtttcgccctaccatggagctacctcgccgaagtcctttctcatctcctc

SEQ ID NO: 16678 - DNA, 415 bp, Zea Mays
atattaagagcttgtgctcttaaacatggtcgaagttgggataatagcttatcatatgcagagttctcttataataatagttacctggctagtttgaagatgtcaccctttgaggctttatatggcaggaaatgcaggactctatattgggatcagactggagaaagatagttctttgggcctaaacttatacaagaggcagaagaacaagtttgaatgataagagaaaatttgagaattgcacaatcaagacagaagagctatgctgatacccggagaaggctactggagtttaaggagggtgatcatgtgtatctgaaggtgtcaccaatccggggtatgaggagatttaaagttaaaggaaagttgtcccctcgcttcattggacctttcttgatcttaaagcgagtgagat

SEQ ID NO: 16679 - DNA, 541 bp, Zea Mays
gtaggtgctcccaaaaacgtgccacaaacagtgctccactatcagacacaatagtccttgggattccatgcaaacgcactatttggtcaacatagatctctgcatatttttctgccttgtgggtggtatgtactggcaggaaatgagttgtcttggttaacctatccacaatgacctaaatggaatcgtggtgccgggaggtgtttggcaatcccacaacgaaatccatgcaaatgtcctcccacttccaagaaggaatgggaagaggctgtaaggtacctgctaccttcaaatgactagccttgattctttggcaagtgtcgcacgaagatacatacttagccatttctctcttcattctggtccaccaatacaaggatctgaggtcatgatacatcttgttactgccggggtgcatggaaaattttgagagatgagcttcgtccaatattttcttcctgagttctgggttcttaggaacaaccaatcggtcttcaaaccatagaactcccttgctgtcttgacgaaaacatttgtactt

SEQ ID NO: 16680 - DNA, 627 bp, Zea Mays
tacgtctggaaagaataccacgagaatggaactgagaaatgctctatggcagtctacctgggagaaagccaaaattacccaaatcaccctcctttccaagtcaccttcgctggacaccgcttcccagacacttgccaaaatgttgcccgaaaagccctccgccagctatgccaaaactacaacagggaagtctttgagacacaccttcgttactttccaccttgcaacaaaaatacccctacctggaggaaaagacttcaggccctatcaggaagagatcctactgaagatgaccccaccatagtctacatggccggctatctccacacccttgacaaccactatgacgaccttttctcccactacacccacctaaactcctgggtggagagcctagatcaacaaatcaagaaattaaaagaggagaaggcgtccctccaagaaagtctcgaaatagcaaaaggtgaagaggccaacactcatgaagcctactggaccctgaagatggattatgataagaagttaaagaagctcgcccccactaagaagatccggaagcggaccaagagccaaggatgccagacagaacgaaaaaaggaaaccccaccaacactgcctccctctagg

SEQ ID NO: 16681 - DNA, 1204 bp, Zea Mays
caaatcaggaggtccggtctcacaccactggttcctggcttaactcaccacacacacacatcaccaaatctcccattcccaatccacactcgcacacacctcaccatcatcaccagcacatcacccaacacatgcttagactaaatctgtgacaagggcagctccctcccgtccttgtctcaatggcctaaagccggatcctagatcagaggtagaaaagaagattcccatactaagacgagaaaactaagtccctaggattgtccttggccatggacacggctatacgttagatttacactctgcagaggttgtacaactgtacccatacgaagcggaggcttggccgagcctcgacacaacaccctccagtaaatcccccgctcacggcaccaacctgctttttcaagccaagatctgtgggaggtactccctcccacacaacggaactgtgaactcccccacccagggccctcgagaggagtctattggataagggcagggcgcaccatcagccccgttcctaacacttacgccttatgcccacagttcgtggtgccgcttacgggagaccaccttttgggccggtacccacaaggcgtatgttatgcacggaaattcccaaagcgctgttaacccatcttggtccttacatggcaagggcttgcctcctctaagaacggttgccaccctcaatggtgggccactcactccatccacctttctcgttccacaatcactcacaggggatgtcttagtcatcccctaaatattttacacgcacacatgcttgcccctgccagtaatcccaactcacgtcactattcccgctcattcccatcctgcttcacacacgccaagaatccaccacaatcccatccatcacagccacacaccacatacacacaccaagtcgcatgaatagtatatgtatagggtagtagcatgatatcaagtaggagcaatgatatcaacaaaggcttatcaatcaaacggcatgaatatcaaaaggcgagacattcatgaaggctaggaatgagatctcgggtttttaggggtctcactcccatttgtcgctcggaactttggcctagcactactgcatataatcatgtctataggaagggcgaggatgttagggtgacctattgtagtgaagtcctcctcgagctcggggacatactccgagtcgtcggcttcctcc

SEQ ID NO: 16682 - DNA, 1383 bp, Zea Mays
ctgaataagtggttgaatggtatgttccaaactcaacagatgttatcttcattgcagtaagcttttggcccaatggcaaccagaaagctctatcagacactataaggatcttttggtcgatttgggtattagatctaaggattgtctcgatgacagataatgacggatgagactcctgtaattgcttctcagctttcagtcgagcttcaccaatgcagcgttgaagatgtcttaacctctcaggaataatttcaaaggttccagtcaaattgcctacatacagataggcggcatgcagaccaaagaaacataggtaatatgcaacctgttttaatgcatacagtacaataagctccatcttatcttcatatttacagcagctatacaggccttctgaaccttcccctgttatcagttcaagaagcttttgctttgaaatgcttaaaccttgcccatcggagaaagaatgccttaagtatgcactttcttgcaaagcagatgtataacttacatggatgtcattgataaggccttggataatatctgagaggttgacaggatgaatttctatgagtttgttaactttaggtctggttgaaattgaagctgcttgttttgaagaggggatgtctaaggtagaaatatcctcagcttttctcactttattagtgccatttctcacattcaagtagaagcttagcccattggactgtgacgttgactcaaacaaggatgattccttttctgaactcaatttatccatgtgggtatgacctctaacaacattttctagcatgttcttttgagttgcttccaaattagctgatggatcatgagatataggcccaggaacataaacctcattctgcttgtcctcatgttgaggctttgcacttctcggaaaatcctccagaaaaccaatgtcaagcgctggcatctgctggccacttatttgtagttcagaatttaaactgcaaggctttacctcctcaaccatgctctcataagtagagcaactctcccggttgcatggcccttctgataaaagatgccaatccaaataaatcccatctgctgcagatagaggaagtggttttagggagcaaagtacttcttctatagggggaagcatagatcgcattgctttatcatcatgtaaaataggtgtaggtagtgatttgaatgtatcatcaactagagccaattcagagctaaccactgattcatagaaatgttttgcttgatcaaagtcgtctttgaatatttcctcagatgtattcatctcagctttctctgactgaataagaacaagtgacttaaaggcatccttggaaggaaagtcgatgatctttacttcctcaaagagaatgaagcaaggaaaat

SEQ ID NO: 16683 - DNA, 729 bp, Zea Mays
cttcccctcaaccaatttcaccattgggactatgaatcaaccggtccacggtgacagggcggatggtcatacggatggaagcgttccgaccaaccgacggcgtgaacgaccaaattgaagcttgggaaagcttcacagacctaccagaggtgacgcacatactaaattttggactgggcacgaaaagaaacgtggggctacggagagggtgtcacggcggtgttctacagagcagaggggtgttccgatgatgagactcgggtaaactccaattggtcggctccgagagcaacagggggctacaaacaagcaagaactcgaatcaattgggtatgcactaacccgaggagtgctgatcacggtagagttcctcgcggcggagtaagaacagagagaaaggggatttgtggactgcgttagttctgcggcgtactcgattcgagtgcttagttgttgaggtgcgggatgtgatgaagaagcggagtccgggctcaatttataggctgtcgaccggagttggagaagaagtgcggatttcagatgtgctggcaagctttccacgcggcggattccggtgatggcacgggggttcgccatttaaccggagcctgccacctcagtgaccttctgccatgacgccgaggatatttaccgtggccaccgacgaccatccccatgctgcggtggcgttcttatcgccggcgacgagcgtctgagctggcattctga

SEQ ID NO: 16684 - DNA, 512 bp, Zea Mays
gattaggagagcataggtatttagctacctattatgtaggatataagctggacaggttgaggtaagaaagattatggcaaggacaagatttcattcgaaatgtttaagtcttgattcatctcgagattcgctttgactgttatatccttccttgtcgaggtcgtgttctcttccttcttggatcttggtgtcggtgtccaagttagggttatgtagttaaggtagattataggtagcaacagatagtcaataggtaggtagcataggttgagtgtgttatgtcaaattctggtttggtggctttgtgttaggtcgggctagaaaaattatgtagatcgttagaaacatgtaggtcaggctggtagattagaatcgttttttaatagatagattaggcaatctatcaagaatgtgtaggttgtttgtatatgtccgagttggtccaagacaccaattcaagttttagagtaaagcatgtaatcatgtatagtgtctaatctactagattcagc

SEQ ID NO: 16685 - DNA, 621 bp, Zea Mays
gcgaaggcgaacttgattagagcacgtaccgctgatggaggtcaatgggacgaagaggccacgacgaatggcggcttggtcggtggaggaaagctccgacgagcaattcggatggccaggagcaagcttctgcccggtgaagcctgagacgagcatccgtgaggaccagagttcgccccccgaccaggttcccgatcctccatcggtggccgaacattagcaggacgcagggagcaccgcggcggatccatggtggtcgccctctcatctctctcctcgatttctctctgcacatatacacggcacaaaggcaactcgcttcggcttggcgtatccacagaggaacggcaggggttatataggggcggcacgagcctgggctcaagaatcacaaggatccgcaacaactcccgccagcgcaggtcacggagcggtagctgcgcgcggaatccgttagaggatagggacgattctgacacctgggtcccacacggcagtggctgaggggagagcgtgcgtgcggcggctgaatcgcagggcccacccatgcagaggccgcgcgcgtgacaggggaaaaattaggctgcggtggctgtaggagaaagtggagtctgggccgag

SEQ ID NO: 16686 - DNA, 782 bp, Zea Mays
ggaaatccggcactgtaaactggaagaggaccaaccagtgcccaaaatttctgattacccgagggaaaaactccctgagattcttgtgcaactcgcgaactggctcacaagagtaccaatgctctgatctcgacgaattagattcggtggcgggcaaaactcgtggtagctcgcggattcgacgaacatggcacggaaacaagagctagcactagatacgagttgcgtaaggttctgcggggggcctggttgttagcggtactacatcttctgctactgggaccattgtggcgcaacggattagcaggccgaccaagaaatctacaaaggtgtatgggccggattgggtgaatgggctgcagctgtgctcgctttgcgaataagtagaacgagggttgcctcgtgaagggcatgtaagaattattcactacaacttcttctccaagttctactgctcgttcgccgccactcttcttcctccttaccctctgctactcttaatcgtcctctgctactctttattgctgttctcttctactgctaccttgtatccataccgagttgctaacagtggtatcagattcaacgatccttggccgatcctcgcgttctcgcgctggatccttctggtgttcattcccatttcactcgttttcgccgtcagcaagttctcatgaatccatatactcagatcatcttggacgagatcgctcgccgattcgctgatcatgatgccaaatgggatcagcgcgcgtcggagcaagaatcttgctgggaggcgg

SEQ ID NO: 16687 - DNA, 548 bp, Zea Mays
gatgggatctgatgagctaaataaggccgatcaagctgctgatggccatgatcaggcatcaggagggtggcgcttgctggtggtttattcggtgctgacggactgaatagtgttgatgctggacttctgtcggatcaggttccagccattcggcccttttgctggtggtttggttggtgtggacgggtaggctttggctgatgtcagccttcagtttcagcttgcgatcgagtcgctcgtcgagcccatgaggcctgctgctaatttactcaaccaccagaatgactcatcggctcctcttccttttcacgatattccctgtcaggtagctgattattctgttaatttgtcaattgaaacagatgcacaggagagttccattcatctgggacaagttaggtgctgtttggtccttgtaattgtaacgtattccgatttcagctataagtgttttcatctgattttgtttggtgccagccgcctgtgtaatcggatacaaagtaatcagatacggaacatacacttttgttaccgctccttcggctctg

SEQ ID NO: 16688 - DNA, 616 bp, Zea Mays
tgggaggtggagaaagctcatctacattgaaacacaaatatccatcagtgtcgaagttgaaaaacttacgaaaatgaattataaagagcatacctataagtttggcccgctcggcagcttcttcagctcttttggcttcttctaaagcatcatgagattctttctcatttcttttaatagcttcatcatcaatttctcgtccaccattcagccatacttcagaataaaatttcccacctaaggtagtagcttcggctgaagggtttctaatatcatcagctgagaaggcgaagtctggctgagctacagccttagcatgaccgcaaccaaccatctccaagatggacatagccccacgggcaccggcgaaggcacaaaagtcccctctgttgctacgaacttcctcgaaagctttgacctcattgtttatccattaaatgacttcatcaggatttccacgaataaatttctgctcgcagaaatatgctccaactttagaaaagttgttctttaggtttttagcgcattccatggatatttcatagcatttttccttggcagcacgaagctcatcgacattcttctatgctcttgatctttcaatttcacatatttc

SEQ ID NO: 16689 - DNA, 465 bp, Zea Mays
cggcgaggcactcacaacttcattagtgagcacgattgaagccaaaattcacactgcctcctcctcctctccctaaattaagtgtacacggtgagtcagtagcaccttgcgatcgtgtagccccaatctcacctcctaatttcaccagagcccgtcgcggcaccaaattttccccttctcatcggcggtgagcagaatcctctgcgctccgtggccagccgatcccaggtccactcctgctctttttaattgtgttttagcacccgtgcatactcgtgatactcatcagctcaaccctttacgcttaaccatactcaatcaaccggaacgcttgaaattgtatccggaatccgccgtcgccatggtcgggctaagccggggtcataataacccaattaaagcttgttctaggttcgtcttgggtcagtgatgcttgcccattagttaatttgagcggccaccgcc

SEQ ID NO: 16690 - DNA, 399 bp, Zea Mays
ctcagcaggagaagtgggctgattggctcggcgagggcgcttcaggtgaatactgtcagacctctgaatatccaaagcttcgctagcttctgggaggggcgctaccaccggtgtttcagcaggggccacattagaggaatcttcaggtaacatatccagcatggcacttatttccgcatcactgggattcaaaggcacctcaaaatgaacctgcctctcgtcgtcaggaatttcttccagtgaggcaaccaaagcattaacttcttcgggagagggtcgcactctaaggcccaaaccactatcaccggcaggaggattcgacacaaaactggtaaaggccttggaaggaggcagattccaggctgagtacgcaacaggagcgccgatgttcgacacctt

SEQ ID NO: 16691 - DNA, 277 bp, Zea Mays
accttggctagagccagcggcaacttccttcggcatttcccattcatttgcaagagtccatactttgaaagcgatgtgttcttaaactaaatctctggtaccgatgtaggtgcatacggtattgaaagccattaggcatgcttgcacttcattcccaattgtgattgatggcctcctcatgccgaagcacgaccatataggacgttgaatgatgcctctcacatcctccctttgatccagatcattctatacgtaaaaccattgcttcatctaggag

SEQ ID NO: 16692 - DNA, 569 bp, Zea Mays
ttctcggttcttcaattttgtcagtcttcggcattgcagccgactcttcaatcctctgcataagagcaggtcctttggcttcaacagctgaagaagtctcaccgccaaattcaggcactatggccggttcaatgtagcgcggtcggtgagtaaggaccttcaactttttcctcttcggtgcgggctcgcttgaagcatctgaagcagcagtcttcccagaagttgcaccctttcttttctgcccccgcggcgggtagcgatagtcagggtacacaaatccaatagcatcaaaaactctgtttagccttttcttttttcggctcccgaaggttgcagatagtgcattatcctcagacatggagtatgctccaagtagttcatcactagtattttaaacacatttcaaccagtcatcgtctggttcgataaattggtctccaaacttgaaggtatatttcaatcgaaccaaaccaccttcgctagggttagtgatggtttcctttggcatttcccagctgtctatcagtggccatatcctgtaggctacctgttcttgaactaaatctctc

SEQ ID NO: 16693 - DNA, 355 bp, Zea Mays
tggacaaatgagtggttctacatgaaggctgacgagaataagagggagaagctgatgaccatggttatgagtcctatgccactaagcttcggaatgacaaggccattgtgacatttgcaactcggttccccgtgccagctagccgaagttgaattcagagtggtggctatcgaaatcagcaccagagatttggtacaagagtacttggcaaacaaaacctttctgacctctagcggctggggaatgccaaagaagaaagaagggggaaagaaatatgagcttgttcggctcccctatcgttttaaatttgagaaacaattcaagaaaccatgtactaaatggctagagatgatcg

SEQ ID NO: 16694 - DNA, 1249 bp, Zea Mays
tcactttctccataaaccatgtccagctctccccaccccatgtaggtagtggaggctcctttgtttgtactttttgtcctgtattgttggtaattggtgcttgagacaaatgctctaattacaaacaattatctcttttttgttaactaggatgaattcaaacactcatgtggaagctcttgaggatgatgtccttaatgctaatgaagatgagagaatgtttcctgagtttgttgaaaatggtcatgcacgtgggtatgacatgcttgcacaattcgaggataccgatgatgaagagagggaggagaaccttaccatgggtgtgcctgatgatgtagaagatgaggatagactgattgttgattgggatagagaaaatccaagtctagaagaaggcaatacttttccaaccatgagagattgtaggaatgcactcgcaacctattgcatcagaggggaatacgactttatcattgacaagagttcgcccaagagatacattgtgcattgttggtttgagcggtgtaagtggaggatgcatgcctccactatgaggaataacactattgttcaagttatggtcaacccttttccgcacacatgcccaagtgccgaaagaaaagtgacgcagagggcagccaagagcaggtggtgctgtgatgcagtgttacagtgggtgacagaaaatccttttattggtccaaccgcacttattaagaagattcatgagaagcataacattcaagtgccttacatgagggtcttctatgggaaacaaatggctcttgataaaatctatggtccatggaaggaaagttttcaactattgtactcatttaaatccgaagtggagaaggcttgtcctggaagtgttgtgcagattgacaagcacaaagtagtgtacaatgtgaaaggtaaaactatggagaaggaatgctttcggagagtatttgtttcattcaaggcttgttggaagggttttttggatggttgtaggccatacttggcggtggatgcaactgttttgaccggcaaattcacaggacagttagtggctgcttgtgctatagatgggcaaaattggttgtatccagttgcttatggtgtcttggaggttgaatcatcagagagctggacatggtttatggagaatctgcgacatgtcattgggtttcctaatggattggtcatacacacagatgcttgcaaaggtttggaggttgcagtggatcatgtgttccctggagtg

SEQ ID NO: 16695 - DNA, 541 bp, Zea Mays
tgctgcaggatgtactgcatgtgctaggaacctacgtctgacctctatatgacataaggcgagtgtctgagcctcgggcttgctactacatcactcgcatgcatattagggtgatggatgcaggagataggggtttcagaactctatcagcccatgagtccctaacgccgctatctacctacgctgcttcggtcagcaatgctgctaggcgagcttctatggtctctcagccacacttatcgacaatagttgcatgatacgaggtacatgcatcttcctctatgtcttcgtggagaaagccagaccagtgttgttccaggtgaagctggggaagatcgcctcaacacccttgtaggtgtggtggcaggttttacactgacctggacagcgctaccctagatctttgaagggtacatggagaacttgaagaagcatatgccaggattgcagccctcgaagcttagctcgaaggaaggaatccacccgaagcccaagtccctgccatagctgtgtcctcgccccgtaagaggattcactatgg

SEQ ID NO: 16696 - DNA, 488 bp, Zea Mays
ctccggtgggcgctgtcgccataggttgggcgcgctgccatgacttgtgcgagtaggattgaagataactcgtgggtcgttaatctggtggtggacggcggagattgagaccagggacccgcccccctcgttccattttgttatgtaagccaggggcagtcggatggggatcaaacgatccaggattggtgctgactcacgagccttgggtcgcgatccgatggccgatgttagttatgggttaagatgtgatctggtgcgtcagcttgtgatcggacgtccgtagttgcgagataccccttcgttgtcgcagatttgtaaaagaaccctcacggttcggtgaaatcaacccgcagtacagaccagcgtgaaaaccattatgcagaggccctgaaatttataattccaaccccgcacttccctataatatggtgtgtagtccataactaatagaaaatcatgaaataaatccataaattggatttcta

SEQ ID NO: 16697 - DNA, 778 bp, Zea Mays
aatctggatgctcctctgctcgtagaaatcaaagaactctaagctagtgaagttagatcccaggtctgtgatgatgctgttgggtatcctgaatctgaacattatttcttgaattaacaacactgcttttgctgaagtcagagaggcgattggtttgtactctatccactttgtaaatttgttgatggcgacgagtacatgagtgtaacctcaccgagctttcttgaatgacccgatcgtatctagcccctagtatgcaaatggccaggttatacaaatagtttgcacatgttgggcgggtaagtgttgttgctttgataggaattggcacgcttcgcacttctggactaagtctgctgcatctttctttgttgttagccaatagaaacctgacttgaaagcttctcctaccaaggtctttgatgccgcgtgtattccgcactgcctcgcatgaatttcttccaccagttgtctccccgtagccgagtgaatgcatttcatgaggactcctcctgcacctctcctgtatagcagaccccctatgatggtatggtgagctgattgccttgcagtggggggctctgctgtggccttatcatctggatcctcctaatttttttatatatctgataattggctccctccagtcattggggtctgtctttgcctagtctatcatgttgcattcctcagcatgccctgctgcgatgctgcacctcctgaacaaaaactctgggtggaacctgggcccgactagaccccagtatcgacagtgcat

SEQ ID NO: 16698 - DNA, 668 bp, Zea Mays
ccccaaactgcacttaacagaaattccttagcagtcgtcagctgagcaaggcttaactatgtgtgtccttggtagatttaccctgtcaggcacaatagctatgttaaatggtatttcatagtcattaaataagtacagtctatgcatatcaattatcaccactgccacaatttagcagaaaaagtgaggtgtgagtgatgcagggaatcggatacatgtgcatgcaccccgtgttatgctaaagcatcggcatgatcattgatacagacatcatagcttacgcagccacaacaagtgaatggcaggaagatggttgttgcaagctccagaaatgaacttttctgaatagcacgtatgccacacacaaagctctcaactatcgagacagaagagagttattatcagatctattagatcctattgcattggcatcagaagccagtgttaacagattagcgaatcagcacatatgtcaagacttgtaacatatccaacagtagcataaatgatagatagtgcaatgataagctaatggttgtttatatatatatttgcaattgatttgtgatttctaattgacatgtaaaccatttgtattgtacatagaattgatccaagagatcaaaccattaagccattaagctccaaaaacgctcacaaccttggtg

SEQ ID NO: 16699 - DNA, 589 bp, Zea Mays
cgtgatctgtaattaccatgttggatggtatattcgaggcatgtagtaggtaaccaagggcatagcagtattttagtcttcaccccctctgttaccctataaatacccatgtcctgtagtaggatgggccacccttgacaagacatttgtgctctcatccatccgtgttgtcgtgctactcacttagtcacttgccacctatcacattgttcccaagtgcttgggcccattgtttctagtcccaacatttggcccccaccatgcttgcttcgaagaccaacccacaatgcctcccaagaaagaaaccaccagatctaactcctcggatgaggccacgaaggcaaccctcgctgctaaaaatggtaaggtcactttcattgacaacatcccacccccacaatcaacaatgccaccaacatgacgaagagagaaaacaaccaagtccccgagccaaagaccatccacctccgaaggcagcattcacactcgtagctctgaaagcctagccaaagacgccccaaacccgaggagtcacccctacaggccaccgtatagccagacctcacaagaaacatgagacccccaaccc

SEQ ID NO: 16700 - DNA, 513 bp, Zea Mays
ggggaattatgcccggaagttcgtcccctgttttgagttacagatggtcagtggacgctagcagtcacatgaagctaatcaagaaagatatatgtacatttgtttgtttgtactagttgaatcactaatgctttaatgattgctatagaggagattcgctccaaaaagcagtctctcttttgcgtggccctgaggtccattatcagtgggtgaaagcaatagtatctgttgttttgatattctgtttggtctaaaaaaatggagttacaacttatctgatgtcagacgtaagtaaatcgtatctttttgtttgggatgtcgttagtgcgcgttgtcgctgcactttatggttgttgaaaggaattatatactaagaacaagacacctaggcattttgcttgccttagggatcagaagctaagagggacatggcagttgacaggttttgtgttccgtcgcttttgcaagtgctaagttgtatttgcgtgcactgggttactgggtatagattcc

SEQ ID NO: 16701 - DNA, 758 bp, Zea Mays
gttaggacgcaccagcttcgctggacctcccacctgcgggctgggaggagatggtctctccatggcaagagatgtcaaggtctaggggagaaccatcagtgttcaaccccatccctttttagccaagcttcaacactaactctctcaccagcttgtatgttggtcttcccttccccttagaatgccttgactccgaggagagagatggtctgagcattggcctagacttctatgggctttgttaccccgagtccatgttgcagttcctgtttgcgtgcgatgaactactttccaacggctggatgactacaacaccgatgaggagggttactacccaactcgagagtgctttcacgcaggtcaaaaagagcacgacgaagggaactagctctgtataccttaggagaatgacgtgccacccccacacactggggaagcaagagagccgggtgaggcctagacccctctagtgagtcacatggcccaccttgaacagttctgtgagttgcacgccaagctcagagaggaacaacaacaattacaacaaattcgacgggtcctcgagatggaagcagctggcaaagttcttgacgagggtgcacgcgccaaggcacacgacgttcatcgtcgcatcatggaagatgccgaggctgaagccccccatggcctttcacagggctagtaaaaaccttgctgcaccagcgatcttgctctacaccatgccggagccatccaccaccgagggacaccgaatccac

SEQ ID NO: 16702 - DNA, 717 bp, Zea Mays
gctgatcccaatgggtgtaaccatgcagaagctaaccccaatgggtgtgaccgtgcaaaagctgatcccaatgggtgtgaccgtgccaaagctaaccctaatgggtgtgaccgtgcaccggctattgtccgtatttttatgaggacgaagaggaggaagaagaagttccgctaattcgtaaaaatagccggtgttacacaggtagtaggggagatagtgatattccttctctagctctgtctgctcttgtcagccttcaagaattgtccataacagattttgatcaggcccttgaggatgtcgttcctgaagatatgctgtcggagccgactgctggtgacatgatggatgtttgctctgaaattccagacgtgggattagaggtatcccgagcagtatctcgcgcatcgtcgactttggagggcagttttcgatgtcaagaagttggtcaagattgctcgactcccgaggtgattgaggatccttcagccttagaggtggctgttgcagaaaacccaacccccgagggtggtgctggcagttacccagcccccgagggtgtcgccggtagtgatccggctctggtgggtaatgcgagctgcaacccagcccccgagggtgttgccggtaatgatccagctctgatgggtggcgcgagctacaacccagcccccgagggtgtccaagtaagctctccttcccacacctccatggatg

SEQ ID NO: 16703 - DNA, 570 bp, Zea Mays
aacaattgttatagttgtcagcactaggggcacattctagtgctctatccaccgaatatccgagcacaatgatcacacacacatataattcacaaatacattcagtatcttctaaacacgccactacggcaaaacatctctatttggcaatgtctttcgtaggggcaattgaggaagaagggtgactcgaggcatcaggcgtagccttgacgcactataccacaacaccaaattagcgtcggacaactgtcgctataaatatactattatcgttgaactgttagtcagtatatcttgtcacagataatgagtcggtataaatctataggccaactgagcatcagtcactatatgtatacgtgaatagcgtcgcttcgttagtcggcaattcgtaccaatagtctcgcaccgtgagtcggcataaaagcagtgtgcaatttgggcccgcgcgaaaacacagaagcaaaccctgctccaaccaattttccccttccccaaatttgagcccgccagcacacaaacgcgcctacctaaatcagccaccgcgcgccgcccctgcgccagcgaccg

SEQ ID NO: 16704 - DNA, 553 bp, Zea Mays
gtggtactaactcctccatgtgttcgctgtacgccgtgactagagctgggcactgccagaacctgagtaagaattctcttcccgagatcgccatcccctaaatttcattttgcacccgagatacatgggaatcgtgtaccgattagtgcgtcaggcgtctcaaccatggcgagccgtcgtggtgtcaggcgtggtcgccggcgttggcagtgaggtaggagaacgcgccctgaccgttgatgcgtggatgaagggttgagattagatcccgtgtaccctttcgctaggttcgatctggtccattgatctagatcggacggatagaaatcgatctagagtaataaaaccctcaccgttgaagtcggatccgacggttagattcgtgtaccggttcaaagttaatagagatctaatccgggccatgtagctgagatcggacggcccagatctgcccatacccgttcggcctggacaaaatgcagaacagcccctcggttttatcaaaaccaacccgccgtcctgcgcagtggggctctgtgtcttaggaaaaatt

SEQ ID NO: 16705 - DNA, 764 bp, Zea Mays
agcgagaggatgtcactattcatgccagccagattcgccagctatttggatttcacgagtcatcgactcgtcttcacagcttatgctatggcacctctgaccctcctcatcgccctcacggcggtgttgctcctggtacagcccacgtcgcggctctgttccgatcgcccttctcagatgggtcgcgacgctctccggcagacttcaccacagcagcaaagtttctatatcagcttatgagacggacacttctgccgtggatggggtacagggaggctaccacacatatccagctctggctccttggtgccctggtctctcactcagagtttgacgttgtggatttccttatttgtgagatcgaggacaccgtattggatggtctgcgtgcacgtcgacagctgccatatgctcactatctatgtcacatttttgctcagctgattcggcctccacagttccagggcacacttgaggcctcacgcctcgtctttgggtcctaccgtccagcgcctgaggatcctgcgccagcacctgctccagtatttgacactcaggccgaggatactgctcttcatcagttcgaagctcaggacgcagcagttgattatgatgatgatgatgatgattttgggatttcgcctccgcctcctatgcctccacgctcacatgatcatgaggctaggagttctcgtgctacccctgctgcccctcctgccattgaccctgctcttgcttcgattctccagacactttctcagcag

SEQ ID NO: 16706 - DNA, 358 bp, Zea Mays
gggtgatgtggtcggcgccgtttgatctgatgcgaacagatgtgattagaacttggagataccccttcacatgatggatatgattcgttggatctggatcgaatgggcttcgttcgatccgcgctatttaaaacggtggccatcagatctagatccgaggatcagcgttgcgtaaccgtttgattcgatggggatctaatctcgtccgtccagactcgatcgggtggcccgtgttggtcgataccccttcgcgggacgtattagcaaaagagcccttccagtattgataaatcaacccgcagtctaatgtatagtagtctgtgtctatggaaatcttgcgctagaccccctgaccttt

SEQ ID NO: 16707 - DNA, 587 bp, Zea Mays
cagtggagttcattcaggagataatattcagatttggaatacctaacagcatcatcactcacctagggtctaacttccccagctcggagttcttcgacttctgcgagcagaggagcatttagatcaagtacgcatcagtggcacacccaagagctaatgggcaggtggaaagagccaacgggatgatactcgatgcactcagaaagaaggtgtttgacaaaagcgagaagcttgcagggaagtggatcagggaactaccatatgtggtctggagcctgtgaacccagccgagccgaggtctacatggaaacaccccattcttcatggtgtatgggtcggaggcagtgctaccagccgatctgatctttgggcgcccaaattaacctttgaaagcatagtcgaagcagaagcaaccaggctagaggacatcgatgtcctggaggaggaatggctaaatgtggtaattcagtcggctagataccagcagaccttgaggcgctaccacaacaaagcagtgcgacatcgatccttcgcagtgggagacttggtcctccgccgagtacttcgggtcaaatgacgataatgat

SEQ ID NO: 16708 - DNA, 285 bp, Zea Mays
cgcatgctaaccgagcccggcgaggacacgagcatcatcccggggacgagctggagctcccagacccgactccggaaccccgacgatggtgtacgcacgtgtccaccgcggcggctttcagcgcgagtccatggaaggcgacggcgcggcagatagaagcccgatggccagtggctgggcgaggtggacagaacggtcatgcactggatgattccctggctaattctggttgggtcagagtgcagccttgcaatcgtggcagtgaacgcggaagaccggcggaat

SEQ ID NO: 16709 - DNA, 909 bp, Zea Mays
gcccctacaacccattaacaacccaagggtcgaaagctggcccatcgaagggttcgacacctgccctagggcaaaaactagagtgagggaaggaacatatgggtcctaacatccagtaccacaatgctcgagctatataagagcatcacatcccgtgtttgagtcctgacttccgacccatggctatttccttgaagaaaggcaccaaagccctcgaggtcagtcgaacaaccctaggaactataggagagtggaagctaggatttttaatggttgatcactagctagtccattggattcctctaaaagggaccgagccatcacttgaatgtaccatttcgtagctcactagactccccacttcgtaccatcgaggaaatgtggagtcatgatccaacccctctatcccaaagcaaatgagacactgatagaatgatgataaaaagtcaaaataactctctgatcggtctaccacaacaagtggaggcatagggtcaacatcgcaaagtgatatcgaaagcacgatcacaaactgctttacccaaaacaaggacacgtcgaaggaccctctgaatgaatccgtagttccttcagaggctcgggggctagactcaccgagtctgctcatgtgtcctcagcaagggctagacaggaggaaacctctgatggagcgcaaggatcctctagaggcttagggctactgccatgtgtggatagctcgagtatgacataaacctttaagaacacgtcttactatttcttgaccctcgttaatcgtcccactccacgtcttcgctttggtcaacccccgaccctcgaggaccaaggataggatgggctgatcgtaggtctctgtctcgcccaccccctaatcgcctgagagataggggctacaaccagaccctatat

SEQ ID NO: 16710 - DNA, 1139 bp, Zea Mays
ggccgttataaaggcactaggatgtggaaatggaagggacatacatttagaatgccaccataagcattagcttccactctcattccatgaaggcttttcaatcgattgacaaattgtgtggccttttcagtcactcggtttggaaggcgtcatgaattattaccggcaacgatacaatatgattacagtgtcgtactgctattgaggatttacatgcatactgtcaagaagctgcaggaagaaatgatgtattagaactagtgcagtagatgacaaactatccactacaccggccttacaccaaaagtaattcgatgtgtttgacctcttgcagttagccctaattttgtgtttttaccatcctttatttctcttattcagtttatgcatgtacatccccgacacgagaacaatgagcaacactcctatatgagcatgaatatttgacactgcatttagctacacacattcatcaggatgactgaagaaattaaccaaacacctgttagcgtgagagatcaagagccgaactagcaactactacaggatttggggaaaatgatggggaagaattctataggaagaagatagttgttcacttcattttgttcataatccggcaacggatataggaatcatatatatgtgtattgctattggatccccatttacatggcccactgtagcccaacaactctcgcatttggttttctcgcgcgctctggtcaaacttgtttcgcgtcttccttctatgacccttcgcctatcatgtgcatgtcgttgttctcttccaatggcagcgccttgctaacattcccccgaccatgagggcaatcttgtccccaagttgtcgctttaggaaacctagcgtgcaaaacatcaacatcctcccatgcatgtggccagttcttctgccatgccgaaccaaatcactttgacttgtgcaaccagatcaccaccatgctcaatgagacgcctccgcaattaccgagtggcacatgaagagcaaaagaatcctagggcaactgtaatgcaaccaattgatcccggccgaccgcacactacagttgtgaaacatggaaaatatgatgaatggcacttgaagttggcaacttcaagcgataagccattgcctccac

SEQ ID NO: 16711 - DNA, 305 bp, Zea Mays
ttatcgtgatagcgcctcagagtttgctgataccgtgctgattgaatcaccgtgttcagtcgttcttcttcgagtacatcaacatcctccagcctagtagcctcagcttctgctatgttttcaaagatcaaccttagtgccccaaacttgagatcagcaggtagcactgcctccgaaccatagaccatgaagaaaggagtgtttccatgcagggctcgactaggttgagttctcaggctccaaacgacgtacgacagttctctgatccactttcctgcgaacttttcatttttgtcgaaaacttt

SEQ ID NO: 16712 - DNA, 701 bp, Zea Mays
aaggggcgcgacatgagtcctcatgaagtgcattctttcggctaccgggaagcaactactagatgagatccacgccgggcaatgcgggatacacgcagcatccaggactctagttgggaaggtcttcaggtctggtttctactggccaacagcaaagagtgatgcagccaagctagtccagaggtgtgaagcttgccaatacttatcaaagcagcagcatttaccagcacagcaactgtagaccatacccgtaacatggcgatttgtgtgctggggactggacatgattggaccattcaagaaagctcaaggaggatacactcacgtgctggttgccattgacaaattcactaaatggatagagtacaaatccatcgcttctctgacttcagctaaggcagtggaattcatacaagatataatattcaggttcggaataccaaatagcattataactgacctgggatccaatttcactagctcagaattctttgatttctgcgaacaaagaagcatctagatcaaatatgcatcagtagcacacccaagagccaacggtcaggtagaaagggctaatggaatgatattggaagcactcaggaagaaagtcttcgacaagaatgaaaagttcacatggaagtggatcagagagttgccgtatgtggtctggagcttaagaactcaacctagccgagctttgc

SEQ ID NO: 16713 - DNA, 515 bp, Zea Mays
gattgcctcgcacccagaaaggatatgattctacatgggtgattgtggatagattgactaaagtagctcatttcattcccgtcaagactacttataaaggttctcagctggcagagttatatatggctcggattgtgtgtttacacggagtaccaaagaagatcgtgtctgatcgaggttcacagtttacctcaagattctagagaatctttcatgagaatatgaatacaaagttgaactttagtacggcctatcaccctcatactgatggatagaccgaaaggactaatcaagtgttggaagacatgttgagagcttgtgcccttcagcatggaggaagttgggataaaagtctaccttatgctgagttctcttataataatagttatcaggctactctgaagatgtcaccatttgaagctctatatggtaggaagtgcaggacccctctatattgggatcagactggagaaagacagttctttgggcctgagcttatacaagaggcagaagaa

SEQ ID NO: 16714 - DNA, 593 bp, Zea Mays
gtgggtgcagtcctcatgcaaaacagccaccccatcgcctatgtcagcaaggctttgggtcctaaaaccaggggattatccacctacgagaaggaatacctcgccattctcttagcagtccaacagtggcgccagttcctgcagtttggagaatttattgtgaaaactgatcaacgcagccttgcccacctctctaatcaacgtctgcacactccgtggaagcaaagagtgttcactaagttgttgggattacagtacaaaatcatgtacaaacagggatctgagaacaaagctgccgatgctctatcccggcgcccccattttcctaattctgaattgttggccatttctatgcccactcctacatggctttccaacattcaggacagctataaagaggaccccaaggctcaagaattgttggtgcaactcgccagcaacccgacagcagtacctgagtacaccctacagcacggtatcctccgccacaagggtaaaatccttgttggttctcacttgcccacccagcagtccattatcggcgccttccataccagcgccgtgggtggtcacagcggtatcccagtcaccac

SEQ ID NO: 16715 - DNA, 582 bp, Zea Mays
gcgatggagcatagtagtgggccgcgacacgccatgaacggggtcctctgctaggaaatcatcaataataccttgcccactaagttctccctcgtctttacctcgcgtagcatcaatggtagggtgtcgggtgttcggattcatcgggatggcgtgtcgccggtgagggcgccaccgcgacctgggcagcgccgctgtgctgactgttagcgtcgacgtgctcaatctgtggagagaagatggtgccagtgccgtcggattataattgaagggtcgagattagaatcatctcagcgtttcagtacattaaaccgtgaccgttgatattcgatccatcggcccgagtgaacgttgcatggatggggctgtgccttagatttcggatacaacaacggtgagtgatgacgaagctgtatccagggccgacctaatccagcccgttcatgctcaatcggacgaccgaaaaccctagatgccccttcgccttggcatttatgctaaagagcccctgtagaatcaagtaaccaacccgccgtccacccatgggattgatatgtgtgttgcggatattttacccctagc

SEQ ID NO: 16716 - DNA, 427 bp, Zea Mays
tcactgggtcacattcttccacctccaactttaacttttccaccatctgcttgctaatgaaactggtagaacttccagaatcaaccaacattaataacatctgatgctgaatcaatgctctaagtcggatacattgagaatcatcagccccattaatagcattcagagacagcttcagttcctcttcttcctgtttctcctcttgctctatttgctccaatacttcaggagttaaaaccttctccatatcctcaggaactagaacatgtaactggactgcattccctttctggcaccttgcttgatgaccaggttcaaatttctctccacaagtgaagcatagaccattcactcttctatactcctttagttgtctctccttactccatcctcccatctcaacacctttaccatctgctctatttcc

SEQ ID NO: 16717 - DNA, 846 bp, Zea Mays
ctgatgagcaactatgcctaggagcttgttacccagccccgtagctccaacatcgtcacctttaagtgaatattcacacacaagttcctctccaatgggactttcggtcgctacaaggctcattgggtcctcttgcagtttacacagtgccctagcattgactacaacgagacttttagctcggttgttaaacagaccactgtccgcacagtactcgccatggctactgctctcaactggcctattcagtagtttgacgtgaagaacgtcttcctccacgacactctcagtgagaccgtctactgcagtcagcctatggggttcaccaatcccgctcaaccagatctgatctcccgcctcaacaaagtccttgtatggactgaaataggcaccaaaggcatggtacaatctgtttgccatatatccgacctccttgggttttatggaagccaagtcaggtacctcattgttcatcttccgtcgcagctccgatacggtatatccgttactttatgttgatgacataattttcactgtatccagtaccaagattttgtgatgcaccatcattgccctgtagcggatatttacaatgaaggacctcgagccccttcatcacgtccttggtatcaccgttgagcatcgttccgacggcctatttctccaccagcgcacttacacgctggatgtcatccagtgggcaaccatagttgactacaagtcgtgtactattccagtagacctccaggcaaagcttgccgccgcctgttcaggactcctatcagttcaggagcatcttcgatgctcttcagcacctgactttcactcggtctgacgtcgcctaca

SEQ ID NO: 16718 - DNA, 1156 bp, Zea Mays
tctagatctagtgttgtgtgatttctggagaaaaaggcttccaaacgtggtctataagacaagccaaaattgtgttcatgcatgaacagtaactaaagaagatcagattcatcccacctcgccgccggtgatcctcgcgcggtgattcgtgcccgggttaatatgtgtgctctttggtcgtgtggataactgagggagggtaaaagatcggcgaggaaggaatttaggcacgggttcagcttgtccgctatgtccacttgccctgcgcccaagccgagctatcgccgccggacgcaagtgcatgttcaccacatcgcagtaagtgtgcgagactatgacacacgtctcagagcccttcgattacccgcgtgccacaaagaccgagcaccagtgaaatatcctgccgtcgccccaaatagtttcatccaaaattcgtatcatatgtaacttgtctctttaaattgagtgcactccctgctccgcccctctgttactcgctcagtccaccctcaaccacctcccaccatttaccatagcttccagtcacctgaattccctgagaacggtcactagcgccgccgtgaggagcgccaccatggccagcactactccagttagttcatactcttattggacccgttttagtacccctttgacccttagttgctcaatgtcttggttatttgattgctaccacagtgaaactccaagaacgacgtctcaccaccactgaagaccacccatcacgtcgaccagctctcccgtgcttcctccgtacaaattcgcccgagcaccacaaccctagtgagccactagtacttcctaggccagttaatcaaactctaccacatggctttgctcgggaacaaacttgtcaggccttggtgtttgccattgccgtggatagaggtgttctagggtcggaccgttccgtttttcattgtagacgggctcggttagctgcagggatgaagtccgggtacactctaccgccagcaagggttgccagcgatgagtcctcgtgaccagagccaagtgctcgacctgagtgcgtcgggacctgggtttgtgaaggtcagagaagggaggggtttaagtgtaactattagaggcacaggaaatagtgccagtaaccttttaccagttatttgaatcg

SEQ ID NO: 16719 - DNA, 309 bp, Zea Mays
cttgccactgagggggaatggaaagagctctgactctgctggctgaaccgtgatggggcgggtccagctggtctactgaagtttggccccttgggtggaaatccaaatgatcgagtcttctggtgccggtcctgctgttgtgcccggagaacctggaactttcttttgagatgccctttttcttcctcctttgccctttcaacttgcatggccttgttggaaaggtgagagaaattgaggaagtcttggctagccaaaattgtcttgagttctggcctgagtccctttaggaaacgggccatcttcttg

SEQ ID NO: 16720 - DNA, 380 bp, Zea Mays
aggcctggcgcgacaatgcggttgtcccaagagagttcaacaaaggagacctcgtactcgtccagaccacccggacagaatcacgaggcaagctggagccgaaatgggagggtccattcatcgtcaagtcgaaggcatcccccagcgcgtacaggctagtaacgccttccggcgaagacttagagcactcctggaacattgacaatctccgcaaattttttgtttaaccatcagggcccacgcgtccttgtaatccagcaaacaatgttattccagcccgcactcttttcctcctgagggtgaggtttttaacgaggcggagccatgtaatataccagcaaaagcccccgcaaaaacaaaaactcagacgcaacgtgtcg

SEQ ID NO: 16721 - DNA, 785 bp, Zea Mays
cgcacggctcggtcaatgcgtaggggacgctgaagttgacggcgggtcggactcggagttgtagacggagctcgcgacggcggggtggattgcctagggttcggccgccgcggtggagaagaacgagggctcggtctctgcggtggagaagaaagagggggcggcgacaccgcctccgcgattccaggccccttccgcggtgaagaaaaacaaagcgacggcgtctctgcgggggagaaggcgatttcgggtctctgcggtggagaaggtgaatgcgacggcggtggaacggcggcggggggggggatctctatgggttcggcagccgcggtggagaagaagacggcggcgattgagctagggttcggctgccgcgagcgttacgggtgagttgagctgaaaaaaatgcgtcctcggttgctggattcgtgggcccgatacacataaaatgctggcgaaatcaacatgaaggcccatggaccgacacgtggattactgtatcgtaaacggacacataagacatcgtattatgaatatttatgtggggactagtacggctgcctagattgcgggaacacaatcttttcgtgggcccggatgtccgaaacatgcgcatacccaaaagtgtgtaaatcgtaacacgaatgagcataacacgtagttataattgtcgtaagcaggtagtacagtgggtcaaaaggtctgcgcacctggtcggtgcgggcgcggtccgcacacctggtcggggcttccaccagttagagagagtccagagctctaaatac

SEQ ID NO: 16722 - DNA, 449 bp, Zea Mays
tcatgagaatggaagcgccgcgaccacagaaaaaggtacagaggcttactggatgcatggcatccctgagcaggttcatatcatggctaggcgagaaaggcatgccattctacaaactgctcaaaaaggtggacaagtttcagtggaccacagtggcataggaagctctaaaggcactgaaaaagttcctgactacaccaccagtactcaagccacaacgccgagccacgccgaattagccagcaaaagatctgatgttatacatctcctgcatgactcatgtggtgagcaccacgttagtagtcgagcgggtggaggaaggacatacatatccagtgcagcatccggtctacttcatcagcgaagttctcgagccctcaaaaatgaagtatccccaagttcagaaactgctatacgtggtacttctaaccgctcgcaagctccatcac

SEQ ID NO: 16723 - DNA, 273 bp, Zea Mays
caaaagggttcagactttaagaccgaacatatatcacagcaaaaggacagtattacggatgatccggtccccgagaccggagagtccgccgtcacacaaagatcttctaattcctctgtggggaacatgatagaggaattcagagatcttgataaattaggacaggggttcacatcggccgatcctttggaggagattgacataggagatggtaaaactccaaggctgacttttgtaaataagaccctggagaccgatcctagaaatgagatg

SEQ ID NO: 16724 - DNA, 714 bp, Zea Mays
ggcattaattctttgaactacagggtgcactgtgtaaaaatctagggttatgcgcgttattcccagccacagtatggatggcgggtttatttcagtaaatcccaggggctcttttataaaatgggatcggcgaagaggtatcatgcgtccagggccgttggattgtcttcgcacggtgcagattagatcgcatccatatccaagcggtacgcactagggaccaccggatccgtgattgacggcccaaattcagtcaagtcggattcaatacccaaccgtcgattcacgcatcaacggaggttatcagatccgaccgaatcctttccctggcctaatcccagccgcacgcagacaaatcaacgacccacgctaattactcctcggacctaatcctagccgtatatctcgaagtctagggccatcccctgtcttccccattgagcgcttagagcggcggcgcccgagcagtcccagacggcgagctcgttggcgtgcgcacgattctccgcccaagcgtccccaacactaaaattgattggtactacgcgacgaggaggacgaggcgagtcgattggatgggtttcttactgacggaatgaggcacaggagctcggccacggcgctatgcgggtcggcggggaagatccgactacggcgagaaattcccgcccagtcgatgtcgcgcccacccagtctctgccctgcgcgtgttcc

SEQ ID NO: 16725 - DNA, 826 bp, Zea Mays
tgtgttggcttccaggtaagccgatgggatggagataggcagttttatttagcagtttacatttataaggttgttttgtgctagtcattgtaatctgcgattgcgatttccatgaacatctcgccaccatgaccaggtgaatttgcagtggtgaacacccatgggcttttggaaacttcacatgtttaataaagtcaaaagcacggaggttggtaactatggaagcatgtgaaacctttaacacagcctaacaaactgtaacacggttctgggcagaactgttcgtgtcttgttttcttgccattccaatgtatttaggcaaagccaagtgcagtcatgcaggttactgcaaaggggaatgaaacatgatcatgccgatgaccacagtaaatttatctcttgttttactcagagggattgtgattttatacgtaaactgtgaaagttcaattcgatcagaccaatagaaatatgctcgcgagtttatacaaattgtgcgtgggagtctggcaatgagcatcatactaatattgataatgacaagctactgagataaattgttatagtgatctcaacaatatgttatcacggttttgtgcaacaatatattatacaactactaatctttaatgacaaggctagtgaacatcacattagttatttatgagttgacatattggcaaaactagtaaaagattatttgagtgtatacttttataatctttgttgaatgtgtcattcaattatatgtgcacttgtaatagggttcgggagttttcttgacctgtctgaaaatgtcttcttaaaacagtacacaagggttgtc

SEQ ID NO: 16726 - DNA, 664 bp, Zea Mays
aaatatggaaaaataccttcatacaccttctgtggtgatgctcatgcattaattttggtatttatttttctatattaataattatttctggcagcaaataattaacaggaaataattaaattgcatgtgacagctacgttgggtatttttaaatcgctctaaatatttatgatgtgttgagcttttggactcacgtcgagcgattaaattgtatagtgggtactcagacacatcgatcagactatattattaatcgaccgagttatggcattggctgagcactggctgcgccctggcaacacgacgcaatatttgtgtcgtatgaacttggctgcgtcatgtgattgctatgtagcactctcgtttgtttggatagctcccgttgagtcgacccgccatcactgagtcgcgtatttttcgcatgccctgtaggcactgtctgtctgtcgtgatcattaagccacaattgcgcctgttgcgcacgttgcgtggacttatcgtgtaccccgattaccgagccataattgtgcctgttgcgcttattacgaaggcttgttgtgttgtcgtggccctgatggccggacacgcgttgacgccagatacgctagagcttgtactcgcgtggattgtggtgagttgttcaaggccctgaagtcatattatg

SEQ ID NO: 16727 - DNA, 448 bp, Zea Mays
tgaagcgcaggggtctcggggtaataattcctagacacggtgaatatttgaacctggatcgtgcgcagacggcacggattagatccgatttcatcctaaaccggtacgcgtcagccgccctcggatcgaggaccaacggtcacgatttaaaattcccccgatcaaccctactccgtctgatttcatccaacggtgtagattccccgggtcaaatcggtatttcgattctaatcgtcaccgttgcttgagagatcaacgaccaaaatatctcccacccacggaacaaatgccggcagcggagcaaagctcccccacgacgacgccattacccaacctcgccggagttgtccggtctcgccatcgccgcccccattttctaattaaacatgctcgacggcactactagtccaaggccagattggaggaggtgtcctcaccagcaatcgtc

SEQ ID NO: 16728 - DNA, 296 bp, Zea Mays
ctcgtgctcctgctcatcaaggacgatcgccacttaaccaccacgacatccaccgacatcccctcggccgcggccgcggcgacggcacggaggaggcagcccagctcgtcctcccgcaaggtgttgtaagggctaacatcaggcactctgaagagctcggtggcgcagatcctacgcatctgccaccacccatcgtcctacgacacgaaggtgacgccctccgcgccatggtcaccttccttccccacgcgacgcagcaactgcaacctcccgtccacagcgcccctgccccccac

SEQ ID NO: 16729 - DNA, 383 bp, Zea Mays
cacgcaggagctggaggccgcccgcctcactatcaaggccttggaggatgatcgcgtcgtcatgaaggcgatgtgcgacaaggccatggataaggctgttcgcgctgggtggatcctgatgaggagacccggtgtcgtggtgcctgaggacattgtcgctgatgtcgtggccgcgcctgatgccgcaagccgtccatcttcttcctctgctcctgcaaacgatgcttcctgcaagaatactccagcgcaatgatttgcctaaaaaacacttgttcattgagttagcaccttttagagaaaaagtgtaatgggagttatgtatgcgtgcaactgttatgtttgaactgattgttccgtcggtagcgtgctgaaaaacacccctg

SEQ ID NO: 16730 - DNA, 579 bp, Zea Mays
ggaaatggtattcagtcgactgacagagcaagttggagcccagttttctcaaattttcatgtgaaacctaagccaaggttctgcagcaaagttgttgtccattataccatcttcatctttgttacagcagccatgggcaaattcttactagattagtcataaactgtttccaaagatgatccaatgtcactgtcagtctgattttcagacttaatccgcctgacagccaaagtttgggcatggttatctcccattttcttacaagaacatggcttgcactcttaagcaaaattgttgtcctataattgggctataattttgatgtggtgacctagggcacaaaccccataatttgaaagttacaagggtttcaagttgaggcaatcacactgaaatgcagacttaaccaaaaagggttaagtatggctcttttgcacttaagtccaaatctcaagttttggattgcaaattcacatatgattgacccaaatgacctaatatacttatttaacttggtttttgcactttaacccaaaagtggactaattttgcacataggcccctagggtttggttttag

SEQ ID NO: 16731 - DNA, 516 bp, Zea Mays
cttgactgatcataagtgcaccgccagggggtattcttgctggaaatggacaacgacatggaggaagatgcaaaagcagaggacctgggcattgacatcagcagcaccatgaagctccaagtcagggtcaaggatcggacattggtggcgctggtggacacaggctctacccacacattcatccgggaagctgtggccacccagctgggcctccaagtcacaccaagtccgggtctctctgtcaaggtagcaaacggggacaacatcaccggcagcggaatatattccaagctccaaattgctattgccgaggagaccttccacgtcacctgctacggtcttcctctggccggcttcaacattgtcctgggggtccagtggcttcggtcattgggacccatcttgtggaacttcaatgccttatccatggagttctggcgcctaggacgcaaggtgcgttgggtgggactgggtgcgccacatactcagtgcgcagccctgtacaaaccccgcgaa

SEQ ID NO: 16732 - DNA, 328 bp, Zea Mays
ctggtagaaaggtgaactgatcaaacacatttccaaggagggagaagaccataaatctggatatagattccttcttcgtttcttgcaaacacactatgtcggggcgagtagactcaaccatcatacgcacaacatccctcctagctttcctattaagacctctgacattccaaatgaggatttttgacagattcattgataacaaaaatgcaaccaacacaatgtgaggctacagcaggccatcaagcacacgtttcaatgcttaactccctaagcaaaggaacatccaagcattcttgcacattatctgggaccggccatccaaaca

SEQ ID NO: 16733 - DNA, 455 bp, Zea Mays
ataatcgatcgtctcaccaaggtggcccatttcgtcccagtaaagaccacttttggaggagcagtccttgcccgattataccttaaagagatagtcaggctacatggcattcctcggaagatagtatcagatagaggaacgcagttcacctcaaaattttggaagggccttcagcaagcaatgggcaccaagctagatttcagcactgcttatcatccccagtcagatggtcaaaccgaaagagtcaacaaggtccttgaagatttactcagagcctgcgtgttagccttcgacagagattgggagtccagtttgccgtacgccgaattctcgtacaacaacagccatcaggccaacatcaaaatgtcaccattcgaagcactgtatggaagaaaatgccagactcccctgatgtggtccaatgtgggggaaaggacactagaaggacccgactt

SEQ ID NO: 16734 - DNA, 332 bp, Zea Mays
ggaagatgcacgtggtttgtcgctggaggaaggcggtggtgctggtcgactcggcgagggagttggtgctggtgtacggccggtcatggacgtagtcgtgcgctgctgccatggtgtagattttcctgcagaaacatgagaccttgcacacatcgtccctacacttctctttcagctttgcaagcaagatgaaacaatcgggttacgttagcataatctttataagcaaggatgtcctgaatttccctatttaacccacccaaaaatctagccatagcagattcctcaccctcctctatgttacaatgcaacatacccatttgtaattcctg

SEQ ID NO: 16735 - DNA, 500 bp, Zea Mays
gccatcgtaatactccagcagcgctcgttttttctcctgagatgaaaccacttattccccattcagcagcttgggaatgaaattttctcccttcgtctaacaggttgggaggtgacaaaaggggtattagcatcaccaaaccagaccacacagacaggcagcccttggaagcacttcgagcgaggcataagggcaacatgcctaacgaccggtgcgcaccaacagaggtggtgtatggcactcagaattccagcaaggatgaggagaagacttgaggactccgtgtgcaagacgaaggatggtgtgcctcctctaagctctccttaccggtgcgcccttcatcgctttcttctcatccaccacggaagcaaaggaatggaagggagatgaatcaaatgacgtgatgcaacgattcctggccgatggcggggcttccatctcccgtgctatcttggagttttcgttgagcgtgtcttaaccgaaatgatgcccctcgatcc

SEQ ID NO: 16736 - DNA, 347 bp, Zea Mays
ccgtctaatcggagcagggtgcaggtgtagactacgacgtaggctaatgcgctaccacttgtaggggtgctcagtcggtgtcgtctgtcttttccgcctgtttccctttgcctcggtaacgtgcgggctataggagtcgtaatgatagcatcccaagccgcacagggagtcaatggtcttgcctcggtaacgcatgagtactgtgtggcccatgtattgtggacgcaccgcctgccattggggcgggaaggtatatgtctcgtccacagttaatgcagaggcgctttacactcaaaggctaacgtcagtctttccccgatggcttagtcgtgcatcgtagaacatgt

SEQ ID NO: 16737 - DNA, 1182 bp, Zea Mays
tcacatttcatatacttatgaatatgtgactaatacgtgctcacctcttctgtcatttcagtaatctcgcctacccgcgtgctcgtctcctacccagcctggatcttctctctctcgtgaggtttccaggtagctatcactctatttgagatcctatcggctgcactctactccttcttatcttttcattctatcgtgcagcagtcaggtcaggatggtgcggacgaagaatgtctcattatcagggggaggcaacgatgaggaccctcctcgccattttaggcaggtcaaagggaagactgtttacattgagcagcaggaggacaagaagaagcgacgtatggacagagccgctcgtgcagcactagcagcggcagcagcggcagagcaggctgagcggggaggccagctctagatttcctcttattagatagcctatcgagttcgttgccttgcatctcagcctcggcccactactccctccacaccttccgctactatctctactccacctcccacttcaccagctcttgtcactccagagccatccactacttccactgtacccagcacctccaccactccagattccactgctcccctcccgctcccatttccgctccgcccattacaccacctcgctttagggagcgtgacaagactgaggtgagaccactagctgctgatccgcgtctacttgaccttcagcgtgctactgctgcccaggtacattggttcagacacgtacctgtggagtcttggttgctagctcagagggaccctgcggctgctccactcttcagtaccaggactcaggagtccttcttcagggcacaactgacagatcagattgctttgcaagcgcaccgacttttggatctacctgcttttctgttagccaccggtgccgactcagaggctcaccttacttatctgccaagtctgctttcacttctgaccgcgagtggcagatatattgaggagtgggttagagtgttctatgccactgtttggattgaccctgaccatcagtggatgaggttctgttttgagctagaggatgtcactctgcatgccagtcagattagacagctctttggatttccagagttgacgactaggctccacagccagtgctacggcactttggatcctccctatcgccctcacggtggagttgca

SEQ ID NO: 16738 - DNA, 386 bp, Zea Mays
ctggtgcaattaatcctaagacacagttgacccacaagctggactgcgggttgatactcaacttctccggggacttttatgcaaaacgctatcgcaaaggggtatccaacgccgagagccatacgattacaaacggacggccctgattagatcatcgccacaacagatcggtctacaaccatagccccaggatattgatccaacggttactgacttcgaaccccgctcaaagcacccgaccgttcgatcttagatcaacatcgatcgtccactcaccgaatcgttatcttggaaataatcgcgcacgttgagctaggatccaacggttaccaaccaaccctatcgcccaagccgacagcgcggcggcacagtacccgcacggcggc

SEQ ID NO: 16739 - DNA, 440 bp, Zea Mays
caataccatgagatctccttgattgatgaatcccatctctatccctgtttgattgaatccgatctatctctatccctgtgttatgaccggcatctcctataccaggcgcaggctcggccaggtggttgagatcggccaaatagattagataaggcctagctaataaatagataaaggagagattatctctggttagttggatagggattagaagagatctcacatctcttatccttagatcatataagcatcaactgggacataaatacttgtaagtggtcatctaatggaagcaaacaaaaacttataccgcgtgattggttgctcagactactgcgcccaggccggcctcatcccgttgaccgtgctttggcatatgtttggttggctgcagagcaggacgacagcgtgtacccgctcatgcagtgtaggattttttg

SEQ ID NO: 16740 - DNA, 723 bp, Zea Mays
cgacatgttgcgtctgagtttttgtttttgcggggtattttgcaggtatattacatggctccgcctcattaaaaacctcaccccccgttaggaaaagagtgcggaccggaatagtattgtttggtggattacaagggcgcgtgggccctgagggttaaacaaaaaatttgtggagattgtcaatgttccaggagtgctctaagtctttgccggatggcgttgatagcctgtacgcgctgggggatgcctttgacttgacgatgaatggaccctcccattttggctccagcttgccccgtgactctgtccgggtggtccggacgagtacgaggtctcctttgttgaactctcttaggacgaccgcattgtcgcgccaggccttggtttgagcttggtatttgttgagggcctgcagggcgaagacgcggtctccgtcgatgaggtctttagacgttggttcgtcgacgtcggagattgctgatgtgcttgttcggggtgacccatgctttatctcctgcggcatcacggcctttgatccatataatagacagaaaggtgtgaatccggttgcccggcattcggtcttgttgagggcccaaactacctcaggtagttggtcggcccatttacccttgtcgtcaagaagccttttcttgatggcagtgaaaatcttgccattggcgcgctcgacgacgccgttggattgcgggtggtataccgagg

SEQ ID NO: 16741 - DNA, 694 bp, Zea Mays
gccagccgcgcacggctacaccgcgcgacacatttcctccccacgatttaatcaatgtgatttactcactgcgttacgccacatccattaatggccaccttcaacacatgttcatgccgtcgagtccgcggcttgaattctccctcgtacctggctatttaagccatgcccatgcttcccctctttacctgctcggtccttgtgctcccttttctccaccgcaacctgctttcgccgagcgtcgtcgatctttgttggaactcgcatcggcttctctgttcacgacgtcgtcgcccgccagagtactcctcccgtgttgaaattgcccggagacccgcatccctccatgtcgctcgttgtcgttgttctggcctcccgtgctttcctcgccaaagcagtctgcgctactctatcagtcgcctcgcttcttgccgtgccaagcactagtgactcgtagctcgctagagtttgccttgagcaccacccatccgccgcttgatgcgctgctcgcccgtttgtgcgtgacttccatacaccgacgtcgaagtttgccatggccgaatctctatgccatgactccgtccagcgtcgaggctctactcctcagccgcaactcctactactccttgtcgagttagctggaatccccgcacgctctatgctcgatgtctcccgaagactcacgacatcgccc

SEQ ID NO: 16742 - DNA, 400 bp, Zea Mays
agattgctgaagcaactacagagaaagaggtgaagaaaagaaaagctatgacacctagatcagaggtatggcagagcttcaccaagatcataggcaataattctagttttatgaaggaagctaggtgcaactattgcaagattgttatcaagtgtgaggcaaaagtcaatggtacatctgcattaggcaaacacttgaaggtatgcaaaaagaatcctaataagatcaatgatgacaaataacctgttttgcaagcatgtagtgaagatggtagtgggtctagcatcactgcttggaggtttgatccagaaatgcttagggtggcttttactgaaatgttaattacagatgagcttccatttgcttttgctaagagactaggttttaggaagttcatgtc

SEQ ID NO: 16743 - DNA, 321 bp, Zea Mays
ctttcccctggtagatggcttcggataaaaccacgcctaccgcctccaggattggagcagggtttcccctacgagcagaaggagaagctggcggagaagggagtgagacccacctccccgcacctccaaaactaccactagatttggcccaagttctagccaatcaaacccgactcattgaagtcctcactagaagtctggagaatcagcacccatgtgatggaaaaccacaggacaggatgggagaatttctgagactcaagcctcccacgttcgctggatccagcaatcccctcgatgccgacgactggctgcgcacaa

SEQ ID NO: 16744 - DNA, 637 bp, Zea Mays
cgctgctgaagcagcactagattccaatgtgttagagacagagctcttgccgggacagaggcaccctgcgatctcagctgaccagccatctcgtcaaccaaagcgtgacattaaaaacaaatgagtgcaaagacagtatttcacccggagtatagtcagatcgggaaaagctaaattacctggagattggagaagaacgaaggaagccccaaatcatgagaagtcagttggtgacttgacggaggattatcaaccgaggcaatctgcagagcatcattggggaccaactcagcatcaccagcagaaatcaaaactctagcatcaggtgcgctggcctctaaggcgacttcctgacccaaggcacgtgctgctgccatacaatcagaatgtggaggagaagacccgacgtggacatccatggaagtatgagaaggggaacccgctcggacaccctcgggggctgggtcatagctcgcgcttcccacccgagccggatcattaccgacaacaccgtcgggggctgggtaaacgctggcgccatccttggggaccgggttctctgcagcagccacctctaaggctaaaggattttcagccacttccatgggaacggagcaatctagatcagcctcttgac

SEQ ID NO: 16745 - DNA, 804 bp, Zea Mays
catttgacacgccttggcatgagttttgttgtgacttgggtacagtgatagacccgacttgacactagcatatttcctcgccctaagcatatcacagctcgagactcacatgaaaaagcaaggatttggagcagggaagagatactacacgggacccttgccaagataggcatgctagggcaactaaacaggtgcttggacatgagcagaagcgatcctccacgtgttcgaccacgactgacactcgggagagcgctctgactgcgccgcacatgccacgagctccggtcggctcgaccgcacgcccaaccccatgaccgtactcgagccctcacctataagaagccccagtcctcggccttgccctctcgcacaccccataccttttaccagcgactggacgatagtaatcactagagcaccgagcgtggtgttgtccgcaagcttgctgacgcatcaaccagctcagaccagccactccagcctaaccccttccagtctaactccccgaccagcttctctagaggctagcgaagtttcccagccactcagatcgaacgatacctcaccagagaagccataacacctcgctggacttgtcccttccaccggttccctcggttcatgtaatctaaccatccattcgttgattccttgcacacacacactccctgccacttagtgaacctccctgtgcgatctgattgagctctaccgccatggaatggctggtgcagacatcaccgacaagctccactgcctagatccgtggccagaccagctccgggcaccaatgacgccgac

SEQ ID NO: 16746 - DNA, 1802 bp, Zea Mays
ggaacacgaccacaaagtcatccaagaactcatgcaacatcctatttattgcttccataaaagcagcatgggcattagttaagccaaaagacatgactatgaactcataatgcccatacctggtgcaaaaaacggtcttctcaatatcctcctcacggatcctcaattgatgataaccagagttcaaatcaattttggagaacacctaggcacccctcaactattcaaagagtacctcaatacggggtagcagatatttattcttgattgtcacttgattcaaagcgcgataatccacacatagcctcttgcttttatccttcttctcaacaaacaatactggggaagcccatggagacctgctaggcctaatgaaacccttagtcagcagatcatccaattgccgcttcaattcaacctgctcctttggggccatccgatacggggctttatgaataggctgcgtatccagaatcagcttgatttcaaaagctgcatcgtgccccggaggaatgcctggaagctctgccgaaaacacgtcggcaaagtcacacaccacccggatgtcctgcacccgcaaggcagcctcaccctccaccaccatggagaaaaatattcccgacttccttgaccggcgatccggaagcaattgcgccaacaaggataacgtgaactttggggagcttcccatgaataccacctccctacccgacggcgcctgcaataacactatcttccaaaaataggatataaccgcgcgatactgagataaccaatccatacccaagataacattgaaagcccccaaggacatcacaacaagattggccgaaaagacctcatcagcaaggatgacggaacacccctgacaaactgagcagctactaatggagccattagcagaacaaaccaaaattaggtgacccaacctctgcaccgaaagaccagcccgcgacacaaaattatccgaaacaaacgaatagctagcgctagagtcaaaaagagcatgggccacaaacgaatcaactgaaatcgtacctgtcaccacgtctccttgctctctgccatccgcagcaggtagcacataagctccggaaatacccgcagaagaggaagctcctggagtgaaattaacagaagaaccccactgagccgtcgggtgaggcagacgcggagctccaaactgagatggcataggagtaggcgcagccagacactaaggaaaaccctgcatcggcacgaactgagaagtcccagacacataaaactgctgcggaggaagtggaactgaaaattgctgctcagctgtgacaccctagtgccacttagggttcttccttaagctaaccccaacccatgatcacatgcaatctcaatgaaaggataaacattaaaaatgagaacaaagaattatgttgaagtctacttaaaccctccttaaagttttcatgaattctaaggaaggaaaaactcttaaaccctagttaaaccctacctccaaattgtgccgtgccctcgcctataaatgcgtccaagaggccttagccattggcaccgcacaccccgagcctcgcccgagccagagatcaccggagttcgccgtgaaaagcgagcaccgccgcccgccatccctgcccaggctcggccatcgtggccacccctttctgttgaactccagcctcgccctagcccctggatcgcttcccagtgaagccatgaagcttctccaagcttgagccgaggcattgcctcaccggagaagcagtttcaccctcaccggacttcgatctttcgccgccgcg

SEQ ID NO: 16747 - DNA, 545 bp, Zea Mays
gcactcgaatcgaccaaccaggtgtgcgagatatggcatccccacgtcgactccgagatcgagggtctccagtcccgcgtggcggattcggagcgcgcttgcctcgtggcccccatgagcatcaacgcggtttcgtcatgcccaacagcgtcagcaggggagaagatgttggacgcgtcattcgtgcgtcaggaggtgcgcatctgcttcagtgataaggtaccgatgttgtcgctcgagggcatcaatggtgtgtgccgggacgagatccgtgtgcacaaggtctgtgacattcgtctcctccacttctcctagttgttgccagaccactccatcctcgccgagctcgaagaccgcgacgtcagtgaacagctcgccgaagcccgtggccgcctcgacaaccccacaaccacgctcctggggcccaacatcaaccccgttactaccccgcctcaccttcgtggattgtgtgccgagctcagcttctcctccccgacgtcctctctcctgcagttggtgtgcgtagaggaggatgaggttctcac

SEQ ID NO: 16748 - DNA, 425 bp, Zea Mays
aaaagatctacggaggggtggatttggtcactggccggctcgaccaccgtatccacttgcccgcgcggtcggacgagttgtcgctgccggaggctgccatttctccttacacatcacgcaagtgcatgcttaccacgtcactgtaaatgtggccgacggtgaaacacatcccagagccctttgtttactcgcgcgccacgacacatgaacaccagagagttatcaggtcgtctagtgaactcgacctcggccaaattcacggaactagaagtcgacttctttaaattgagtgtcatgccagcttagcccatccatcgcgaacccagtccaccgcgcactactctgtttcgtccatcagagcgtgagttcacaggagttccctgaaatcggtcgtcagcgccaccgtgataccctccgccgtggcc

SEQ ID NO: 16749 - DNA, 397 bp, Zea Mays
ccgaactaaaattcaatcttatatccaaggactcgtgcaacttcttccaataccgagaggtaaactacgatccccggtctgacacaatcttctttgtcacaccatgtaagcagacaatctgtgccatgtacaactctgccaacttggctcctgaatatgtggtcttcactggaataaagtgggctactttagttagcctgtccacaatcacccatatagaatcatatccagcagatgtgcggggcaatccagttatgaaatccataccaatctcttcccacttccacttaggtatcttcagtggatgcagtagtccagctggcctctgctgttcagccttaactcattggcatacatcacacatagccacatgtgcagccacatctctcttcaatcc

SEQ ID NO: 16750 - DNA, 466 bp, Zea Mays
cttagcccttggatcagcgatccacggtcaatacactgtgtgcgccagcggccatacgatcctagatctacggcgatgaacaagcccgggcgaaacgttaccttaatctaatccggcgcgttcatcaggagatcaacggttaccgtgcatcttcctccacacgcagagaccaggcagtgatgccgacaccatcgcggtggcgccatggccaggactaggcaatgagctcccctagtgaactccatcaaatctaaacagagctacacattactgtgactaaggcgggtaggtctagggcacacatacccgtagttaggacgccgaggtaccccgaccatgggcagggtggatctgtggcggcggaactgctccatcgagaaattcttgaccaccaggttatcatccccccaattgagctacgaacttcatcaaggctccccggtggcacgcccaggccctctgcaac

SEQ ID NO: 16751 - DNA, 399 bp, Zea Mays
atcctctccctcctcctctgtactcttctttcccgtcccctccacgtctcgtctcctccctcgctgcggtgcgggatacgggctagattcagtcagcgctcatgatccggaggatcgagggcaacaaccagcgcggagcggcacaagcctcacgtgtccgggatctcttctccgcccagtaggcttccttgccttcgggcggtttccaggtgagggagggcgactcgccttcgtctgattgctttctctctttcttctttcgtgcgatgttgatagtaccacctcgccctcggtgccgcgcccgtcgccacgatctggtctgcagatgctcatcttgactcctgtgcgtccagtgaaaccctcacgtgacgggactgaaaatgaactcgactggaatca

SEQ ID NO: 16752 - DNA, 1077 bp, Zea Mays
cgcgaataaacctaagacttagagcacagtagagagggacggcgggttaatttgactctcttcgagggtctctttagcaaagtctatcgacgaaggggtatcggacgggctgagccgtccgatcggatatcaagagtccagattagatcgaaggggggtacgggacagtgaccgtgagatcacagatcgacggaagaggttttaaagaggtaaggagggttctggaccgcccgattagagattcacggcccagatcggccccggccgaaggggtatcctatttctaatcgtagccgtccatgcgatgatcaacggtcgcggaagcatcgtctcctacccagcccgagccacccaactggcctcagcgcacggcggcggagtcaccggagtccatgaatccgaccaacccgagcgccagactcaaattcgttcggccctcgcgaaattgacgacgcccagagcctgattcacccatcaattgctactgccatccatcgtaggacctggcccacagtgcaccgcgccagcatcacccgctaccccgaattgacacacgagccatggctaattgagtgcaatacgactgacaaaccaaggaattaacggtgtttctcatacctaattgcgcagcagaggttctccggccccggtggatagttggaggtcgagattccgcgacaacgacgaggaacttcagagagccgcaaccccaatttgtgtgtgcaggggtcttggtttgcttcctgtcgtaccgaagactccaatccgcgacaaaccgaacccacacgatgtgagtgcggtgacggtgccgctcgcaagctctcaatctctctcttcctctcctcggatttctttctccatcgattttgcgttggcgctcggttccagctcagatgtgacgaaacggggaggccgaagcggtcgtggctggtggctttgtactagcgatgcatgttgggatggctgtaacggccccgaagctcacggcgcgacgcggcatgcgcggggcgagagacgcgcggagaagacggacacattctgttgaagggaggctgacgaggcgatcccacgtactag

SEQ ID NO: 16753 - DNA, 787 bp, Zea Mays
ctattttcctctatagacaagcaggttcgactgttgtgtccatcagtaatgccacatttttggcactttcgagtcttcttcttttctcctttcgcacccagtttcggaactctttgttcactagtttttatcgtccttccctttggccttgcattatttggacgcaataagcttatgccatctacatcatattccagtccctacatgccatacaaagaagtatttataggtacaaatgttatgatgtcagattataaatagttactaacattaaatatacagaatatctgcaatttaataaatttagatttcatacctttctaacatccccatactgtgctccttcacaatcatcatttccaacaagcgtcatttgcagttcagattgatgatgtgcatcaatatttaagcctccatcctactcattagtgcattatagtcaatattacaaataatgtataaatcatcccatttgtttgcattatacataaattacattgtttttttgccataatattacctgttgtcgtgaatgtactgccacatgctcctcgttatcacattgcgatacatgttcaccttcagcgtttccaacatcatcctcttcgccctgcaacgtttaatttttacaattagcaataattaagttctgaataaaatgttcaacaattttatataaaagaacacccacatggttgccctatccagtagttgcaccaccagcatcttcacatcctatatctggctctaaacgcccaatcatctccaacagttcatccattgtgtc

SEQ ID NO: 16754 - DNA, 625 bp, Zea Mays
caggggctacgacgcaagtattctaagactcgatgaatagctagagtggatggcgggttaaatacgaaaaagagcaggggctcttatgcaaatccacacagccgaaggggtattggtggatttcggctgtttgatcataaatggatggcacaaattaaatctacttttaattgaaccggtatgccatgagatccttcggatctcaatctaacggtgctaactcattacccggagatccaatctcggccattggccaaagatctagtggcctggattaagtgaacgaagaggtgtgctccctgtctaatcacagccacacatccgccactcaacggcaccagtctcatccccatcccactcatcttccccggccagcagagcggcggccagacagcacacggcggcgcccttggcccgtgcggcggctccacccatctggcgacgaaatccgcgccctcttctagatacaaccaaattcactgccacccgaacctattgggataataattatcccggattgcgatcccagcggctcgggccaccatgatccgcggacaatggtgaagcggcggcggtgcccggccattcggtctacctgaattcgaattcaaacacagccaaggac

SEQ ID NO: 16755 - DNA, 649 bp, Zea Mays
caagttgtggagcggttagctgagaacaaaacaggccctaaagctttaagagtgcattgggacttgtatgtatgagatgaaagtaaaactctaagagtaccttagtgcttaggcaatgtaagaaaaggggcaacagtaaagctttaaggtgacccgacttgattgagatgtccagttttcttcaatagggtgtgtacttatttatggataaagcaaagtacagtaaaggtaactgaactctaaaactggttcaagcaccaaccgatataaattgatgatcgacaaccataccaacagaacgacggtaatatctaaagtagtaccatatgcaccttctttctaatgttttctgattgctatcaataacagcagggagaagaagaaattacagtatccctctacaaaccaagaaatgtaccaaataatcatattaccaccaataactactccataaggaccattttgcaaaatcacaaatacgtactaaagttcctactactttgctgcttgtttcatcctctgagcatcatcttttgttgccatcatccggtaacagttgtttgttggaggcttggagctacataatctaaagagagcaatgacaaagtctcatagtcatgatccgcattgatagatcagcctattttct

SEQ ID NO: 16756 - DNA, 495 bp, Zea Mays
ttcagtcgtcatgactaccgatgccggagtttcttgttcctgcgtggcgtgcggatcagcgacgacgacgcttgcaccccacaattcaacaaatagctgtagtatggcggtatgtttgatctccatgccacggcttgaaagtcccctcgaggtctcgtgcttccgatttgcacctcttccatggttgtcatgggcagatcatgctgctgggctgagcacgcttggtaacaaccgtaagctattagcatagcatcagtcttgggtaatctccacatatatattgggcgaccattcgctaggctatcggattgatgctcgccaaagagattcaggtgcatacttgcgtaatgtctgtagcctttgagaaccttctgccaaaactgaggacagaggttggctctcagatagccaccaaacaaatttgccgctacgaatgatccgttcaacaggtccgccatctccatgcatatggattccagctctggctcatccatg

SEQ ID NO: 16757 - DNA, 542 bp, Zea Mays
cgcaagagttaaagcacgccccccgaacaaacaaatcagccgtccctgaagtcgacgaactaacttccaaagatctcatcgatgaagagcgtgtcctcgccttgcaggccctcaacaaatatcaaatctagaccaaagcctggcgtgacaacacaatcatcccaagagagttcaacgaaggggacctcgtatttgtaagaaccacccggacagagtcccggggcaagctagagccaaagtgggaagggacttacatagtcaaggcgaaggcatcctccagcgcttacaggctagcaacgtcatccgacgaagacttagaacattcctggaacatcgataatctccggaaatttttcatttaagttccaaggcctaagcgcctttgtaattcttcgaacaatgctatccaagcccgcactcttttcctcccggggggtgaggtttttaacgaggcgacgtcatgtaatataccaacggaaaagcccccacaaaaagaaaaaaatatacaagcatcattaccatgtcgaaaaagaccgctctga

SEQ ID NO: 16758 - DNA, 339 bp, Zea Mays
ccacgaaggtgtctcgtgctaagacacgtggtgcgcgacgacggtagcttatcggcgacgaggccatctaatcgacgatgagctggggtgaagtgcggcggtcttagccgtagctcaatcctgcctcggatttttacccggtcaagtttatctgttgtacccgaagcacgaatcgcagcacgagatcgaccaccggcggcgactcaccggcgacgagcgagccagctggcggtctgatccccaatggtctactgtaccatggcgcatctgcttcagtcgcctgaaccggccatgttccaacccaattatctctagattcttgttaggaacagagcgatc

SEQ ID NO: 16759 - DNA, 421 bp, Zea Mays
tagaatagcgagaattttagaagtcctgattcacccccctcttagacgtccgcagtccttttgagtatgtcggctgagtgcaaccccgacacacttatgtttattaagaacgtcagccaccttagtcgatgtacttaagctttaagtacgtgggctagtgtaaccgacattcttagttttttgactaggtcgaatccacgcccgactcctcgtctcatttcaaaccgccgccaccgtttcgttgagcccgtgtgaagccccaccgctaagactgcttccaagcccatcgagtcacgccatgccgtccatctaccaccacgtctctgtcatccttgtgagtgagcgtccaccatgccccatgttgtcgtcgtcgtcctctgcccatgcccccacacgttgcccatgccccacacgccatcgc

SEQ ID NO: 16760 - DNA, 621 bp, Zea Mays
aacctcccatgatgatcgccatggtcagctcttcgtgtttctggcaaccattgcgagtccgaaatctgtggagtgggcatataggtctgctccggtgaggtcgcggtcgccgattcgggcggcactgcttcgggtggacgttaggtggaagaaacgtgtgggctgttgatcggccgatgtatggtcgtgattgaaccgcgcgcctattctcatcggccagtgatcggctattggatgaccagattagaccctgagtatagtgctctcatgtgtaatatgtgccctccgatcgggatctggtggttagggttagagcactcttcaataagatccggaccgctgatcttaggcggagggctcgaattagattcgtgttacaattgaatctggaccgtggatcggtgatcgagcagtctcgggcgcgtaccgattcgtttaaagtgatgaagtaatctacgacattgatttctgatcggatggaccttgttccccggtaccccttcgaccgcgacgaaattgtaaaagagcccttacactttccagaaaccaacccgccatcctcgattatagagaatttgttcacctaagcccttggaaattgcagaataacccctggcttct

SEQ ID NO: 16761 - DNA, 689 bp, Zea Mays
agtaagcatagtaagtgtatggttcacgacttcatcatccagaataaccatcagattttccggtgtgcactgaaagcaaatgatccgcggttttggtaggtgaaacgttgttaggtgaatgcggatgttggctgttgttgcacgtgcgaactgttgtgtggaagctgctgggtcctcctctattgtgcgtggcttgtggcgggcttggactactctcatggcttcggcgcttggaactgctcgtctgtccggtcctgcgtgcatctctctctcctggctggaggtgtggtggcctggcggcttctctgtgtttttctttttatgatgacttctcgtgttggctagggttggcgttaggggctcggtcagttatgctccctcagcttttataggcagcgcaccatagcaggcagagcagagataaagattccaattgcatccatctacaaacaaggctctcggcggaagggataaaagcatgcatcgcaattactgctgctctgctgcaaccttggctctcgtcaattggatgaccaaaagatgccaacgtctaagatcttttctttgtgcagctgcctgtttgtcaccaacacaaaattgtaggtgcctgtttgtcaccaattatcctctaccacaaagaactacaatagtgatggaggatccgatccagcacagatccactataatgc

SEQ ID NO: 16762 - DNA, 719 bp, Zea Mays
tgaagatgacccaccatcgtctacatggccggatatctccacactctcgataaccactatgatgacctttcctcccactacacccacctaaactcccgggtggaaagcttagagcagtaggtcaaggagcttaaaaaggagaaggcatccctccaagagtgtctcgatatggcagaaggtgaagaggccaacactcgtgaatcttaccgaaccctgaagatggattatgataagaagctgaagaagctcgcccccacgaagaaaatccaaaagaagaccaagagccaaggatgccagactaagcggaagaagaaagcccctctagctccacctctccccaggatagagaatttgtctgacgtcgaggatatgtccctagctagccttgatgaccttctcaaggaatttggggacaccttagaaaaggagttcggaagtaccttagaaagcgctcgcgtgtagtgcgacttgtggtaactgtatgcttgtaatgaactggtgtaatgaataaaataacttggttgaaaaagaaatttggcatatgcatagtagtaactctctctccccctagcagatggcttcggataaaacaacgcctaccacctctgggattggagcagggtttcccctaagagctgaaggagaagccggtggagaagggagtgagacccacctccccgcacctccgaagctgcccttagatttagcccaagttctag

SEQ ID NO: 16763 - DNA, 1147 bp, Zea Mays
ccacaccttcacgcggcagccgctacagcgacttcgcctccgccatcagctgcggtgcaaaattccaggtccagcgaagtcccagccacaccctttgctggacccctcgggccggcatgcaccttcgatgcgccaccaccaactgcccagcctccacccctataccacaaacacgagttagcgaaaatagaatcaccctacttaaaaccataagacattccacttaccagcaggcggcaccccggtccgagcgtcgaacatggtaacgcccccaccaggtagtcgtcgatagacaactcctggcctattccccaagtctccgacatcgccgtttcaacaacgcacggtggcgaagacgccttcgtaggcaccgctggcgccatgggggggcaccatcacagccagaacaacccctcttgtgctggggcgcgatgtcttggcatcgctacatgggtccaccagccgaagcggggctttccgtttcttccgctgggtctcttgacgatctttctccatcactgctgacacaataacaccaatatttcttctgtaaggaaagattttcaactcgcgagccaaacaagacataaaatagtcatcgccggtggcccagagaatagggtccttcctatgtcatcgacccccggtaaccttcagcatgagcgaagatgtttctcggtgctcgggcgaagtcataacctccctaggcccagcacatgtccccgtcaactcctcaagaaaagcctagaggccttcgcccccaccaaaaatcccactagttgccccacttattcttagcacaaggaacaatctgaactacttcggccaagtcttcctagtcctcgacgtggatgtgcaggacccaaattgtgcaatcagtccatctatatttttcttctgccaatgtaagaaaaaattcttagtgaagacctcaacatatgactcttcgccataggaagtcaccgcccaaacatacttcgccaacgccaccatagcaatcgacgtcaactgatgaatctgaatttcgaattttcgtagaacttccactatgaatcgatgcgccgacaagcggagtccagcagcgaaaaattccttgaacacaaccaactcgccctccagctcggggacatcttcagcccccggcgcc

SEQ ID NO: 16764 - DNA, 405 bp, Zea Mays
ccagaaacgaaccattatcgcccatctaatcaacaccaacgatcacccaaccgacggtccccctagcgtcttctccccatcggctgacccaccggcggcgcagagcgcaccacggcggggcatcgccggcacgttcccaatccagtgcccccaacgttttatggcgcacgaacccaggccaaaacaaagaggagaaaagggcgaacacaatcaagggcatcataccatggattgtgtacccgtaagcctcaacaccggcgtatggcgttttcgcggcagagtacggtctacggcgagaaattggtggagcaccgatcgaccgtttgccgaattggtggttgggtagcctccctgtgtccagtcgaagcaccgcagcaaccggtaaggatgaaaccgaggttctgg

SEQ ID NO: 16765 - DNA, 453 bp, Zea Mays
cacaaaccaaccagcacgactcctgaaagcctgatcgcactccactgaccgcctcacctcctctggaggagaccaaaaggccgagcacaccagcaccaacccagaacagagagagagagagagagagagagattactaaaaggctcgcgagcaggttagtcaaaacgtacttgtagctcgcgccggcagcccggcaccaatcaccggaggacagcgcttccctctccctgcgtggctatatcttcttcgacagtgggagagacagagagagacaacacccacacgctcgggatcggagaacgcgcacaggcactttccatcccccgatcaaatcgtcatcatgtgcaacgccgccgggacagattccttgccggcgccggcgcccccgctcggctctctcaaggcctccgcgcaccagctcctccaccccgtcgacggcgaccaagccaacgc

SEQ ID NO: 16766 - DNA, 504 bp, Zea Mays
gcaagtttctgtttttgttcatttatgcgaagcctttcttggtgttttgccccactttggcctttggaagtatttgtaccactgtcggcctgggatggccggagggcagcaccagctggtgggggcacgagcttggagatgcgccatgggaggaagactgactacctcgacatcccactcaaggatagcatcaagggatggcgcctggaatggttcatcatggagaatcatgggaattccctccccccacggtcagggagacagccggatgttcgcacttcgagctagatcgaattccccacataccaaaaggtggtcgaggcaggagctctgctagctgaagttggattgttgaaagaaaggggtctgactgcagaagctgtggtcgctgactttgttttcaagaacattcagtcgctgaaagacagagcatatccggcctatctgtaccgaggcttggctgattcaacccgggtgaccaacagaagaattcctgctgtggac

SEQ ID NO: 16767 - DNA, 740 bp, Zea Mays
ctcccaagtctcttatgcatgggtggacctaaagactacgggactgtagtcctgtctaagccttggacatcgtggtggctcatgcctgggctctgacctccgggtcttctggtcttgtcaagcgtgtgtcttctgtcttctgccttccatttggcccctcattgttgcggtcgacatcctccttttataggccagggaggggatcggccatcggtaacttcctcgagaaggagctattatgcccgggtaaaactaagcattttacctaggtgatgttgcgttggtcgtatgcgtcttggttgcccggtcatatatgatcgtgcttatttatgatgggtggcgtgggggtgaagagtctttggttccatcattgtcgtcctagcgttgtatcgacccctagctaccatagcctgggtctcagcatagctcgtcgtgttgcggagtctgtaggcggtcagcactgaggcgtaggcttgatcggctatgagtgggtcgcgatcctaggagcctgtaggttatgagtggaacatggactgattcgccctctatggctcagcgctaggtgcagttaatgtggcacagtgggttagtcctattaggcgcagtcgcgcagaatccacttgtcacagggcaacccctgccccctttgatcgtgaggcattgccctctatggattcatcgtgttcgggcctgatggcccctcttcccctcccctaggaataccgggagtgccacgatgc

SEQ ID NO: 16768 - DNA, 708 bp, Zea Mays
caccattcgaggtccgggttcgtgcctgggtgcttcacggggccgtaaggaagatgagcggcagaaacttagggcgcaagggcaagcagatcgtcgataatttgtcaccggagtgctccctccgccgtggctccgcactacaccgtcgatcgacctcgccttcatccctacacgcggtgagactcccttctctgggttcacgcacatctatacttcgagtagtgacgtttgaattaaagattcgtgcactgggtcatgggttttgggggctatggcctatggctatggcaccgccgtgctggatcttgtgcgccgccatttagagagcagggatgaggtagatgagttgtggtcgtttgtccttggatcgacggtggagattgaggctatgagataacgtttcggtgggtggcgtactggcgtgtggaccgtggatcgcgctgtgtgcggccaggattaaaagatccccccttcacattgttgatttggttcgttggatcagagacgagaggagaagatttcatcttggtatgggtcgtttcggaccgttgatcagtgatccaacggtggtggatgtgtaccggttcacatgagtttaaaatctaatccggtccattcgggttagatcgggtggttgaggtggctgcgtacctctctggccgaatagttttgcaaaagagaccccgcctttctaagaaaccaaccaac

SEQ ID NO: 16769 - DNA, 750 bp, Zea Mays
agggtggaaggcaaacggcatgtgcagcttggtgcccatcaatcgcatcaactcgcgccaaaacagcgaggtgaacaccgggtcgcgcttggagacaatggactacggcatgccgtgcaggcgcacgatgtcaatgaagaacgcctgggccatggtgtcgacggtgtatggatgcgccagggggatgaagtgacaatatttgctgaagcggtcaacgacggagaggatcaccgatttgccgttcacccacggcaaagcttccacgaaatcgaggccaatgttggcccagacctcggtaggtactggcagcggtaagaggagaccggtagggtggaggtgctctgttttggaccgctggcaagtgaggcattcccgcacccagtcctgcacacaccgacgcatattgggaaagtgaaagtcatggcgaaggcgatgcagtgtgcgctggaccccttcctgtctgtcgtcatgtatggccaccatgatttcctgcagcaacggtgacgacggcagtatgtatagccaaccatcgaaagtgacgaggccatcagtgatagcccacggcgcagttcgggtgcctgcggcgagctcgtcatgcacagccaccagggacgggtccatagcttgtgcgtggcagaggcgactgaagaagtcaaatcgggggcatgagaccgccacaacagtgtcatcggtgtcgcgtcgggagagggcgtcagccaccatgttcgtcgcgccaggcttgtactccac

SEQ ID NO: 16770 - DNA, 508 bp, Zea Mays
gtatccccaaatgttgacttgcagttgcatggtgccctctgagcggatgcctgttaaggcgtggagtgaaatgatgggtgctggatcctctggattggattcatccttgattcatgtatattcctcaaaatctgtgacctccagatagaacagacgtgggcaccgatgaccacgaacgtattgttcgtcatagttgtaacacatgccttgtttgcggtgctcgcccatctcaccgggagtgagcttcttaaatggacgttgtgtgccccgtgctggttggtgcttctactgttacagtggactgttgtgctggaataggaaatgaaggtcgctggggaggcctcgacggcttgctgatagttgatgtctggtggatgtcgagtgcctgagctcttcgttcatatgctccgccaaacttaatgcatgattgagatctcgaggagccataagtttgacatcgatcttgatacactctagaagacatgccgtgaagagttgtaccttcttt

SEQ ID NO: 16771 - DNA, 455 bp, Zea Mays
cgacgagcgacgaggatcatgaaccaccatgatggcggcgtcgagatcgggatccatatgcatgtgagagcaagacgtgaccatctcctaccttttacagctcacaaagacgaagctcggaggagctggtgaccagaccttggggccatgcatggatcactttcccaacccttgttatcgagtatagagtaggacgggcggataaaatactagatcccgagctcggaaaatatggcgtcggtgcaagtggaggccaatcatggccacggtgctgccggctctccaccttggaagctttatcacaacccccactacaccccgcggggcaggggcacccatctctcctcatcctgctgctcgccctctccttgccaagtccgcaggagtcccgagccccctcctatgatcattgcgctggacgacgaggaggtcgaccaagggtacgggtacggcgc

SEQ ID NO: 16772 - DNA, 451 bp, Zea Mays
tggatgtggtcgggggcactatggttgctcagacgccgtacccacttgccggcgacgtggccgagcgggcatcgcagaggtgtacgccgatcgtagtgattgtgccacgtcgtgaccctttcaccacgtcgtttctagccataataactcagcaatgaccgccgtagctcctcagctagtgaccaccacgatagctcgcgtcagtaaactccccctctatctggccgccagcatgccttctccaaattggacaccaccgctgttggcttctataaattgagtgatcaaccaggtccgctaggttattatgcacccagtgcaccaggtctcgcccctgatcatccaccatagcatcccaatttcctttttcccccaattctgttttccgcaccgccgtgaacgcttcaccgtggccagctctctgcaggttagttcaagcttctctgcttca

SEQ ID NO: 16773 - DNA, 985 bp, Zea Mays
gccgacccacgccacagtcactcagcattgtgggtgcggtcatcaagtcggtggaggaagagcctccccctattaccctaacatcctcgtcatcaatgggtgggagggggtagacgacgatcccattttgacgacgagcctaccgtgcaagggggaacctccaaagtgtgaggcacgtctccatcgagaatcagtgctgcaacatccaccgtcaccatgccaccggggagcaggacccaacccaacctatttcgaaggatgaggcgtccaaggtagacgagtccctggacgagcgcgtactccgcatgcaaaggaacacccattgtcggaactaacacgtcgatcaggaatgtgagcacgagatggctgagtgcaatcctaggcttcctcatgatcattagcttctcccccgcaattagcagcttgagtttactccggtcatgcagactccaagccaggttggtggagtactaacttggattgccaataacttacctcgcacgcccgacacggagggttaccgatagatcctcacttgggaggtaaatcaccttctcttgctggaccattcggaggatgatatgtgttacctcatcaacaaccaacatgatgtgtggagcaacattgaggcatcgtgtgcatgacaacacgaagaagaactaatgcgataaaagggtatgaccaggactacaccgcctcactctggggagccaagggctaggcagactccgttgctgccttgacaaataacccatcaccatgtcactccgctcgtgagcggttgcatgatgcgcaacatcagttgccaccatgggaccgacacaacaaccacgcttgggttgagcacccgggagcccagggcatgtttggggtctcagcctgcaccctccgtttgtgtgtggtccaatcaccgcccaacttcaaggtctctaacatcgataagtatgaggccaaacaagagtcgagtggttggctagttgtttac

SEQ ID NO: 16774 - DNA, 575 bp, Zea Mays
tgaaggggccacgtgtgggcgattagctttgtgaattgcaaagggcgtcccgagcgtggagaaaacttctagcaggcttcgtaggaccttgtgacccaatttgcagcgcagatcatgccgggccagtagaagccttgacggatcacctttgcggctagggccctaggccctgcgtgagagccgcaagtcccgctgtggacttcgcgcaggatttggacgccttcggtctcggtgacacatttaagcatgggttggctgacccccttcttgtaaagctggccttcaatgagtgcgaagtcccggcttcgatgtctgaggcgcttggcctcgttgatatcggttggatgatagtacacatgcaggaacagggttattggtgcccgccagtcttcggtcatgatgaggttaactatgtggtggccctcgctgtcattggttatttggagcccctatgggctgcggacggctggcgtgccgatgatgtagtagaatatgtcggagggcagggcctcgcctctggcggctgccttggccaatgcgtcggcctcctcattcttggctcggtccacgtgctg

SEQ ID NO: 16775 - DNA, 489 bp, Zea Mays
gaactcttctgaggctcccatccgcacttgatgataccctgatgtcatatccagactggaaaaatgtgtgcccacgagctcatctaaattctcctcgaccaccggcatagggaatcgattctcgatggtcatgtcgttcaatttcctgtaatcgacacagaaccgccaggtaccatccttcttttgcattaagaggaccagggaagcaaaaggctcactcttggagtgatcaagcatgtcctcaatagttcagacacctgcttcttgatcttagtcttatgatggggagaatatttatagggtctagaattgactggtatggatcctgggagcaaagggatgtgatggtcaaacggtcgagatggaggcaattcagttggtgtagcaaaaatgtctctaaactcccccaatagcccttgcagttccctattgacctcctttgtgttatcttcagtaacttcctccaacaaggcaaaaattcagatatct

SEQ ID NO: 16776 - DNA, 1162 bp, Zea Mays
tgccggcagctcctgaggtcccaggagtttctagggcacacgtatgtgccctggaagtttctcccgaagaccctaaccaggtcgtcccagtcgtggatttgtgcgaggggaaggtgctcgagccaagctcgagcggcgccggacaagaacaagggcaagttgcgaatgatgattctgtcgtcgtccgtgcctcccaactaacaggccaggcgataatcggcgagccacagctcgggctttgtttctcctgagtatttgtcgatggtagtcggcgcatggaaccgagccgggaacggtgctctgcgtatagctcggctgaagacctatgggctcggaggttcgggtgaggggctttggtcctcctcactgtcgtagcgcccaccgcgccgagggtggtagcctcgcgtggcgtgggggcggtcgtcatgacgtagtcgttcgccgaggcaagctcgaacatcgtgatgctggcggttgttgaagaggcggtctcagaccacgggggctttgtcccttgcagactggggattgaccgaggcctctcgctcctgacgggagggccccgctcgatgctccgaggcaggctctcgaagtcgggaggcagagctctcggccggatggagtgcagcacattctaggagacccctgatctcgcctcggacttggtgcccctcagtcgtggatggctacggcattgttcggagcaagattgccaccgcagcgaggttcttgctggccctgttaaagattgggggttgctcggcccctgcgtcctcgatgatgcaacggtggacgtcgcgtgatttgatgcgtgcccctttgccgagggctcggcctgccttctcctgctcgagggcttgctggagttgtcgcaggcattcccgttcttcattgagcttggcctgaatctcgcggagttgttcgagttgtgtgtcctgactccccacgggggtccggtccacatcccgctcccttgggccttcgacgcacagagttggtgttggggtgttgttgttgctgggcatgtcgagttgattctatccttcgtgctcgtgctcgacatggaagcattcccgagttgggtcgtaaccctcgtcgtcagagccatagtcgtcagagccgtcggagaggtagtagtcgcatgcgaatagaaagtgccgcg

SEQ ID NO: 16777 - DNA, 474 bp, Zea Mays
agcaagatatgactggataaagggtcagtcactacagtcactctttgactgattgatggtgctagtcaacaagatcagggtgcttggaagtgaagactggaatgattcaaaagttaccaggctattcatgagagcttataaggaaaaggacatgggtctggcaagaatgatcagagatcgagatgattatgaggagatgactcctcatcagctgttcgccaaaatccaacaacatgagtctgaagaagctccaactaaggcaaaggattcaaatgccttggttgcaaatgaacaagagtcagtgaagaagtctgcttcaagcaaggatcacaaacacaagaaagttattgagagctccagtgatgatgatagctccagtgatgatcttcatgaagaagcagctatgttcatcaagacgttcaagaagcttgctaaaagaagccacaagtttcaaaggaaaaacaagaagagagc

SEQ ID NO: 16778 - DNA, 731 bp, Zea Mays
ctgacaacccggaggctactgaagtatggcgaatgtattttgatggctcgctgaagctgcagggagcaggcgcagggatcctcttcattgcccctggaggtgaacaactcaagtacgctcttcagctattattcctagcatcaaataatgcagcagaatatgaggcactgatccatgggttgaacatcgccatatcactgggcattaagaggttgatggtatacggagattcactagtggtcataagctagataaataaagattgggattgctcgactgattctatgggcaagtactgtacaaccgtccgaaaattagaagacaagtttgaagggttggaattccatcacgtggaaagagatcgcaatgcagcagcagacacgttgtcgaagctaggatccagtcgggcccatgtcccatccggagttctcatccaagaagtatcacgtccaagtattccctcatatcaggcggaagaatgcaacaccttaagccaaccagaattggaccctaatgactggagagagcctatcatcaggtacataaaaaatgaaaaagaaccggatgataaaacgacagcagaatgcatcgcgagacagtcggcccactacaccctcatagggggcacactgtacagaaggggtgtgacaagagtcctcatgaagtgcatttcctcggcaactgggaagcagctattagatgagatccacaccggacagtgtggaatacac

SEQ ID NO: 16779 - DNA, 387 bp, Zea Mays
gagaagaggcctcgtgaagaggtccatgacgctggaccacccgtctctcgtgcccgaggtgcaccccgcggaagcgagtggacactggacaacatcctcgatgcccagtgcccatatcacaaggatatgtgccacaccttgcggaactgcagagacttcaagcattccgtcgggaatggccgacccttcgaacctctaccacctcccccaccacgaggagggcccggtgaacctcgacgacctcagcaacaggaaggggaggaggtggagcattcccgcgcattgatggagaggtcaacgtcatcttcggaggacacgggtcacaagaaaacaaaaggcaacagaagctcaacgaccgacaaatactggtggcaaccaccagtgccc

SEQ ID NO: 16780 - DNA, 329 bp, Zea Mays
tatccactcatactcgtttacctaacagttataaattcttgcccactaacatatccattggtagagaaattattctatacccactttgacatcgtgtaaaattcgtcggatttttggtttcgggtactcattgcctctaggttccaccctatagtacacgttaaagagggtggagggaggtgtgtggggtgttgttggagaaggcctcaatatacgagcatctccgcccgatctctgatagtgcaactcctatacgttattttaggcgagtagcttaaaatcaatttaggacataaaaagtttaaggggttttcactttggatgcaaat

SEQ ID NO: 16781 - DNA, 616 bp, Zea Mays
aagcaacataagtacatagggatgccaaaacaagagcgagcagggcatgatcggacctgtggagagctggccacggcgagctctcacactgcggtgttcttgaccgatttggggcaaatctcaaattagagctctctggtggacaatccgaggcacgagtgggtgcgctggatgcttgattacctagcggagctgatggcacgctcaatttataggacccgagggcggtggctcttgaatttggcatggcgcgctggcggccggagagaggggagagcactggcgcaagaggtgcgtggctttcaccgcggcaaggttaccggcgatgaacggacatgccaaggcacgttactgcgacgtggtagagcacctaggcactttacaaccgatcaacaggcggccaactccggtgagcttatctgaaccggccgtgagttagggggacgcgacagccggggcgaaacagtggcctaagttcatcctgaatacgatatttcttaccccgagcggttatctctactctgtcgagcacgaattgtggcgcctggcgcgaatccgagcgtggggtcgccggcggcgaggttcactgaaccagaagatcttttcgctactgtac

SEQ ID NO: 16782 - DNA, 615 bp, Zea Mays
ccagctagggtgttgaggcgatcctcaccggcttctcctggaacgatgctggtctgacttcctccacgcagacgctgaggaaggtgcctgaaccttgtgttctgcagctgctgccggtaggtgtggctgagcgaccacagggtccgacgggcagcatcgctgaccgaggcagcgtaggtggacagtggtgtcagggactcgtgagtagacagagtcctgaatcccctgtcccctgcatccatcaccctgacgtggatgcgggtgatgtagtagcaagcccggggaggctcgctcactcgccttgtttcgtacagggggcggacgtaggtgcctagcgcgtgcagcacttcttgcagcaggttggggaagtgcgccgtctcgaacattgatgtataatgttcgacaacagaaccaaaccccatgaagttgtcctgctaggcgtagtcagcttcctcgttgatgtgttcgtctccaccttcttcgtcgtcgtcatcctcgtcatcgtcgtcttcggagttgtcggggtcgtcgcctctgggtgcaggtgcttggaaggctggtacatacggtgctgacgtcgatgacctagctgcgaaggccagggactctactaac

SEQ ID NO: 16783 - DNA, 416 bp, Zea Mays
agggaatcttgcctcttgctgcatccacgtcggctcattactttgcagccataggatcgcttttcaacgtcggctcattactttgcagccataggatcgcttttcaacggcaacgaccacgccaacttcggcctctctgtgacacgcgaaacgacgcgatgcttccagagctccatcatgccccctcaatcgcattcgtggtgcctacgtagaccgccaccaggagccatatccctgtcctcctcaaacgccgtggttgtgccggcgcaggcccaaccgcccaagtgtcatcccctccctctcaaacatcaccatgttgccgccgccaggaattgcattccccttctcccccaatgctgtaacgttgtctgtgtcgaccggctccaggctgaacgccatccatcgcttccacgcac

SEQ ID NO: 16784 - DNA, 519 bp, Zea Mays
gcccatgctgaagtgcataactgaaaccgaagacatacaaatcctccgcgaagtccacagcggaacttgcggctcccactcaggacctagggccctcgctgccaaggtgattcatcagggattttactggcccacaataatttgtactgccaatcgagtcacaaggtcatgcgaagcatgccaaaagttctccccttgctgaggcagcccttcgcaagtcaccaagctcatcgcccatacatggccacttcaacgctgggggctagacatcgttggaccactgcctacagctcaagggaacctcaagttcacctttgtcgtcgtcgaatatttcacaaagtggattgaggccagggtagtatccacaataacatcgaagaccgctcaaaaattcttttggcaaaacattgtctgtcgcttcggagtcccgttcgaactcacagtcgacaatggcaaacagttcgacagccaagacttcagggatttctgcttttccatcggcaccaagcctgtctttgc

SEQ ID NO: 16785 - DNA, 808 bp, Zea Mays
caggagcaatgaagaggatccatgccctggctccctgcagcttcaacgagccatcaaagtacatttttgatactttggtagtctccgggttgtctggacctgatgctcagtccactctgatacgaagtcaaccagagcttgagtctttattgacgtgcaaggtcggaactctatgtcgtgagctcccagctcacacgcccacttggctacccttccgatagcttctttgttgtggagaatgtcccctattggaaatcctatgactactatgactttgtggtcatcaaagtagtgacggagcttgcgagtggttagaagtacaacgtatagtagtttctgaacttggggatacttcatttttgagggcccaagaacttcgctgatgaagtagactgcatgttgtaccgggtatgtatgtccttcttcctcctgctcgactactaacgcggtgcttaccatgtgagtcgtgcaggagatgtataacaacagatcttctgctggctgatccggcgtggctcggcatggtggcttgattattggtggtgtagtcagcaactttttcagtgcctctagagcttcatgtgcctctatggtccactgaaacttgtccacctttttgagcaatttgtataacagcatgcctttctcgcttagtcttgatatgaacctgctcagggatgccatgcatccagtgagcctctgtacctttttctgtgatcgtggcgcttccattctcatgatggcctcgattttttctgggttggcttcaattccttggtggctgacaatgaatccgtgtaacttccct

SEQ ID NO: 16786 - DNA, 631 bp, Zea Mays
ttcgtgggcgcgactcagccgtccctcgcgtcgccggagttctcgggcgaaccgcttcaaccgccgtcgccctagtattgcagctccgactctaggctataaagggcagagccccgtgaccccgtcctcctcattctatcccaataggtggcattgttgtcgtgcgggcaagctgagagaaaccatgggagggagagacagcacaactgatccggatgtgcgcgctgatggagctggtgctcgggccatgggacttcattaggttgctagggtgctcttcatggttgccctggattggattgtgccccgtggctccacaaatttctcgccggaatgatgcaggctcgtagttgcgcccctcacggggggtaggcgtcgcggctgcaccagaaccggtgagagcacgtccttattcttcgccttcatctctgctccatgtatcgtccatcgaattagagatttgcacttgggttcataatcggggggaggcccgacaatggcgccaccgtggcgatatccttccgccgtgcctcgctgcgaggggtgagagatggagcgacaaccgttggattatggggtacggcgaggatgggtcgatgccgtacccactcacgcaggggtgtggcggtcc

SEQ ID NO: 16787 - DNA, 342 bp, Zea Mays
ttgtcaaccatttgaaggcgcaagttcgtcattaatgtcattgccttcaagtattactaagtcattctcattttgcacctcatcatcctcctcatcaacaactatttcaatatctacttccattccaatagcttcggctaagtctatctcaaatcgcccttctagcccatcttcttggaagaactctccgtcatatgtgtctgggtctaagttataatcttcatcgttaggaacaggtaatttaacgtgcggcgataccttatacacaacatcccaacccttaagatgttctttcgtttggcacgcatatgggagataatacacttgtgtggcctgttggac

SEQ ID NO: 16788 - DNA, 559 bp, Zea Mays
gcgtcgtcaagcgacgcaaccagccaattgtggggatggctcgagctctcctcaagtagaggggaatgccggttgtcttctggggagaggcggtggtggcagcggtctacatcctgaaccacttgcccaacaaggcactcaacgagatgacaccgtacaaggcttggcatgggtgcaagccgacggtctctcacctacgggtcttcgactgcctcgcgttcaccaagaagcttggccacatcggcaagctcgacgatagaagcacccggtggtgttcattggctacacggagggctcgaaggcctaccacatccttgactcaggaacacaacgtgtgcgcgcgacgtagtgttcgacgaagggcgaggatgggcatgggacaaggcggtggacgacgacacgactctgacgtacgacgacttcaccatcaagtacgtccacttcgagggagctgggggagtaggcaactcttcttcgagcaggtctaccccagcccccaagtctccaccgactccagtgccacgctctctagctccggctacatcgagctctacaccac

SEQ ID NO: 16789 - DNA, 447 bp, Zea Mays
ctatcccctgcatccatcaccctgacgtggatgcgagtgatgtagtagcaagcccggggaggctcgctcactcgccttgtttcgtacaaggggcggacgtaggtttctagcacgtgcagcacgtcttgcagtaggttggggaagtgccctgtcttgaacattgatgtgtcatgttcgacaacaggaccaaaccccatgaagtagtcctgctaggcgtagttggcttcctcgttgacatgttcctcttcgtccttgttgtcgttgtcatcctcgtcatcgtcgtccccagagtcgtctgggtcgtagcctccgagtgcaggagcttgaacggctggtgcaggtggtgccgatgtcgatgacctagctgcgaaggccagtgactctgccaacggggtgggcatcgacagctattcctccaagttgtccttcaggatgactccattctcc

SEQ ID NO: 16790 - DNA, 759 bp, Zea Mays
cggctgtatcaaagaaggcgcacagccttatcatacaaattatggttacatacacacagcgagggcatcacttattacattggctcaaccttcgggatgatacccatctccctgtagttgaacaacattatccttaattcctcaccctcaaaaagatttcgcagctccccttcacccacactagccccagccggcgaggacaataattcctgcttaccagtcccgtccacacgaagacgaacactctccatctcaccacaatgacgcctgttacttcgcgacaattcactcactccgtttcgccaccgcccttcgccgcctacacccagtactcgcacccggaggagcctcagcacccaccacacgcggcgaagtctccgccgtagccacgtccaacgccgcaaaataatccaagtcctcgtctgaagactcctccgtccacacaatcgaactcccagaatcatcagactcaaaacacttagacacatagccaaacgaatcgtcatcagcagccacggtcgaagccgccacaaaaatagcattgtcagtagcggttgcgtgtgcgggcacaaacccaagaacctgcgcagcaaccgaggttcagtatcacacagacaaaatttacaaactccacaacacttattcagccacctgcgagggcccggccgtggctgtggggccctcggttgccggctcagcagtcggctcggccaccaccttcagggcgccttcgctcgtcggcgcaggagctggcgcggg

SEQ ID NO: 16791 - DNA, 684 bp, Zea Mays
gactgatagtgttagtttttgtatgatactgaagatcggttgctgcgcaggttccggcgtccgggcctgtgcaagtaaaccctgatgatgttatgagtgatgatgttttgatggatgcaaatgcgatgtctcttagtggtaatgtgtcgggggaatcagattttgggttgtggtcttcggagggtggaaaattggggagccctttttcgtggacggatgatgaatcctcggaagatgatttagactattttgcagcgttggatttagctgcagcggagtctccgttgaggaccgtcccccgcgaagcgtcggtgactttgatcggtgcgctcccaggtgacttgtgagggcgaaaaagatgggggtgttgaaacaaagcgtctgtgagtcttcgcaaggtgttagaagacatcgtcgaatgggcatggagaggtcccatctttagatcggaccacggctggatcaaggtgcccatcgcgagttactggcgtcgacgtctaggtcatgcatcggggaaggggacctacgggacctttttgaaggggaagagttgaggttgatgctatttaatttctgagaagctggtcttatcccgaaggaagagctgatgtaataatgagtgttgccatcgccgttctttggtgaagatgagtgaaaatgctgccctcccccccttcgctgaag

SEQ ID NO: 16792 - DNA, 583 bp, Zea Mays
gggagaaccaccatagggttgagggaacacagaaggagcatatggaggagcgacatacgatccataaggaaaagtaatgtatggatatccgtacgggtatggaggaggatacggataaacaaaaggttgtggaggaggagcgtcggtggaaggggcttcagtggtaggaggagaagcgtcggtcgttggaggcttagtaggaggagcatggatatggaggatgatgcgaataaggaaagtaaggttgtagagttaaggaacagggacgagtagtaacatcatcaaccaataatagatgggagaaagaccatagaataagacttgcccacatagacacatcaggatctcaagacgtcgagattgcttgttgagcaagtccgtcaacgtatcaaagtttggagtccactttagatccacatcggaacgaagagtagaaagctataagtggaggagaagcttgtgaatcgaaatggagagtggagagctatacatgaatggatgagagggcttatgaattggagatgaatgtatgtgaataaactcaagcacatccactatttatacggtggattcatgcattttt

SEQ ID NO: 16793 - DNA, 385 bp, Zea Mays
ggaggagtcaagaggaagatgattgtcagtattctaagtaggcatgctatccggtcggttaaagaagaccaagaggctttaaagaagcaaaaaacaataccgaagccgaaagtatcgactgccaaaaaacgaaagcttgccgagatgtcctctgagaagacgaagatgcaagatgtgtcgaagcaaaatacgagcccttcttcgtcttctgctgctgaggtctcagagattttaaatggtaatgactgagtctttcccatttgccctgctaagtcctctaaggttggaactgacaagcctcttatatacaagggaaatctcatcgactgctgagaggaaaaatgggggccagaagaaatgacttatgattaatatactggaagca

SEQ ID NO: 16794 - DNA, 398 bp, Zea Mays
atgaaatgacgtggaattgagccgatacttcacgaataggtttatatgggtaaatatgagtgaagtgtgtgcttggtttgaatttaggcgaagaaaatggaatttgggcactcggctcggaaacgatcgctcgaaacagggaaatgtgtgaaattgaagcctggtatatcggattggcgtgaaaataggtgaatatgttactagaggtgttgtgaagatgcctgaaaagtttgatttcaaatcggagcatgtttggctggtttgggcatttcaccaagcatgtggcgcgcggtggattagggttttggtgaaaaagctatttgaggattgaaaccctcccaaagggagctagaaacctgtagggatactgaagagatacataggaacatctcccacca

SEQ ID NO: 16795 - DNA, 650 bp, Zea Mays
gggggctcggggtaaaactcctaagacacagagcatagtcacgtaggatgggcgggtttgattcttatatagtacagggactcttttaaaaaaacacgcagccgaaagggtatcgttgaatggtggccgtccgatctaaaccaagggctcaaattaaatcagttctcacttgaaccggtaagcagtgctagccacacgatcctgcgcggatggctcagatcggatccgcaacccagcaaaccggtatgcactcacggccctacgatctaccatctacggtcgaggatagcgcctgaccgcaacccatctaattcgtctgctaacgatccgatggccaggaagcttcttcctccccaaggctggacgcggcggcgaatgcatagcgcgcggcgacacctcaccggagatacataatctctcccctctagttccctaaatccgaatctgacgggtgctagacagacggggcgttattgcgaataggttggggagaatcttaccataggtagaagtcacaagtcatgggtccatggcacaccacggagcattgaggcccacggcggcgctaaggtacccggcgagcaattcctactgcgccaaagctcgaatcgtccctaccgaagcagctacacgaagcggaaacaagcacg

SEQ ID NO: 16796 - DNA, 478 bp, Zea Mays
atattcgacagttttatttgtgctcaacgcagccgttgttctccgagataacgctcgagtaatgacttgtaattgttgtgtcgtattttaattccacctgcatttacgtagagaaagaatgactgagttgctgccggtgtctttagaggtaacagccgaatggttcttggcgacgtcggtgttttagattgcaacagccgagtcctgctgagccacatcggtgtttaaaaataacggccgagtgatgactgacgacgttagtgttttagaagtaacaatcgagtcgtattaggccatgtcggcattttagaaataaccaccgagtgatgactaagcactttttagaaatggtgtctgacccgggaaaacccctttgtatcacatcgccgcacgcctctgcattctaagccctagcctcactttttgcctccgaacctcctctgttttcctttgatttcgcttccgctcagtccgccgt

SEQ ID NO: 16797 - DNA, 392 bp, Zea Mays
gctataaagccatgtcccgcaccctgtcctgcatcggtccacgtgtgccgttttaaaccaccttgccgtgaaccatagccgccgcaagtgatgacaggccgggcagccacaatccaatgaacttccaccgcgccgccagcttgttgggttggtgtagggtggtcctggggcacgccacacgtttcttgggcacctctgggcaggaagaatctaggggtgacccggaattgctcgccggacttgggattgggcgtggagtcgtgcctactcaccgctggacctgccactgcgccaattcaccggtatgattgccctagagaattcgcctcctatttccctttcttgtggattaggtatcgctcgggatgggtcggcgaagcacaggttgacca

SEQ ID NO: 16798 - DNA, 834 bp, Zea Mays
cagaaaaagcacaataagtgtgcgacaccacccatagggtgcgaagtcttccacgaagacatcgtccgagcaaaagtcgcctaagggtgcagccaaaaaaaagcacaataagtgtgcaacacaaccgacaaggtgcgaagtcttccacaaagacaccgtccgagcaaaagtcgcctaagggtgcagccggaaaaagcacaataagtgcgcgacaccacccacagggtgcgaagtcttccacaaagacactgtccgagcaaaagtcaccaaagggtgcagccagaaaaagaacaataagtgcgcgacaccacccacagggtgcgaagtcttccataaagacaccgtccgagcaaaagtttcccaagggtgcagccagaaaaaccaaagtacgtaacaacactcgcagcgtgcgatctcccctacataagccaccatccgagcagaagtcgcctaagggtgcagctcgataagtacaacacatgtgtagtcacctatcaagcgcggagtcacctacgaaatgtacacgtccatccacaccaaaatcgcctaaacttgcagcaaactcgcaataggcacaacaaattacatagcgcaatagcaaatgaacaaacaagcgacgggctcaaaggcaccatcgcacagcacaatagtacacactatacaacttttaccccacaaacatggacatcacagttctattgcgaagagggggagggcagcgttttcacagaatatcgcaacagaatagcgaaggaaacaaattgtcacataggctcctcctttgaaataagacatgcctctcgaaaattgaacaacatcaacctcaactcttcc

SEQ ID NO: 16799 - DNA, 451 bp, Zea Mays
gggggggggaaggtggggacccacttccttgggtggctgcaggaggaactggagtcactcccgtccatcgtgatgggccttatgtcctatgcgtcgctcgtgtccttcgaggaggctgcaaatgcctatgcccatgagggttgtaggcacttcgaggccttcgatcagagcaacgaggacttcaatgctggtgtattccaggtcgaagacaacatgctgaagcactcagctggggcactttacgataggatgtggggccctcacggctacgtcgtcgtccgggagagggtcaactgagcgcttgcacaggtacatatgtgcccttagcgagggtgttgtgtatgttcgctgtctgatacgttgttgtgttgtcttctcaggcgatgagggttgaagaagtggaggacctcgctgcccttgcccgccttcaccaaaggacgcaacatatccc

SEQ ID NO: 16800 - DNA, 598 bp, Zea Mays
tggggaaaaaactttgattacaattcttctaattatacttaattggaatttgaataactaatacatacatgctcgggtctagttttcctgacaaaatgaacttaagcaggttgcgagcacagtcctcacgtgacacgtggggatgttcagcaactgcagctttataggaactatcctttgcaaccaggtcagtagttgcctggtatatgaatatatgttagtaaacagtagcataaatatgtatgtcttagtgtataaataggaaaaatatgaaaatgacaacatgtcttacatctgtcagtggggttttatcgaatagaggtgcaccagatacaggagtgtcatgtgtaacagatttttgtccttcctgtaaccaataaatttattaatataaacgtaatgaaacatagggtataattaatattagcataatatgatgaaggtgtaaatgcttacactatttatatctggtgttaacttaggagcagcaggcttgtctgttgtgggagcctgaggatttaaaaaaaataaagcatgcatatatattaatgttacttgcatacattgtaaatgaaataataataattgtgatataagg

SEQ ID NO: 16801 - DNA, 867 bp, Zea Mays
gattggaattctacatcctcgattagatctacaatacatcgaatcggtacgcgctaagcaccatccgatctgaatcctactgtgtcgatctcgtccgtgcaccgatccgttcgatcggaatcgaacgctccacaatactctgacctaacccagtacacaccctctaatctacactgtagatcacgccatcaatggctcaggatgagccggtctcccccgaccgccaccggtggcgccgcccatcgaatcacggcgcgacattgccggagcagtgccccatatgcattccggcgcccctgacccaatctaaagtgtgctacacgaagcgcatgctagtatgaacaacacgggagggtatttaccgtcactggccgagagttgaagccggtccacgacgataggcggttttcgcggcagttccctacgacggcgagcaattgccgatcacccagtaccgatccctcacgaggatgcgactcacacgaaaggcgaagactcgatggccctcctcgatcactccttggggtcgcagagtcactcacggttgagaacactggcggcgacggcactagtccattatctgcgtcggtggtgagggcttggggtatggacgctagttcaacagagacgagaagtcaaagaggtgcgccggtacttatacgcggagaagacgatcaaagcgattgcacgacccgagctatcccccacgatttgcgtcccccagcttcggcgcgcgcgattttgttgccgcgaagaccgggtcggtgaagaagacgggtctgccaacgcgaccccacttggcggtgaaacacggcgcgagcatccgttaatggatgggctatccagtgggcctaggtcgccagcgat

SEQ ID NO: 16802 - DNA, 460 bp, Zea Mays
attttatttttatacattgtattaactgggatcagtagcggctcggtggtaagggcacaaaggggagagcggcaggccaaggcgggtaaggcaacactgtggctcccaactcaccttcatgtgttccagcttgggttcatggtgttggcataggaaaaacgaatgcaagtatcaattatcaaccatctgttttccagatatgtaaaagcattgcgcctttatttttttccaatgatgtagatctgttgtataagttgaaaatagaacggtgataggtgatcatttattttttgttgagcaatgcaacccaactgtcgtgcttacaaggtgtgtcaaacattggtagttatgaattattttgttgtcgtccaattacattgtaagatgatgcattattagtggatgctaccatctcaagcactagaaaattgtaaatccttttgatcgagaaacataaaac

SEQ ID NO: 16803 - DNA, 876 bp, Zea Mays
taaatgtgtctaatagtgggaggatttctcttccttttttacccttagatttcttgataggatttttctttttttctcccgggcttgataggtatgcacctagggttgtcctgatcagagcagctgaccaacaacactttcagttcctcttctactaatgacatgggctccttattttgagaggaccgatcatcttgattacaattcactgaaaccgattgttgcatcaagctagacctagccatttctagagatttaatgagattaacactttcttctattttcctatcattgcttcctaattctacccttaaagaattagcaatttcaatcaaagtgttgctatctgtattcagaatcgaaaaggggttggatgaattaccttttcaatgaatgcatcttttgctttcgccctggagatcgacatgtcagtaactttgacatcttcatatgcctccagtctcgagctcctcctcacaccttcagcaggctctccacctttggatttccccttgtttcctttaatcaactgaaagccatcattcatgttgtcatcttctttgtaagcattctcactcagctgagaatcctgcattagacctcccacttttttgcaaagtcatcatccgcctcttgagcactgagcaaatcctcctcactatcatcaaagttaactctctcaacatcctattcattctccacatgatcattctctttgttttcatccagctgcttcccagtaatctcacttagagttttgctgaattttccagagctctcattctctccactcttttctggtatggttataccagatcctccctcacttttctcccatctagctctcttgtcactagatttttgttcttctttttt

SEQ ID NO: 16804 - DNA, 337 bp, Zea Mays
gtggtggaattgatttgcctcctaatcgacacactcggtggatatataggcaaccccagccacaaccagcagagatgaatcctcctaatcttccaccaggctgagttgacccactgattgcagctcagatgaggatgatgcaacaaatggcggacactatggcagatatgcgtgctcagatgcagcaagaacgccaggagatgcgtcaggaaagagaagagacacgacatgagttgcgccacaaacgagaggagatacgccaggaaaggagggcgcaacagcagctgcagcagcaaatgcaacaacaacagcaacagcagcaataagtaccactgcc

SEQ ID NO: 16805 - DNA, 1008 bp, Zea Mays
ggcacagagaatagtaacacatggacggcgggttggtttcctgaaaacgcaggggctcttataaaaatatgcattcgcgacaggatatgaagcatctcgggccgtccgatctactccctgcggtccagattagactgccacttatctgaaccggtacgcgttaaggatcgcaagatctgagatcgacggttaaggttttatgaatcgtgatcccgcgcctggcctttggattcaatccctacggtttctagcgcccatgacctgatcaatactgagccgcacgatacatgcccgtcggtccagattttaagtatgcaagggaatcggtcgaatctaatccaaaccgtctgttagccgatcaaaggccacggtcgctctcccccaactctttctctcctccggcagactgggcacggcggcgcccgcacggttccgcggcggagccatgactggcaagccccaaagctccaaattgcggacacgcttcgaatcctagcagcctaaaatgatgtcctaaggaagagaaacacgatgaacgtagtcttaccttactgtgtgtcgcagggaaccctggccacggcgggcagcggattcaccaacaccggcaagggattccacggtctccggtgatcttccccttcaattgcgcccacgctcgacttcaacgcagtcgcagcttgtccacacgaacctccccgacccaactatgatcgcgcgacgatggtgagggcgtggatcacccctgacggcgcaaggtcttcttcgctggtcagagacggtggaggtggtccccaggcagtccgtggtgacacctccgctggacgagcgggacgagcgcgaggaacagcgagggaggtagtagatggggcgcgcggtgggatttcacggcggcagtgagcgtgcgacagcagagtgcaggcggcggcggtcacacaatttctctgcgctggcgaattgggaccgaggtttgggaacaggagcgcagagtccgcgctatatacccatggc

SEQ ID NO: 16806 - DNA, 725 bp, Zea Mays
tcactttctaaaattctatttactgaaaacaagggctaaggactgctggtacaaattctacagagcgcaggggctagtttataaagatccaggactcaatagcaattactttacattggccgaggacagcgggttgattactgtgaagatcaggggctctttagcaatttgtacacggctgaaagggtattggtggatcaccggccgttcgatcggtaatcgatggttcagattagatcttggtgccccatgaaccggtaaaccacagtcgtcggattcgcgatcaacggcaaggattttatgtgggcgagattaaccagagaccgttggatccaaatccactacacaaatcaatttgacccaagggttattctaccttctaatctgcaccgtccaaagggagatcaacggcacacaaccatctcccacctcccgaccaccctgagcacgacagccatattttgcccacgcagagagctccggcaaggcacccccaaatcgaatcccgcacccaaaagtttgatccgagagtttctaactgcaatcgtgcttaaggagaatgagctgaggagcatctaaccgaggattaacgcacagacgaagctgtccccgcaccatggcggatatgtgttgttgcctagaccgtcggtgagaaattgccatacccacggcaacacatggtttctctgattgccaccaccatgtccacgatgcctcggtggtgc

SEQ ID NO: 16807 - DNA, 527 bp, Zea Mays
gtgaagtggtctgtcaggcgctctgtcgaacgtttccaatggtacagtaaatagataggatcaggttcagatcccctcgctgccgatgagccgtgcgctcggattcgcgctcgccatggtgattcgcgctcggatcagttagataacgctgggggtaagtaaatatcacaccgtggatacactccggccactattttacttcggccaccgtacccgagcagatcacagttgcttcggatgggttcgccggagatagccacttcgctgtcttgcgacacgtgccttggcacgttaaccacactgccgtgactcacgttagcccgtccggtggtcgccggggagcttgccacggtaattgccaccaatcgcgcgcgccactgaccccctctttcttcggccgccgcgcgtctccctcaaattcactagccaccgctcaagcttgctataaattgcgcatacccacggctccgttaagtagtcaagcccctcatccagcaactcgtgcctcgaatcatccactagagctc

SEQ ID NO: 16808 - DNA, 455 bp, Zea Mays
gcgggcgccatggacggactccccggggctataaagtcgtaggcctaggaccggttctcctctattcctcgtaacccaccaccattaccgtagaaccgggtggattgcgccgccgtcggtggcactcgcgggttgccgcgcgctgcttcgaaaggtgagagctgtgggttcgcttggttcctgtgactctaatggtgactgctccagtgacgaatctccacggggagcaccgcaattgctcgcggaacggtccgttcaccgttggccgcaggatgccatggccagggggtccgcgcggttcattgcaggtaatacacccctctatcgtgttccctgttgcttcctctctctactacacccagttacaagggtagtagggcacctggggatttgatcgtcgcgctccggcgaacttcaccgcgtgggcatggtggcgccgccgcgcaatcggggtc

SEQ ID NO: 16809 - DNA, 632 bp, Zea Mays
ggccggccggggcggcgctattcgtgcccgcagtggcgtagccaccggagacaatccagaccgaggtttctaggggtgctggggtggtctggatagcaagagaggatgggcaggacccgacgagcactgtggcgaagtcatggtcgctagaacgggactaaacgagtggatggaggaggggggacctcgggcggaccagaggctactccggcgagccgaaattacccaaggtgagacagaatcggtgcagaagaatgtcagggaaggttacttaccaagagacgatgctcggggcagcttggcacgacatgaggggactctggttggctggacggcgagaaaccgtggcagaggcaaactccgacttgcgcagaggaggggttaagcgcggacctttctcgtggcggaggtaaactctgacttgcgcagaggaggggttgagcgtggaccgagcagcgggattggtgaaaggggaaaccactacgggttcctggtgcacaaggcttcggcgaagctcaccgtggccaaggcgacgatagtgacccgacgaggacggcagaacggcagaggtggcagcgctgtgggctgagtgagcgcgagggctgggagagagcgaatgagaagcaggggcg

SEQ ID NO: 16810 - DNA, 362 bp, Zea Mays
gctctcctaagccctctctcgctctgctcgcatgcgtcacccacgttcgccgtggttagagccacctagagcacctctatcatcgtcgtgtccctcctcaagctccttgtcaccccgtctcgtaaccctagagctcactgcattgccccgaacagcgtgacattgtccctaacatcactggagctcgccaccatcggagccgaagtttgaagacgatcgttttgcaaaatagtcccctctcttcattcttcttacgtgtgcgctttctgcagtacaaaaatcattatattttggacatgatctattcagttaggccatgcactcttaaggtttcatgtctaccgtccagagccgtatttgca

SEQ ID NO: 16811 - DNA, 524 bp, Zea Mays
gtcgggatgtcagtcaccactgaaacttgaaatggatctaacagtaagttttgatgaactttagacctgattcaagctcgattgagtaagtgaatgatcaaggttgctatagcaaaatttatgttggattatagatcaataactttgatacaggaagatcagtgggctatcacataaaaattggagaaaactgctcctcaacttgggctgtcagaacgactgaaggtggtggccatggtacagtactaaaaaaatcttcagattcatccccctcgccgtcggtgacctccgcgcaaggatttgcgctgatcgcggtgattcgtgcaggactcgggaatgatagtaccggggggtgaaaagatcggaaggggagtggatttggtcgcggggtgaagcttatcaaccgcgccagtagccatgcgacgtggccggaccgtcggtgtcgtcgtggtactccggcaacctcagttactccacacagtggctctttaccatgtagtagtaatcgtggcgcgcctggactt

SEQ ID NO: 16812 - DNA, 599 bp, Zea Mays
tacttattacaacacacttgttgcacacactcatagactacagatagatgatatctggtggagcataaggatcctagttgaggtctccaaacacatcactcgaagcatattcgacgatggcattgtccaagtccatgtaatcggtgtcggtcagaagcggaggattggtcgtgcttagttccattgtagccatgcttgagcaaccaactccatccttcaagttaggtggggtggtgaattgagcttcatatccctgtccttcagcattttttcccttaagagattgctggtacaatgacactaaatgacaaggaatgcgacactttttagtaggatggttaaagcatccacacttcttacacttctcttgcttggaagtgggggtgtctttcctcggagcctttgtattttgcttatccggacgcttgttgcgtttgcgcttctttgaattatcagagttcttgggatggtttttggggccatcccctttcttctcattcttcacagcatgatgtatttcataggagcagctccaacacgacgttgcttatgatttttcatcgtaagctcatcatgcttttctgcctgaagtagatcat

SEQ ID NO: 16813 - DNA, 789 bp, Zea Mays
tttggtgggggctcgtcggtgtcaggaaatttccgtggccgaggacgcgggcgcggaagaaacagtgggagacgcggtggccgcaacagcggccgtggaggaaagacggccgcgaacgacgaatgtcgttattgcggaaatactggacactgggcgcgggactgcaggaagaagaagcgcgatgagcaatcccacgccgtgcatactgaagaagtggacgaagccttgttactagcgagaaccagcgtcatcgacatacaagagaacctcgacgacgccccggcttcgctggggccgcaccatgtcgttcatctcagggaggacaagctgtacgttcagcttggtgacaaagtgaaggaagaggcgcggtggatcctagatacgggagccacaaatcacatgacgggtgagcgctctgcgttctcctcactgaatgagaaggtgcaaggtacaatgcgattcggcgatggttcagtcacgaccatttgtggtcgcggatccattcttctccactgccggaatggtgaccacaagactctgacgggagtttactacattccgaggctcaccacgaatatcgtgagacttggacaattggaagaaggtggacacaagatcctaatgctgaacgggcgtctgaagatctgggatactcagcgtcggctactggcaagtgtgccacgatcggtgaaccgactgtacgagctggatctcgacgttgcaaagccagtctgcctcgctgcgcaaggaggcagcgcagcgtggaggtggcacgcacgccttggacac

SEQ ID NO: 16814 - DNA, 495 bp, Zea Mays
gccagttttagatgactcaccgccggcgaccgtgtgcccggattcgtgcccaccacggtgattcgtgcccaacgcagttggataacgcagaagggtaagaaatatcgcaccgtctatgaactccgatcactaatctactccagtcgtcgtacccgcctgtgtcacggccgcttcggatagactcaccagagttagccacctcgcgaccttgcgccacgtgccttggtgctttaaccacgccgcagtgagtcaccttagcccactcgatcatcgccggtgagctcgccacggtgaaagccatcaattgcttgcgtcagtgcacccttttatctccggccgccgcgtgtctttccctgaattagttgccaccactcatgggcactataaattgagcacaccctcggctccgctatgtaattgtgaacccaacacaaccactcgtgcctccaattactcaccagagcccccgaattgctcacttccaccagattggtt

SEQ ID NO: 16815 - DNA, 406 bp, Zea Mays
attctattggccaacagcgaaaagcgatgcaaccaagttagttcagaggtgcgaagcttgccagtacttgtcaaagcaacaccatttaccagcacagcaattgcagaccataccagtaacttggcccttcgcatgctggggactggatatgattggacctttcaagaaagctcaaggagggtacactcatgtactggtagcaatcgacaagttcaccaaatggatagaattcaaacccattgcttccttaacctcagccaaggccgtggaattcatacaagacataatattcagattcggaataccaaacaatatcataactgacttgggatccaacttcacaagctcagaattcttagatttctgcgagcaaaagggcattcagatcaagtatgcttcggtagcg

SEQ ID NO: 16816 - DNA, 422 bp, Zea Mays
gcgaagggaagggatgagggatgattcaaataaagtagttcatagggaagggagatgagttatccaactatctggaccgttgattttgatagtgtgttaagtttgagtacaatatgtttggtgaatttagtggggataatgagtatggggtgatttggttgtttgacttttgcaaagtttaaactgacgtattatacagtggtaagagcataactcttttctattatataaatatatgtaactttctatctttaacgtatacaactttatatcttactttctgtcttttaacgtacataccattctatatttaacgcaagtttttttattattattattttcccggccggtcccccctcccctcatcccctgtgcttccgggaaacaacgttctgaattcaacagtgcctaaattaagtgac

SEQ ID NO: 16817 - DNA, 569 bp, Zea Mays
ttctggtcctcgtcgacactcctcctcctgttcgtccttgtgggttcatctctgtccaaaggcatctagttgtctcttcatttgatgcctcttgaccccctgccttgaggcgaccctctcccttttataggccgagagagtggtcggtcagcggtggcttctctaggaaggatccgtaaggcaggggtaaatccagcgttttacctcgggtgaggccacatgtactcgtgtggcccgaggggtccataggtcatgagtgggaagcagaccggtgcccacaatgtgactcagtgccaggcgtggttaatgcagtcagtcatttatggcgggtcaatccagggccgagagtgggattcactcgagtggttcccttctgacacgctcatcctcccttgtcaggcttcgccatgtccggcctaggctcggtgccacggggttcgatcgagggcgggtccttatagggttggcgcacctgcctcttccgactgactaatgggccctagtgatcagaggctcttccctcagcacgctcactgaccggcgggtcctagggaccagcgatcatttcc

SEQ ID NO: 16818 - DNA, 427 bp, Zea Mays
cccgaggtagacgaagttgttgtttacagaagcttcatgatgtcagggcttcggtttccattgagtaaatttctagttgaagtgctaaagcttttgagatttttattcatcagattacccccgaggccataatcaggatggggatttatatttgggccatgaggagccagggactagagccgagtgtaaaatgcttctgcaacatgcacgagctgtcctattagacgaaggatattagcaaggagcagtatcataataattttggttgttatagcttcatgccccgctttgatgtaagctatccagttcaacgtttcggaagaggtggccaggggcctggatggaagaatggttttatgtaaagaataacttagttgaaagggaagatataaaggggattatccaatgccctatttggtctcgcttc

SEQ ID NO: 16819 - DNA, 1163 bp, Zea Mays
cgagacttcattgggtaatttggacgcaaggattttacccaatcttgaaataattcatgttcaaccatattgaaaggatactcatgagcaatcattgcttcatagaacttcttcacgctagcatcttgatcatacttgtatggttgaacaatggcaattcctgcctcatttttttgggttgtgagatgctgctgccctttctttatgctgtggtaattagcaagatgagtccaaaaacctgaagtaccaaattttccctcagtcctgtgtttgcttgtcttggtattacaccctttgaccttgcactttgcccagatctgcttttccatcttaccattgacctccactgtcactgtatacttttcaaagtgatcccacacttctgatgtggtcttctttggcctcttgataggacgctcgccatcctcgccatcattttcagcatcaaaattggttggagcatcagtaccactgccaacagcactagcaccaacacttggcaaaagaattccatcagatgcaggtgtcaacgaagatgcagattgaccaacaatatgacttgcaccttcacttgcaacgagagctagtattcctataaaaaatgattttctctaagtaaccaaataaagaaatagctagaacaattaaacatacatgggcaatggacatgtagtgcttactagatgagtgcacagcatctgacgatggctgagactgagagccaatgatggcgatgtcacaatttggtggtggtgcttgtgcgtccattggtgaccgtccacaatcagtaatagagagaccaatgctgcaatgcacaccacacaggcacacaacgatatgagcagcagcaggcatgtcatagaaaaagatgacaagagaggaggggagacaaggagagaagaactcacagggaagtgggatagactcatcagctgacaaagccgagggagacgcggcgacgccactcttgggccagaatggcgagggctcaaggcgatgacgatgagatacgttggccgatcggcggcaggtccttggagtcttggagacgaagactgctggccgagtgggattgtctgtctggctgctaggttatctgtctggctgctggagtgctggttgggccatttgggctggacggctggttgggctgctagtagatg

SEQ ID NO: 16820 - DNA, 526 bp, Zea Mays
cgcggaatcaagcatggagtcaccaaggcacaagaatttcataggggagaattgaggtgaaagaatagatctagggtttgtctgctagaatccattaggaagtgggcatgtatactctaggcctaccataagcaccagcacaagggaaacatatttttagatcgaatggaaggaatgctaagtcggacgaactaagttggacagaaaacatgtttctacgcaaaatcagttgggacacaagaaattgaacgaaacaaggaactcaataccaacaatcaaacttcaaatgcaggatgagaaactcagtactcaaggtagataaggccagcaagttttattcatataagcagaagtaccattacaaaagaagagctagttcattaggaaatgacccttgcaaaagacccctaccactactactacttctactactacacctacccactactactacactacactatactaatatctaagttggtggtgccttgccaccgccgttgccgccgttgccaccatcgtcgtc

SEQ ID NO: 16821 - DNA, 404 bp, Zea Mays
ttttgttgtcttctgttctcctgcgatccgtgtccgccgaagatgacgttgacctccctgtcaacgcgcgggaaggctcctcctcctccctcctcctgctgttggggttgttgtggttcttcttgtcctccccgcggtggaggaggtagaggttggaagggtcggccgtgtccgacggtgtgcttgaagtccctgcagttccaaaggtgtggcgcatgtacttgtggtacgggcactgggcatcgaggatgtcgtccagcgtgcgctcgcctccgcgaggtcctccccgggtgcgagaggcaggcggtccggcggcgtgcacttcttcgcgaggtctcttctcccagcgtttgtcgggttgctggttcgcgtcgcgtcgtggtgctgccggtgcgggcttcgct

SEQ ID NO: 16822 - DNA, 649 bp, Zea Mays
taataatcgagatataaaccacttgaatctctaacaaattcttataactgggggtggtggtggtaacaaagccttaacgaaacaggacccccgccacttgaatgagtacgaaacagcctgacggatgctcaatcggtttggtttggttgcgtgacaagtcgtcgatccggttagggagcttcacaccaaaggaaacttaccgacgcggcaaagcagcagcagcaacgacgacggaacacgagtcacataggaataggacgggacgacgggaaggttaggatgctgctggcctgcccgtgtaaagcgaggcagcaaccaccgcaagcgtatgacgcaggagcaagttgctagattcttcttcttgtccagacccagtccagctcggttccggctgcgagcacgttttccttggaccattggatggactggactggactgtaccgtggctgccgcgcgacacatgcatgtacgtgtacgtgagatggggacgtctcgtttgtccgggccggcgtttttggtgggcggagacgcgtgatcaggtcagggaggggctagtttggccccctagattcgcgcgtctgtgcctgcctccgacgcgcggtcgtcatcacgccgatgctcggctttcctctcctagacataccactcc

SEQ ID NO: 16823 - DNA, 307 bp, Zea Mays
gtcgagtaagcatgcagattgacaataaacacttcgagtgcctttgagaatgaagtctttctattgatggtgtatttcccaattacagaatacaatgccgtcccaatagcttttgaaatctagctaggggtaaaacttcctgagatgttctatattccatgagttccctatttccgtgccatccatttgagtaagacgaaatgatctaggccgagtgacttctgctactatgaatggtccttcccatagtggcgataatttatgccgcccctcccccgctagaattcggtggaggacaacatctccc

SEQ ID NO: 16824 - DNA, 731 bp, Zea Mays
aagtgcaccaacagataaactcccaggaatatcattaatccagaaattatcttcgatcgcctcctgaactgtccttttgttaatcaacttcttaggaatggtctcaaaaagtcggggagcgatatccacaatccgctgcccacacaaccatcgatcactccagaaaagggtagaggctcgacttcctatctcagaatacaaggccacttgtagaaactctcgaatttttctcgggatatgaagaggcagggatgatcagggccgacctggctcagttttttgcagccaagcccaacgcattttaagagcccaactcagttcagtgatgctgaaaatacccaacccaccaagctcgcgaggtctgcacactctgccccagaccactgcacaatgtccacccatggcatttttacgaccacgccaaaggaaccctcttctaattttatcaatgtccttcaaagtagcagaaggcaggtccacagccatagcactgtaaatcagcatccctgtcaaaacagattgcaccagtacacttcttcctgctttagtcaacaaatcagctttccacccaggcagttgattagctattttatccacaatgggctgcacctgctcccttcttaatttatataatgaaaggggcagcccaaggtacttgcaaggaaagctagatatctcacaaggccaaaactgctgaatcatctctaaattgtcttcatgacatctgatgg

SEQ ID NO: 16825 - DNA, 1774 bp, Zea Mays
atccagattgtcatgagaggtcgcgagtgctcgtttctcctcctatgagcaagaagcaactttcagtatccagtaaacagtaagcacgatgaagtcaaccaaggaagcttacctcatgtgtcgtcctttcagagtcaagttgagaagtgagggaagaattcaaagatcgcgcgacgaccaatgaagcagaagttgggactagatcggcttggctctgagagtatttctccttgaagtcggagcactattgggtcaacttggcccaactttgtgaatacttttcttcaagatcagagcaccgctgggccatatctgacaatgtagctgaaaagggacgcatgattaagaacaaggatgatcgataaaaacagctaagaaaactgcaaggtcgctaaccagcgtttgatgccttcgagttagcaatctgtttctgaagtagcaaggggttccattgcattagagacagagcttcttccggaacagcggcaccgcacaacctcagctggacagacattccatcaaccaaagcctacgattgcagacagatgagcaaaaggaagataattcactaatatgggcaatataaggcaacaggacgactcgcctgaagattggagaggaacgatggcagacccaaggcagaagaagctacatcatggcttgacgagggaagatcagcaggaacaatttgaagggcattatcagggcaatctcagccccgccagcagatagcaggtttctcgcatctggatcatcgacctctaaggcaacttgttcgttcaaagctgtggaagcatgcgccgttgtcgcccatcgaaccaaggtggggacgacccgacgtggacatccatggaagtatgggaaggagagcccacctgaacacccttggggctgggttgcagctcgcgctacccaccagagccggatcactaccaacaacactcttaggggctgggttgtagctcgcgctacccaccagagctggatcactaccgacaacacccccgggggctaggtaaccgccagcaccaccctcgggggttgggtcttccgcagtagccacctctaaggctgagagctcttttgtaacctccatgggagtcaggtgactcaaaccagcatcttgacattgaagactgccttccaaagtcgacgatgcgcgagataccacttgggatacctccaatccatcgcctggaacctctaagcaaatagccatcacatcatcggcagtcggctctgtcagcatgtcctcggggatgacgtcctcaagtgcttgatcaaaaattcgatattgacagtccctgaagggctgacaagggttgacagggctggagaaaggaatatcacttcccccctcactacctctacagtgcctgctattcttacggatcagcaggacttcttcttcttcctcctcatcttcataaaatatgaaagcagcggctggtgcacaatcacgatccttggtgtcaactttaggaagggcctccgccggtgtctcatctggaaccggagcaaaaggacccacaccctggtccaagctcgacagtcgccgaagctgccttttcttccttttttcttcaacgggtgcaatcgatcggctcactcggcgcgaacgttttggtcgggcaccttcgggtttctgggctttcaccacttcaccaagttcttgcccatctgtgatagccattggctcgacgagggcggagtcagacgactccccagccagcaagctaagtacagtgtccatctctgcgtcgtcagtgctggt

SEQ ID NO: 16826 - DNA, 526 bp, Zea Mays
ggttgatttctctgttttacggggactctttagcaaagtacacaaacgaaggggtattctttattatcagccgcaggatcttgatcttgcggttaggattagatttcccactcagcgaaccggtacacgatctgtgccgcacaacccgattctgacgccccagatttaattaccctaacctgactcccgcccacacgatcgcaatcggacggccatcgctacgccaacccgaatcggtacgcagagcctaaattggaccgttgatcccgcgatcgacggcacagaacgccccgcactcttccttcgtttcccctccggtgaacaggcacggcggagcacccctgcccgcggtggcgccatctccggcgagagccaccaatggcccgaatgcccaaatccgatgcccaggacgatgctacacatgatggaggcggatgcgagtacagggagggagtccataccgcgaattgtcgcaaggagctctctggccgcggggataggcggaggtgcgacgacgcgatgacga

SEQ ID NO: 16827 - DNA, 273 bp, Zea Mays
gcagcatcagttggtcagcggcgctagcttggaacttcaccgaggtaggaagactgagtatcttgacatcccattgaaggatagtatcaatggatggcgctttgagtggttcaccatggagaatcacaacaagtcgctgcacgcccgctctgggagacaacatgatgttcgaatgtcgagtaggatagaggccccaactgacttggaggtcgctgaagctagaattctgcttgccgagatagctagcatgaaagacaggggtttgactactga

SEQ ID NO: 16828 - DNA, 902 bp, Zea Mays
ggtgggatatcaataaccatagcaggatatataagcatccctgtgagcacatgattatcttgcacctttcttccggccttgatcaggagatcagctttccatcgcgataaacagttagcaatcctgtcaatgattggttggagctgatctcttgttaacttcttcaaagatagaggcaagcctaagtacttgcaaggaaactcagcaatcccacaagaaaggagggaattaattactagccgatcctgctcaacacacctgatgggatatactttattcttcagcacattattttttagtccagaggcttctccaagaatgtttaggacagcagcaatctcgttggcagccgacttgagaaagattacagcatcatccacatagagggagacgcggtgatgcagaatgttggaaaggttgcagcaggcgagcagcccctccacttcagctttcttaaccaaatacccccaaacatccatcacaataatacaaggggtcccctcgtctaagacccctccggtgaatgataacttttcctggacattttatcaagacttgagtacagtccatatatatgaataaggagatctgtgcatccataaaaagatgttatatatctaacctatctaaaccttgtgagaagatagaagatacgagcgtagttattcatcattgttccagcatctacatatctgaagataaaaggcacaaaggtaaaaaatctccacagatttggatttacaatggtggtagtttataacttgttcgggcgtgataaaagatggaataataagttatgtacatccagttttttcctaaatttgcagcagcacagtcttggtctgaatcagagtcttagttgcaacagaagcacctaaacagtgtgtccatgtggtcgcttc

SEQ ID NO: 16829 - DNA, 422 bp, Zea Mays
gttgattggtttcggttcccacccggatgggtcgggacaccgggagagatcgacacgaaccccccaccctgtggtggtgacggaggagagagtggaggaggcgtcgagtcacgttgacgttcggggtggaatattaccattccagttcgggatctctctctcggtatcttagctcaagctcactcgcggtctctgtctgccttgccgatttcgtccggcaagtctcgtgcctccaccaacggaaaataatgggtgccctttcaccggtgccatagccagccactggtgctacgacacatacaaagatctagatctgcgccaggagttcccatccattttcacgtctttatttgtgtgtgtgtgtgtggctccactccttgtgtttccgcaggcgagttcacttatgcatgcaccactatcac

SEQ ID NO: 16830 - DNA, 799 bp, Zea Mays
agtaactaaaactgaatttcagtgttttgatagcagttttgaagtctatttgtggctattctatagggttttaggctatggtgtttgtagatgaaataaagaccatatgatagtgaataattttcagtaagtgggtataacatgattctacacgaaaagtggagtaaaactggctcaaagttggattgtcaggtgactgaaactgagttatattcagtgtactgaagactgaatttcagtgttgggttatctgtttggagctctgtggtaattaatccatggagtatgagccctactatatgtagcaaagttaaagatcatctgaagtatagcaagtttcatgtagagagttggcttgatatggtgtaggatttagagaaaaaggggtggcaaaaccctctgtcagactcagtgtagtgttgttcaaacttctcaaactgaattttcagtgaatttgctcctttttggtgcttcataaatattgttctgagtatattcagccaaggagtgttatactaaatagggagagctataattggagagtaattttggttaagaaaggtgggcttgttgttgaaaggaattgtgagatactagtgactgaaccgagaagagtgggatggaacagcaggactgatgaagttggattcagtgcctgggttggtaactgaaggagaatctcactgctgtggttgcacttgtgtgtatagttggagatatggatggagtacaatgataaggcctagaggcctcacttccaacagaaattatttactttggatctctttgagcctatcca

SEQ ID NO: 16831 - DNA, 315 bp, Zea Mays
gctaaacataggttaacatgtgttccatgattaatgtgcttgcttgctgtagttgattgtgatataggagtccatcgacattgatgcataggtcctctgttaaacttgtgtttgggatgcttgtgtgcgatcaatggatggactaatgaaaagtcgtttccaattaaataaatgcttgtactcatgatgtcgtgttgtgttggttaattataggtagtaatcgtcgttcttccagtggtgttgatgtggtgtgcccgacgacgtgtagataactaaagctaacatgtggttgcttgcggtgtcctccaatttaat

SEQ ID NO: 16832 - DNA, 499 bp, Zea Mays
gaaaatggttggagacaaactatatctaggagagaatattttaagggatgatagtaaaatatattagaaagtactatatatgagaggaggcgtacaagagaaatggttcgagacagaaaaatgttgcgggaggtgaaaatatagagacgagaatatataccatagtggaatgaatatagagggaaaaattagtggtactgctgcgacagcctgaagcacagaggaaggaaggctccaagcctacgtggtcccaccttcagggtgactagggctgacgtggtgtggagtggacgtgacagtgcccttgcaggcagtggcaggcgtaagggtcagttcctgcaggcaggtagcagcagtgcaacgcggacgatgcaaagagatcctcgcggcgacccatcacccatcattccgcttccgccgtccacgtctccccgcgtaaaaagtgaaggagaaacgcgcggacgagtggacgacggcgagcagcggaggtagatgacaa

SEQ ID NO: 16833 - DNA, 494 bp, Zea Mays
ccgccagtcgccgccggagacccgcgctcgcgttcccggccatccagctcaccagagaccgctgcaagcctccccgagctctgccccgaggtgagacacccgtccctatgcgcaatttcccctattgtgccctgtgttcggccaatttcaccttcgccggtgctcggccgcggcggtccgtcgtgctcgcacggtggccggccgatttagcccggtctagttccccggagtaggtccctgtgtcacccctgcctctgccgaagctagcccaggccttagcgtgccttaaggcccctccctgtggtcggaatggctcaccggagttgctctggcccgctcgaggccttctcaccgtcgctctaccctctctgcctgtggattcatggcctcttcctcgccattgagttcgccgtggcgccctctccctctctgcccaactccggcgacctcggagccaccctagctcgcgtcggcctcaacttcagtgacctcac

SEQ ID NO: 16834 - DNA, 400 bp, Zea Mays
cccaaaaccctagccgccagctccagtttcttctattgcgcagggtccgcatcgtcatccactcaaagccactgacgtgtgggccatatttgacagctctatcttctaccgtgaccgagctcgatcgggtattgcagtaggttgttgcgatcggatcatggtggttaggattcgtgggcctcaatcctatctccttgcgcctttaaataccggctgaggtgctctgcgattcaacaatcccgtatggcatcgaggctgggagatcgtagcgtagagctgagcatcaaaaccaaaggaagaggacggagagagagagatagagaacgaccggtgctgtggatcttcatcgagcgcggtgtaatggttggactccgttcgtcgctctccgagggaggaagtt

SEQ ID NO: 16835 - DNA, 439 bp, Zea Mays
ccggactccatttagtacccccgatggcacgaccaagtactgcaaaccctccgccgctacgccctcgccgaccacgtcctctccatggtccctgacccgttagaggattggcttctgatggacgaggtggtgctttcctggatccatggcaccctcacggtcgaacttcaggacattgtccgcgtgccggacaatactgctcaccagatctggggtgcccttgaggctcagttcctcggtcaccgtcagactcggatcctgtacctcgagaccgccttccgtcagcttgctcagggcgatctctctgtggacgagtactgccgtcagatgaagacgatggcggacactctccgcaccctcggggcccccatcaccgacgagtgcctcgtgctcaacctcctccgcggtttgagccctcgcttcgatcgtgtgacgccca

SEQ ID NO: 16836 - DNA, 536 bp, Zea Mays
ctccaacgggtctttctgaaccaacttattgtgatgctattcttcaatcagaatggcagcttctgatgcttgagtgtaccggcacatgggatcttgttccccatcctcacatctgtcatattacctgtaaatgggtttacaaggtcatgacccgctgtgatggttctcttgagcgttataaagcttgtcttgttgctcgtggttttcaataggagcatggttgtgatcatgatgacatgtttgctcctgttgctcatatgaccacggttcacactctttttgttgtgggctctgtttgtaagtggtccatctctcagcttgatatcaagaatgtctttcttaatagtaagttgcgtgcggaggtctatatgcagccaccttctaggtattctattcctgagggcatggtttgccatctttatcgctctctttatggcctcgagtaggctcctcaagctgtttagagttttcttctgtgatcactattgctagttttctgctagtgcctatgatcttgctttttttgtgcactcgtt

SEQ ID NO: 16837 - DNA, 506 bp, Zea Mays
cggacacacaacttggcttcccagactaaatcctgcaggtcccgtgcctgtatcaaaggatggctagtatcaggcgatgggccctatgggtgtgctactaacgctccctagccgaagttgtgttcaggtccaggtcccagtcgaggttgcctcctaggggccgttgccaactcttttaggtatgctggtatccagccttgacacgtcgagcctacatcccaggggcccaggtaccagggaggagtcgacaacgccacacacagcaagaacaagcgtcatacagataagagctatttaattgatagttcccaaaagtatcttacaaaaacaaagttattacatccgccttcaagcggggccctagccttatgtctacaggtatgacctactcgacattagtagggtcgcgctggaagcgcgcggccgccatctccacgaggctgatgaacatccttgaaatagatgggccagcggtcaccgtaggaggcggcaccgaagccatcaaa

SEQ ID NO: 16838 - DNA, 785 bp, Zea Mays
gtaggatccagtgagtgtttgattatggttgctataacaaaatcaaagctggtttgtaggagatcaactttgctacagaaggattagtgagttgccacacaaaaatttgagaacaaaagccctgcaaagttgctcggtcagacatactgaacaagatagccatggtacaatgaacgaaaagatcttcagatgtagtgaacatgttgccggtaaactccgcgccgcaatcctcaccggcgtcgcgatttgtgtgccctggtgtgtggataatggctggcggtgaaagatctcgcacaggggatgaagtcgggggcactgttactgcccagtcgtacccacttgcgcagcgacgtggccggatggtcatcaccgtggaggtcgccgttcaccgcgattgcgccacgccgtagtcctttcaccatgtacccgaaaccgtggcaagataagagttaccacccttgagtcatagtgtcgttgaacgccacaatgagctcaccagtgcaacattctgtcaccaccgtgatccaaatctccttcaaattcgggacaaccatggccagcttctataaattgagtgcactgctagctccgctaggttgttacgaagccagagcaccaatcctcgcccccgatcgttcaccgtagcgccctaatttggaatttctcccaaatccattctccgcgctgccgtgagcaccccctccgccgacccactgttctgtccctccacctgtcttcctagctgtcgttcttgagtcgtggtatgttgctaaagcttactgtgc

SEQ ID NO: 16839 - DNA, 518 bp, Zea Mays
gttatgaaataaagcaagcaatgaattatctccaaactgtctttcttccctgctaatctagtctccctccttgctgcccaacatagatcggcacccagccgatcgtccacgccacctgtgaagtcaggggccggcgcctgcgcctttgccacttcccccctaccaccggccacataacatcttggtatcaggagaccagccacgcatcccacccaccaccaccaccatgtcctccatcccaagcgatccagtggctcaggccttggacgccatcaaccaaaggctggcaaccctggacaccatgcacaccactatacagtgcctagaacgacagcagcaggaaagctaggctgccattgatcgccttgatcagcgccagcaggagatcatccctgacaggaaccagcgtccgcgaggcgggcctaatgccaaccatgaagaccgcccaaccagattccatcatctggatttcccacgatacgacgggaagacggatccgctactcttcaccaacaaat

SEQ ID NO: 16840 - DNA, 599 bp, Zea Mays
cctttttggcatagaagacatcacaaattgagattttattagtaagcaataagaccttgtcagatgaataaatgctagaatctcagtcatacattgctcaaccagatgttggcacattgctatttatcgctgaacgacatgaagcgaactttgagataaatggctagtaccttagcaacacgaagttgcgagtacatcgaaaggtaattctgagaattttttcacaccaacattgtgtgttttcgtcgaaccactttactcggcctatctaggacctctatgcttgtgttgcatacatctctcagaatttaaatacttatagccgctgaattgacttgggatagtcctttgactggtatggtatatactataaaccaaatggtaaaggtcgattctgaatagacatatatcttgggtttatgtagcagaactacattgtattccaccccttggcatgcttaccataatctatatctgatctaccagaagtaagaaaagtacaaatatagtcatggaatcccacatcaccacagagcttgaagctacattaggcattaatttgtccttggtttttggcgttggaagagccacaattctcg

SEQ ID NO: 16841 - DNA, 569 bp, Zea Mays
gtggggcatcgagaaagaggcgggtcagatgatgtctccggctaagagctagggctcgctggttcgtcaagctcgccagttgacggggacgggtcgcatcgtcgtggtgagcgaggtcgggtctgccaagagcgggatgatgtcatgacgataacgagcgggacgaggacgttgggaaggggccagggtcaggcgacatcaagcatcaggaaggaggcgacggtgtcaagaatggagcatctgggaggattggatagatgcgaggactagaccaaatatgatggaagttgagagaactgctcagggcaattttagcctatccaaaccttaatttatatactttacagtaggtgaacattaggtataagaggttataaaaaattgagagggatccttctatggatacgacagcgtcggaaagaatgagattggatgaatagatgtgaggattagaccaagtaaaaggacgagagtcgatagaactagactaattcgacgaggagacccataacatgattgttttagcctatctaaatcttcatttttaaatatacttaacagtaaataaa

SEQ ID NO: 16842 - DNA, 782 bp, Zea Mays
tcacacggcctagtttagatctcccacataaacaaactggtaccaaaacctggcccttagatctaaataccacggcgcgaattcaattcaaacgaaggggtaacctggagtcgaccagagccgtctatacttgatctgacggacaccagagccccgaccgaaacgttacccactcatcatatctgggccgatcacaagacgatcaatgacccatgtgcgtcttccccacccctatccgagccgggcggcactgtgcacacacgacggcggcggcagactggcaatcaccgtctcagtgcttcagtgaaccatcccacgtgccaactagcgcaacacaacacagaactcattgtgaaagctatagggccaactcaccgtggtttagggtagcatagaaccacgcccacggcgaagagcggcaccttggcagcgaagggctccggtgagcaatccctgatgccctgatgatcaatcgttcccaccgagcctgcgaacgacgttactttccacttgcgatgttcctcggcctgaccatgcgtaaagacaggcactgagggcgagttccctgggcagcggcgatcctctcggcttcacccgcggcaagtcttaggttgggctcaacgctcccggcacgtgatggataaggtaaggaccgcgggtttcgacaggttttgtacccaggtcaacgcccaagcaagagagcaatagccacccacgatcccggcggcatcggtattccattagcgcaagcatcggcgaaggggatgaacccgacatgcggg

SEQ ID NO: 16843 - DNA, 1049 bp, Zea Mays
gcccagacgtaacaacctggccgcgcctctcgccgacttttgcgccacgtcgcggctggataaaggtatggcacctctcctcaccttccttcgcttgcaactaccccctgccagcgccacccatgaagctgagagagagaagggccgccctcgtcgcccgttgtgttctttcccgcccagtgttctgcgtacggtcgggaagatgcgccgcggtgtggtgaaaatggctaagggtccattcgggcgcggagagttttccggggtgtggccgacttctcgccggagccatggcttgttgggatcggtggccgcaacttcaggccacaacctcatcatcggtaggtgagtctcctgtggagttgtcgcgtccttcgttcccttgtcgtacgtccgcgggttggcggggtattgcgtggtggctgcggccagttggtgggctgtgatggcctcggtcgtcctagtcgtctggcgagggagatatgggttggagatgtcccctggccattaaatcgtccatcgaactcacggcaggcagacctccgtttcaaaaccggtctgtggcggtgtctgtgcggggaatcctcgggtggtgtgttcaccggcgggccgtgtcgtgcggaggcagtgccgccgcggttgtctttggagccgcgtacccagcgcagggaagaagacgatgtgcgaacctatgatctgtgaacgaacggctacgatttaatcggggttccccttcgcgggatcaatccgggatcgttggattccatttggacgaacaggattaggtggaaggggtaatcggtcggctttggatcgggaccgtccatttggaaaccggcggaatggatccaatctcgcgttacagacgtgtatcgatcatggaccgtgcgattcaaatccaagggcagaattggaataccggttcgcgggttgtaccaaactaatctgggccgccagtgaccgatcggacggtggggatatcacgataccccttcacgggcgtagattaacacaatggcccctgagttttagataaaccaacccgccatccc

SEQ ID NO: 16844 - DNA, 792 bp, Zea Mays
gaaagccaaagtgatcggccggagcggagaaggaccaacagggggtcctgacagaatcgatggcacaactggagcgtgaagttggcacaggagcctcaggcgcaggatggtaggatccaaaaacgaggcgtcaggcctcaagagtgccctgaaaccgaggaggctgaatcagctgcgcaaagatgtggcataagtagtgagcatatggcaactgtcgacaagcacgaatcccatccaaaacggtgtcctcgatctcacaaataaggaagtccacgacgtcaaactcagagtgagagaccagggcaccaaggagccagagctggatatgagtggtagcctccctgtatcccatcctcggcagaagagttcgtctgataaactcaaataaatacttggctgctgtagtaaagtctgccggtgaacgtcgcgacccatctgaaaagggcgggcggaacagagccgcgacgtgagctgtacccggagccacaccaccatgagggcgacgaggagggtcagaagtgccatagcagaggctgtgaagacgagtcgtcgactcgggaaatccaaagagctggcggatctgactggcagtaatggtgacatcctctcgctcaaaacgaaacctcatccagtgatgatccgggtctatccatacagaggcgtaaaagactcgtacccactcctcaacatacctgtcgctggtagtcaaaagggtcagaaggccaggcagatatgtgaggtgcgcctcagagtcagcaccggctgcaagcagaaaggctggaagatccaaaa

SEQ ID NO: 16845 - DNA, 549 bp, Zea Mays
ctgagtagtgatctggcactttagagatagtgcccgacccaggaaaccccctttatactcgtgtcgacgtgccttcttgatttccaagccctaacttcactttttcccttcagccattcctctacttccctaaaattctgagcctacttgccccgctggaaagatcgcgatggccccccaagcggaagaggcagagcgccgctgctgcaatcatcccgcccatcgaccccaacagccagctgcccttcactggtaaccatatgtctgtcatctctgaatctgaccttcttcatctcgttgagattggggttttgcttccgaaggagctctgctcttggtggatctgccgcggtatcactgttccgataaaggacactcatgaatctgccgtttatgttccatttctcattcgtgggcttgctcttcccatctccccctttttccgcggcctccttgttttttgagttgaatctgacgcatttgaaccctaactcaattctgcaagttgccattttcgtacatctgtgcgaggcttttcttgggattctc

SEQ ID NO: 16846 - DNA, 455 bp, Zea Mays
gatctcctctcctccccaactctagcctctcggtacaacgctctgaggccgttgctggcggccgaaccaagctagcaccgccgccctcactgtcgtgccgcgattccgtgaaccaaccatagcacaatttcgcgtgaagcacacgatagcggacacacaatgaaccgctaagaatagcgtgcgcgagcatcatccgctattttagcgaacattttatagttcactgctggagcacatagcggacgtttctaccgctaaatttagcgtacatggccatatagcggcccttgctggagccagtttaaagtggcatgaaggctgcagaagagtggttgcgaaattaaagagcaattaggacaagccctaacaataagacatgcttgtgttagggacaagcaaaaattccagatctaatatcctgtgattgagggtgatgcccatatccttcaggttac

SEQ ID NO: 16847 - DNA, 381 bp, Zea Mays
agcagggggagtaaaatcagttttgagacataaaggcacatgatcagaaaaggatctactaagaccagaaacattcacattattataatgcagatcccactccgggctaacaagaaatctgtccaacttctcataagtggggggatttctattattagaccaggtaaaaagcctaccacttagatccaattcaatcagatcatgaacatcaataatagagttaaataaggaactccacttattggtaccaccaggtttgttcttatctgattcttttcttagaatgttcaagtcgccacccatcaacattgggtgagagcatttggaacaaaaagaggacaactcactcaggaatttatacttttgatcattttgagcagc

SEQ ID NO: 16848 - DNA, 286 bp, Zea Mays
atgatatgcaaaacagcatttcaggttgatacttttgtcggctctgccctgatgaatgtctatgcgaagtgtggtgaagttgggttggcaagaaagttgtttgatctttcaagggagaaggacttgatctcttggaatggaattattgcggcatatgcacaccatggtgttggcatagaagcaatccacttgtatgaaaagatgcaaggaaatggatataggcctaatgatgtcacctatgtggtgttgctctcagcatgtagccactctggtttggttgacgaag

SEQ ID NO: 16849 - DNA, 433 bp, Zea Mays
ccaagaccggacacaatctttttagactggtataagtcttttggcatcttatggtttgatgggatgagatcaataatcagattgattatatcgttatagcagttattcgagaagttatactttgccttcattgccataagacgtgtaaccacctgcaacacagtcacagtggtgttgtcatgcattttttcctctgacgcgtgaagaagcttataaaactcctgcacttcctctggtgtagcctgttccgaggccaatgttggatactctctactaatatcagccaccaattcatccatccgaccctcctcctcatcatcaattctttctgactctgtgatattctactctacttctccatgtgagcgccacacaagatagttaggcataaacccattcttgcaaaggtgatgctctagttcttcgatctttc

SEQ ID NO: 16850 - DNA, 810 bp, Zea Mays
gtcctcgacacgaggccgcaaaggcggcaagccacgcaaagcgcgtggaggcgcccaggccggggcgcgaggacatgctaagggtggtgtccgtggaggtgcccaaggcggcgccgtcggcaacaagaagccggcacgagacgacggctgacacaactgcgacaagcttggccactaggcaagggactgtcgacagccacgacgtggtcaggccaacgtcgcacaggcggaggcggaggaggaggctctgctcctagcacatgcaagcatcgagctatctccagcgacaccagccgcagcggcactcctccaccttgatgagtcgaaagcacgcacttttcttggcgacggctccaacaaagacatgatcgaaggatggtgcctcgataccagcgccactcatcacatgatcggtcgacgggagttcttcaccgagcttgactctagcgtccgaggctccgtcaagtttggggacacctccggcgtagagatcaagggcgccagctcagtcgtcttcaccaccgcgtctggtgagcacaggctgctcaccagagtctactacatccccacgctaaggaactctatcatcagcttgggacagttggatgagaacggttcacgcgtggaggtcaagcacggagtcatgaggatctgggacccctctcgtcgccttcttgccaaggtacgcaggagtctaaatcggctatacatcctcaatgtgaaggtggcacaaccttgctgccttgctgctcgtcgagacgacggggcatggcagtggcacgagcgtttcgggcaccttaacttcgaggc

SEQ ID NO: 16851 - DNA, 360 bp, Zea Mays
atttagtagcagttagtagtatagtgtagtgtgagtaatgtaatgtagtaaaaaagggaaaaaggctgactcataatgggtcagtctttgagtttgtgaaaatcccttccactattaaacgaagaaacttcagttggtccgagtgaacttttgcttttttgctgctctttctttgtaattgtttgatagttcgtcttcacgcctaatactgccggcgtttttagaaataaccgctgagtgatgtctgatgacatcgacgttttagaggtaaccgtcgagtcatgttcaattatgccagcgttttagaggtaaccgccgagcgatagatgatgacaccggcgttttagaggtaaacgccaa

SEQ ID NO: 16852 - DNA, 814 bp, Zea Mays
cgcgggagtggccccgagaactggttggtggagaggtcgaggaaggtgagcctcgcgcacgcgtacagcgcggcgccggggaaggcgcccgtgaggttgttgtaggagaggtcgaggtgggtgaggctcgcgagcgcgcacaccggtgccgggacggagcccgtgagtttctgcctggacaggataagctcggtgacgaccccaacgccgccggtggcgcacgtgacgccggtccagttgcagtggtcgggggcggcggcggggtcccaggacttgagctgcggggggctgccccaggccttcttgacggcgagcagcgtgtcgcggtcactggggccgccgccggcggcgggctgggagcggccctcgccggcgaggaggaagaggagcaagacgagcagcagggggaagcgatggcaggacgtggtgggccgcattttttgtttttgtccttggaagcttcctcggctgtgatgtgaggaggagatgagacgggacgggatcacgggactcgggcggagtgatgccgcgggagtgacggctggtgtccgagtttgtgcacggctctttatacgtgtgtgtgaaatgggtgtgcgagttgtggtcagcgtcaacggtctccgcctgctgttcggtggtccagtggcgcactcaaaagtgatggatgctaatcaactttgttctgtctgtctcttctgtaagaatcgagttcccaattcccatagtcaattagtcatagctcctacctcggttagtgtttcgtaaaaggattaaccctgtaatcgctgagtacaaataaactaatctcaccgac

SEQ ID NO: 16853 - DNA, 619 bp, Zea Mays
ctcggaggtagagggattcgcttaccttctgcggagttgtgcgcttcgcctgggaatttgcaagaagccggagtatgcctagaagaagtaccaggaaaacagagttgagaagtgctccatcgtgatctacctcggggaaagctgaagctatccaaaccacccaccattccagatcactgccactggccaccatttcctaaacacttgccaaaatgccaccctaaaagctctccgtcagctatgccaaaactatgacaaggaaattaccgagacgcccctccgctacttcccacccaccaacaaaaatagccccacttggaggaaaagactccaagccctcttagggagagagcacaatgaggatgaccccactgtaactgtaatctacatggccagatacctccacacccttgacacccactttgacgaccttttctcacatcgcactcgcctagactcccgggtagagaacctggaactccagatcaagaaactaaaggaagaaaatgctgctcttcagaacagcctcgaggaggcggaaggcgaggaagccaacacccgcgaggcatacaggagcctgaagaaagactatgccaggaaactaaagaggtttgcccta

SEQ ID NO: 16854 - DNA, 669 bp, Zea Mays
ataattgttggacttggttggtggggacttggtcgttcgccccgcctcgcagacttgctcgacggggatttggtcggtaaatgggccagagggaggtttatggcctcaccttgggtagcagccccaagcattcgtgcgataccttggagtcggtcggaggttttcttgccgaggatcagaagcccctgagtgcacgcaagcacatcagtatgatgtagcccatgagtaatcagtgacgattgcttgggggtttacttagttcctggcgaagccatgggtctgccttttgacgacttcttttgaccttatggtcgtgtcggattcgcttcattttgtgttgtggtcttgatctggccctttgggttggtcaccaaagtggatcgttgcctcagccctgcacggagttgcccgggggcagcgatcgctggagcgagcgtagtctctagggacatacccgtacggagttgcccggaggtggtgcccgccggagcgtggtttgaatgcatgcaagcgcatcagtatgatgtagcccccgagtaatctgtgaggattgcttggggtttacttttttgtaggcaaagattaggacttgccttctattgacctttcgtgatctagccctccgagttggtcgttgacgcctgtcggttctttgttaagcacacatct

SEQ ID NO: 16855 - DNA, 508 bp, Zea Mays
cggagaagaggtatcgacgagatcccaccccttggatcaagatatgatgaaccggatttaatgaagcgtcgcccacacacagccccacgattggcgatctaccattttaattggtctcgacgaacaggtactcatgttacatcccgaccgtccatcccgtgatccacggacacgatttctaattcgcaagatctaaccgcccacatttgattgctgatctacggtcctcgttcaccctggcctgatccgcccccttgatttaatctacacccttaatttcccaatctacggcgtgtcgttcttcttcaaactcccgcctcggtagcgagggtgccgcacccgtccccgaggtgacaacctcatcggtgtgacccggtatttccccctcccctggtccccaacatcatagcccagaaattactatcggcatgaacgagtaacttagcagcggctaggtggaaggatgggtctcaccgaggtcctggtgccggcgttgttcaacgccgaa

SEQ ID NO: 16856 - DNA, 981 bp, Zea Mays
acagttagccgcttgggtccctagcggtatcgaaggggcaatttgtaccattggcagccacctgtttggtttaacaattaatttgtggtgcaaattttgagcagggcccagatttggtggcctcattactcgtcatctggcccacccttagcttagatcagactcaactcttcactcatgcaataaaaagaaaagaaaaaaagaaaactctctgaactgaatagagtgcagtaacatctgcagaaaatctggcagcgggcccaaacgcttggatctgccgccacggaaacagaaacccgcaattgctgtccagccagcgagccgtccccatcctgatccccacatcctccatctccatgaatgatcctccagtacgggagttcccgccccacggcagcgagcatgtgaggagggctcaggataagatagggtcgtggtctcacggatgatgacaggtgccaccaacaccaagcaagcaataagggacgggacgggagggctcttgcgatcaaacaaaggaccatccagtttcttcaccatcaaaatacagtacttggaacggcttcgacggcctaactttccttagtgctgctgccacttcgcgttgaccaggctttatttggggggaaaaagcacggatgatgcacataaaagcatcttcatgtggaagccactggtgctaatctctctttgacagaacgccaactgaagcagcagaggatcggtggtgtcaacgtcatgctcagtggaattcaggcggaacacacatacacccagtatgacaaaagtaacatgtccatgtttgccgtcttagacaggatttcaaggcgcgacagatacatacggggccagagaagtttcaaacatgttaggttggaatttcttctcacgacttgacacccacagaggggaaaaagaaaatgcatggaccaaacatgtgaacgcccgtccgaaacaacaggtggcacagcagcatcactt

SEQ ID NO: 16857 - DNA, 512 bp, Zea Mays
gcagggagctcgagggcgaaagggcacaacagttgggagtcctagttcgggcaatgcaaggccctacttccagcatagggggatgagacttatattactcgcacgggggtgcctgaagtagggattacaagcacaacgggagagggggggtccccaagtccctagaactgattgagacaagtgctaataccaaaagacttggaggaaaactactgagtgttcgcttgcccttggaagaactaccactaccctatttatacacttagaagatgtaagttgtgaagcccaaggccgttgtattcccaaggaagatgtcttggcatcctacgagtgacatgacggtgtactgcgttgttgacttatggttgctgatttcctgctgagagccgaggccgaggccgagcggttggtcgtacgctcgagcccccatgggaggggttgcccataccatagttgttgtaaaagggctttggtatgggtaaaagcatgcttacggggtgcgtgagcgtccc

SEQ ID NO: 16858 - DNA, 484 bp, Zea Mays
cctaacctcaacgaaaggtggcgtcgtggcttcgccagcccctggcgaggatgtaggtacccgcgacctgggcgagaaccagtggctggaggaaggaggatgaagagtgggcaccattcgccagagattggaacccgcagccatggcgtggacggcccggggtttatgcgttaacctaatggaagaaggggtctagggggtgcttatatgcacggatagagccgtgaggacggcgggcagaacgaccctggaatccggctggcgcgtagctagcgcgcggtagtttcgccgctgaagctgcgcaggaagcggaatccaccgtgcaatcccgatgttcagttttagggagaagatgacttacagcccgggcccgctagtcggtgaatgagtggtcacaagcatggagcggggacgctgtcgatgagggcccagcgacagcagttcaatgggcgcgcgcctggtaatctgagagggcaccgaactg

SEQ ID NO: 16859 - DNA, 474 bp, Zea Mays
atgggctggtgcgttgggtgtgtgattacttagcggagctcactggggcggcaatttataggttccatcagcggtggtggctaattttgagaagacgcgcggtggccgaagagaaggaaggttactagcgcaggtgatatcatggctttcaccgtggcaaggccaccggcgatgaacggacacgcttcagtggtttactgcgacgtggtaacgccctaaggcacgtggcacccgagcggcaggtggccaactccggcgaggttatctggaccggctgtgaggcaagtgggtacggcgaccagggcagaacagtgtcccaagctcatccccagcgccagatttttcaccctacatagttatctgcacttcactgagcaacaagcgtaacggcggcaacgatcacggggtgggatcaccggcggcgatacattgaatttggcgatcttcgtcaggtcactgtaccatgggaacttg

SEQ ID NO: 16860 - DNA, 1007 bp, Zea Mays
ctcgagtgatgcataccaaccaaacgtaggtattgactgcaatagagagaagaaccaatcttttatgttttcagacgatgttgctattccgagttgagacgtgtatcggctcacatactcgacgatgttgaatttgtaaaattggacaccttgaactttggtggggtggcatccgaacaaacttgtttggatagggattcgtgtagctgatcgccttccatttggtgaggatccgaaactgattgttaagattgttaaacatagaataaattacctgtacatggaatgcctgcatgcactccttccttagatagctagaccacattcctgtaatctcgtgcatgctttctttcctacgatagctagactgcctgccagatatgcacgcataaaattctccatgtacattacctatataaaggaatagcacaaccctgagaagcagtgcattaggcctaaccaaacatggtatcagagccaaggttttaatgtccacaataccttcttctcccacaaattcctccaccaccacgtcctcctccaacatggtatcttctgctgctcacattccaattcatcaagtcgtcaccattcgtctcaccaaaacaaactttcttctctggcgtgctcagcttctccctcatcttcgtggtgcccaactgatgggttttctagatggctctaatccggcaccaacacagcagattgcctcatctaccgatgcaaatgccagggtcatccccaacccagcatatgagcggtggttcagcggactcctttcttcaatgattgaagatgttctcggtgatgtaatgactgtgtcctcctctaaagaagcctgggatatccttaaaaacatgtattcttctgcctcacgggctcgcattgttcagatccggatggatctcgctactatcaagaagcgggacctctctgctgctgattatttttgcaagataaagagctatgcatctgatctggcggctgctgctgcacctctccgtgaa

SEQ ID NO: 16861 - DNA, 396 bp, Zea Mays
tccgggtagtacgagtggacacttcccctgactgcgaaaccccaaggtgatcacatacgaggtcgatggccctggacagattggagcgctcagcgctaaggactcggaggcactcctccgcacgcgcgagctcctccaacaccatcgctggtaaacaaaaaataggaaaatgtgtcagtgaatcgctgagactaaaagggtcaaaagttagggatgggagagtatgatactcaccttcagtcaaggaccccgacgcagatccatcgacatgaccgcttggcgaccatgtcttcccaagacttggctggtctgttaggaggccatcatttgtctcgaccgtgggatgctcaggttgtatcggttggccgaactcggaccttgccagcccaactcccc

SEQ ID NO: 16862 - DNA, 293 bp, Zea Mays
ctttgcctgcccttgatcatatggagagctttagtaactgcaagatcccaagacgccttggtcgggacatgattgagacttacgatggctgtctgtaggctggccttgttcgcttgaacagaagagcaaggcgatatctgagggaaaaaaagtactacaggctgttacagtcttctagcagacggttaaaaaaccggacgacgaggaacgcgcaacacctttcgcagagtcgattggagctcctccacggcgttgtgccatgtccatgagagcgagtcgtcccacgcgatggt

SEQ ID NO: 16863 - DNA, 859 bp, Zea Mays
aggaaacccctatgggtctccctcgcattcgtgtggagaacagagttattctggaagatagctcagagtagtttctgcctacgcccaccccgttggcagaatcactagccttcgcagctggatcgtcagcttcagcaccgcctgcaccagcagtccaagcccctgctcccggaggtgatgacctagacggctctggtgacgatgatgaaggcgacgaagaagaagaagaggagaacgtcaacgaagaagccaacgatgaatagccggaccactatgtggggttatggcctgtcactgaacattatacatcaatgtttgagacagggcacttccctaacctgctgcaggatgttctacatgcgttgggaaactatgtccgacccctgtatatgacaaggcgagtgtacgagcctcctcgggcttgctactacatcactcgcattcatgtcagggtgatggatgcaggtgatagagggttcaggactctgtcagctcatgagtctctaacaccgctatccacctacgctgctttggtcagcgatgctgctaggcgaacactatcatccctcagccacacctactggtagcagctgcacaacacgaactataggcatcttcctctacgcattcgtggagaaagccagaccagcattgttccaggtggagctggagaagatcgcctcaacaccctagctggtgtggtggcaggtcttaacaccgacctggatagtgctaccatggacctctctagggtacacttggagctagaggatgcacacacaaggatcgcagccctcgaagctcaacttgatggaaggaatccctctaaagttcaagtccctaccatggtgttgtcccc

SEQ ID NO: 16864 - DNA, 385 bp, Zea Mays
gagtactcagcataaggtagactcttgtcccaactactatcatgttgaagggcacaagctctcaacatgtcctccaatacttgattagtccttttggtctgtccaccagtctgaggatggtaggtcgaactaaaattcaacttcgtatccatattctcatgaaaacttttccaaaatctggaggtaaaatgtgatcctctatctgaaatgatcttctttggtacactgtgtagagacacaatccgagccacatataactctgccaattgagattccttataagtgaaatgagccactttggtcaatctatccacaataacccatatagaatcatatcctttcggggtgcgaggcaatctagtaatgaaatccataccaatctctt

SEQ ID NO: 16865 - DNA, 547 bp, Zea Mays
accggtaatgggtgggtcttctctcacaatgaaaaagcacaagagctacaaaatttcttccataatgctttaaagcggctgtcggtaccctggatcaggggtaccctcttctacagcatgaaggcgccgctctcgtgcaacacctcaaggccacacggagaatggcacccaaccccaccacatgggcaggtccaagggcgccacgtggcaaggaaaggaagtgcattccatgtattcaacgttgggtccggacctccatagaaggacgccggacccctatgcgtacaagtccggagcccccaagaaggcacgctgggccccttgggaggatcccagtcccccttcgagtgaggtccgagccttggcaaggtcccgggacaagaaggaccctggcatgagtaagggtccggtgctggcacgtgtccagaccttcccctgcgctccccactattatcgcatggcttgtggcccgtgaagctaacgggccgagcctgacgtaaggcccacgaagtcgtgcagtctctgcatttattgcggagaggacgcg

SEQ ID NO: 16866 - DNA, 403 bp, Zea Mays
tattgtggcaccggtgtaggaattggacccgcagggacggcttgattgctcaccgaagtcagtcttccgccgctgaaccgcatagatgcgtgggcagcgttctgtgcatcgccatcaccggtaagaccttgacccctggactcaccccaacccccgctatgcgtagcaccgttgagatccaagtttgttgtgcgggtcgcgctatctaggcaccgcagcaatggcgctgccgtggtccgctcgggctttgtcgccgggcgctatcaggagatggaagatgggtcctacgccgttgatctaaccagggatggctaggattagatatgtgggggagtcatcctgtgtcgttgacttacgagcatgtggccaggatttgtgcgcggtgtaatccttgtgcaatcaa

SEQ ID NO: 16867 - DNA, 522 bp, Zea Mays
tcctgctgcaaaggatcgacgtcgcatggccttatcgtggtagagcctcagagtttgctggtaccgtgctgattgaattaccgtgttcagccgttcttcttcgagtacatcaacatcctctagcctagtagcctcggcttctgctatgctttcaaagatcaaccttggcgccccaaacttgaggtcagcaggtagtactacttctgacccgtagaccatgaagaaaggagtatttacgtgcaaagctcgactaggttgagttcttaggctccaaacgacgtagggcaactcccttatccactttcctgcaaacttttcgtttttatcgaagactttcttcctgagtgcctccaatatcatcccgttagctcgttcaacctgtccgttggctcttgggtgtgccaccgaagcatacttgatctgaatgctcttttgctcacagaaatcgaagaaatctaaacttgtgaagttggatcccaggtcagttatgatactgttcggtattccgaatctgaatattat

SEQ ID NO: 16868 - DNA, 372 bp, Zea Mays
tgtggatcacgttgccatagaaaatctggagaaaaagagttctgaagttgctctgtcaggcatgtagcaagaaactgaaactgaacttctgatggtacagtaacccaagtggatccgaacgccagcatagcctgctcgtcgccgacgaccctccctgcgctaagatttgcgccgccgttgtctcaactcgtgctcaggatgacttgataagcgctcggagcacaccgccggggataagcccggccattaaagaatccaggtcaccgtacaaagttccccgcggtagaacccgataagctcgccgataaccaccgcctcccggccgtgcgccgcgtggcctagccgttctacagcaccgccgtgacaccttaa

SEQ ID NO: 16869 - DNA, 408 bp, Zea Mays
attcgttcggtcgtagctagaaagttgcccttgggtcggggtacacccattaccatgaagggtccttcccagctgggggagtgttacggagccctgatttggtctggtacctttgtaggattaggtcccaaccctgggttcccatctgcatttgacgaaggaggccccgcctttggctgtggtcattcctggatgaacctatcagaaagctagacccgtggggaatctagatgggtttccggaggaaggcaggcttcagctccgtaggccgggggacatgggatcccgctggtggtccgcctagtcgtcgtcgtcggagtgggagtcttttgcgaagacgtccttcaggtccccttcgggtgactgatacccgaggtcctgttcagccgcagccacctcgccgtcgtc

SEQ ID NO: 16870 - DNA, 456 bp, Zea Mays
gtcacatcttgccacatagcgtgtgatttcaatcttcatctttgtccaccaataatgttgttttagatcatgatacatcttagtgcttccaggatgaatagaataatgactaagatgtgcttcatctagaatttgctggcggatctcatcatttttgggcacaactatgcggttcttaaaccatacaacaccttgatcatctcttctgaagcagttggcttttccggcctgtattttctcatgaatgtgtttcattccctcatcacttctctgtgcgtcaattattctttgcaggaggactgactcaagcttcaagtgatttgaagttccatgtggaatcattcctaggttcaacttctccatttcttgacataacgtaatgtcagaagtcttcattgtaagacaatgacagaaagccttgcgacttaacgcatctgccactacattagctttgcc

SEQ ID NO: 16871 - DNA, 591 bp, Zea Mays
cattggtggaagaaattttggaggaattagcaggaactcgttactttaccagtctagacctcacagctgggtatcatcagataagaatgggagagggtgaagagtttaagacagcttttaagacacatttgggacattatcagttcagagtgatgccttttgggctcactaatgctcctgctacatttcaatgcgctatgaactctattctagctccctttcttagaaagtttgctatggtttttctggatgatatactgatctacagtgctacttggtctgaacatctatctcatattcgactggtttttgggaagatgagggaacaccagttttttctgaagaagaccaaatgtgcttttggcaaaactgaattgctttatttggggcatgtgatatctcagcaaggggtggcaactgatccctccaaaactgatgctatgctaagatggcctactcctgcttctgtaacagatttgagaggatttcttggtttgactggctattataggagatttgtgaagaattatgggatgattgctaagccacttaccaacttattgcagaccaagaattttcagtggaattgtg

SEQ ID NO: 16872 - DNA, 306 bp, Zea Mays
gcgatggggaggatgcggtgccgccggcggcggaggcggaaacagaggcggcgacggcagggtggcatttgtttgggtggtggaaatggtagcagccgggagcagtagcagcaaagagaagaggagggggaggaaggcgggaggcggcggcagaagcattgcgcgccgcgatccggcggcctccaccggcggcacgggtggagactggagagaggaagggggggttttggtttggggctttgggaagaaatggttcgggggtttggctgtgtctgtgtgggtgcagcgtgcacacgggagagagag

SEQ ID NO: 16873 - DNA, 440 bp, Zea Mays
taaaaacactaattctcgtcggcctatacagtgtagtcgatgggagttgaaaggttacgtggtcacagggttttgagtggggtccaaaaggcattaaccgtcggctgggttcgtggtcgacgggaattacataaccctatcgattgcgtgtggctgatggtaattcgtgttatccacgttaccttctagctagctgacagtagttcgttaactcttgttggctggcccaggagtcgacgggagttaatacgaccgacgggtgtaaggaaaatggaccttgggacatttggctaagggcatgtttgtttggtctgaattgggctaaattggaatttgattccaagataaacttgtttggctgcgcctgaaattggaaatcaacattccactcactttcctaacctgaatccgaagcccacgatagattcctacctcctgaa

SEQ ID NO: 16874 - DNA, 454 bp, Zea Mays
taaactaaactccatgtgttcctgtcgatcctttgacccgctcaccgtgccacacttcccccttacatctcggttaggtcctcaaaccttcctcaaccctcttgttccactgtggtagcctgaacgcgaagggaactttggtagtggtggccaccgtagcaattgttctcggttcaccatagctagcttcctctagtgggtaacactcttggttagctcatgttttaagatccctaagtgaacttgatgctcaccgatctgttcttttgaacactatcgtgccaggctcgtcgaaacatcaccgcacaaccgctgaacaccaccgtgtgggtgtcctcgcgtcgaccggctaaaccaatggcccccaagctaaccaatgtaagaatcacatgtgagatgtgttgtgatgctagccatggcctcggattgaacgctactgcgttgtgggtcaaac

SEQ ID NO: 16875 - DNA, 389 bp, Zea Mays
atagcggcgataatttgtgtcgtccttctcccgttagaatttggcgaaggaccaagtctcccactacgaaggatcgatgtcgtatagtcttatcatgatagcgcctcagggtctgctggtatctagctgattggattactgtattcaatcgctcttcttccagtacgtcaatatcttctagcctggtagcttctgcttcagctatgctttcgaagaccagccttggtgccccaaatctgaggtcggcaggtagcactgcctccgaaccatagaccatgaagaagggggtgtttccatgtagagctcaactgggttgagttcttaggctccagaccacataaggtaactctctgatccacttccccgcgaacttttcattcttgtcaaag

SEQ ID NO: 16876 - DNA, 353 bp, Zea Mays
gtggaattgatctacctcccaatcgacacactcggaggatatttagacaaccccagccacaaccagcagagatggaccctccaccactgcctccaccagtcggagttgacccaacaattgcagcttagatgaggatgatgcaacagatggcagacaccatggcggatatgcacgcacagatgcagcaggaatgccaagagatgcgccaggagagagaggatatatggcaggaaatgcgccaggagctagaggagatacaccaggagagaagggcacagctgcaacagcaacagcaacagcaacatcagcaagcaccactgcctccacctccaccaccagttccaccccgggac

SEQ ID NO: 16877 - DNA, 474 bp, Zea Mays
gcgggccagatttgttccttcttattatgcacatgatatgttaaacaagttgcaacaattgagacagtgtactaaaagtgtagaagattattatcaggaattacaaatgggtatgctgcgttgtaacatagaggatgttgaggaatctgctatggctagatttttgggcgggttaaatagggaaattcaggacatccttgcttataaagagtatgctaacgcaacccgattgtttcatcttgcttgcaaagctgaaagggaagtgcagggacgacgtgctagtgcaaggtctaatgtttctgcaggaaaatctacaccatggcagcagcgcacgactacatccatgaccgatcgtacaccaggaccaactccctcgccgagtcgaccagcaccaccgccttcctccggtgacaaaccacgtgcatcttccacaaattcaaaaaccaaatgtgcccagaaaccagcaggtagtgc

SEQ ID NO: 16878 - DNA, 644 bp, Zea Mays
atcccgtcgaccaaagccttatattaaaaacaaatgagtacaaagacagtaatttgctaggagtatcgctagaacaggaaaagccaaattacctgaagattagagaagaatgacggaaatcccaagtcacgagaagctaggtggtggctcgatgaaggaatatcaaccggggcaatctgaagaacatcaccagggattaattcaacaccactaacaggaatcagaactccagcatctggtgcaccaacctctaaggcgactccctcacttgaagcatgcgctgttagtacaccactagagtgtggtggagaagacctgatgtggacatccatggaggtatgagaaggggagcccgctcggacaccctcaggggctgggttgtagcccgtactgcccatcggagccggatcaccaccggcaacaccctcgggggctgggttgcagcttgcgctacccacacgagtcggatcattaccggcaacaccctcaggggctgggcaaccgctggcaccacccttgaggactgggttctctgcaacagccacctctaaggctgaaggattctcagtcacctccatgggacttgaacgaccttgaccaatctcttggctctgaagaccgccttccaaggtcgacgatgcacg

SEQ ID NO: 16879 - DNA, 477 bp, Zea Mays
gtcctatgagccaatgctttacataggagccctgacactctcgagacgcacctaaggtaggacagcttcgcgccatatggctacgacaccacaaggtcacccacacgtgccatggagcaattgagataaagatatcgtccatcacatttattgtaggaagcaatattagagtaaaaatatcactttagtctcgcatcatgttgcaggtgtatccatgagcactatacagtgcatgcgctttcgacagctaccaactacatcatacttgaagttgtgggcacatatactcaccatcgtgcttcatatacgatataatgagtatgatagaagtagttggacttctattgggcagagcatgttctccatcccaaggatataaatcacatataccgtcagatgccctcttttactattgactttccaatgtctaaataacttggtttctgatgtcacagtgcgctgtcatcattcttggca

SEQ ID NO: 16880 - DNA, 752 bp, Zea Mays
gagttcttaagtagtgttcacaacgttcaggtttgatacccttacacaacacccgcacagagaacttaactccgcccacacacagagagtggtgcgcggttacacgcattctgggccttggagtcgagggttggcgcgacgctggcgacgtggatgctcatctgccacttgggccacttgctcctgtgcatcgggctggattttgacctcctgttgctgggcttctgactgaagactgtctggtaggatcatattcctggtcccttgaaggcctgcttgaacccaagcaggcgtgcctggaaagcactgctgaagtgcatccttgtcctcccaatgcaagtggtgagttctcgaggaaggccaaaccattccacaagtacctgctgcacaagatggttacctttggttaagcccctagtctgtagaatcctgtatggaacgctgtgttctggcagggaggttgacaatgttgatgatgcggcgcccttgaagccagttgccattttcagctgagaaacatgaaccacaggatgaatgcgactcgaattaggaagttccaaacgataggccacattaccaacacgagcagtcacacggtaaggaccaaaatacttaaaagttagcttgtggttggcatgagataggactgaagattgtacgtatggctggagtttcatgtaaacccaattaccaactaaaaaggagcgctcagaccagttcttatctgcttgccgtttcatacgatcctgagc

SEQ ID NO: 16881 - DNA, 425 bp, Zea Mays
cagggcgactctcgccccaatccaaagtatgatgcatgccgtaagcttcgctatatctttctatatgcgtattacttgttagatttaaccttgggagcctttggcagggatggcactactcgccggagcaccgcaccgccgtccctgggaacgcgccgctcgggtctgcatcagggtagaagatggatcctttggcctttgatggcagattgaaccgtgtggattgtaacgatggtaccgattgggttagatgttggctatgtcgttggatcgagatcgggtgattggaattgcatcacgacatttaaaatcgtgggcgttgaattccaatccgaggggtcgacagcacataccggttcagtattatggagatttaatcctagccctagatcgagttcgggacgatccagaatagtgcatacccc

SEQ ID NO: 16882 - DNA, 707 bp, Zea Mays
tataaaaaggataacataaccaattgaaaccacacatgcatgcttaatttcactgcttaaatgagaaaataaaaaatattataataccttaagctctgaagtcttttttgttctctgaatacttgcaatccttgcacctgtaaaaaaatgaaagcattagatggcgtgctccgcagagatctgacggtgttctcaatcgcagaaataatgctaatcgtagaatggacttgtggtgttctcaaatcacaaaaggacaaaaaagcaaatcacaaaaggacaatggatctaatggtggctgctcggcaatggaaaaaaaaaatccaaaaatcgttgttgttcgtggactactcggcggccatggctgctctgcagatctgatggtggctgctctggccgcatctcatatgcctcggcagatccagaagaagcaaggtagtgtatgggcacagggaaacgagatgcggcggtagatgcggctagaggagatgcggctggagactaggggcacacggtggccgcatctcatatggtggctggaggcatatgcggcggcagaaaagattggggaggaacgagcgacgggaggagcgtacctgccctgggagaggaatggagacgcgatgtgctcccgagcggatgagttcgggtgtttttttggagcccagagatccttcgtattggaagaatattctatttttggagccact

SEQ ID NO: 16883 - DNA, 533 bp, Zea Mays
actaaaaccaagaagcgatcatgctatatatcacttcgtatttatacttatggaaagattcagatctatacatgttcagtattggaaggaaatcacgtacggtactagcaatacacggatctgtctgaagtagaattaggaaggagtcatgtcagctggttgtttcttgtgtactgtgactagttcagttttctgtttggcaagctgacataaactctaaattcggcacttttcagttacaaaattcttgttttggcaataatttcaatttgttaaggtgacataacacagagtataatataggataaggagctatagtctttatcaaggcagacttgcttttctttccccttttttctgatagaaactggtggtcatatgcaagtaggcatctggagttattccccaatgattgcttggtatatgccgttatttgttcaacactgagctgattggagtagttctatcgaatttatgggtggattggcttaatagtcatatgtgattggtgctgttgactcatggatttggtg

SEQ ID NO: 16884 - DNA, 458 bp, Zea Mays
aaattatcatatcctcttgcatcctacacctgtgtaggattagatgtaatttatgtttcttatagtgaaaagatccagctagatggagagggacatttgcttcacataacagtgacgcagtgtggattgtttattgaaaatatacggcaagattgaggtcactgaaagtgaaccgtcatgtagtgtggaaagagttgatatattgatttattatggtccggggcaatggtctatgcacctcttgctatctttattgtctttagatcaaaatgcattggaagtgcagtagttccaataaattggcccagggcgtgatcggatcttcgaaccgaccctacatgtaagggcatattactcgccttatccctactactaattaagcatgcaatatgggcgccaggcgcgtccatgcccccgcctcccctttcactgccatactagacccaccaagtaactcg

SEQ ID NO: 16885 - DNA, 517 bp, Zea Mays
cagcgcgccatctagaccaccaaggtcctcgaagccttcggcatgcgccatctgcagcaacagcacactcattcagcaaaaccacacatacccacacctataaccacacaaaaatagcctttacctgatctatcgctcggtcggactgctcccggaccgtttctcggccgtgcgagccccacatcctgtcgaagagcgcccccgccgactgcttcaacatagggtcctcgaccttgaagatttcgcgttcaaagttttcgtccgactggtcgaagacctcgaaatgcctgcacccctcacgggacaaagcattcatggcccctcgcaggtgacgagggaggcaaatgacatgagacccgtcacgatcgtttggagcacccctagctcttcctgcatccattcaaggaagcggaggccccttcttggccgggtgcctcgaaggcagcggtccacgcacccagttctcggtacgcgtccacgaactgcgcatgcgtccgctcgacctccgcacgcatcg

SEQ ID NO: 16886 - DNA, 317 bp, Zea Mays
gttgtgcagctgctgccagtaggtgtggctgattgaccacaaagtttgcctagcaacgtcgctgaccgaagtagtgtaggtggatagcggcgtcagagactcatgtgctgacagtcctgaagcctctatcacctgcatccactaccctggcatgaatgcgagtgatgtagtagcaagcccgaggaggctcatacactcgccttgtctcatacaggggtcagacgtaggttcccaacgcgtgcagaacatcctgcagcaggttagggaagtgcctgtttcgaacattgaggtgtaatgttcaataacaggccataacc

SEQ ID NO: 16887 - DNA, 405 bp, Zea Mays
agcagatgcagttgcaggggaagcttatcaccgtgcctgtagccattgcaacgtggccggaccgccggtgtcgtcgtggacactccggcgatctcaattatgccacaccgtgactcttcactacgcggtagtaaccgtggcacacttaggcttaccctctctgaaccactgcaccggtgaacgccacgattgcaccaccagtgatcttcttcctctccgaccaccagcgcgccattccaaaattgaaggccaccgctcttgaacactataaattaagcacaccgctagctccgttaggtaatcacgaagccagagcacccgctcctgcctccaattagccaccatagctctctaatttctctttctccacaaatctgtttttcgccaccgtgaaagaaccctcgc

SEQ ID NO: 16888 - DNA, 1241 bp, Zea Mays
ggcgaatggctagtcccgcgaaggatgtaggcattttgaagtcttcgaccgggcgatcgaggacttcgactgtgaaattttccaggtcgaagatgatgtgttgaagcggtccactaggcgctttataacaggatgtggggtcctcatggtcgaggcactgtcctggagagggccgatcgagcactggcacagtttttttgactgactgaattgttttgttgccttcacagatgatgaatgaagaagttgatgacctcgccggtcttgagagctcgatgactcggatgggtggcatggaagaggtgggagttgaagggcactcagcacctaaggctggttccggtgaagacccggcagcgtctacttcggcgcaggttgaagaaatgcgctagggattttaggttttaggtgatttactttttgtgatactgaaggtcggttgctgcacaggttccgatgtctaggcctacgcaagaaaaccctgatgaagttgatactaatgttttgacggctgcaaatgcaacgtctcttaatggaaatgtgtctgaggggtctgagcttgggtcatagtcttaggacggggaggaatttgggagtcctttctcgtgggttgaggaatcttctgaggaggacttagattattttgttgcattagatttggccacgtcggggagtcctttcttgtggattgaggaatcttctgaggaggacttagattattttgttgcgttagatttggccacgtcggagtctccgctgcgatctgctcctcgcgaagcgctggctacatcggccgaggcgagggctgaagactcgcggaggcgaagggtggttgtgtcgaaatagagcaccagtgagacgtcacggagtggaagacatcgccgaatgggtatggaaaggtctcgtcttcgactggatcggggtgatcagcgcgagctactttcctcgacgtccggaacgtgcatcagagagggggacttgcgggacctatttgagggggaagagttaaggatgatgttgtttaatttctgagaggcgggtcttattccgaaggtggagcctatgtgacattttcgttgccctcactgctcttgttgcgattgtgagtgaaaacgctgccctccccctcttcgcaatagagttgtgagggtaacagtcgtgatttgtattattgcgcaatggtgtcgttgagaccttcgtttgttgtttgtttgtgattgcgagttgtatgttgtgctatt

SEQ ID NO: 16889 - DNA, 449 bp, Zea Mays
aaaaatcttcagattcatccccctcgtcgtcggtgaccaccgcgcaaggattcgcggtgattcgtgcaggactcaggcaggatagtaccggggggaagatcggaagagaagtggatttggtcgcgtggtgaagcttatcacttgcgcctgtagccgagcgacgtggccggaccgccggtatcaccatggtactccgacgaccacaattatgccacgttgtggctctttactgcgtagtagtaactgtggcacgcctaggcctaccattttagaaccgctacaccgatgaacaccacgactgagccaccattaactttccttctctccggccgccaacacgccatgccaaaattaggagtcaccgcccttgtactctataaattgagcataccactagctcagttaggtaatcacgaagccagagcacccgctcctgcctccgattagtc

SEQ ID NO: 16890 - DNA, 447 bp, Zea Mays
aaccatcagcaaagctacatgtgtgtgacagctcattttgtcgatgaatcatggcaactacaaaagaggataataggctttttcatggtgaagggtcacagggcagatgacataggaaaagacatggagaggtgtctggctgattggggattggacaaggtgtttaccatcaccgttgacaatgcttcagctaataatggtgcagtttcctacatggcaaaggtcacaaacaaatcaaggactagcgtcttggaatccaagttacttcacatgagatgtgcagcacatattgtgaacttgatagttcaagagggattgaaagaggttgacatatctatcaagcgtgttcgtgctgctgttaaattcattaagagctcccctgctaggattgccaaatttaagaagtgtggagagctagagaaggtaaacaccaatgatttcttgtca

SEQ ID NO: 16891 - DNA, 358 bp, Zea Mays
cgctgtcgcacggccttgtcatgatagcgccttagagtctgctggtaccgtgctgattggattaccgcatttagccgttcttcttcgagtatatcaatgtcctctagcctagtggccttgacttctgttatgctttcaaagatcaaccttggcgctctgaacttgagatcggcgggtaacactgcctccgacccatagaccatgaagaaaggagtgtttccatgcagagctcggctaggttgggttcttaggctccaaacgacatagggcaattcccttatccactttcctgcgaatttttcattcttatcgaagacctttttcttgagtgcctccagtatcatcccgttggctcgct

SEQ ID NO: 16892 - DNA, 955 bp, Zea Mays
tggcccggggcgttaattttatagagctccgccactgtctatggccgtgcggatagagcgggtgcagtgcgtgaatggatccgtgtggttcacatcctgcataactcgttgaaatcctgccactttggtaattgaaattattgaaggagagagtaacaaaaatggtcagaacacaaacgtagtgtactagtctgctattgaagaagttaacgtttttgtgagatgggacacaaatggactgttatgaacttgcaaatgaattgttacctgcaaggaaaaatcaacttcgttactactgtaacttgccatgaagcttatgctgaggactgtaatctatcagttgagcacctctacacagtcatgttgacttgcgccagagcaaaaatttatgcacagtgtctctgctttcaagcgatattgttttcagttaacacctatacgtactatcaactcatagaaaagttaggcctcagctgtggacctgtgatcactagtcaagacatcaacggttgtaacatgtagtacatgtctggtaaatatggcgacatagtaagtataaacataagctgttcttataaacctgagatctttttgttcatcttgaacgcatcgcctattcttgacttcttgtaaaccaacagaaatatgttgccttttggcgcttcttattattatataaacagaagctgaaacccgggggtcgcgctggtgatcatcaggtcattcatacatcagttaagtataacaagcatagaactgacagcaaatcctacctagtctgcatatgtgaagttctagtgtcaatattgaacataaatatctgaagtctaaagtttgaatttatagtatatcaagtttttctcaaaagttgttgcttctaaaaataactagcctaaacacttaaatagtacgaacactcactccaatagtctgtacctatttatcatggttatta

SEQ ID NO: 16893 - DNA, 618 bp, Zea Mays
caaggattcacgctgattgcggtgattcgtgcaggatattactgggagggtaggatattaccgggagggtgaaaagatcgggaggggagtggatttggtcgtggggtgaagcttatcaaccgcgcctgtagccgtgcgatgtggtcggactgccggtgccgtcgtggaactccggcaaccccaattatgccatgccatagttctttaccacgtagtagtaattgtggcacgcctggacttaccatttcaagaactgttgcaccggcgaacgccacgactgagccaccagtgacctcccctctctccggcagccagtgcgccattccaaaattaggagccacctccctgggacactataaattgagcataccgctagctccgttaggtcatcacgaagccaaagcactagctcctgcgtccgattagtcaccagagggctccaatttctttctctccccaaatcagttttccgcacgtcgtgaaccaccgcgtcgtggccagccttctgcaggttagctcaagcctccttgattgatgttctagcctccctcaagttctctggtactcatagaccttttggattgaactagatcaccctggataacccagaacacgtcg

SEQ ID NO: 16894 - DNA, 397 bp, Zea Mays
ctggaatagttcattcgcttgaagcaaggaggaaactcggtgatgcaataccccaccaaattgaaccatctctcccattatgctatagagcaagttgacacagacctggaaaagaagaattgtttcatgagaggtctgaatgatcgattacaacgaaagatggccacttgcctagatctcacttacagcagggccgtgagcacagctctttcagtggaagccaagaatcggggtagggaaagacaaaaagatttgggcgtgaagggggtgaaggatcctctcaaggatccgagaatcggtcgaggttggtaattcgtccttttaacccaaatcgctcttttcctcgtccacccgcctatcctttcaagcaaccagttttcatccgtcccactcctac

SEQ ID NO: 16895 - DNA, 383 bp, Zea Mays
agcttgttctgctttggtcctgtactgcgactgcgatatcgatgcgtttgtgtggataatgtggggaactctagttgtttaaattttttatgaatgaccaaacgcaggttcggtttctacatttggaaactgtttattctatcaatgatgcacttccatgtaggactgaatgctcttggttgggtgactgaatgctcttggttgggtagattatacacggctaggttgtttgttgggatttagttggatcacacggctagattgtttgttggtgatttgggtagattacacggctagattgtatgttgcgtttctcttactcaataacctgaaatagccttggatatattacttgttgctgaaaataagattggacgctaaac

SEQ ID NO: 16896 - DNA, 572 bp, Zea Mays
gcgatttccccttcctttcctcgctgctggcgatcaccgttgaggacctctggccgtggtccagtgtagtgctcctccctcatccttcacctggtgagcagtcctcatctcttttcccctctctcttctattctcagtaacctagaggagctcctccaccctttgtgacaatcctcaaaatcctatgaatccaagtgattgtgtgtgtgtctagtgcttcattatgttcctctgcaggtcttgagctccctagggagggtttcgtgcactcaaatagccatttcactctcgttccaaatcctcgcgcaccaagtgctcggtgaaatatccaaaccactcaaatttgctcaaatcgaccccagatttttccagcacccccatggcacctccagtagcactcatgccaacattcatgccaatccaatatcctagacaccgatttaccaccgtttcccatttatagcgattatttctgagccgagtgccacaaattcattttcttcgccaaatttcaaaccaagcacacacttcactcatatatacctactcgtgaagtatcagctcaattccaa

SEQ ID NO: 16897 - DNA, 1098 bp, Zea Mays
cacctctagagtttcaatatttgaagcctttttcactatatatctcataacatctactactttaaagagggagtagttgacatgtactccctttcgaggtccattagcagcgacaccactagcaccgctagtcctgcatctgtctgctcgctctccttctgctctgtattatgtcctccctctccgagcacaccaacaccgctcggttcacacatcctcccactcccatgtcttttcctctccgcattttgactagcggtggcccgtcgctccaccctcaatccgatcgcacaccggccaccatgtcgtatctagcctcacctcctcctccccatttcccccttatctttccctgccttcacatctaggcaatggtggtcgccgctccgcccccgatctagctcctccgtgtttccccgttctccttcgggtcatgccatcacctcctcgtcaccgtatcagccctacatttcgcccaaatccaatcaatggtggcacatcgctccacccctgatctggctcctccccatttccccacctcgttcgaccgcgccctcaccttctcctcctctccgcacgtggcccacatccgacaacagtggtagtcctcaatgtggctcctttttatttccccattctcttttggctgcaccatcgcctcctctctacatccatcccgcatccgaccggcactagttcatccctgatccatccgcacctccaccaccacgcctttgatcaagtcgtacccctgccaccatggcgcatcgagcctcgcctcgcctcctcctcgtttcacacttctccttcatcgcttgcacattcattcaccatggatcctctcccaccgctcaagccaccctcccctactccacgtccattgcaacaaccttgaccatgatttgagatggcaatcgccttgaccatgccatagacccatgaacaagtgcacaagctacactaccctcacacattaaaaagtagcaacactgctcccggtttccatctcatatatagaagatgccatcattgtacgccaattgttgaggtcttcattgacgacaagcaaccaataagtatgcccaccatgcccaccat

SEQ ID NO: 16898 - DNA, 993 bp, Zea Mays
gagtcgtccagaaaggtgttcgatgaaatgctgaaccggggcgcggcgtcgtggaacgcgctcctcgttggttacgccaggaacaagatgtgcctcgaagccctgtcggtgttcagggagttggccgcgcaggggcgggaggtgtctctcgatcaggtgagcgtgtcgagtgtgctcagcgcttgcgctgtggcaggggccctgaactatggtcgccaggtacacgcgtgcgctaccaaggtagggctggagctcagcgcggtttgtgtcagcaacgctcttcttgacatgtacaccaggtgtggatgctcacgagaatcttccgctctgctaaatgctgtgggttgcagggatgttgtcacctggaacatcatcattcgtagctgcattcatgacaatcggttcaaggaagcttgtgtgctgttccggtccatggtcaggaacggtaccttgccggatgatgtagcctttgctactgtgttgcaggcatcagcgtgtatgtcggcatgggctataggagcaagcatgcatgcctccgtcgtgaagacagggttcttatacagtgatggcgtcactagctcgctaatcaccatgtattccaaatgtggctgcttggacgatgcacaccgagcatttgtgggggcaaaagatcatctgcatataatgtcctggacggccatgataactgcactgcagcagcatggacatggcatgcaggcaattgatgtatttgagaatatgctagagaatggcattcctcctgaccacatcacatttgtgagtgttctctcttcctgtagccacagcggacttgttgagcaaggacgcaggtacttcgattcgatgactcgagttcataagatcacaccacagaatgagcactatgcgtgcatggttgacatgtttgggcgagcaggccttctaactgaggcaaagcgattcattcaccagatgggacctaagcaagatgcatcagtccttggggcactcctt

SEQ ID NO: 16899 - DNA, 502 bp, Zea Mays
gaaagaaggatggtactggaaggaagctcctggatcataaagatggcaatgtaagtgtttgatcaggcgaaggagtgggtatctctttctagaaggattttggaatgaagatggtgtccgatcgcatcgtcgttgtgttgacttcaactccgaagcattttggtctgtttgtggctgcttcatgcccttccttggcaggaacatgttgttgtcgttatcagttcgttgatgtcatttaggtttgtctgctatgtttatctgttttgttgtcgctacatgtggtgatgtaatgaccatgatgctattttccgagatgttctaggctgtgaggtttgttatgaccctagtattgctctcagtggttgtaatcctgaactatgttcagttacgtcctatttcttaatggaataggggatgcccctttatcaattcaaaaatattcactaatgggatagtgaatagattcaaggatacatttaattaatttacgtagtcagccagg

SEQ ID NO: 16900 - DNA, 486 bp, Zea Mays
attatttctctgtttttaaacatctctggactaggcctcaatttctggaaaacgcgggggcttccttataagtttcctgagactcagtcaacagtgtctatggactgcgggttggtttctggaaagcagaggggctcttatgcaaagttctatggccgaaggggtatggaatgctactggccgctcgatccaaaaccgagggcccagattagatcctatccaaagtgaagcggtacgatacttagccgtttgatcggggatcaacggtgcagatttaaaactgtcctgatccaccctgacccgcacgattcatgatcaacggttcaggtgagttttactgaagcggtacacccgatctaatcgtagccctctgttcccgatccaaaggccagggcagcccccccttctccgatggaggagcacggtggcgcgcgcccatccacggcggtccgcccgccggagatcacgaatccggcccatacgaac

SEQ ID NO: 16901 - DNA, 421 bp, Zea Mays
tgcggtatggtctttttgtgattggtgcggtgccgggaattagatcaatgtagaactctacttctctttctggtggcattcctggcaattcttctggaaacacatccatgaattcttctactacagatatgctttctgctgctaggttaaacaccattggatcttgggcgggtggctgagcctgacatgaaactgactttccttggtggtcagtgagaagaactgtcttatctgcgcaacttatgatgccattgtgcttggttaaccaatccattcctaagatcacatcaattccatgggatggcaagatggctaagtctgccaaaaacactaccccacttaaaagaatcctgacttgggagcatttgagatggcatagaaggtctgaccctggggttcgggtgaccaagggaatttctag

SEQ ID NO: 16902 - DNA, 579 bp, Zea Mays
gtgaccatgattaatgtcgctcaagcgtatgctggttgtggtgaccttggaatgtgcaagagtgtacatgcttatgcagttaaggccggttttgatttggatgtcttggtgacaaactcaatacttggcatgtacttgagttttggagatattgagattggaagagagattttcaggaaaaatattgttcggaatgtggttacttggacaatgatgatgggtttccttcttaagcaggtgcatgctggtgaagttataatgctctttgttcagatgaggtcaaatggcatagttcctgacagggtagcaatggtcagtttggtgcaagcttgtgcacttctgggtgatgcaaggagaggaaaaatggttcacaaccaaatgatcaccggtgggtttagtagtgagcttcctgcagttaattcattaatcactatgtattccaaatgcaaggatttaagttctgctagagtgttgtttgatggaatgaggaagaaaagtttagtttcttggactgcaatggtgtctgggtatataggaagtggaagagccctagaggggatgcttctatttggtaagatg

SEQ ID NO: 16903 - DNA, 495 bp, Zea Mays
ctacgagcttacccaaacccatctattaattcggctaactagcgcaacaacataggctgctatacatcctacacgtcggcttgcctgttattatcgcaatccgagacaacacatatataacaaacacttaacgaaatcgactcctatttaacatgagttggctaatcacagtagaagacttagcgaaccattttagacatcgtaactcaaaaacatgggttggagccgattaatcagtgtttcttaaccatttctcaacttaagctggacaacacacaagtcacttaaaacaccatgttttaggaggcctaacatagaggtattaacacatggcgtaaaactccataagacttacatttgctactcaaggacctaaagcacttatgtgcatatgttatcggattgttcttcaattttaaccaggaccgacttatgaatgctatttgcttccaataattgtttgggctgcgacaacgctaatacaagatttgtaat

SEQ ID NO: 16904 - DNA, 596 bp, Zea Mays
atttaatcgaggcagcacgacaccatgttcttgcagcaatctctcctcggccgcctttagacgcccgacaagttcgtcgactgaaatttcgctcagattgagcaacgtctcaattgacgctgcaatctggttgaaacgagacgggagagcctgcaggaacttgcggacgacctcctcctcggtgtactcgtaaccgagcatagccagctcacctgtgatccggccgatgcgcgcgctgaagtcgtctacggattcgccgtcgttgaacttcagtgcgtcgaaatcccgcttcaacgtgcttgccttggccttcctcacgtggtcgacgccgatattccatacccacagcatgtcccaggcgtccctcgccgtcgctttggacgccacaacttccatgagctccggcgggacagccttggagataaccgccagcgcgttccagtcgtcgacgaaactccccgctccggtgctcactgcgtcccagagatttcttgcctgcagcatcaccttcatgagcgccgcctagtcgaagtagttggttttcgtcaacatcgggtagttccccgatggtgccatcctttcgacgactcgctcga

SEQ ID NO: 16905 - DNA, 430 bp, Zea Mays
caatcttgcctcctcacctgacgaatggttcctcgaacctccgatcggatgagacccatgaggggcggtctgggatgtctggaaactgggtgttattgcctgtggatgagctcccatcatcccgtcaccagttcctcccctctacgcgacgcttcctcatcggtttgcattcgccaccacatttgacagtcgtgcttgatcctgggatagctatgccagaggcttcatggagagattcatttttgttgggcactggttttctgtgatatctggtggattatcaccagcaatcaccggagagaagagataagaagggaaaagaacacaggcaaagagaagcagacagaggtctggatatttggtttttgttcttcaatgccttcttcatttcagacatttgcctcttatacgcgtggccaactcgcctgcg

SEQ ID NO: 16906 - DNA, 833 bp, Zea Mays
caaacgtacaagtagtctaacattgagaaggatcaactttggtgcattgctggcgccaaggggctagcgtagcctgattggaggtagcaggtttgattagctgttagatcgacttgtgtttttttgaagaaacaagcatgattgtagctctgtaatctgtgcatctgtgtgtgtgggtatattgcatgtttttgtgtgccttgtatttttatattcaaggaaaaaaatgcacctcaacacgtcttcgtccacgtattagaaattccattatttatttttcgcagtactccgtggagacatctccattctgtatcccatgcatatccatattgaattcatatctggtacatgatacgagggtgccttatgtatccatgtaacttaggctatttgttgttgttagcacttttgctgcattacttgatgttagagtaactatgtattccttgtaatggggtcttgtgtaatgggcttaggcccaacaactctaatatatacatcacccaacccaagttagggttaaggtttacaaccttcaaaatggtatcaaagctaggtttagcccccctctatccctcctacgatcaccttcgtgtattttggtgtgcctcctatcctaatctttctgccattgcccctcataagcttgcgccccgttccactcgttgcatcttccttgggtactcctctgatcacaaggggtaccggtgcctagacctctccactcaccgagttcttgtctcccgtcatgtcgtcttcgacgagtctgacttccctttcttcgtatcctcttccgctgcctcctctgagtaggacaccctcctcgagtgcgg

SEQ ID NO: 16907 - DNA, 331 bp, Zea Mays
gcggctagctctctagctttactatacaccgcatgccgcatgcagctagcaggagagcaagtagtggatggacaccagcccagccccgcccgcgccgtacggccaaatgacaccatacggccgactgcggcctgatgagccctgtcacaataatggcgatgctcgatctccggccgcgagatggagagggcaccacctggtccccggccggccgggcccgcccgctggggaggacacaccgttgatgcgcgagggcgaaggcgaaggccggcgacggcgacggccgtatatggatctgctgttttgtttcggctccaagtcatgacacata

SEQ ID NO: 16908 - DNA, 869 bp, Zea Mays
cacccattggggtcagcgtcagacgggctacacacattgggttcagcttcagtaaattcaggcactggcacttccttagcaacaggagcagaaggattggcaccttgatccaagctaaacacctgacgaaggcgtctcttcttctttttctctccctcagcaggaaaagaggcttggtcaactcggcgagaacgttttggacgaacattgacaggcttctgaacgtccaaggctttatcagcttcagggatgggaaccaccaccaatgtttcagtaggagcagcatcagaagaatccccagccaacatatccagcatggcgcttatctctgcatcactaggatccaaaggcacttcaaagtggacctgccgttcatcatcaggaatttctccaagcgaagcaaccaaagcactaacttcttcgacagagggtcacactctaaggcccaaaccgccatcagcagaaggaggatttgacacgaaatgagtaaaggctttggaaggaggcaggctctaggccgagtaagcaacaggggcgccaatatttgataccttgcctctaagtatcatttcaagccggttcgccaaatccacaacaggaatccttctgttggtgacccgggttgagtcggctagacctcgatacagataggccggatatgccctgtctttcaacggctgaatattcttgaagacaaagtcagctaccacagcctcggcagtcagacccctccccttcatcaatccaacttcagctagcaaagcccctgcttcagccacctcctggtttgtgggggactcagtctaactcagagtacgaacatccggctgtctccctgaacggggtgggagggaattcccatgattttc

SEQ ID NO: 16909 - DNA, 426 bp, Zea Mays
atgggagctggatgtttcagtgacgtgttgggtggctagcgtcggtttgggcagggattgttccaggagtcggctcaagccggttcttagccctctggttctagttgacgtctaggcgtccgccgcggtcgctaggcctagcgacgtgtaggatgttccggttgtgtggtgaagctttagccgtagtggattgggtccacatggtgtggactaagcaggggtttcgagggccatcggctccacgtgccacttaggcatggatccgatgcgagcccgggagaggtggttggctccttatagccgatacgacccggggagccgaacacagctcggactgatgtttgcacgtgtttgtgtatgcagggaacctattcggagcacgtcaacaccttcctgatcggctataggtcaggtgacacgacatgc

SEQ ID NO: 16910 - DNA, 891 bp, Zea Mays
ttggctattggaagttgggttcggttactatgcttatgagtcactgacaacttacggacaggtccctctactttcttttcttccccaaaccgctccctggccatggcgcgcacacagattgtcaccgacgtggtttgtaccggccatggccggcgacggcggctacggcaaactaccggggaggcattagcgactaccagagacctcgggacacctaacaatttggcacgaacaccctgagaacggcttgtccatgtgcacggcggaaaccgagcacgggagtatacattcccgcggattgggagtggtctagttcgatttaacgggtcggtgagcatcacaagcttatggagttgcagaaacaacactcaatttaggcagatccttaccagagcggtttggccacgaacgggctgttcttcacggggcggcggaccgatttaggggaaaatggcgctgcggcgttcacgagtggaattgagggcagagctttgggctatacggctataaggggttctagtcttgctgcgcacaaccaatttgggaggagggggcagaggcagcacgaatttctgcttcggttcaacctacggtgtgcgcgatgctcatacctcaccgcggagcatggctatttatagctgcgccggcccagtggtcacctcgcggccgagaagagcatcactatggcatgtcgaccacgtcggtaaaaggtacagggagggagaactacggcatgcgcgccaccgcggcggaatttcactgagtcacggcagccgccggtgagtaacctcggccgagctcagggaatggtgccacgtacgagctattcttccccgacgttatccactccataccgcactcgaagcaggacggcggcagcgtgaattttgg

SEQ ID NO: 16911 - DNA, 389 bp, Zea Mays
gtggaaattattgttttcaagtcatctagtcgaacctagtcgtataactaccgaccagtcgactagttgcgattagtcatcgaccagaccgactaatcgagcctaatgcaagtaaagcagagcagcaagacaaactcatcttttcggtgtttgatatcggcagatacacaagaggtaggcctagatgatgaaccttgaatacggggggcatcgcctggggcgacaatagtgcagcacgggtggtcgtctggaactggatcttgtgggcggcggcattgcgggtttgcggcagcacggacggtcgtctagaatttgcgggcggcactgcaattgggcgattgcctagaactggatcttgtgtgcggcaacgacattgcggtagcacgacc

SEQ ID NO: 16912 - DNA, 1105 bp, Zea Mays
tttggacacaacatgctctttggctctgttgcaggaggaggtcgcggattcagggcgacgtcgtgcattccctcggtttgaatcgggttcgtggtcgaaattagagggcaaggggccttttcccttaccttctcctccttctggggatcggaatgtgtcatccaactctgatacacgtccagtgccaccgtctaagtcagtggatgagcgactgggtgcactgcgggcttttcgtagggccaaaggcttgtgtgatagatgcgcagaaaagtggcataagggccatacttgtgcagcaacggtgcagctctaggccatgcaggaggtatgggagttgtttacccctgaggagttgccagagcagcccgagtctgaatctgtacatgaagaccaaatgtttttagtggtgttgtctgaggctgtgagtggtggtccagctaaaaaggctttccaattgttgggttggctacaccagcgggaggtttccatcttaattgattcaggcagtacacattcttttgtgaaccagtgcttgattcaacaattacctactgccctgttagtggaagcacatatcaaggttaaggtggctaatggaggtattatgcactgctcttccgttttacctcgagctgaatggacgatacagggttatgtttttcaccaagatttgaaggtccttcccctgcagcattatgacatgattttgggaatggattggttggaggttcacagccctatgcatgtgcattggcgtcacaaatggctttctattacatatcatggatctttcgttacattgtatggctcagactatggggctagtgagagcttgctaattcagatatcatcagtgtctgtacccgagcctgcaagtgagagctccaagttttaccctgagattgagtccttactgtcccagttttcttctgtgacttcggctccaactttgttgccaccagtaagaagttgtgatcatgctataccattattggtgggagccaaaccagtaaacatccgcccttacaggtacccacctgcacttaaggatgaaatcgaagcacaagtcactcttatgttacaacaaggccttattaggcccagt

SEQ ID NO: 16913 - DNA, 974 bp, Zea Mays
cgagggccgatgataaatctgtggtcagaattagattctcattgtaacgaaccataacgctataacgaccgtcagatcaaggtcagactatccggatcacaggcgcggagggactcgaccagagttgcacatcaaccaatctacgaccctgatcgggtcggatcaacgcggcaatccggttctaatccacaccgtctatcaccggatcaatgacttgacactaatcccccaacatccgcctagatacctaatcttaaccgtctctccacgaatcaacgatcgtgaatccgcgacccccatcctgcacgactctggcagcgctgtcaagtctgcagcggcggagccttcactggcgacatcgggttctaagtgccagggctctataccccaaattaatccgcccaacgcaacaccccctaaccctagatctggtacgccccgcatatggtatcagatagtgctccacggacctcggtcacggcgagtagctgcgccacggcgcaatccagcgctggtgagcaattcacagctgataaggcgcttatacgctataacacttgatggtacatcgcatggagaagcaggaaggggcagtgggagatcttcatcggtggtgacgccgcgaattgatcgacccgcggtgtggggcggaaacacgatagagactcccgccaatgtgtaattcgccgtgagcagggcatctccgatccctggcgacctccgctctagctactgcggcttcctggtgacctccccagcgtgtaaccggatcaaatcggtggcgagccgtgggctgcgtgtgatggctctcaattcgcagcgcgcaatggtgaccttcacccaattacagcggcgtatgacaatggctaggggcagtatataaatggacaacgcccgaacgagttgcacacggacggtattcgggcgggaggtgcggcggatctgttatgcttcacaagcagattgcgccgtgg

SEQ ID NO: 16914 - DNA, 457 bp, Zea Mays
gatacgaagtctactggacaaccatctcctctccgcataagagggcatttaaaaattgtcaatcatgggatctagctgacattgagagggattatggggatgtggacacggaggctgctagacgaccaagtttatgtggttcctgcttgtcgcgcgaattggggatgcagagagggagtttggtggagttggtcttagtccaacttgagcaacacgccacatccccattttgcacgctctaagccacttcactacaacaaccttactattgggccgtttaaaatggaggcaaccgcttccactcccttttcctatggtgtattcctcatctgcgcaaagcaaaatggggatggagagtgggaaggaaaggctgctggagtgatgaacaacgtcttgtagcgtatagaatgggggtgcagagtgggatggggaggctactgaaagagacgaatgtgcg

SEQ ID NO: 16915 - DNA, 522 bp, Zea Mays
ccgcgaagcattgctcggatcgaagaatagccttagggatcgttgagcgcgcggggtccggtgatggcgccgccgcggaaccagtgcgccaccgccgccgtgctcactgtagattggtgcgcgaaatctcggccgtcgatcctctgttggatggtcgggattagaaaaccaaataacgcttcggcaagggcatatagcgatcgttggatgagtatccagtggcggggagtggctccagcgttcattagatctaagccgtaggatcttgatccgatggccagtagcgcgtaccagttcgcaagtgtggtgatctaatctggaccctaggttgtagatcgggcggtcagaaacgcttggtaccccttcggcctgcaccttttgctaaagagaccctagggttaaaggatatcaacccgccgtccagtgagtggagcgctgtgcctgggaaattttatgcgagcagcccctgagttttctggttattgaggcccagtccagtcaactcgaaattcagattaaaat

SEQ ID NO: 16916 - DNA, 451 bp, Zea Mays
cccgacccgatcctagcggttgcgcgcgcccttcttgacgaccctcctcactaatcgcgcagctgcgctactcctaccagcgttgttccatggcgtccccccaccatacatgagctttacctcgcccgccgctctcgtgactgtgcgtgtcctcctccacgacgaccagctcatccgaggcatgttcgtgtccttcgatccagtctggaaccctattcttcgagactgcgtcgaggtccaccctcaagcgggccgtcacgtgcctggaccgcttatcttcccacgtgctgcgatcgccttcctagcggttgagcccgtgtcatctccctcccttcctagtgcctctgtcggggcaccttctttggccctctccgctcacaccgtaccttcgccacttccacctccccgcaccaccaccgattgggtggttgactccggggcctccttccac

SEQ ID NO: 16917 - DNA, 322 bp, Zea Mays
tgataaggcagtcgaacgagttcgccctctttcttcccttcttcaagcttcagcataccccacttcttcagcgttgggaacactctgttggctaggtattcctacactatgtccctagacccaatgtgttcagacacaattctaaactcatacacaacatcttggcatggatcccccggtgtcatgttgcattgaggtctagtcagcccgaagattagcttcagcgggctttgaactagcttctccttttcttcatcaattttaacataaaaccattcagatttccaaccggttggccatttagtgcgatagctgaccaccg

SEQ ID NO: 16918 - DNA, 472 bp, Zea Mays
caggagcagcaggcaaatcgccaatcagactctggccccacctgcaggctcgcatcctcccctgaggcgggcccgggggccactgtcggtaccctaaatcaggggtaccctctactacagtataaagacattgtacacgtacgacgtctcctggccacacggagaacggcatccgaccccaccacatgggcaggtctagaggcaccacgtggcaaggagagataatacaccccaagatgcaccattgggtccggacctccacagaggaacaccggacccctgtacacatagcccggaccctcgaatacagtccgggactccgaaaaaggcatgtcgggtccctcagacgggccccagatctctccgagtgagatccggaccacagcaaggtcccgagacggggggaaccccggcatgagtcagggtccggtgctggcacgtgtccaggccttgccctgcgctccccgctcag

SEQ ID NO: 16919 - DNA, 462 bp, Zea Mays
aatttacaccccaatccacttcgatacatgtggatcgggatggatactagagcatccaaataaaacctaatcaagatcttgcacgcagtgccgctaccttgcgtcatagtccgcaccagtagatgggtaggctatcggtaggatctttccttggcaccatgacgccatctacgctcactatctcactgggtctcactatgtcgttgcaacgcgacaatggctgccgctgccatgtaccgacgcatcatcgcctgccctcgctaaccctcgcatgttgtcacctcaccattaccgttttgcgttagattcattgacacgtaacacgccacacgccacactgacgcaccaagcggctgctctgccctagcacaccgccaccgtcggcctaccctctttgccctctccaactctcatttaggatgaccaaaaaggtttttttatattcatatcattttagaacac

SEQ ID NO: 16920 - DNA, 387 bp, Zea Mays
ctgaacccaaaacccttccgatacgctaagctacgtgaggggctcaactcatgtagttggctattcggacgtgaaggctacaaacaccaaacgacgtggtgcttgtatgatagactcaaacaccaaccgaaatggtttttgacttataggtagcaaaacccccgtcacctgtgtttagaacccacctaaagctgttcatcgcggtctagaggccattttggagaagggtttacctggatccgctcttaacgtagttgtcacaccgcgtacatggcagtaggaggaattaaatatagcacatcgtgcatctaggaatagcagatgggccgtcggtcgtgggctgccacgacatataactagcacgtccaggtttacgtaatagcacat

SEQ ID NO: 16921 - DNA, 827 bp, Zea Mays
tgaccacaaaaaggtatcaacaaaggcagatatatatagtttcggcattgtagtactggaaatcgtaacacgaaaacagtgcccacgcagttacgcagacataaatgctcagcattttatccaccatgtaagaaaataatgcatatacatggtacatttttacatatttcgcatgcttttcctccaatgttttgacagcaagtaaatctgcttaaataacttccaacttcacagctgcgtcaaaatttgacaaaagataactacgtcaaatccatgtacccggcccttgaagcggactgccttcagcaagtgaaactgtgcatagaaattgggctgaactgcgtggagaaggaacctacaaagagaccaactgccagggaaataatctctatgtttaatcaaaaaaaggattcgagcagatctggggtatctaactgcatcgttaatgtgatagaggcgtggctatcaaggcttccatggcatccttggcctctaactttgctccgtcagacttaagcttgatggcaacagcggtatttgaaagatttgcaagggtgtccgcttgagttcctgcgatgcagcggaaggaagaaaaaaactagcagattaaaaatgagaatggggatcttgtatatctatttatgttttatccttttcatagaaaaattacaagctatgattttgatggtatagtggcaatattatgtcaatgtaacattcaatgggcatcgaattaaaatataatctaagtattttttttcctagcattgtaaggcgtagaaatatatgtcaatactcctttcattttaaattggaagtcgttctgg

SEQ ID NO: 16922 - DNA, 725 bp, Zea Mays
gctccatctttcgtgcctccatctctttggctttaatggcctcgacgtcgcctccaatggtgaccgttggtccggttgccgatactgaagacgccgcccggtaggtcgtacaagatgccgtggagacggcggccgcgcgcttccagcgcgaccctactgatgccgagtagctcatacatgtagaaatgaggctagggctccgcttgaaggcggatataataacttttgtttttgtaagatactttttgggaactatcaattaaacagctcttatctgtatggtgcttgttcttactgtgtgtggttttatcaactcctctcctggtacttggcccccccctgggatgtaggttcgacgtgtcgaggctagataccagcatacctaagaaagagttggtgtcccggcccccaggaggtagcctcgactgggacctggacttgcacacaacttcggctaggaagtgttagtagcacacccattaggacccatcatctggtaccaaccatcctttgattcgtgcaacaggacctgcaggatttggcctgggaagccaagccgtgtgcccggaccccctgaaccacagttccagatactaggacacccatcgcagagtggtggagcgtgtaggcttatggtacgggaccaggctaagtggctacatggctctagaccaccccaggggacgtgcgtccattctctagaaccggaccccaggttcccggac

SEQ ID NO: 16923 - DNA, 548 bp, Zea Mays
actgggtccgctggtgaccgtcctcatactcctagtttctgactcatatagttgttggccccgtccgaccgcgtccgatgactcgttgccgttcttcgtgataaaccatgagtcagatgttccctatgactcaaacatgatttagaaatgtcgttagtgctcatgcgctagagtactggctgctacggtgcccactttgtaatcgcccttgctctggggttcgggagcggtcgcgaacccttcatgggtcgaccttcgaactccaaattttgctggattagctaggcgcttcgcggtcatggtccgacgagggtccaccggtcctttcccgataggtgagagatagtatcgagtactgaaaagatgggttgagtcatcttacccggtgttggcttggcatcattggacatcggtgtcacttgctacgttatgcggccatctccccggtccactggtcgatcttgtgggttgtgcgaccccaaggcgcacgttatgtctgtcctaattctgcaaatcaaaaatgatgatacatcagttactatctctca

SEQ ID NO: 16924 - DNA, 272 bp, Zea Mays
aaataccataccaattggtaatttgaaaggtgtgggagctaaggaacacatcaataaagttggtgctctattctagtgctctccattggtatgttcttagtgacacacatggtgccttgtatatatactttgtgaagtgcttagactagtatgcacttgctctagagttaggcctagtgtttagtaagctttgcatatcccttaccactaagtgcttgtgtgaactattattgtattcaagggggtttatagtcttacgagaccataccaac

SEQ ID NO: 16925 - DNA, 447 bp, Zea Mays
tgaaggccaaagaactgggcgaaactaattcttagagagcgaagatgaacaaacaccccccatcgcctagggtcagccggatatcaccctaaagttgtgtagtggaacagggtaatagaggaagctatagctaacggcactttggacccaatattaaaagatatcgatgagctagctattcgttggatcttaggttgggcaggtttgactgaggacgacaaacttttgcatccagaattggtaggcgaagtttcgacaaaaattcaagaatatgcagaaaagagaaagaagggcgaatttaagcctcggagggagaatgacatactaaccgcagcactagacaatcctgaacacactggacgggctcggggaatctcttctaagatttcctagagagaggcctttccagagtatgcatcatcatttaggaaacacgagaagtcgaaa

SEQ ID NO: 16926 - DNA, 517 bp, Zea Mays
gatagatcatgacgtcgtccgactcatgctaaggacgtttactgttttagatcctaaccttgtaaacttaatctgtgagaaccctaggtattgcaaaatgatgcccgaggaagtccttggtaagtttgtgagtcaatgaatgatgaccaaggaggaaaggtacatcgacgacgacgtcaacgggagcccccactacaacaaactgcaacccgttgccctcaaagcgatgaatgacaaggagatgctcccaagcaaggtggcacaagttgaggcgatcgacctcaatgaataggagatgtcacttgtgatcaagcgcttcaagaccacactaaaggggcataaggacttctccaacaagggaaaatgaaggggaagcacacctgcttccggtgcgcctgcagtcagccagttttggcatgtttttgcaatgaaggggcaacaactatgaggccttttagggctataaaaggacccacatggacctccttcagcaccaaagcactctaagagctactca

SEQ ID NO: 16927 - DNA, 658 bp, Zea Mays
gtcccagagggggatacgctcaggagatgcgcccacaagtccggactcctttaacgggactaatgacgtcagatccgtacccgcgcaagagtaggtccaggaccgccacatgtccgagagaggagacgctcgagaggtgcgtccatgagcctagagccctatttgtgccattcccgcgcttcttgactctcggacctcctgcgaatagggcctaggtcctcgattccttttgagatttcaatccattgcgtgatgcacccaatgggtgtatccctcgagcttcgagccgacttgagtaacaaacgacttgaggtctcagaaaaactcacttcactggatcatcctgctatcttgacgcgtggttgtccggctaattgaaatctagtcgtcctatttatgcttgagggaggatcgaccgtttgagacccgaccgactgaagcttgattcactaaatgtgctcatcaaaagctgttgagtattgagtttgtcaactgaaattcaaccgatagaggtctggctaaaatttttcgaaaaatctgtcgtggcacccaatgggtgtgtccagtgtcaggttttgttgtctcttccataatacagtttcttgagtggacatagaataatgatgtgtgttcgccgcgttatgctagggatgtgctg

SEQ ID NO: 16928 - DNA, 739 bp, Zea Mays
ctttcccaagatattgtaggccctcgggatcctgattactaacctcattaagtcgaatacccattctttagcatcgttacaactaaaggagggtacccgctggggcacctctacataccggttacctttggcgctccttacaactaccaaaccaagttcttactcttccaagtagctcggttcaagtgcagatataatgccatcattgggaggctaggactggccaagttcatggccgtccaacacaacccctacatgatactcaagatgcccggacctcaaggaatcatcgccatccgggctgacttccaaggagcgtcggaatgctatcggagggccatgtagacaaccctcaccactggacccccggtaacaccatgacttcaagcagcgagcgcagacacaccgccaggggacgacctcacaatcctagcgaaataagcatccttagctaccaccatgcgactagttgaagaaaccaagaaagccaaccttggcttctctgacgaacataagacgatgatcatcagctctagcctcgtcgctaaattggaaggcgcactcgtctattttctacaagacaactaagatgtttttgtgtggcaacccggacattccgggtgttcctagagaactggacgagcacaaactgaaggtgtatcctcaagaaaagacaagccggcagaagatgtgccgctgaccgacaaaaagagttgccataagggccgacttagctcac

SEQ ID NO: 16929 - DNA, 688 bp, Zea Mays
taatcaacttgcaaagaaggccaaagtattggtacaatcaatatttatcataacattgttattcaagatatcaagacgattaaattacatttgcaccaacgttcaagtcaaatgtgaagttttcttatatttgacttaaaaaatttaattcatggaggtaaaaaaatgttgaatactatggtaattgtttgctgattgtacaacaagttcatggtgaatttcaatgtttataaggaccacttaatgtccatcttaatatttgacttgatatcattgcttgtttgtcatgttccagactcaaaatattccaaggcatgagaattataaggccaacacgttggctcaataagcatttgtctttgatgttggtgggtgtaccgtttttatcaaacaaaagtcgatgcacatacttacgctttgctctagttagtaagagtcagctaggttggatttggatgttggctagcctaactttgttatttttgtgtagagaggacaaaccctattaggccaacccttgatggtagctaggccgacttcctgaatctagccatgtgggccctgaaagttgaccaagataattttcctaatgaagaatctaatgatgataaggctgacttggatgattggaaggctctcatattgaactatgtacatgatcccagtattagagttgattaaagtgttc

SEQ ID NO: 16930 - DNA, 672 bp, Zea Mays
gacacatttgaaccatacctctattctgcaagttacctttttcgtacatctgtgcgaggcttttcttgggattctcccccatttcggactctggaagtatctttatcattgtcggcccgggatggctagggggtagcatcagcttgttggcggcgcaagtttggagcttcgccgagggaggaaaatagagtatctcgatatccccctcaaggacaacattaagggatggtgtcttgagtggttcatcgtggaaaatcatggcaaatatctccccctcggtcagggaggcaaccagatgttcgtacccccagctgggtagagtctcccaccttttcagagataactgaggccaaagtgctacttgctgaagtctgctcattgaaggactggggtctgactgctgaggccgtggtcgccgactttgtcttcaagaacattcaacccttgaaggacagagtctaccccgcttatttgtataccggcatcaatgattccacccgagtcatagacatatagattcccaatgaggatttgttgagccgactggatatgattctaaggggtagggtctcgaatgctggtgctcatgtagcttactctacgtggaacctaccgccaaataggccattctctgaatttgtctccaaccctcctgctcgtgatggtagcccg

SEQ ID NO: 16931 - DNA, 590 bp, Zea Mays
gcccatgttagtattttctccatctggcacacgagcaccttacaaacatatccaaatctcagcatggccgtagtgagattggtcgtggccatggtttggatttagcctgtttctctgcttcagcctctgtggtcatggtttggatttctgcagagattatccttattagttatgtatggttggatgatgtgtatagtgtattatccttattagttcttgcttttttcaattccttgatgtgccatcataattaagtattctgcaatttatagttatgtactgctgttgaaatattattcagttcaccaatgtgtggtcacatttttcagggatttggacacctttcattaattacatacccttgctgctaatatgcttgttggtgagttttatctattgttgcattttttctgataagtggtaaaggacatgaaaattgcttactgctgagttttatctgttgttgtattctttctgttaagtggtgaagggcatgaaaattgcttgctggtgagttttatctgctattgcatttttctgttgggtgatatatatcatgaaaattgtggatcaaacacaaactgtcgaaa

SEQ ID NO: 16932 - DNA, 463 bp, Zea Mays
ctgggctaacgaagaaacatggataacggcgctgtgacagtgtaattgctgaccaggtctggttcaaccaaatgtgcatattgactagtctgggcttcctctattattggaagcctagggctcttaatatatatatagggcaggtataatgggagccctgggcttcggatattaaagagagcccgggtcgtggagggggtctggtccgctcagccgtcggcgcgtgggtctgatggagaggagacaaagaacatgcagaaccggcggcgccgtgacagggtggattaatgggaaggcgggaatcatatggtaatgggcggaattatagggattagatttcgcatgcaaacgtgtgtactctgaaacgtgggcgcggaattaatggatcttgcatggtgtttaattaaggcagttaaagataatatcgtataaggtgatgaatggtttggcataaaacagttac

SEQ ID NO: 16933 - DNA, 616 bp, Zea Mays
aagagtttgaattaaatttgaacacaacttgaatttgaaaagagagagaaaaagaaaaagaaaagaaaagaggaagaaatcctgtttgggccggccaaaccctattcggcccactccacctttcctctctcgcccagctcatcgccaccgcgcccggactcactggcgcgtggggcccactgcccagtcttcggtcacacgcgcgtgatggctgtctcgcccgatgacgcgtgggactcgtgatgcagttgcgcccgcgtctttcacttaggaccaccacgacagagcttccttcactgcgcggactccgcaacgaacgccggcgaagccgcgcaccgcccgaaagcttcggagccgttcaatcgcccggtaccccgcttcgcctataagcatcgaccccacgaactcatccgctcgggcccctcctgtttttctgccaccgccactccacgccagctcttgcgacgacgctacccacacggacaactcgccgccgccagtgaatcttatcaccgttggttgtctgccctcggggttgggttgtggaggagcgtctacacccgtagttgccgttcgtggcatctgggagtggaatcgatcacctggcaccaccgaa

SEQ ID NO: 16934 - DNA, 300 bp, Zea Mays
cgcaggaacatggacgtaaagtggtgtatggagggtgcgcccccatggacaacatcgggggatctgtcgcatcggtattccccctagcctcgggtgcggcaaggagattgaacgttttgcagggcacgcgctgcttcgaacgatgcgctggggagagcgtgggggaaaggtgtcagtaacgggtggggcagttaaccacaccatcacaccacctgcgcataaaacattgagtaggtcgtttcgcgtcccatcgagccacccacgccgaacggggccatggtgattctgtttctaccgtgc

SEQ ID NO: 16935 - DNA, 545 bp, Zea Mays
aaccaaacgatgattggttgaaatgtattgaagctaccagcgatgaactgcttgggacatattccaaggccgaagatgatgccttgtccgcagcctttgggggccgagggaagaaaagattgaacagagtatttgatgcaatcggcttcgtataccctgattatcactacccgctgcgaaggcaagtgaagaagagaaaaactgtcgcttcggccaccactgctgtgccgaagggcaagaaaatgaaggttttgacccaccggccatgatatattgaaccggccgtggtgcctgaatttggcgaagggacctcttccacttctgaagcaaaacaagctgcttccatcgttcaaagcactgaagagtctattgtgatgccgaaggtgcctacggtcgggccagccaaagcaaaggatgatacggtcgaagagtcaaaggtggaagaaacagtaaaaatgccagaaattctgagctcaccgacagaggcaaatttgccgaagatgcaaaaaggtcctgccgcaactcccaagaggaggaggatggcc

SEQ ID NO: 16936 - DNA, 1093 bp, Zea Mays
caccttacaaaaacccccttctagttctgtttcttctctaactcgacccctaggccacggcgcgctcaccgccgaccacccagatgctcggaccatccaagactgacggtgactacccaaattaactacggggcgagtattaccgacccgaggtgaccctagaacaggttctaattggattaatccgaccctgcatttgcctgaccacggtgatggcgaacaccgtacacagaccaagatgttccggttgattaagtggggtcaagctcaatgggtcaagcagacgacgatcgcaagcatgtgtaggtgctaaaacacggactagaagagcgacggcggacctggaggcggctggtcacatcacgacgtctcatggtggcgcagatagatgatttgggggaagaatgaaattctccgtctatggtggctaattgaaggtgggaatgggtgctctggcttcatgataacatggcgcaatagaccgagtcatcaatatataagggcgctaagcggtggtgtccaattttgaaagggaagaccggtggccgagaggagaggtgagtcaccggcgtgaactatcttggtgttccccggggtaatgcctccgacgacgaactgacctcctacggatatctactgcgacgtggtagatcttctaagcacgtggcgtggctacgatcgacggtgaactctgacgaggacacctctgtccaatgcacgacaagtgtcacagtgaacagtccgacgataagtctctatctctttcccgagttgagatctttccttgtccacggttatccgcaagtcacggcacacgaatcacgatgatcgacgtcaatcgcggcgaagggtcaccagcggcgagatgctctgtatcaaagatatttctgctactgtaccattggaatctctgtttgaagcgcttgatagagcagaaggaagcgccaagatctttaatttttatgtgagcacttgctaatcttcttgtaagagatttgtagctctataaacccacaacaattctgctattgtgatctggcttatcttctcactcctttgaacaagaatcgagttccaagttgatcaattctca

SEQ ID NO: 16937 - DNA, 348 bp, Zea Mays
ggaaaaaataaagacttcaagctctactccagggaaaacagccgaagcttcaaaaacgcgaattgaaacaaaacagactgaagctgaagctgcacaaagtcatgccgagaccgaagctgggccttcagagcccgccaaggagaaatccttggaaatcggagaagaaaaagcggaaaaggaatctgcagaacaaattctgtctgaaaaaactgccattcctattctcgaagcatcttccgaagctcttgattatattgtacgacatgcttcaggaaaaaggttatctgaagaagaaaagcgagaagctcaatattatgcccagagactgaaatatccaaaaggggcgtt

SEQ ID NO: 16938 - DNA, 532 bp, Zea Mays
ccggggatggcgatggatggagacgaccattttcttgcgcatgcgtgtgagtttgagggctgctaggcggctagctatgctctcggcgtggttctagcccgaagaacaacacgatggtgacggtccagatcgcgccaggcgtggtctgtgctctagaagccactcgcccactccagtctggaagcgttctggctgccacccacgccggatgattgctctcatggaatgcagccccatgaatgctcggtgtcggtgcgcttgtcgcggctagacctgaaacttgggccgggccggtacggcacgagcccatcgtgtcttgggccttaagtcttcaggccgacacggtctttaatatttttggaccgtactaaactaaacacttaaaatctaagcctgacacggcagtaaagcacgtcgtgcttgtcttggaccgagccggtccaggcacggtccacaaccaaacaagccattttgaagatatatataatgaaatctaatataattttgatgtcatatttttaccggccttttt

SEQ ID NO: 16939 - DNA, 718 bp, Zea Mays
gaagaagaaaaaaagctaataggtgggcttggcttgggaactgtatccaagcagagcactgtaccaaacatgccctagaggtgtagatccggcagggaagggaaacaaaaggcgattcaattaagctccacatcaagcatccattagtcgttgcttaacagtaaatgaatctttgttttcggaaggagcacgagcaacgaatcatggcaggtccggtccacgtatcctactacacgcacgacatggaagtacgtacctctatcgggtacacacgtatcactcctacacctagacgtatcacttgcaccctcgcgcgggagtgagtgacagactgacagtgaaggctcatctctccgttggggacgcggccagcggctccggtcgagagcttgctttgcttccacggggcagtccctctcggcgctaaccacctcgatcgcggcacccgtcttaggaaaatcagagtaacaaacccggtcacaccaccacaccgcgcactgacgcgcatcatcatgttgcttcctgcttacagctttaacaaactcgcctaccgcgactcgcgagcgaaagacagacaaaaataaaagaaaaaaaaagaagctgtgctgctgtgttgtgtgcgtcgcgtgcatggtgtgcgcgagagccttcgtccccggcgtgacggccaaacggaatcgatggacttttttgttaggtgagggcgactacctgggtc

SEQ ID NO: 16940 - DNA, 885 bp, Zea Mays
ttctggtgtactcgcgcgcagcccatatcctagccgcggcgccgacacctggggcccattggccagcgcctccccgtgcacactcgtactcacgtcgccaactgacgaatgggcccacttcgtcagtcgtctccctcctcgggtcggattcaccgctgtgaacaaaacgcgcggactccggcgccggaatcgcagggcttgagggaatctcggggtcgttgcgaccactcggaccctccccgctgtgtataaataccgacgtgcatcctcgccctctctccatgtcgaaccagcgccatcagtgagctacgctgccgccgtgggcgtttgggggtaaagcaaagaaatcagccgcggtgaggtgattagactcgtgattagtcggtcgagtggcttcgtggtgttgcgctggtgctctggggaaactctggcgagcttcgcggcggaggaattgcgccggtgccgcgcgtccgccgttgaagcaggcctctccgtggtgcgggcgattgatcacaccgtcaaaggtaataaatctatcattcagttcatcgcgcagtaccggtcgatttgcatatctcgggcagagcaatgttagactaggaagcgggatggcttgccgccggcgggtgcgtcatcgggcaaacggaaggagcagggctggttctatcccgaggttgaggacggctccccttgcgttggatcggaaacgggtggccaagatccgttcacggttgagcgcatggaagaaatccaatcgtgaccggttagtggtgatcggagggctgggaattttgcgcatgcgtggttagatctcgggcatcaaactcggatccatcggccgggattggcccgtaccccttcgcgggtacgttttacaaaagaaac

SEQ ID NO: 16941 - DNA, 644 bp, Zea Mays
gccagacacagacatacacatattcatccatgcgaaccacaaaaactagaaccagcagcagactaagcacacccaggattaaggccaaatccttctaatgtctactgccccagcaaggtccataaaagagcatcttcattaatatgctgcaagactatgttgatgtttggggaagcatcatcgaacacacagtctttcctgtgtgtcagcacactgccaggtgggggctcttgacaggttggcaagtgggacaccttcagctacaaaagggaaaactgtagacaccaaaggggaatcaattaccattttccagaactcacttacttgttttccaagttcatctctctcttctctactacttctactgttcttcctcgcatgtatttcggttatgaacattgtggagattctgaattctgaatacagctaggtcgtttcccaatcctcttcttccttcatctctagattcctgtattgctaacaagtggtatcagaggcgttcgatccttggcgctggtttcatcttcgcagcaacaccatggctctcgacaccaagctcatactcgatgcactgcagtaccacttcgacgagatggacaccaagatggatcgatggttcaccgctcaagatgcgaggcgtggcc

SEQ ID NO: 16942 - DNA, 408 bp, Zea Mays
caaatttttaaaatgcggattatgtgttggggaatgcatcgataggtgtctacgtgaaaagtgtattgttttatgcatgtgatcgatgattgggatagtcgaggcgaatgaggagtatgattaatcctgttagagtcactatgttgttgatgccttgtgcgtaacatggggacacgtaggtgcgtttgtgctgtggtgtattatagtggtggtggcgtaagatatttgattgaggtgtgcgggtatatgccgtaatatggttatactcgcaacgaggaaagatgtatgcattgtgtaacacgacacttaggtcgctattatataatcgtgtgaaggatgctcatgatggtcgtgtgattgaggagtgatgtagtggcaagcgagaaataagtttagtttttcaaacgg

SEQ ID NO: 16943 - DNA, 498 bp, Zea Mays
ctagtggactttggctctttggcaacattattgtttttccaactctagctctttggccacaccatctttggtttcggctgacccgactataggcaccttcggcactacagtcgatccttcagcgctctgaacagcgggagcagcttgttccgcttcggcagcggaagaggtcccttcgccaaattcaggcactacggccgattcaatatatcatggtcggtgagtcaaaacctttattttcttgcccttcggcgtagcagtgatggccgaagcggcagttttcctcttttttccttgccttcgcaaggggtagcagtaatcagggtatatgaaaccaattgcatcgaaaaccctgttcaatcttttcttgccccgacccccgaaggctaaggataaagcgtcatcttcggctctggtgtatgctctaagtaactcgtcgctagtagcctcaatacattttagccagtcgacatttggttcgtcaaaccagtctctgta

SEQ ID NO: 16944 - DNA, 761 bp, Zea Mays
cattacctatgaaactgaaacaaaaaatggcactactaaattattttagaggagctagctaatttaatgccataaaacatatggtataagttttgttttgaagttttgagaaaggttgtgacagagaatgtagctactacaaagcattgtaggtagatccatattttgttttagaatcttacagaaagagtttaaactgctgcatttccctaggatagttagtcaaaccttgataacatgtgttacctttttcatccatattagatcagattcatgttgaatcctggcttcttttttatatactatttctgggatattttttatattcatgcagtgagatttacttctccttgggttcccttgtaataattagatttagcacagagatgcataaattcatattattagcgcaagatcgagtggcaactcacatcactgtttctcgtctattgttccataacacaatgtttggggacctagccctaccaaccagcgtgtccgcgcttttctggtgccccacccgagacgcattttagtcaacactagattatcttaatgtacttataatatttagtcgatgacacagacgagtgcactttccgagctttccaactatatgtgtcgaatcatatcaaattccttatgctctataccattgtctgcaggataattgattttggagacattgacaagttttccgtgcacgagctggtaatgtttcttttagtttctaaatccttcaagtcatcattggccacatg

SEQ ID NO: 16945 - DNA, 530 bp, Zea Mays
gtcagggaaggctcaaccgcctcaggaagacttccgtctcacccgagcagggcttggacctcgataatcgaagcaaaggaatcacgacatcacccggcacagggacgctgacgcaccctgtaagctggcttttacccataccgaagccctgttacaacaactatggtataggcacctttcccctggaggctcgggcgtacggccaacccctcgacctcggctctcagcaggaaatcagcagacacaagtcaacaatgcagtgcatcgtcatgccactcacaggacgccaagacatctccccttggaatacgacgacctccgtattgacaacatacatctcctaggtgtataaatagggtggtgtagtccctccaagaggcaggcgaacactcagtagttttccacccagtctttcgcctcaatcagttccagggacttggggacttcccctctcccgctgtgcttgtaatccctactgcgggcatcctggtgcgagtaatataagcctcatccccctctgctgggagtag

SEQ ID NO: 16946 - DNA, 627 bp, Zea Mays
ctacctgcatcaacaccagctatgcccctcagccccggcagatcccggtctacccagtggtagtcgaggaagttccggcggatctccctcccatccgagtggagaatgtaatcaacctggaggacagctcggaggagcagctgccgacccccaccccgttggcagagtccctggccttcgcagctgggtcatcgacgtcagcactgtttgcaccagccttccaagcacctgcacccggaggcgacgaccccgacgactccggaaacgacgatgacgaggatgacgacgacgaagaccatggagaaggcgaacacgtcaacgaggaagctgactacgcccagtaggacaacttcatggggattggtcctgttgtcgaacattacacatcaatgttagagacggggcacttccccaacttgttgcaagaggtgctgcacgcgctaggcacctatgtccgccccctgtacgagacgaggcgagtgagcgagcctccccgggctttctattacatcacttgcatccacgtcagggtgatggatgcaggtgacaggggattcatgactctgtctgctcacgagtccctgacgccactgtccacctatgctgcctcggtcagcgatgctgccc

SEQ ID NO: 16947 - DNA, 754 bp, Zea Mays
ctgaagggcactcagcgcctcaagctggccctagcgaagaccctacagcggcgactgctctggttggtgaagactctgcagcggcggctgctccttcgcaggtggcggggtcacgttagggttgttgggtttaaggtttctttttgtgatactgaaggtcggttgctgcgcaggtttcgacgtctgggcctacacaagcaacccccgctgatgttgatactagtattttggcggctgcgaatgcaacgccctttaatggaatttgtctggttctgaaactgagtcatggtcctcggatggggatgattttgggagcccgctttcgtggattgaggagtcttatgaggaagatttagactactttgctgcgttggatttggctgcatcggagtccccgccgcaacctgatgcgcacgaagagtctactccctggctagggcgatagctgaagaccactgcaggcgaaaggtggtatcgaagcagagtgttgatgggatgtcacgaagtgggaggcatcgccggatgggtatggagcaatcccgtctttgattagattgggggtagccaacgcgatctactgtcctcgacggctgagacgtgtattggtgagggggacttgcagaatctatttgagggcgaagagttgaagatgatattgtttaatttccaggaggcgagtcttattctgaaggtggagccgatgtagcttttttgctgacctcgctctcgtgttgtgatagtgagtgaaaacgat

SEQ ID NO: 16948 - DNA, 331 bp, Zea Mays
tttgaagacccatttacatgtgataggaacaacatgcgagggtaaaggaacgatatcccatgtaccagtgcgttcaagagcaaccaattcatcaatcatagctagctgccactcaacaatcccagaagcttcctgatatgtagtgggttcaacaattgccacagcagcccgtggaaaaccatagcgatctggaggttcaatgataccacagtcacgaagacgatatccctgattaaaaacatcattagactcattattgttagtacaagaatcaggtacaagatcagtatcaggatcagtcgtagaaatagtgcgggaacgacgaatgcag

SEQ ID NO: 16949 - DNA, 470 bp, Zea Mays
ggacttggagggagatggtgctggatcatcaagggaggatgctgatcaaggtgatccaaaccaaagaagaggagaaccacaacaggagagagtaagagaagaagaagatcaggtgatgggagggcgaggacatccatctctgcccaaatatttgtttcccggatttcaagggaaggaacctggaatatggttagccaagtgccaagactacttcaccatttataaggttccggaagctctatgggcaatatcagcatccatgcacatggaggggaatgcaacgaggtggcttcaagtgtacaagatgaggcagggactgggaaactggatgcagtttggcagagctgttcgggccaaatttggagtggaagaatatcccaaggccatgagacatcttctgaccctatatcagaagaatggagttgaagagtacgctcaagagtttgacaaagcaaggtataccactgctg

SEQ ID NO: 16950 - DNA, 633 bp, Zea Mays
tccccctgtctaacactatcttctaagggataccatggagtctgactatctctttaagatatatccgggcaagggtggctcctccaaaggtggttttcactgggatgaagtgggctaccttggtaagacggtctattattacccagatagagtcattccctttttgcgtccagggcagtctggttacaaaatccatgcctatttcctcccactttcattcgggcactgggaggggttgcaataggcctgccggtttctggtgctcggcttttgttcgttggcaagtgtcacaccaggccacatattgtgctatctctttcttcatccctctccaccagtatctggttttgaggtctaggtacatcttggtggttcctgggtggatggagtaggctgagttgtgagcttcattgagcaggacttcccgtgcctctccttttggtacacacagacgattcttgaaccaaaggactccttgttcatctgtcctgaggtccggaagttgttctttgagagcttttgccataagtcttgttgtctccgtgtccaggcgttgagctttgcatatgagatcttctagcattggcttgacttctaggctgccgttgttccccagacatgcattcagctgag

SEQ ID NO: 16951 - DNA, 492 bp, Zea Mays
aaaagacacaacacgatgctgcatgggattggcgtacatgaaaaggaccttgcgttgatcaggcatgagggcttgtcaatggacgaagagaggacggttgagcttggccaagataaaagtcacggaagagcttgagataattgattaccagtaccttgcaatgtgacagttgttgttatcatggatgtggagacggggagatatgatgcatggttgctgactagagaggtgatgtaactacttgatgcaagcaccgatctggaaagagccttgtcatagggtgaagagtgcaagcacattctttccctaaaagagagcaaaggcacactgccattcttcggtctataggcttttcatttccaaaatcgtgttctttgaacgtgatcaaagtcttcttcctcatactccactacgttgtcgtctttattagcacgttattatattcaagcaagagcaatggggctaacgacttcagagaattcccaaatctcg

SEQ ID NO: 16952 - DNA, 388 bp, Zea Mays
gagggggaaaagtggaagctggagtggtggaggtggtgggtatagcggaagtggtggatggctctggagcgacaggagctggtgaagtgggaggtggagtagaaacagtggcggaaggtgtagagggagcagtggagagaggtcgagatgcgaggcgacgaactctgtaagcaatctgatcagaggaaattagcaactgtcctcctcgctctgcctgctctgttgctgatgcctctgcaagtgctgcacgggtggctctgtccacacgccgcttcttccgaccttcctgctgctcaaggtacacagtctcccccttgacctacctgaaggggcaaggatggtccttgtcatctcctccccctggcgctgagacattcttcgtccgcac

SEQ ID NO: 16953 - DNA, 697 bp, Zea Mays
caatattcaacctttgccggagcatgaagttattttcccagcggttagagatgtggtcagagaatatcttgtggagcaccggtggctcggggtgcgggacattcagcggtcgcacctgggtcaagttctggtgcagtttaacagggtgctagatagagacaatcttgtcttgcttggaccgcaacaatatcttgatgccaccttcactgctcagcggcataatgatgcctggaaccacagggcacttttttttaatcgtgagtgttggcttatgctgttgggattccccttagactatcattcctccgagtacttgcaggctgctattggctcttttggtagattaatcttgtgggaggaggacagacataatgtgaataggactatgcttagggttcaggtcacgtcccttgaggaggtccccagttcattgtcttttctgaagctgatggtttcctcggtgattcgtggactgtgcaatgcgagatcatccaacaaaacttgctggggggtcaaccccaagatgaagacccagtgctggtggtccctgaagatggtcagcagcttccactcgcgttctttggtctgggccaacctttgcccgctgcaggttgggaccttaatttcccgccagaagataatgttcaggttcagccgacagacaatattcaaggggattgggaccagtggattgtta

SEQ ID NO: 16954 - DNA, 377 bp, Zea Mays
ggcggtgatgccgccggtgcggttgctgggcacaataggagggggaaagtggtgccttgtgaccgtgagagtgtggcggagcttcgagcacagtttaattggaccaaggatcactagaaagggcgaaaggagctcaccggagcgacgggggaagcacggcgacgctagctcgattggctcgggggaaggcggaggagatggccggagctggtgtggtgaagacggggctcgggcgggtccttttataggcgcccgggggagggagagggatggaggggacggcgagcactgacgagctcgccatgatggcgggaatggcgataacgtcgattgagacggctcgggtaggcgggggtgaggggacagctcgggtacag

SEQ ID NO: 16955 - DNA, 479 bp, Zea Mays
caccagctgagtgaatgcattattgagctgttttgtgaagtgtgtgatgtcaagacccacttatcttcgaaatgtccggtggttcgtacttgcaatacttttgcagttcctagtgggtatgcggtagatggtttggggttttactatatacctcagcctactcctgtcaaatcaaagcaaggtagctatgttggtacagtgactgttgtggagggctcaatgacagaggagcagatcactagtgagctgagaaggttggttgctacggagtgggattggagtgtgaagggctttggaaataatgtgttctcgacgggttttccttcaatgagtgaactgcaacgaatgattgaatgggggacaattcacactaaatttggtgctaaaatgcaagtcaaggaagagggatctggagaagaaataaaatatgtgatgccaaaggtatgggtgcagttcacaggattacctaaggaattgag

SEQ ID NO: 16956 - DNA, 471 bp, Zea Mays
taagggtatagcagcagccaccaagcgaatcaagcatggtgatcacaaacttaagattgaattttcatctaagcttggaggtcccgtaggaccaaacactcgcacttttgtggatgaaatcgtattgtttacaaagaaaaaggcaccactcattggagtgaaaaagtggaaagatatagagttcaatgttagatcttctatagcctctgacgtactggtatgtgaaatttcttattgtttggtatgatctactgagatatggtctactattcccaaattactagacaattaaccttctctatatatcaaaactgaaacagcgaaggtgggagtttccaagcaatgaggacgcgcatgaaaagatctggtctattgccaaggagagatacaaaggatggcgatcaacgttaagctcaacatacaaggcatacaatagttatgctgaaaggatgaaaaacaagcctgaagatg

SEQ ID NO: 16957 - DNA, 799 bp, Zea Mays
ccgaggattcttggtctgggcgggggtttctcgcttagggtttggcggcggccgtggaagccggtgtctggggcctgcccagcggtcggtttggtgaaatcttaggtttttcacatgttcttctacctcgatttggccattttagctatgaatctgcgccagttttgtcctcctgatgctgcatatagcaggaacgttgtgcgagtagggattcggctatcacacgcttaaaaaagatagtatctttagtaaaagaaatccctttccattgctttctgctgagctttagggagtaggggcttacttggcctagcttgtttcatttcttggtgatttgtttgtttagatgttgggttcttgtagagatccggtgctacttctgatttatggcatgggggctgggtaggatttgggtgattactgattaggggccatcttccttgtgtttggatgtgcagtaagatttcacccaatttgacctatggatttcatagcttagtagtggttatggatatggacattgttttaaggatctggctctttgtgacaagtacaaatgccaggatatctgatgtttcctagcttccacaaggcggtactttgtcttctcatttttatcacttctaaagtagcataagatttgttgttttttgtttatggtgttcatattatgcggaatattatgataattgtctgcaactaagtgcctgttaaatgttctctaatgttttgttttatattcggttcaggggctaaataagctaaatgttgtcctcgttttgtatcggtatacaccaca

SEQ ID NO: 16958 - DNA, 912 bp, Zea Mays
catccatcggatcgagatcaaaggcccaacacgctctcccatctgagctccctacctctgcagaaaaaatgccaaaagatctactgtttccctgaggaatgcctcctgaaactccaaaccccaatgccacagaacatgaaagaaaagagaaaaagaaatttaacttctttttcagaaaattgggatatcacactctaccccccttaaaaagaatttgtcctcgaattcgaccactccaagcaaagcatccaaggtaccccttatagcaccaccattcaaaacatgggtccattattggtcttaattaacacaagaacttctacctcggactaattgcctaaggaaactacacaacctgatatccagcatgaatcaaaatgcaatgaagctcaaagcaagtcatagatgcaatcaacactacgatttcacaccatcgaatttggatgcagctatacatcaacatcaatgtcttcaaacaacactcctttatgaaggggtaatatgcactaagcacaacccttaccagcttcaacaattcattttaattcaatggtgaaacatccacaccagattaatgtataagaagatcaaatacctcgcctcaaagcaccacaaaacaagtggttctattgaaacaaaactcctaatcttcctaaaccttgttcttgccatcatgaaaagataatcatgtaatctcacattctttgcaccccacaaaagggagaaagtctacagaactaatggagcaataaagccgacaagaagccaataacattctacgcggcacagttcatcgaagaaatgccaaaactccacaaagagcactgacagcacaacaacaacacaatacttgcttaatcaatgtcactatacttcatccaaaactcaactaagaaaaatatccaaactagt

SEQ ID NO: 16959 - DNA, 683 bp, Zea Mays
gtatcccataccatagtggttgtaacagggcttcgatatggggaaaagcctgtttatgagatgtgtcagcgcttctatgttggatgatgccgggatgtcctttgctgtagatgtcaaggtcggagccgagctcgggccaggcagaagtcttcccgaggtgatggctgaatccttcctaatgtgtgccatagtcgatggagttgcctcctacgggattcgcagtggagcaggtagccaagggcgaggcgaaaacagtgtctaaggtcgagctcagtgtcaggcgaggcggagttggcgcccaagggtcggtctgtcgtattagatgtcctatcaggggatggcaggcgcgtgcgtgcaaagtggcgcatgcgtaatcatgctgttggcattggacaagacagcggtcttgttgctgctgtgcacctatagcgccatgtagggtaggtatgtgcattgaatgcaggtgtcccccgttggccctcggtcacgccttgtcttcgtcgcctgagacgagctcgggcgagacagatatggcggccctagggcgaggtagcctcgggcgaggcagagattggggacctgcgtcgtgagaggctcgagcgaggcggagacatgcccgatgctatgactaatttaggatcgagctcgagcgagttggagacttggttccttgctctcgagcg

SEQ ID NO: 16960 - DNA, 389 bp, Zea Mays
ggcctctttcgggtttgttgcttgcttgtggtgcatctctctggctcttctaggggggtgatctgtagtggtgaagtcggagctgctttgttttggatgcggcaaagctcgacaacgatgacacaccaagttcaccttttggaaggttcaccgtaggaagtcggagctgctcgctttacttgtggtaagctcggcaatgctgtcatgctgatgtgcggttgagtccgtcaagtgtgttaagtacttggctgatgggatgctcatagtgggaagtcagagctgcttactgctgcttgtggtaagctcggcaactatgacgtgtggtgggttctgtcggtgtaaataggtagcctagggtttgttatcttactatcgtgataggtttttgg

SEQ ID NO: 16961 - DNA, 554 bp, Zea Mays
gcgtgttcatgcggcgtcagccatgggaatttcaatttaaaggaacggagagcattagtgggtcacgtaggtcatggtgctcacaagaaccagagtcggactaccagaattttggttggtcatcactagcgccatcaacgggttcgcctggccactaggacgcggagatgagtacgcactgcggggtccgatggggataatgagcgtcgtgatgaattctggcggaaacaggtagtcacgctggagctatacggccgtaagggacaatactttcaccgtgcactaccaatttgggacgaggaatggaagacaccacgaattttggcttctaccgatcacaccggaagacagtgaagacctcactgtggttcatggcgcaatttaaagggatggcgacctagctagctacccgcggtcacaaggcacgacgttagtgcatggcgaccacataacaaggaagtatagggtggtagaatttatgtgcgagtgacactgcgatggaaacacccgagccgcggtggccgccggtgaaatatccctacccctttccccag

SEQ ID NO: 16962 - DNA, 836 bp, Zea Mays
aaagttctagatagacttagttaaagcaacatgtatccttgtttggtatgatactagataaacttcctataaccgctcctccttagattataaaaggagggacaaagcaccccaggtcagatgatcagatcgtaagcaatagccactaatatacatgacgtaggatattatcttacatcgagagcctgaacctatctaaatccttatgtctcttgtgcgatttactttcagttctcggtctcgtgagctacctcgttaaattaatgtcaaacaatcattgacagttggcacgctaggtaggggaattcacgttaatcattgaacattaattttcagtcatgggcttcacataaggagaggaaatcatttttgacacctttaagttcgttggcgatgaatctgggactctcatgcttttgtctattacccaggcgattgcaaaaattatctacgacatactccactttttcagcaacgcgcttgggcacctcaggctagtgcatgacaactgacaacttcaagatcaggagtttcatattgaatagatccaatctatgctttagttcgacttttcccacgagaaccatttgaattcggactttgcgataatttggacaactgctatgacttggactccgattatgaggggactcggttcatgttcatggaatactatggccgataggagaatcttccattcaagaaagaaggtgacaacgatggcccaacaacaaagagacagagggctcaggaggaactacagcagagtggtcgagatgtccacgaccaaatctagatggtggagttttagggccagccagtccacaccatcccga

SEQ ID NO: 16963 - DNA, 631 bp, Zea Mays
gaaaaagcgcggtccgagtttatatggcctcccagggtaacgaggaacgagtccagcggcggaaagaacggccacggcaagctccaggcatcatccaccgcgaggaagccggatttggttagaaatctgtttgaggtgcgcttgatttgttatggagacgattctgacagcgagggcccgtatgcaagagacacatgaattcacgtgtagaagagagcagtcgctggcacagggacccgcctgccagccgttccgtgcggtgcctgcgttagaagtcagcaccacctagtgggccccacacgtcagccgaccatgcgcgtggtgagagggggatgggccgcgcggaggttactggccagatgggcctaaatcggttgatagaagcccagctaggctctttttcttttctttttctttttctgtttctttcctctttatttctttttttttgtttaaattcaaacctaatgtttgaattcgaaattggtttgcatatctcacaggtcatgagtaccaaatggaaatactaatttagggatgtatttatatttatttatagttatttttatttatatgtaatactcctttcttgttttatcattttaaattcccaattcaaattgaggtttaa

SEQ ID NO: 16964 - DNA, 565 bp, Zea Mays
ggactgttacgctataagaacagaatctggattggtacagatgattccctcaaacataccctggtcactgctttccaccacagccctgtgggaggtcattccggtgtcccagtaacctacaaaaaaatcaaacagtcatttgcttggcgcggcatgaagtcgttcgttcattcctgggttgcttcctgtgtcacttgtcaacaggctaaacctgaccggtcacgttctccaggcctcctacaaccacttcctgtgccacccacagcatggcacactatttcaatggacttcatcgaagggttaccaaaatctcaacgattcgattctattcttgtggtggtggacatgtttaccaagtatgcgcatttcataccactatctcaccccttctcggcagcgtctgtggccagggaatttttccagcacatataccgtttacacggccttcccactgctatcgtttcagatcgcgacaaagtgttcactagtcacttctggaaggaattgttcaagcttgctggagttactcttcttatgagcagctcttaccatccgcagaccgacg

SEQ ID NO: 16965 - DNA, 666 bp, Zea Mays
agacgatatgatcccggccgagtgacttctgctactatgaatggtccttcccataagggcgataacttgtgccgtccctcccccgttagaattcggcggaggacgagatctcctactgaaaaggatcgttgtcgcatggccttgtcatgatagcgtctcagagtctgctggtaccgtgccgattgaattattgtgttcagccgctcttcttcgagtacatcgacatcttccagcctggttgcttcggcctctgctatgctttcaaagatcaaccttgacgccccaaacttgagatcagcaggcagtactgcctctgacccatagaccatgaagaaaggagtgtttccatgcagagctcggctaggttgggttcttaggctccaaacgacgtagggcaattcccttatccactttcctgtgaacttttcatttttatcgaaaacctttttcctgagtgcctccaatatcatcccgttagctcgttcaagctgcccattagctctcgggtgtgctaccgaagcatacttgacctgaatgcttttttgctcgcagaaatcaaagaactctgaacttgtgaagttggatcccaggtcggttatgatattgttcggtattccgaacctgaatattatgtcttgtatgaattccacggctttagctgaggtc

SEQ ID NO: 16966 - DNA, 695 bp, Zea Mays
gccttatcatctttagataaggttggctcgactgtaggcacctttggcactacaatcagctcttcagtgctctgcataatcagaacagtttgctttgcttcggtagctgaagaggactctacgccaaatacagatactattacagccggttcaatataatgcggccggtgggtcagaaccttcacctttttgctctttggctcagctggggtgactgaagcggcaatcttcctctttttctcttgccctcgcagtgggtagcggtaatcagggtatacgaagccaatagcatcaaataccctgtttaatcttttcttaccccgacctccaaaaggctgcggacagagcattatctttagccttggagtatgctccaagtagctcatcactagtagcttcgatgcacttcagccagtcgtcgtttggctcatcaaacttctccctgaatctaaaggtgtacttcagccggaccagaccaccctcactagaatcggctatggtctccttcggcatatcctagctttccacaagtggccataccctgaaggatatatgctcttgaatcaaatcccttgtgccaatgaaggaacaaacagtgttaaaagccctttgacatgcttcaacagcgtcatcaatttccaccttcggccttcaaaggccgaagcgagaccaaatgggttgctgtatgatttctt

SEQ ID NO: 16967 - DNA, 928 bp, Zea Mays
cgtggcggcagcgctctacctcagggccttcctccccgacgctggcggcagcgtctcctgcgccgacgaagcctgcgaccctctcctccaggattcgtcctgcgcctcttccacatcatcctccgatgaagagctctcgcctcggctgccgccgcataagggaggcctgccgtctctgtccgacatggtcgcgcttctcactggcaggttaagaaaaaaattctcttgtgtgtatagcagtttttgtgaccctgcactctacttctctagtctctagaggaccgtttactcttggagtttctgagtgctctactgatgttggtttactcctcgtgtagtctggccttgtcgggggcagcaaccatcactttcttctacagtctaggtgaacatgggcttcagactgcattgctggtatgaaaattttccatccgacaatagatttcagttgacgtttgtgatttttagtttttcagtctaggagaaggtctagcactaaagatagcaggagtttatcaccagctttcgaattgtattttacttttgatcatttgcatccaccagccatgatttataattttatatgttttcaaatgctatatgcttctctgtggtcgaatcctatgcagtactacttgaaggcacaatttggttacaacaaagatgagtttgctaatctacttctaattgtcggtgctgccgggatgctatcacaggtaccaaaataatttgttacgtggaagctatagcattagtttttcggtcatttcaaggctgcagtagtattcgttcattcaagagatgtaatttatttttctcacgcttgatgtttgcagctcactgtaatgcctatcttggctccgattctgggtgaagagatgctgcttattgttgggcttctaggtggatgtactcatgtaataacttt

SEQ ID NO: 16968 - DNA, 425 bp, Zea Mays
ctgacgtaaggcctctgggccgcgcggtgctgcatttattgcggataaagcgcgccgcctgtctattccgctggcaggtgatgtgccaccttggcatttaatgagccctgccaccccactggcatgcgatgtgctgccttagcatttaatgtgccatgtccactccactgacgggtggcgaccaggctatcctgcaggcggcgtgcctgtccattccattggcaagtagtacgcccgcattgtggcatacactatgctcatcatcactcgtacgttgccagtgaagcttccgctgcacgccgatactacgcagactgcggatatcagggcgcaaggagattgccctggcgaccaacattagttgctccaagtatttcatccgttatgtccctaggcccgcatgtcagggctcaacatacttgtac

SEQ ID NO: 16969 - DNA, 722 bp, Zea Mays
gtagcaactgaagcttcagtcaggtctgatgtactagcagcagaccgctgcttatttgcagggaatgaacctatagaagccgccatctttgatgtaccattggatggagaagacctagctgtaattccttgggatcgtcctccaccataagaagcactggattgctgattgcgccatgggacaacattataatgacttgcataagattttccacgtgactcttgttgaatttttctctctgtacgcattgcttgatcaactagatcttgcaaggtacggtatgggaacatctcgacaaatccagaaatatcttcattgagtccgcctaaaaatcttgccatggttgactcaggatcttctctgattctagtttgcactaacaacaactccatctccttaaaatattcatcaacggatttctttccttgcttcaataattgcaatcgatttcgaagatcacgttgatagctggaaggaacaaatcgactcttcatcactcgcttcatctcctcctatgtattaatatgtcttagtcccaatctaagttgatgttcttgcagttgattccaccaagtaagagcataaccagaaaactcgactgaggccaagttcactcggtgttgatctgaaaaattgtgaactctgaaaatttgatcacattgctcagcccaattaagatattcatctgcactttctttcccagtaaatttaggaatatccaa

SEQ ID NO: 16970 - DNA, 410 bp, Zea Mays
tgaactatgtaccattgtccgttatgattaaattcggtacccaaaagcggtggatgatgttggtgatgaatttcatggtctgcttagaggtgattttcatgataggccatgcctcgatccacttagtaaatttatcaatcgcaaccaagacatgtgtgtagtcttcatgtgcccttttgagaggttcgaccagatcgagcccccagactttctaaaaaggagctttagtgctcaagctccgcttgaacactgctatggttggtagcccctcttggtgacagcaagagtgtgacctatgtatcccgatcctgtcgtccggtagacttgtaacgccccgaattttggagttgaatttttctttctccttcactcatcaaattcgggtgccacctctcctatttttctttttc

SEQ ID NO: 16971 - DNA, 733 bp, Zea Mays
gttctgtaaacaaggaccaagggttaatgcccgaccacatgaacaagggtgtttctcaagaacattcaagtgatgaaggatatgaaacgcctaccgacccctgtcctagcatagatcgggccgctcggcgttaattgcatcgtgacccggttatcatccacaagagtgtgaggtaaagtacacatctttagtttcgtatgtgtatacctaattagttgatttcacaatgactattacacatgaataggaggtcttgtctcaatatcatgcgataattgatgaagccgtggcacattaccaagacgcactggggctgaaccaagacaaagacacaccggtaccgaccgatacaaccaccgagaggtcaaggaaaaggacacagagcgaccggaaaagaggtgataggggactgaacaagtttcctgacaaaacatataaaatctcagatgtgagcccgaaaggtcagcccctagttccagaagaggcactccctaagttccggaatgcacttgggttcttagttagggataatcttgacatcacaatccgacattggaaagatgtttcagaagatgtcaagaatcaaatatggaataagctattaacgaggtttgttctacctcggggttcagaagaactcgtgaaggaatacacgatgaagcagcttgcaatcaatttccgaaactggaggtccgagatgaatacaaaatttgcaaagaaaggcctagacccg

SEQ ID NO: 16972 - DNA, 301 bp, Zea Mays
acattgagatctatcttcatcagctgactcctaacactatcgttaggctcagcgttttcatctaggctctccgaagccagggaatagactcgaatgccgaagccttctgccgagtgcacgagcttcactatcagacgaaggccagagaagatagtcttcatgagaattttggttgctacaacttcacctaccgcaaagatataagaccccggtggttagctatcgcaccaaatggcctactggttggaaaaatgagtggttttatgttaaagccgatgagaagaagagggagaagctgaag

SEQ ID NO: 16973 - DNA, 308 bp, Zea Mays
ggacgattgtggtttgatgttgaggagagctcgttgtagccgttgttcaggccaggaatgactacgattagaccaaacataccctttcgcttctttaatctggggtcgtccgatcgagttttgataggcgggattcaatcccttgcataccggtttgggttgcatgtgggcacccttggattgggatctcacggctaggactggcctcagtttattcagctgcgcaaaatttctaaaagagcccctcgagtctagagtaatcaacccgtggtccggccctggtcaaagactaatgcagcggggtccaa

SEQ ID NO: 16974 - DNA, 669 bp, Zea Mays
gttcagaagatatcagaacagctacattacttaaaaatggacaggaaccaaatatccacacagattatttatgccctcggacaaagctacattccagtctccgcgatcgaagcaaactaatggaacaaatgctagtaaatgacagcctgcaagctaaggtacgaactatgtctgcacgattataactatcaatagtggatttaattctatgtatgaagtggtaactatatcctcccctgcatgattaaccaaccaataattgattacaaggactagccaaacagccctcgcagtcagttccagttcatcgacagttcagacttcagactacctctgatctgctaatgccttcttgtcataagagttcagagcaacgtaataatgtacccttaagactgatggtgaagaataacaagaacatgtggggattgccgtatagtattcgtttacaccaccgcatacaccagcgctacctgtattcttgctaaaactacctgtattcttgctaaaactacctgtattcttgctaacaccagcgcatacaccagcgctacctatattcttgctaaaactacctgtagcgcctacaccaacgctacctgtattgctaaaactacctgtatgccttcatgtattcttgctagaacatgtgggcatcgcatacaccag

SEQ ID NO: 16975 - DNA, 404 bp, Zea Mays
agatgaggcagcacgaacccattttggtgaatcaaatgacgatgagtatgaggatgaacttcaggcggctctgcatcagtcacgtgtggagcacaaatatagttagagggctggtgcaaggtatggcagaggtggcagatctggatcctctagatagagggtatctcgagggccacttgataggatgatgggaaggagtatggagacaaagagcaatcgacgtcgttcggttttattttttgtccaagatggaatctgtagctcaaatagctccagttcttctaactatccgtctggacaaagacacaatctataacccttatgcatgataatgccaatcgggttagggaccagcaggcgaagtaccaccatcgatcatgtatgagtatggaccccctccaccg

SEQ ID NO: 16976 - DNA, 525 bp, Zea Mays
ccagcatccgtatcggcgcgaatctgacaagctggtgctatcggattcgcatttactactacgtggcctgcctgccacggcggctacctacgtacagtaccccctgctagggctagcggtagcgcctgccatgccacttgtaccgttccaaagcgaccatgcgccagagtagagatgtatgatgatctattgcaaatcaaatcaaaccaaccgctgcgagaaggccaggtcctcccgtgactctggacgccgttggtgaaaatggcaggctatgtatgcatcacactcacacactcgcacgaggatccctactgacctcggatctgtcgcggaaacagccgcgctagctagttttcacgggcgctgcgcatcttgtgctcacgctccacaaggctgatggatacttgcgttcaactcatccccgtacaacagcggaggaaaacacgcacaaccaacccaacccaaccaggcatttactcaagaaatcaccaaatttcagcacataaatttacagctgtactgttt

SEQ ID NO: 16977 - DNA, 384 bp, Zea Mays
gacgaacgctcgtgcgcgcgcgcacgcgatcgtccaatccacgctgcagcagctttctttgctatgcgctgcgccgcagccggcagcccatcctctcttgctgctagcctgctacagtgccttcttgtgctcctctctgcatccacccacgtccacgcacacttgctcgcgcctgcctgtcgcatggcctagtagagagagatgaggccgccagggccagccagggggtggacggcaagcaagatctctgactgctagtgacccggccccgtcacagtagtaccctgtgtactccgtgtgcatgccttagcgcgcgcgcgcggcagttccgtgttcgtgtggcaccgctcagcccactgccggtttcctgctgcatgctttctg

SEQ ID NO: 16978 - DNA, 425 bp, Zea Mays
ccaagatccaatggtgtttaatctagcagcagaaagcatatctgtagtagaagaattcatggatgtattcccagaagaattgccaggaatgccgccagaaagagaggtagagttctacattgatctaattcccgacaccgcaccaatcgcaaaaagaccgtaccgcacggctcccaccgaattagcagaactaaaactccagatcgcagaacttcaacagaaagggtacatttgtcccagctcatctccttggggagcaccagttctgttcgtcaccaaaaaggatggaagtatgaggatgtgcattgactatcgatccttaaatgaagtcacaataaaaaacaagtacccactacctcggattgttgacctcttcgaccagcttcaaggggccaagtatttctccaagatagatctaatgtccg

SEQ ID NO: 16979 - DNA, 349 bp, Zea Mays
gaaggttttaccctcactgtcggggtgccttgcgcatcggaggactgggaattcctcaccgtcgttgggcctccgccgcgggactgcgccatcgcgtggcctgggaattcttcgccgcgaatcgaggtaatcggtgtaccatcttcttcgcttttcactggtcgaggtgtagggtagttgagtttggggattagagctccgaggcgtggaattaacggtagtccggcgatgttccgccgtgttgggcggcggcgccgctgttctggcgtcgggagaaggaagatgggcgatggccgttggatcgtgaatgtgcggcccagattagcttaggcataccccttcgcgtgtg

SEQ ID NO: 16980 - DNA, 353 bp, Zea Mays
aagagtcaaagctgaacatcaaagactagctggattattgcacccgttgaagatacccaaatgaaagtgggaagagattggtatggattgcctcgcaccccgaaaggatatgattctatatgggtgattgtggatagactgaccaaagtgtctcatttcattccggtcaagactacttataaaggctctcagctagcagagttatatatggctcgaattgtgtgtttacacggagtaccaaggaagatcgtgtctgatcgaggttcacagtttacctctaggttttggaaaagctttcatgagaatctggatacaaagttgaatttcagttcggcctatcaccctcagactga

SEQ ID NO: 16981 - DNA, 346 bp, Zea Mays
ctctagagtcagatcctgctgcacagcaatcggttccaacttgatttgatggtccggatcccacaaaaacttcctcaacatagagacatggaataccgggtgtacccctgccatggaatccggcaattgcaagcgataagccaagatgccaacctgggctaagatagagaatagtccaatgtatctcgggctaagcttcccggagacaccgaactgaacaactcctttagtaggtgataccctgagaaggacttgatcccccactgcaaactccaagtcccgccttctcacatcagcataactcttctaacggctctgagcggccaaaatattctgacgaatttcc

SEQ ID NO: 16982 - DNA, 1483 bp, Zea Mays
gccaaggcttagcgtaggctccaaaccagtagtcttttaggcccaccctcgcataagaggtttgagagatcttcttccctccctctctcgcttgtaacctgcttgtaacccatattacgagcatcgagtaacaaagatgtcggtagcgtgagccaccaaagactggatgtagggacgttctgtccgaaccactataaacgttgcacccaccgagcacaccaatcgaagcatagaaccagcacatagaaatttacttgttagagcagaggtttgaaacaccgacagttggtgcgccaggtaggggtcctgtgcgttctcgacgaactcttcaggctccagatggccgccgcgacgccgatcggttcctctaaacgacaatctactctgggaaccttaacttcgtcttctacgatgaaggggaaagggtcaaggccctggaagcctgaccccttcatcctaggagtctcaacgctatgacgtggtcctgcggtgacccccatgccgttctcactctcagagtgattgatcgcttcaggagcctcgacttcatcatcgacaaagatgacgagatggtccaagcgtcacccacctgaccttcaccgcccaaaaacccgaacatcgttgtggaagcactcggcggcctcaaccttaccctacaggggcaaggtacagagcagggattgtccttgccctccaaggcctacaaaataaggcgacacattgcaacccatatgggccctgacctgtcatatgacgatctgcgagccttcttctcatcctacgtggatcttttcacatggtatgacgaggaaaggttgccttgccatgatgactctagtagcagccctcacacgtttccacctcactagtgccatgctccgggggtgatcgtggcccagagccacctcccaactaccgatgacttggagtttgtcgggatagtcgaaggtggtggatacctcatttttgatgccctttgctcaggctcaggctcggaccttgtctccccaacaagcagtgaggacagacctcccaacgatgaggaaaatgaaggacaccttatcctcgcgacccatgtcccccctagaaggacatgcgttgtcggtgacactagcaaactagggtgctacatgaggcaagaccctaaggaaccccccccccccccccgtagttcccggtcggaacgggttcacatcccgcttgtatttcctcagcgtttgtcaataaaaagagatttaaaattgttcctagtgtcggacataggaaaaagggggtggaccccaacctaggcccgactcaatctctctatcgacctctctctcttcctttccttttctcgcctcctctctataactcacagggtaggcggcacgacgctgaggacaccggaggagcaaggcaaatacggaggagtcaacggagtgatgtgcgggaacccccaccgacaaaccagcgacattactcttgcctttcaaaactaatc

SEQ ID NO: 16983 - DNA, 534 bp, Zea Mays
ctcaggacttcatcaatcatttcaccaaaggtttcagatagttcaatctgcttcgaaacaatcatctgatggctcagctaaagagaatcacaatacttatccacctccttgtcatgagcatcaaacattgattcaaacattggtcgatgcggggagggcaaacatttcagcttgttgccaatcaaatgcttgatacgtggcacatatatgttgaaaacgtcagaaacgggccgttctggtgcaatgacgtaacacgtttctgaacggctacgaaactgtataaagcccagttacaactgttagcagtaattaaaattgtaacatctgcataacaggacaaaaaatgtttatgtctaacctctgcatggccgaatggttcaccagttttacggggggcgggggacgtctgtcacccctagccaaatctcttatggtctcattatcaaaaaacttaatgcggggagtaccatatttgttatcaggagatgcagggtgatgtaagtgatcaagatagtaaatctaaaaaaaagaatg

SEQ ID NO: 16984 - DNA, 468 bp, Zea Mays
gggataccggagagcttcaaggagttgagatccctgtcgtacctctcgctgaccaggaatagtttcacaacctggcatagacattgcaggtcttgcaacacctgcgcaacctgacaagcttggtgctgaccaggaatttccgcggcggtgagacaatgcaggtgctcatcctgacaaactgtctactcatcggcgtaaatcccacgtggctgcagagcttgggaagcctcaatgtgctggaaatttcatgtaacaagttagatgggaatatcccgccatggctggggaagctagacaactgcttcaacattgacctctcaaacaattctttcagcggtaagctatctgtcagcttcacacagatgaggagcttgaattcaaataatggctcgagcaagcggtcacccacagagggttcccattgttcagcaataaaagcaaatccgccatcgtcgcccttggactggg

SEQ ID NO: 16985 - DNA, 456 bp, Zea Mays
gtttacgttatgaaatagatcgatggtttacactaaaatatatacccatttatgatgttttggttcacgttttacgctgaaatccgtctgaactcccacgcacgatcagctccatatcttatgttccgatatatacggtaacttctagcttcgtgggcgcgctaatcacgatggtgtgtggacccacctgaacgaaccaatgaaaagttggttgccgctctcatgtcatgcaagtctgaaccattaaatatgctagcataaacacgagtaggaaccaactacccgaccagcgaacacgacgctgacccaccttcgtatatcccaactcgaccccaccacgtgcgcaccttctatttacgcaaaatataacacatgtttacgcatgcataaacgtgctccacaatcgcgcggactcacgcgccccactggcccgacctgaccacacgcgtgaccact

SEQ ID NO: 16986 - DNA, 1030 bp, Zea Mays
gctgtggcatttgcccctgaaaagtgttagggaaaacaccaaacatccccgatcccgaagggaagcgatcaccacaagaagaaaattgtggtccgctggggaagtatgaaccaaaacctctgtcacatggtccttggccatatgatacatgaccagcatcccgttgggcacgaccaccacgtggtctcactgcctgagacttagcgacaagaggcaaaacacctctaggcctcccaggacgtctctgaacaggctgagcatgaacaccatgagagaggcggttcatgtccttcctgctcgacttataaacccgccgctcatctctcttcctcctaaagcaaaaagaagctagatgcccatccctctcacaatattcacaatggtacctcacctctctcttgggtggattttgtttgtagaaggcgactttcttttcagatgactgaggggctctaggaaggggatcgctagagatgttgggaaatgtgtcaagtgtgttcctaagatggttaggttttggaagccacacttgtttctgaggaggatctctcataggttcatcaatcacaccatctctcacagggatgactagcttagtagaggtggttttgataagcttgggagtggatgaaggtttctctgaaggtgtcaaaccactgcactcacccaccttcccaaagcaagcgacactcccatccttagtagcaaagcctaacctcggtccgcaagttcccctcttgaactgactgaccatcatgcccaactggggctcactgcacgacacccaactcaagatagatcgaaggtatgtgttttcttccttgatttttgtcttgtcgtgtctgcaggaatcaagggcagattgcaaaccctcacaaagtgcacactgcgcaggtgcaggggcactcactgagctagccttctcaagcaaagctatcatagcgtctctctctgctagctcagactgcaagccaggacaaatggtacacgcacccaacaggatagacctagatctcaactcgtcacgctc

SEQ ID NO: 16987 - DNA, 588 bp, Zea Mays
gcagggggctatgcgcaagatatcccagacacagagaacagggtccctggacggcgggttgttttctgataagcgtaggggttcttttgtgaaatgagcggccgaaggggtatcttgagttctcggccgcacgatatagtatggacggcacggattagacttagggttgcccgaaccggtatgctgagatggtccttggattcagaatcaaaggctcggatttaattaaccctagatctagttcctgtcgcacgttggaagatcgagcgaaggtgtacgctggacctaatctcagccgttcactacgaaaccaacggtcagggtgcgttcttccaccccgccgcactgccacggaggagagaaaccccgcgcggcggcgcccgtgaccggagatccaatccgtgcactcgaacgtccattttctaattcggtctagctacatattgcagatggtacactaagcacggggatgagtttattaccaaggatttgcggtgttgtgtattcctgacgaggagttgcggccgcaagatgaaactcgcccgtcggtgagaaattccactccaattcctggcacacggcctctgc

SEQ ID NO: 16988 - DNA, 747 bp, Zea Mays
atcgcctaactcttataaatccagttttgaaggaagaatttgctctcagttcaatccttttcctgctttaatctacatatattgtttcctctaacccccacatggttcctaacttctgttgtgatcatgtaactagattgtcgcttagtttgggccccctttggtgttggacgaggatcgaactactagggacctctagctaggggaaaggaccatgttctcgaaggtggtccagagctgggtagccgtttagcctggttctgtaccataagcctacaccctccaccactctagaactgttgtcctaatatatcaaactgggtccctaaaggtctgaaccttgaccaaacttaagggttggttcctaaaactctgctcggcaggctctaactacatgattcgaaagattgagcacaacaaagtaggagccttgagggtacaatactaagtgttgatcttgagttgtgttcaggatcaatttatggcttgatcacggtttcagaaatgcatcaccgcacggggtacaccagtaacaggcaaggcggttagccacccccatcatgccaattgtgcacgatacggtgaatgggtcatttcatgtcccatcaagccacccgcgtcaaacaacgtcatgatggtcacctcttttactgcggcgccttagtaactaccacatatcgaccatgtaaaaaactgaaactcaccccaacttctcacatagagcaaggggtggaccgagcaagctcc

SEQ ID NO: 16989 - DNA, 528 bp, Zea Mays
gcaataaatgcggaggccgcgcggctcaaagcccttacgtcacgctccgcctgctggcctacgtcacggacaataagccatgttgctgctttagacccttggccgagcgggggggcggaggcgctacggatagagccaggacacgcatcagtcccagacccaggcctaggttatgacactccttttcccgggaccttgttatgggcggtccggagctcacttggtggggtccgaaccctttctaatggcttcgggctgctttacttcgggggtccgggtcgtgcgcataggggtccagcgtcttctaggcccgatagcgttatctccgagaacgccaccctaactgcccacaagaaacccctgaagatgttctccgcgcggctatgggtagccgcacagacatcgtgccttcataccgtaggtaggggtacccctaatctagggtaccgacagtggcccccggacccacctcaggggaggatgcgagcctacaggtggggccagagtttgactggcgatcggctcgct

SEQ ID NO: 16990 - DNA, 676 bp, Zea Mays
agcgcggctgtcttcaccgccggtggctttccgccgtgattcacgtcgccggcgtcacgattcgtgctcgggtaagtggagaacttcgcggcgtcaaaagatcgtcgtcaccgccgagctggaagtcaccccgatcggccacggcacatctcccctggctcaccgcccgcggtaaaatgctcaccgtcgaccgccgcctctcggccttgtgccgcgtggctcaactctttcaccgtgtcgccgtgacctcctctgaactttccgtggctcatcggagttactgccacgctattgaacacgtagccgcgcgccaaggttcttcttcccctccggccgccagcacaacctgctcaaattaatcgccgccgctgtcgctccctataaattgagccccccaccagttccgtaaggtcctaagctaaccagccaccgctaatcggccacaatcattcactcgtgtgctcgaattcggagtttcccccaaatccgatttccgccaccgtgaaaccaagctcaccgtcgccagccatactctggttagtccctcccctctgctcccttgtttaagcattctcgtgcatctacgatgcttgccgagccattgaattgaactaagggctctccggtcgccgggaacgcgaccatatagccgctatgcttacggccaccgtggcca

SEQ ID NO: 16991 - DNA, 333 bp, Zea Mays
gcttgccccagtggttggctaagcatgtctgaatggctctctggtaagtcgctccagcgtttttgaggctaaacaacatggaggtatagcagaaagctccaaacggggtgatgaatgctgttttttccttgtcttcttttgccaagctgatctgatgatacccggagtagcaatctaagaaggacaacacagaacacccagcggtcgagtctaccacctggtctatcctaggaagtccgaagggatccttcggacagtgtttgttgagatccgtatagtcgatgcacatgcgccaatccactttattctttttgagtacaagaacaggatttg

SEQ ID NO: 16992 - DNA, 782 bp, Zea Mays
gagtaatcctttagcccccgagtgatacacatggatcgcttgaaggtttatgtggtgtaaggggcggacccttttctgttgtgattcgtcacacaccgggtgcaagtccataggtcttttgggtgcatgtgatcgcatcggtcatacgtgcgcggggtatagatcttcctctgttcttcgtgtagatttcctggcctgccgcgcccctgactcgtctaatcaaggcacagtgcaagaataggttgcaacgtaggatgaagtacttctactcgtcgtacccttgcctcgtttaaccagggcagggcacatgatttggttgcggcgtaggctgacatgctaccgtgtgtagggatgctccggcgatgtcgtcatatcttctccgcctatcaccctttgccttggttgctcgcgcactatagtgggagccatgatggcagctgcccacgcggcgcagagagtcaatggccctatcttggtaacgcgcgagccactatgtggtttgtgcatttcggtcgtagcacccgccactggagtgggcaggtaaatgtcttgtctgtggttaatgatgaggcgtgctggaggtcaatatcgtgttttcccgatgattcacgccatgtgtcacaggatacacggcaacgccgggtttcacctagtgagggaggcagtggtcaacaccgctctaccttatgtcagctccttttcacccccttgcttggtgatctgcaaaaggcatccctgcacatggccttgttagggcgttcaatggagtatctatgtgtttt

SEQ ID NO: 16993 - DNA, 385 bp, Zea Mays
ctcgactcagaaacccgccgctcatctctcttcctcctaaagcaaaaagaagctagatgcccatccctctcacaatactcacaatggtacctcacctctgtcttgggtggattttgttagtgggaggaggctttctttttggatggttgaggggctctaggaaggggatcgctagagatgtcgggaaaggtgtcaagtgtgttcctgagatggttaggttttggaagccacacttgtttctgaggaggagctctcacaagttcattgatcacaccatctctcataggggtgataggcttagtaggggtggttttgataagcttgggatgggtgaaggtttctctgaaggtgtcaaaccactacactcaataaccttcccaaagcg

SEQ ID NO: 16994 - DNA, 534 bp, Zea Mays
ggcacttggggaggacgccgtggacagagcaagagaccaagctagggttctgtggccatgggaacatggtggagccatggaggtacggatgtcgtgccgaggcgatgaccggcgactgcagatgtgcctagggcatggcgcagtgtgcagtaggagaataaatgggcgctggtgtacagagggacagggtggcagccatggctaggagagagggcgccatgggtggctgcatcgggttccagcaatggggaaaacctcccagcaccatggacccgagggggatgaaggcgctactgctcaaaagcttggggagggagtttggggaggccaagggtgtccatttgtaggcgagggagcataagagcttggacatgtggcggtaatggaggtagcaagctctgtgcattggtgggcatgggtggctgctaggcaatgttgttttccttttggacgaagcaacgaacacacattgggcgcccatttttgtcattttctcttgggaatcggatctggattactgtaggagattgtaac

SEQ ID NO: 16995 - DNA, 1479 bp, Zea Mays
tatcaacagaatcaatgttttgggccataaatgggtcgttgtgggtttgctcgtcgttgacctaccatatttcttctcaccaaatagtaggtagccccagtcttggatcatatcctcctctgcacatggtcgtcgaacccttccctaatctgcgcccatggctagcaacgcccctcccggattcgtgtctgctctgttcttgccccatcctagatgtgaatcgcgtggccatcatcactcagtcctagctctgagcccgtggccagcgtcgcctccatcgagctcaacattcttcaccggatgtggttgcgtcgtgtgatggaggtcgacatcaccgtgcttggagacgtcacgggcaatgccacctccatttctgcactcgatctccgactcccaagtatctgctcgatctcctctctttcctcgctctagcccttcttttacaactttttggtgtcgtcagcgttgcggctgaaccaagttgctccacatcagcagtgttgttgctttgacctccagaagcttccaaggcagcgcaggagagaacaggaggaggcggcgcgcgtgtgaacagttgatagcgagcggtcgccactccgccaaatgttgcaaaccaggaatgcatgctatattttagcagaagttttagcgtttcttgttggagctatactagacatgtaaaacctctatatttagggtacatgatgtttatagtcacttgttggagacaacctaaggctacctgcagcggtactgcgaggtgtccccaccacttctttagcggctacaggagcacgctacacgccacaacggtgccccatatggtgcatgtcaaatcgcggtaggcttctctctctccctccagatgaagttgggctctaccaagcggtcgccaacttcgctctgtctcccgcgttcatgtcgaggttggcaacgaatgtattcgggcaacgctcgaggcgacgatagtctcccccaccgctcggaccttccaaggagttcctggagcatagtgtcttcatcccacatcactattgtcatcctagatcctcactagcttccgcttcttccctcagtcaccctcggcacgtaatgacggcgacgctgatacttgggcgctcagcaatggcagggcagtcctagactccacgtatgcctcagtggctctcccacacttgtcttgccaaccgcctcacgcctttgcctctggtcatccgcacatcggccgacgactctacgtgtcgtcctcctgctcccctcctcccactggtggaccatcaaccgcgcccggctctagcgtctgcactatgcgccacatgcaatcgttgggtagcagaagctagcagcccgctttgaatgacctagatcatatgaagaagatgccccagatgctactcgactacaaggtttatgtttctcaggtgactaaatacatgatgtgctgatgttagcgattcttgtgtggaagtgaaatcttgc

SEQ ID NO: 16996 - DNA, 908 bp, Zea Mays
tcgtctttttccttcaaagagtcttcgagttctttgactttatcttccaaacctttgataataatttcattcttcctttcctcatcatcttgttgcatttttaaagctttgctcaacaacatgctctgcaaaaacaaactcgaaattaaaatatttaagcgaatacgaacacatcagtggtaacttgaagaagagttcttactttaaagttggaataaaacagggtgcctatgacgtgttgtcgcctatagcagctgatatccttttcaagcttcgggaatctaacactctttgacagggtgcctatgatttttgcaccagcacgatcccggatgcatcctaggatttcttcgtcaaccccgccaaagagtactgatccaggctggtagccgcatgagatagcaaattccttcaattatgccttatcctcttcggaaagccgttggccacccaggtgccgtaggtcgaagtctgcttcttccggagagatttctttagccttcttccctttgtctgaaacttctatggccacttccttctccacagccacgcctgatacaattttgtcaatttcggacatggtagctgtgagatcttcgccttcagttgcaacgacagcttcgacatcagtagatttgacagtcttgtctgccgaagctagaggcgaggtttgctcaatcgcctgcagtatgttcatcatacgtcactttttctgactcccgtctcttccattggtaaccgaagggttttcctttttctgtaaaaggtttgtcagttccaataccagaggacttagcagcttgaatggttgggattcagtatcaccttcaaaatttctgacacttcggcagcagaaggtgagggagggctcatagttttctccggcgcatcatgtaccttcggttcga

SEQ ID NO: 16997 - DNA, 726 bp, Zea Mays
gccgtcggcgccaatatgatatgacgggtcgcctgctccaatcacgttccactccagagatgagacctctccattcccattcggcgatgtctttgggggactttgataccttgcgaagactcacctaccattcccacactttgttttgacaccccaatatttttccgaccccacggttcgctaggggcaaccccgaccgaagtccttgcagccgcaggggggcgaccctcgacagagactccacgacagacaaatctagcaccacaaaataatctagatcatctttcgaagactcatcacccatcctagcgaatgggctcaccaacccctcaccctccgaagactatgactcaacatctatccattgagacattaacgagttatcattctcgttatcatcaaagtttgcttgcgcaggcccagacaccgaaacctgcacagcagccgatcttaagtatcatatacaaaacaaacaccgtcaaaccattcctactatattctttaaacctgcgtaaaagtcctcgacgccgtagggccctcagcgccgccttccttgagcgaggattgctcttccgctcctgtctccaccgcagcgtcctttcgggccaccgatctctcaaggccagcaaggtcctccacctcttcatccctcatcacctgcgaagacagcacaacaatgttttagacaacaagcgcacacacacaccaccatcgacaaagacaaac

SEQ ID NO: 16998 - DNA, 787 bp, Zea Mays
ctgggcgcgagctcggtgcggatctagccctcctcggccatgcgcgacaaccatggcgagcagagaagtgcacagaaggtagagagagtaggaaggaaagaggagcaggaacgcgcggcgaggggagaaggagccagggcgccgcggtgggagatggagcaagggccaggaagctacgcgcgagagagatggaatgggcaccgagcgctgcggggaggagataagctccgtgaagaaaaatgtagggagaaggcggcgggatcttcttcccgcagctgagtagcgcgcgttagagcgagaaaaaaaatctaggcggctcgagataggaacgagagagaagatctttttccattttttaatttcttctttctttttttaacatagaaccgtagatattttgaatcacgatttttagcgataatcaaagggtcgaataattaggatcgacagcaacaattgcacaggatttggtttgatgaatactctatagtcggatgaatacgtatcgttaattcactttttgaagatttagatcgaaacgagaagcaacggaccgaattaaacggatttcggcttcggtatttagtctgtgcttaactcgtctaacctggtaaatctcatccactaatcaagcacccaatttctctaccgaagacaacgcactggaaaaacaggcccaattattactcttgcgctcgccaaaacagcactgaaggataaattgcatcataatctcgcgcatgatttctctcagacaatgtgcgattcagattattttagtccaaac

SEQ ID NO: 16999 - DNA, 421 bp, Zea Mays
gagtatctctgacggaattcctccgacatcgtcttctaatacgcaagtaagcacacgaccggtatggtgaatcgctccaccatgtcttgttcatggggtactttagagacctatggtgttgaggctccccatagtggactttggctggtcccacgtcgtagggtcgggggcattaagggtcgtacgtgatgatgcctcgtcttgttgacggggactctctgacactccccgactttccatggtgtcaatcaagacagtatttagtggtgacgtgccttatcgtggctggcgtgggtcaatagtgtctgtgttttcacgctaagcgggtacaggtgtgtgcctgccaggcacgtgtcggggggtcatggaactgcggttcataaatgtactgcctccaattgtgggtcttcatatctctgcc

SEQ ID NO: 17000 - DNA, 607 bp, Zea Mays
tgaaacaccatccaaatcattgattgtaaaaaaggcatatatggctggatactcctttcaggatttggttcaggcagatcgatatcttgacagctctactatcagtgcacaagtatctgccattgaaacaccatctgatttggggagcaaaggcaaattcgtcagaaacctactgacagaccttgttacaaacaaaaaaaagacaggtaaaccatggcaaggtccccttccggctccaaggatttctccacctttaacacttgcagactgtccgttccgtgttaatcatagattccaacgaattggtgagcagggatcaggtaacatggtgacaatcagtgaccagagctggggaaggaagagtgatgctgctcaaaatttgaaactccacgcgagatttcaggcttcagttacagaaggcagcacctcaaaaaaaggaaacaccaagttcaggccaaattgggcccttgcacgcctgttgaccagacggggcaagttttttggcaaagcccagcccacaaacgtttgccccaaaggtgtcataccctacgtaccaccactgcccagatttgcagccgccgtcaattctcctactctcccagttttg

SEQ ID NO: 17001 - DNA, 703 bp, Zea Mays
gagaaggtggagcccttgatggcaatgctactggtagagacaatggtcataaagaggatgagggggtggagaaggtggagcccttaatggtgatggtggtggtggggacaatgggttagaaagaggataagaaggtggcaatggtaggtcaaaaggaagagactgggtagcaggtgaagattgacgaggtgaggatggtttgttagcaataggatctgcatgtgatgacccttgagttagggggcatgagaatatgatgatggtggctcgaccaattggacatcccatcgaggccaaaggatgaaattcttcatagcctgttcaagtgtctcaatacctttgggcccagggatgtctagcatgtcgtccttgtatccttggacgactgccgacacttctaccctgcaataatcttccagaattttgtgatcatggaactaccatcctagaatcgcaaggcatatggctacttcccttgtatgaatattgttaataccatatattataactagggaacacgacacaggccttgcgagtaaactagatagcagaccttatttcctgtagacacaatagagcttgggacgattggacactctatggaagatggatgagctaatagaattagttgcatctatggagcttgagtagtcatttgttgaacggacattacacacaccaaatgctacatcaattctagttg

SEQ ID NO: 17002 - DNA, 414 bp, Zea Mays
ctgaaggggatgtgcctccagagtcagccagactcggcaacgtggcacccgatgctcctcatacagctgcatcgtgtacaaagggggcgtagggtaaccggtggagttgagcacttcccataagatggaaggaaaaccatcgtgagaaaggaaatcagaactgaaacgagtgtctcctccattggcgggggtgggtgaagtcatctctggaagagtatcaaatgtaaagattatggtggaagaaaggaaaaagagcctgggtggtttgaaaagaagcgggttagatcacatttttacttctttaatttctaatccttttagtttttataatgcatgcatgctgaacataacatctcctctccgaatcggaagggtgctttttagggcatcctttaaatcctaagactggcccat

SEQ ID NO: 17003 - DNA, 826 bp, Zea Mays
aagaaaggcagtgccctctcagccaaccttgaaacgaagcggctaagggctgccagcgacctggtaagcttttggatgtccttaacatgagtgggaggcctcattacctcaatagccttgattttctccgggttagcttcaatgcctcggtatgaaaccaggaaccccagcaacttccttgccgagacaccgaagatgcatttctccgggtttagcttggtgcgggttgcccgtagcttgccgaaaaccagggccaggtcttccactatagccaacccttccctagtcttgaccacgatgtcatcgacgtaaatttccaccttatcccggatcagatccccgaaggtcttgctcattgcccgtacaaaggttggcaaggcattcctcagaccgtagggcattacaacataatagtatagtccatctactgttacaaaagtggtatgcttcctatcctccttagctatccggatttggtggaaaccagagtaagcgtccaagaaggataagaggtcgcaccccgaagtagagtccacaatctgatctatacgcggcagtggatacgggtccttggggcatgcgttattcaggatggtgtagtcgatgcacattcgaagcttcccgttggccttcgacacgacgactgggttggccagccacaccgggtgatgaacctcttcaataaagccagcatgcaacagcttccgggcttcctctcagatgaagtcctaccgttccacggactgtcttcgtggcttctggcttactggcttggcgtccgggtaaacctttagctggtgctcgatcaccaccctggggatccccg

SEQ ID NO: 17004 - DNA, 401 bp, Zea Mays
catcctgtccagttgttttcccttagttgctgccctgggtctccttggtgctcgctgtgtaggagctacaaaatagaattcacatttattgaataatgaaattgttttgtttcatgcaaattagcaaaagagatgccatatttgactgaaaaaactagaacttgccttcagtttcttcatctctagctacattgcctttagcatcacctgtactgtcatgagcagcagatgccatgtcttcctctgcagctctgctgaaaatgatcagcaagtccaggtgtagtagggctgtttggtatgtcatcattaccatctgttggttcctatacattgtggccatttgtctctgtagagtgaagcctttttgaagattgctcctctggttgtggacctgccctcac

SEQ ID NO: 17005 - DNA, 996 bp, Zea Mays
attccagtaaaacataaggtctcttttgaaagaagcgcacgacgaaggggtatcggtgaatctgagtcgttagatctactttcaacggataggattagatctagagtgaaacaaaccggtacgtgtctacagccgttggatccgagatctgtggtcagggtttaatgaaggcgggtttcaatcacggccctatgatccagatcctgcagagtagatttttaatagccagaaggttatcgccgatatgatcctgtccattgaatactggatgaacgccctagatcacgactctgaagcggtatccgcaaatctaatctccaccgtctaatcctcacccaacggcccaccggccttcttgctccccgcgctctaccatcctcctttctctctcttcaagttgtctgctcgccggagttcggccgattcggcgagctagggcaccgagctcaccccagataggtcctatgcggagtataggcgagagcgaactatagggacccgctattacctgcaatcccgtcgtcggaagccgcgaccacgtaccacggcggaaaggaaatgctgatggtcgattacttgtgcctagatggttctccgagcacaattggctcagcgccctcactccacacgacgaggcgaggcgcgggatcctaactccgagggcggtgcatcaatgaggcagcgagtcgagtttcacccgcggtgagcagcggaaatgcatgtccggcgacaaaatctcgatcacggtttgggtaactacgaattcggcttgacggaacatgttcaagggaggaagaggggcatggagaacatgaatctcaccagcagggacgacgaatcgacagtggtccacggcgtggggcgaagtcgcggcggcggcgagcgaatacggccaccgagaccgttcttctctcctcgcaccgactccaacgcgatctggcgacaccagcgggatcccgcgaccgtgcacacaccaccgatcgggaataatggcgg

SEQ ID NO: 17006 - DNA, 452 bp, Zea Mays
ggagtacatgccaaggtcctcaccaccaatggtgtgttatagtaagaagacccagttacgaggagaatagcgtgtggtcaggacctaagccacatgtccatgtgggaggtccccctgcggatgcccccatcaaaccgattgtcaggtctagttgtggcacatgtcgctggcgccctaccagagccaacagcccccaggaggctttgtgcgtccacctgctctgccgaccacaactgggtctagatgcgccacgtgccctcaggtcttcggcttccctgaggagctctgggcacaccacgtgtctggcctcccacgccgtggttggtcaagtagtaggtggagtcggaaagtttctgtgcctatatagggcaggcataattgcgtcccacaacctgcaccacattggttgtcaagcccttacaccataggtatggcaccagtacaccactatg

SEQ ID NO: 17007 - DNA, 403 bp, Zea Mays
gaggctggtcgcctccacaagtagctctaggatgcaactcttggtgtgccatagcggaccatcgatgacttctttctccatggtaagcacgttttcatgctgatacaacttgacttattgtagcaggtgcttgcgctggccctaccactgaccttgaggggatacagaaggccttctagcgattgcttatggaattctacatcgccgacgactgggtggtcggccaggactacgtccgcacgtgtgtcacgtgccaacgcaacaagacgttgaccttgcagttgatcggtctcctttagccgctcgacgtgctgtcctatgtgtgggccgacatcttcgtagacttcatcgatggcctccctaaggttgacaacaagtttatcattctcaccatcatctaacg

SEQ ID NO: 17008 - DNA, 1146 bp, Zea Mays
tgattgttgaagaacttgtacacgaatttcaaaagcaaggccttgttttgcgtctccaacctgaccaccccaaggcccccatttcacttcggctgggtaatcatgctccaagaagcaagagcagatctgtttgagttcacatcatttcctctccagagacaatgcctccgggaggcatcaatccttttgacagtggaggcatgaatttttagcgtgctcatcaagaaagtcgggagagcagagaaaacagagttaactacctccagtcttccggcctgggagaggagagcagaagtacaggacagtctcccttcaatcctttgaataagaggtagaaaatggcagattctgggttttgacaggcctagaggtacaccaaggtaagtgaaaggcatagaacatgtctggcagtttaaagttctggctagaatctccaatcgcgctgggcagacattgattgggtacatacttgatttaaggtaattcactttgagacccgtcgaggtagcaaaggagtttagaactgctctgaggaaaaataattgtttggggcaagcttccaagatcaagagagtgtcgtcagcatattgaacaatcgggaaatcttgaccacagttctcagtgagtggcagctgaagaagaccctgctgtctcgccttattgattatactttgaagcaaatctgccgctagaacgaataaaagaggcgaaagggggtctccttgtcgtaccccacgcttgcaatgaaaagatttgcccggcacaccattaaggagaaccgaggacgtgccagaatggaggatatccctaatccaacccagccatttgggcccaaattctctgaaggacagcacctgaaggatcagatcgtgctcacctgtgtcaaaggccttctcaaagtccagcttgagcacaatgatttcttttttggaaacatggcacaaatggatgtattcataagcccaagctaggcaatcctggatggatctacctttgatgaagccatattgatttttgtgaacaagtgaggtcatcactgtctgaagatggttggccagcaacttggtgatgattttcatactattatttagaagcaagattggcctaaaatctctcaccaattgatcattctccttcttcggaatc

SEQ ID NO: 17009 - DNA, 717 bp, Zea Mays
ctttggtgcctagttctgttctcgatgttgctgctgttagcgtctttccttctgatagtaccttgatacctccggccttgggatttccctcgttcctttccaaccttcaggtatgtacatccctgctctaccctgcctttgttagtggatgttttctttgctgacttttgcaattgcagagtgttatggacttggtgtcaactcagctgagatcatgtggtgctcctgttcctgagtagatttcttctttatcacagtggaaccctctttttctttaaaagcagatagatgatctaaaagcttcaaatgctggttagcggactgatagttcttcttgtccttgttacctttctactcatattaaaaattgttattgcttattttttagctttgactcggcgatattctgatgctggggagaggtgtgcatgaaatcaggctgatcttgatcaggtgaccatgtttcttgacgatgctcgtgccatgaaatccaccccgaatgcaaagcatgactcggaaaagaaggctcatgaggtaacacgctgggagctccaagtatcttattctacactttcgacctgttatcagaggctctcccatccataggaggagatgtagagacttcttgactcctgggacaacttggacaagctataccgggatgccaatcgctccctcaccaccttggagaggagccatcgattcaccatgcggact

SEQ ID NO: 17010 - DNA, 845 bp, Zea Mays
cttggacaagacaaaacgcaagaaatgcctcggttctgcctctctgataaacccaactttggccaaggataactcagtgttcctgacacgaaacccttggggttctgcacctcgaaagaatgaagagaggagaggagaccatatgagaggatttcatctaaattcacccagattcgcgacctatgggtgtttgaatgtgaaagaacgccatgggtcaaccgttcggccacaggtctgagccgcagagcgtgccattgaacgctccgcgcgtgcgcattagggcccgagctcctgtcgtgcaccaaggccaagaaacgcagcgccgcgcacgtgctcgcgcctataaaggtcgctccaccctccgcctttccttgccaaccgttgtccagccagccttcaccagaatttgaccgaggacacgatcatcgtcgcccaccattgttgcccaaggcacgccatggtgaaccaccacctctggtcacgtgccaactcaactagagccaccactaagatcccttgagttccctagggctctccaaggcctcagccagagctctacctcaccagaaccgcgcaaccatcttcgccagagcacggtttccgccggtgaacgtggactcgcgtccacagccaaccatagtccaattccttcaagcaatcatctcctcgacaccccgtgaagtttccccactggtggaattgaaccgtaccatcaccgactagctagaacaccgccaccgacgaactccgaccgttaggagacgtaggtcggacacctccgaccaccaccagccgccatctgaccaccgacgtgttcaccgaagcctccccgacctcaccgacca

SEQ ID NO: 17011 - DNA, 757 bp, Zea Mays
atatgatggcaaaggaggttaggtacatcgaggacatcgccaatagatctctttcctcaacacacgatccacaactcgttgctctcaaagcaacgaacaacaaggagacgtttcctgacaaggtggcacaaattgaggcggttggccttaatgaggatgagatggcgctcgtgattaaatgcttgaagaatgccattggcaccaagcttgccttcgcctcagtgtaccacccacaatccaacggtgtcgtggagcgcgccagcggcaagattttcacggcgatcaagaaaatgctcatcgacgacaagaagggcaaatgggccgacctgctacctgaagcagtctgggcactgaacacgaccgaatgtcgagcgaccggattcactccctttcgccttctatacggatcggaggccatgaccccacaggaaatcaaacatgggtccccgcggacaagcgcttcagcaatacctgacgccgacgagccaacttccaaagacctcattgacggagaccgtgtcttcgccctgcaggctctcgacaaatatcaagcccaaacgaaggcatggcgcgaccacacagtcgtcccaagagaattcaacgaaggggacctcgtacttgtccgcacaacccggacagagtcacggggtaagctggaaccaaagtgggaaggaccatttatcgtcaagacgaagtcgtctcccagcgcgtacagattaacaacacaatctggcgaagacctggaacattcctggaa

SEQ ID NO: 17012 - DNA, 379 bp, Zea Mays
agcaccccactggcgagacccctcggcgtcaagattatccccccagggtcgcggcaatggcacgcgtggtcggggtcgaggacgggcacagcagccgcgcaggttttactgcctattttccggcgaagactgagcgcacccgatgagggactacccggaaacgaaggccaccagggacaggatgtcccgggcgcaacccgccgacaacccaagagttgtcgcccacacatatcaacaccacctcccacaaccatacaaccacggccccgctcagcacccacctaaccacgcatatcaacaccaccaggaggtacaaatcatacctcctccgctccaacctccgcacccgcatcagccaaacatccaccacccaaatcac

SEQ ID NO: 17013 - DNA, 654 bp, Zea Mays
gagcaaagcatcgactttatcaaacaaacatcatttgtcacaagtaacactaatagcattatcgattagacatttaaaatgctaaatctaagctctgtttcactaatttaccacactctgcataacttgctttacgaacttgaccatacgaagtgtctatttgaaatcatgaacacaatcacaacacgacataccactcaaaacattccaaaaacatctacttgctagacgttagaaacattagacctacccttcgtattactaaccctaccacacatcacatacatgcctacccatatccttcgcattattaaaccaatcacgctgcgtatacgagcctaccaacatattcttcacgtcatttaaacctcaaacctatatttcaccccacatcgcgattcacatatctagccaacccatccatcaatccagttatatgaataacaactccacttaccatgaccaaatcaactcgacattcgaaagaacgatgagggttcctcgattcaggcgcttcctcgagcaccaggtgagcgacgctctagcgtttactttcttcatcaaacctccttcattgacacatacgcaagtcgctaccaccagacggtctgcgcgagggtgctgtaccgcggtgaggatggatcgaggcgaaca

SEQ ID NO: 17014 - DNA, 575 bp, Zea Mays
cacgaactcactccaaatggtgaaccacctgggattcaagcagacgatggagacagagagttatactggttcagggttttgccctagtctagtgtagtgctgattgtagtattcttaagaggcatgttacaactggtgcgagtgtgggaagaaagaggggggtcctgtccttttatagctcaagggtagggccttacagaggagacttgtttcctactggtgggggcggtaaggacatgatctattacccctgactgatgtagtacctttgtcgtcgttcatacgatcatgcatagccatactcgtagcatggcataccgctctatccatccggcatacgggtccctgtagcgagtctgatgctgatgtcctcgtagtggcgctcgatgggtcccacggggcagtctcatggtgtggtcatgtctggcacaacctctcctttcgacatgaaccctgcatcaccctcttgcatgcgtaggcatacacccggtatggcatgttgtcccatccttcccggtatgtgggtcactgtagagactctggtgcttaggtccccatgaatggggttgactggc

SEQ ID NO: 17015 - DNA, 492 bp, Zea Mays
gcgctggttcgtcgcgcccacattacgtcggaccgattcagcaccgccccgtgcccgtgctttggctcgaggtgttcctcacccctcatcggagctagcactggcctcggcgcacccgattccccctcctcgcagctgggattgctcgtcggattagtcccgacccgcctggagcacctcctccgccattcactcgtcccagtcgcattctcacagccggaaccccacaattgagctcgtcgggccccctcatcggtcctggcaaactccggcgacctcagaatccccttgggttgtgcctgccttggctccggtgtcttcactgccggtgacggagcgacgctgaccgccacctttaacccccctggtgcccgatcctaaccgcccgctcccgatccaacagcccagatcttcggataccgattcgagcgcgtgcctctgcccctaggccccaacagtcagcccaccctcactccggaccgctgatcgccc

SEQ ID NO: 17016 - DNA, 818 bp, Zea Mays
aggcacggcagggaggagacctcggctggtggagagctcagcaaactccatggcgagcagggaaatacgcaggcagagggagcagggattatgggcgcgagctgaagacgagctcgactggaaacaggaacgccgtgcagagggagctttgcgagctgggatccggcgctggggggaaggagagatggaaggagagggaagcaaggggagggcgcaggaaagagccacggcttggagaggagcgctcggcgtcaagataactatccaggagcagagcgacggccaggccttggttcattacccgatcgctgttcagcaatgaagaagaaatatcccagagagagatgagaacggctggatatttcataggcttgagaggcagaagatagagagaaagaagctcacgcgcgccaaagaaaatcagccgacggcggccacacaaaaatcaaacagaggacggcggtgcgcaaggaaaaaaatcaagctgcggttggaaaaatctgagctggggcggcgggatattctttcgagcagcgaagccaggcacacacagtagaagataaggccacagtgaaaatatcaaggggagacagagctacgggataggaatgcaagaagacttttttttctcttttccctttttctttaagataattgcagatattttgggtcacgatttgtagcgatataaaatgagtcgaaccaaatgagatcgataacaatatttggacatgatttgacttggcgaattctctaaactcggataaattcgtactgttaattcacttttgaagatttacatcgagacgaaaagcgac

SEQ ID NO: 17017 - DNA, 427 bp, Zea Mays
gttcattgtcaaaagtaaacccacgcccagtcactgggtgggttagcatggaccagtcattaaacgataaagtatcatgaccaataaacaaacagtttgaaatcccgacagttaaacataaccaccagagaataaacaaccaaaatgtccaacagttccaaaggaagcaaaatctcccagaccagtgatacaccatctccctacttgtcttcatcatcattgtttttttccttgtcatttttgtctttcttgcttggcttgttggggccgacacatcctgaggatttcttcttcttctgcagctttttgttagacagatcttcttttgacatactgcaaaaaatttccccaagattccggatgaccttggcagacaaggagggtgggccctcgaatttatgatggcacatcaagcaattcttttttt

SEQ ID NO: 17018 - DNA, 528 bp, Zea Mays
cggcgaacagattctgaagctccacgcggcgaagcaaagtggcggggaaaataaaaattatacgaaacccattgtgcgaaacgcacgcttgatcccagtatgctgtttctaacgccctggggcaactgctagcgcgtcttgagtgacgacgtgtggaattcctacagccacagcgtagcggtactggatctctaatgctgtcgactcaacatcatcagtagagccgtcgtcaactagaactagggccattaaacatcccttacccaaaagccgatgaacctccgcgccaggtgtgcgagcgtgacggcaaccttccaccggcgcgctccacggacgaaaagcatcagcgtccccgaaaagtaaggacccaacagaaagaaagaaaaaaatgggccgacggccgacccaaccctcccctgacgtgtcccgaaacgataattgccgtcccgatcgaaacgagcgagcagaatctccgacgcgatcgccaaggcacaaaaaatgcagcgagacgcgcaacagatgtcagcg

SEQ ID NO: 17019 - DNA, 1547 bp, Zea Mays
accgggtctgcaagccggtggacgctctccttcctcagcccgtgattcgaaggagtagaaggaaggctcctctgcctcgctctctacctcgccgcagccgacgtgttgctggtgctgcgccttgttctctagggccggtgctctctgctgctcagaaaagggtgatgcgccatcttggctttgaagagaaggagattttctctcctagtgctcaagataaattttgtaagctgttcaagccttcgccttctggttctcatgtgtgtgctatggctgccatctttggctgagaatttggagatggagagcaggtgaggtctgcggaggtccttacaactctgtaagatctgtttttgtcggattggtcgttctacttcttgtgtcctcatgaatccctcggctattcttatttggaacgtgcgtggccttaataagattgatcgccgtaatgttgtcagggatgtcatcctctccagtaatgctgatattgtttgtttgcaagagacgaaggtcgctattttgacccagcaggtgctcctttcagtttttgggactgtctatgataacttcgtggctctacctgctgttggcactagaggtggagttctggttgcttggaaggggggttcttgtcaggccgtcgcttcaagggttgataatttctcagtttctgttcttttcgctgagcatgaaggtcgtaattggtggctaactggagtctatggtcctcaaggcgatgatgaaaaagtgttgttcctgcaggagcttagaaatattagggctctttgcaatgggccctggcttgtggcaggtgattttaacttaatttaccaagccgctgacaagaataatgccaatctggatagggctatgatggggagattccggcgctttttggatgataatgatctattggaacttccgttgttgggtcggaaatatacttggtccaatgaaaggcgatctcctactctagtgaggttggaccgtgccttttgttgtgatggctggaatgacatttttcctgatgcagtcttgcaaagtttggcggctggggtctctgatcattgtccgctcctgcttggtttgaatgtggccaacaagggtaaacgcagattccattttgagagcttctggttgaaggttcctggtttgtttgatgcagttaagcaaagttgggaggctccggtgcaatctaactgtgccgttgagcgtatgttcatgaagctgcagcggctcagcaggtgcctgcaaaagtggggccagaggaaagttgggagcatcaaatcacaattagaaattgctaaagagcttctccatcgctgggaaattgaaagagatgaaagggctcttgctgatgatgaggagtggctgagacagaagttgaagcttcattgtcttggtttggcctcgctggtgagaaccattgcccgactgcgttctcggattttgtatattcaggaaggtgatgccaacacctccttttttcatcagcaggctagatacagaaaaaagaagaacttcattcctaagctgcacgttggtga

SEQ ID NO: 17020 - DNA, 809 bp, Zea Mays
taattatgtaacggtgattacctatgtataattacactgagcatggtacccatacgtgaggctaacagtcgggcccatatggcccaactaagtgagggggcctgacctgccacagcgagtcccaagtcgtggatgccttcgctctcgggtctttgtcttggggctttcgctccaactatagcggggtcttcaacattgatgagttggtcgcatttgaacctcgcctcaagggaactagtagccttcatgctccctttggggcctacacgggtggatatgtcattgttaaaacaattaaatatttcttcataggaccgaactatatctaattgccattgacggacagagacacacgggtgagtaaagatggacaggcatggacggagagacactgtcaacacgacgcatacatacatagatgaataaaagtgtaggcggggatggccaagggcactaaggtggccagaatgagtaaggtgcagttggggttggccgctggccgaggagcggcctaggagagctaggagaggtctgggcagtcgggagtgacagagggggcacgagcagcgacaggtggatagcaaataatgacaaagaaggtcggatgcacctcatatacactaattttcgacgctttttcgtaagtctctaatggcgacaactgacatgtggataccaaaattaaatggattactaggtatgtacccgtgcgttgcgacggaacacaaattgacgaatctccaatagctaaaatgtcatagcctgggaataggtgcatgaactctctagcccgtgaataggtgcaaaaa

SEQ ID NO: 17021 - DNA, 643 bp, Zea Mays
accactaaaagataaaggtaaaactaataagtgaattataatcgatgggaggaggcggagcaggcggcgggtgctgggggtggaaggctgggtgacggtggaggagataggagaaagcaaaatgtgtccctatcctaagaccctagccgttggaggagcattgtgtggctgaggtgagaaaggatgacatagcgcacgtgagtcaagctctgctccagtgtttaatattatgaattttccataagctaaaaattgatcagctacacaatggggcgtgctgagtttgcttttttcaaggtgctagaatttgtgtcattatatttaaacattagataccaacctgtctgatttctgtcactgggcagtcagtttgggtggttagaccacgactcgttgtaagccttaggctgtctaattagaaccccatgtccagcacccaagccctagctactcctgtaggatacttcaatttctatcaagggagtcatagtagaaatggcacacttggcaagcataatgctagtggaaagcagccatatgtattgttgtctgacatgtttcgacaatttagaatcatgctagtaatagtttattcctaccctgtttaattaggaagctagctacatgtcctttctttttcttt

SEQ ID NO: 17022 - DNA, 1392 bp, Zea Mays
ccgaaccgtagccgatgctttcccctgaataagaccttcaaaagagttctttttctcgacatttatcagaaataatttcgttccttgttagccaaatggaccagaagatcgctgctgcacccatcaataaaaataatctaaaagttctatctctcataccaattattaaataagttatagacatatagtactaaagatgctatgctatgcattggagtttggaactgaaccgggagagtgattttagtttacactacatgcagattgtttttcaggtgaaagagtgtctgttgttgtcttgttgataaattgcttttcatgaactagtggacctatggatttcatgctcaccatgttcatctatatgagagtttggtcgttaatgcaaagcaaaccagttatgtactctcttgttctttgtagaatccatggctcatcactatttagtgctgtagtgactagtggtttacaccatctaaactcagataatttctagataaggaagctagttcacaggaccttgctgagggaaggctatttgtgataaaatcactctaccatttctcacctcacctattgtttggaactttgaataatggcctgtttggatggtgaatgagaccatcctggctcgcattccccaaccaggcaatgttcggctaggctcgtccatgcaacatggccttgtttggttacatggttcattggagtctatctgagtggaacaactgtttggttggctggatgatccatttgctctctcttgcgcgagcgcgcgctgcacccgcctggccaggcccacgagaaacactcgattcaggcggacgcgccgagccaggttccggggttgtttttgcatgcaccctagccaggccctgaacactgcccaagcatccaaacaaacaaagcaccctaagttgacataaaaaaggtggaaatatcgaaatagtgtcacaagtcataagcattaacagtgccgttatatggatcagataaggtatgctactgttaggacaacatcatgaaatgtgtcatttttttttgtcttggccatgttttttatgctgatctaacagaattacagccttacatgcttctaatctagttggagtccccagctatttatcagttcaaagtttcaattggagtgcattttggaagttggcttgttcatgcacaattactttttgcattgcattattctaagtttggattcttacatttttgctgatgactatctgatttgtctttgttgttttcatgcatggactatctccagtgcttcctcaagaagaaagtaagctaatagcacccgcttttgttttgtatgtcttgcagttgcagtacaatacataatactattttggacccacctgacagttttactctcaa

SEQ ID NO: 17023 - DNA, 608 bp, Zea Mays
gaacatttttgtagatatacaacaaagcataaatcggccaaatgagaatccaatttgatcataatacccatcaatataaaccagcataatgactccaagcaaattatagaaggctaaaatcatagcccattgataaatttcaccagcattcttcaatccgaaagtctcaaattactgtagacaaaaaaaagggatgcacgctagctcaagatgcacgatggattaaacgatccgtgttgttcagtttaacttgaactcaatttagtttgctggatccaatatagatgatcaaattttagttgatttctgcactccagcacgcttgcattgctctccacttaagttacaattgacagcacagcatcacatatagatgcaaagcacttcaattgctactcgcagtgtactcatctcatcaatcagctatgccattgcctatggacaaagcactggcgtctgcaacggcttcccgaagcatcttgtcaatcaattaaacgaagagggaaagatcatgccaagaactgtaaaaaaggaaaaagaaaaaaatacggaaccttgatggtaagcgggtagtcccctgcgccgaccagagccctgcctgggcgtag

SEQ ID NO: 17024 - DNA, 794 bp, Zea Mays
tgacaagccatggtggctcacacctaggacacacactagtgcgaggacatggcagagcggatcgggttgctggcgttgtcgaggattggcaggacatgtgtccataacatgggggacgcgcatgcggtgcgctagtcgtggtggtttcgtggttgagcctcaaaactacagagctactgattttgctaagtttggacctcaaaactcaacgatggtggttccgacaggaataggaggtgacacgtaacatcatcgcgaagggtgttgaggtgaagcaacttcgtttggagcatgtggccgtcagatcaaaatcccaagagttagtccattttgcccctaactaagtggataagctcaatgtatctagggatagtttaggaaatagaaataaccttccataaatagatgggtgggttggtctggacaacgatgtctttggctattttcatttggcactagtttagaaactctagttttccatttcctagtttagccgagattcaaaggtgtcttattcgcatctgtgtcttgtaatcttcagctctgtatccaaatgaagggtggctagatccattcacatagtagttcaaatcttgtgctcagttttgtctccactgcagtttttagttcgagtgtgttttcgttctcgtttcctcccctctcttttggatttgtgaaaagaaccatcaagttcttgagttgtgggtactgttgggtgatgggatatgctctttggatcactgtatatgccctgttggtgcaatttttggtcatgatccgagttgatctcattt

SEQ ID NO: 17025 - DNA, 376 bp, Zea Mays
cgcaaaacacgtcagcgagcggcgcgagcagtcttccaaagacggctccccgcctcgccgtcggcccggcaaagagaaggtggacgacggcgaggtagccgcggctgagcagggcctcgggtaccagtcgcccgagggggacctgaaagatatcttcaccggaggctcctactccggtgaagaaaactagacggaccctagagggaccccgtgttccccggtctacggagctgaagcacgcctttccttcggaggcccttccggaccccccacgcgtccgagctgcagacaggtatacgcagaagtgatcacagccagagacgagggctcccgtgtcaaatacagatgggaaccctgggtcgaggcttagccccac

SEQ ID NO: 17026 - DNA, 661 bp, Zea Mays
cccaaataagccctgtcaggccaactgatgaaacctctgatggtacagtggcaaagaaaatctacagattccgtgaatctcgccgtcggtgaccctccgccgtgattgttgccgatcgccatgagtcgtgcttcaagtctgtggattgagctcgacggtgaaaagatcacgctgcggataggtccgggacactgtggccacgctgtccctcgaccacttcaccgacgacgtggccttatggccgtcaccggaatctgcattgttcaccgcgattgcgccacgcatcaggcccttaaccacgtcacaatagcatgggtcatctatatccggtgattgccggagagccaccacggtagatgccaccaatcacttgcattagtgatcccctctttctccgaccgccaccgtgcgagaccaaattcactggccaccgcttagcgcccttataaattgatgacacggtctactgcgctaagttatcaccaagccaaagcatccatccctgcccttgattagccaccatagccggagaatttccttcttcccccaaattggtcgactgcgccaccgtgaatcacctcatcgtggctagctgctcccagatccgcagccaccctccgtgttcgtgtttcagcacctttgcatacttgtgatgcttgtt

SEQ ID NO: 17027 - DNA, 576 bp, Zea Mays
tggtgcgtttatcggagatggacgaccacgatttaaggaaaaactacgatctattctcatccacccgtatgtggaccagcggcccagatcgaatccacccgaaacgttatgaacttctaatcgtggccgatggtgattgatccaatggcacacaatgtgcccccaaaacaactatcgacaccaaccaatcgcatggcggcggataggccccacgacggcgccatggccggagaacgactattcggtcacactgtggttcttcccaactccaacctatgctacacggagagaatggagagaatggtaaggtgtacgagaaggggaacttcttaccagaaattgtggagcacatgttcccgaccacggtaacatgcgacacctcggcggcatcactgctcagatgaggaattctgactggtatcggccgagttctagcccgataatgcaatgtgcggcttcctcaatcgatggcgaagctcccaagccatccatccgaactctggagtcgtacaatgctataggcgtgaggtgacgacgacccgtattctctcttgctctcgacggattgcactctag

SEQ ID NO: 17028 - DNA, 517 bp, Zea Mays
cacggaggcacttcttgagttgagacacgtggaatacattgtgttcatcagacaaatgatctggtaactcaagctggtaggccatttccccaaatcacctaaagattctgaagggtccaataaagcgtggggataacttgcccttaactttgaatcttctcattccacgaattggtgacaccttgaggtacacgtggtcaccctcctcaaattccagtggtcttctccggttatcagcatagctcttctgtcaccggcagaggtgtcgcgtggaggtcggaccgcggtggggagcttcacgacacgaactcccggctctggtgaacaattcccgccgtgctatagcctcggaggcgccaatcctgcctcctcttggatccacacacccggccaaaagtgccagagcacccgccagaggacgtacggtggaggaaattccccccggcgtgcacccagcaacttcccccactcttcaaatggcgcgcgcggagtggagcatttgggcaatggcacgggg

SEQ ID NO: 17029 - DNA, 1176 bp, Zea Mays
gtccagacaagatcgaaggcaccactggagcgtgaagcgaagaaggcggagcagactgaaccggaggtgctgagataccagaatgctgaagcatgagggccatgaatgccctattctctgccctatcctgaataagctgctgctgaagtgcatcctgcctgtcctgcatgctctgaaacatcgagagcatcgtctcggataaccgggcctgctcggctgccaggttggccagaatcgccgcaagagcagggtccatagccggaggaggagcaggggcagcacgagaactcccagcctcatgatcatgggagcgtggaggcataggaggcggaggcggaggaggaaccccaaaatcatcatcatcatcatcagcagcagctgctgtaccctgggtgtcaaactgtcgaagtgctgcatcctcggcctgagtgtcaaacacaggagcataagctggcactggaatctcaggagcaggacggtaagatccaaacacaaggcgtgaggcctcaagggtgctctgaaatcgaggtggctgaatcagctgcacaaagatgtggcacaagtagtgagcatagggtagctaccgacgagcacgaatcccatccagaacggtgtcctcaatctcacagatcagaaagtccacaacatcaaactcagagtgggataccagggcaccaaggagccaaagctgaatgtgagtggtagcctccctgtatcccatcctaggcaggagtgtccgtcggacgagctcatataagtacttcgctgcagtagtgaagtctgctggagaacgtcgcgacccatctgtgaaaggcgggcggaacagagccgcgacgtgagctgtccctggagccacaccgccgtgagggcgacgtggaggatctgaagtgccgtagcagagactgtgaaggcgagtcgtcgactcagggaatccaaatagctgtcggatctgactggcagtgatcgtgacatcctcgcgctcaaagcggaacctcatccaatgatgatccgggtcaatccaaacagaggcatagaagacgcggacccactcctcaacatatctgccgctgatagtcagaaaggacagaaggcctggcaaataggtgagatgcgcctcagactcagtaccggctgctagcaaaaaagctggaagatccaataggcggtgcactctca

SEQ ID NO: 17030 - DNA, 434 bp, Zea Mays
acgcccatttgtgcagtgcgtggtggtggggtagggcctaagacagcaaatgttgtggtgggggaaacctcggtgtcgtcagcccctgattcaaatcttgtgccagaattccagtggaccggtaaggaggcagggttggggaccaatttgatgcttcccaacgactttgtggcttggagactggccacaatattgttcttttggtggcgatcggtggggaggtggcccaacccgcagagtcagctctctctgctgctcatccggctgtggttgcttgtactgttttgcctacctcgccgcctctagcaattattggtcgatccatccgacatgtttacatgagaagacctcggacggttgcagttcaggacacttgcgatgctcagatacgctctcatgtgtgtgctttcctcgccagcctgtctcaagctaca

SEQ ID NO: 17031 - DNA, 433 bp, Zea Mays
aaatggcccaagggcacatttccctttcaataggtacgagaagtggcacctgaagggtgggctcccatgtgcaacgtcgtgggatccgccgcatcggtatcccccttgccttagacaccgcaaggagacgacacgtttatcaggactcgcaccgctccgggcagcgcgctggggaacgagaaaaggtgccagcaacggttagagcggttatcacacagtcacgccgcccgcatgcgataaggtgagcagggcattccacgtcccatcgagccgcccacgctggacgaagccatgatggttctatttttaccgcatcgccatgactgcctcgtaccaggtaagaaccgaaattcacttcacctcaaattcaatccacctccccacgcagagcaaggggtgggccgagcaagctcccagctagtcgcaagtcaaa

SEQ ID NO: 17032 - DNA, 405 bp, Zea Mays
gaattcacgagctacagtggctaatcggaggcgagggctggtgcactagacgtgtaacaacctaacggagctcactggggcattgatttatagggtccattacggtggcgcccaatttgaagaaatcgcgctggcggccgagaagaggggacgagtcaccacggcaatctaccgtggcattcactagacaaaggcgtacgtctattactggttagcctccacggctcaaagcgacgtggtaaaacggcccaaggcatggcgcgaccgaatgaacggcggcagccacggcgatgactgtgcggccacatggtcgggcaagtgggcacggcgacagggtgaaacagtgccccaagttcatctcctgtgtgatatttcttaccctgtgtagttagctgcactccaccg

SEQ ID NO: 17033 - DNA, 787 bp, Zea Mays
gtaggttcttcgaagtttcgcggctgcacacgcgtatttgctcattttcctccatatgagcctatgcggtgtcctgttagaagttgtttgagctctttatgcagtcgtgttgcttgattggattggaacagtagtggtatttctgtacttctgttggaaactgatcgaatgcactgtgggcgtttggctgctcagttttcttagttcacttcacctcgtcaactgatttttttccagcagttcctttcgccagattttttctgtgctcggtttaagcacttattagcttatactttatacttggtgtttttgttgctcttgttgtccgttgtttaatgatctgccatgctgaatcgggtacgggaagggcctataaaagacaagggaggagagaccggttcggctttgcttgttggaagacagagcaagaacagaggtactgttgcaccgaagtcttcatccaggccacgcaaacaaccttttcattcgcatataagtcaccaggaatcctgaatggccacctaatgcgctgtcacggcatgctgctatcaacttgttttggggagtaacattgtgcccaatccatatatgatttttatagcgcagaacaccgtccaccaaagagaagctaggaaccgatgaaggggcgagcaacaaatgagccttgagacgagcagcgaaatcatcctgatcatagccagactccacctctagcaaccagtgtggtgttgctgaagaaattgtagcacaagacgcatcatgagaaggttcgcggaagagtgcgtcg

SEQ ID NO: 17034 - DNA, 524 bp, Zea Mays
cacatttccttccttcctctccctgtcccttgctctctagcggttccctctgctcccccctcgccatcggcgatcgtcggttgattgctccggcaagggtctgccccaccaaatgctcgtccctctcctcttcctggtgagctcctccactacctcttctccctctcagttcttcaactatctgcagtgaagttcaaccctaacaccccttgagcaaaatccaaatctggccaatttctgtgaaatcttgtgtttgcaagtgtctctgtgtgtatcttgagctcccttgcaggttcatctctccctttgggaggtttcaaactctcgaatagccatttcaccgcttccctcatatcccgcacgttaggtgctcggtgaaatgcccaaaccactcaaacttgctcaaatcgaccccggatttttccagcaccttcatgacacctcaagtaacaccttcgccaaatttcacgccaatccgatatcccagacaccgatttaccactgtttcccatttatagcgattg

SEQ ID NO: 17035 - DNA, 353 bp, Zea Mays
catttggtgtgccacgtagggggaatttggagtgtgatttccctagtccgctgatggagtggcttctctaacatccagtggacatggggcggatgcattccgcctcccggccaaagttgtccctcctctgtcatttagtgataggggaaagtcgcattatgacttcctctacctgccaatagatttcaggaatgaggctagaaagggcaacatttttatcaacctgacctcatcggaggtggcttgccggttgtaggggccccatggggcctaccacacggactggtgggctttcaagagcggcaccaagacccaacacgtcgacgacaacctcagctccatggcgtttgggg

SEQ ID NO: 17036 - DNA, 566 bp, Zea Mays
aaagaaagtgttatattggtttaactccaacacacatggattgcggggatacatgaacatcgaaacaaggccttatgagcacttggatggaggaagacttcagtcaaccactcaatatatcattccaaaaaactgagttctttaaaacctcaatgagttaagtgataccatattaaaactttcaaattttagttggttactcattgctcctttttagattctactgccatcatactgcttgtaggaatttattccattgttttttgctgactgaagtgatgtaacaaaccactcgttttccttaacttacgcacactagggatccagaataccacccagcccaatggacttgcagttcctgatgcaacaatgtgtcctattgattcgacttctcatgttattgaactaatgcaaaaagggcacaacaatagatccatgagtgcaacagccttgaacgagaggagcagcagatctcacaggtaagttacttgtgctgcttgtcttttgtataaagagaccttgcttgtgggcaatttgtttattttgtgcagtgtcttttgaccatc

SEQ ID NO: 17037 - DNA, 430 bp, Zea Mays
gagttagtgtatgaagataaatcccaaacttcttcaaaacatcagcaatcatcccattcaaaggaaatcttaatcctgctttaaagaagattttgaacactaccacctcatccttttccggcttcggagtaatttcctctccgccaaaacgaaccagctccttttttgcttcactgaaatagcccagcttcatcagcttagacatatcaccttcagtaacggtggatttcccaaactccaagtggctgggtttagatggcacgacgctgtaatcatcttcagattcagtttcctcagcatcaacctgctcagcttcagcggcaggtgcatcctccgatactaccagccctgaccgttgcatcacttcagagattggagcggtttcggcaccttcggcttcctctccgtcgcgagtaaccctagctgttga

SEQ ID NO: 17038 - DNA, 728 bp, Zea Mays
acaatagctttcatgctcaccacatccattccagcattatgaagttgaagaaggaggtcctgtcactcacccagagtcacatgtctatcaattagtatagagataaattcactcaattttctcgttatgctcctgaggatgtggacattgatgagaagcgccaagagcgtttcttggaagctttgattgcacctctcaactgtagaaccacaacgttccaaatttcaatactctgctcaacaaagctatcagccttgagagtaagatgaaggagttgattgaccataagaggaagtcctagtatcaaggccagtctagcaggaatgtttgttacttgtagagcatccggagctctcattctcgcttcgtaggtcagagtgggagctatcaaaaccagattaaacgctcaggccagtagacctagaagtacaaccggcaagggcagaggactggtggaagtcagcagaatcgtcaaggaattgccacgaacaccccaacaaagactagcaacctagtttccctagtgcaccccaatggctgtttcaagtgtagagaggttgggcactatgcctatgcctatgcctatcccaagagaaatttctagacagcacagactaataacaatcaaaggttagcctagagcgcacccgcacacaaatctcaaggcaagggccagtagagccaaaacaagggcggaatcaatcatgtaactgtggagtcggtcccag

SEQ ID NO: 17039 - DNA, 422 bp, Zea Mays
aggggacctcgtactcgtccggacaactcggacagagtcacggggcaagatggagccaaagtgggagggtcccttcatcgtcaagacaaaggcgtcccccagcgcgtataggctaacaactccatccggcgaagacttagagcattccttgaatattgacaatctctgtaaattttttgtttgaatactcagggccaacacgcccttgtaattcaccaaacagttttatcccagcccgcactcttttcctcccggggggtgaggtttttaatgaggcagagccatgtaatatacacgcaaaaaatcccccgcaagaaactaagccaatgtcgaaaaagaccgcatcgacggtcttcggcattcgaccacatcgaagtcaccgcgaggggcagcgctgactaccctcgcgtgcgacactccgc

SEQ ID NO: 17040 - DNA, 408 bp, Zea Mays
gtagtattaccggcaattgcagcgcggacgacgctggccacggcgcttggcggacgcgccctgatttcacaactccggcgagcgattagaagcgcgccgatggatttcttcgcccagagatgccacggttagattcggtagctgcccgcgatcactcctggtcacaggccaacgacccgacgtcgcttaatcggtagaacggcggcggcggcggaccgtgtttcccatgacaagctcggtgtgctggtggctgaggcgagagaggagtcgcgaggtcgacggagaagtggagaggggcgcagagggcaccaatttatccccccccgtggaccctagcacaggatggaggaaggccgcccacgcccgcgaggatcacggcggcaggtacgccatccgcgcacccgcggc

SEQ ID NO: 17041 - DNA, 578 bp, Zea Mays
cgaacaacaagggcgaggacggacctggaatcagctagccgcaagtaggcggttcacggcggcgcagtcgactgaactgggggaagaaggaaattctcctgctacggtggctaattgagggtgagaatgggtgcttcggcttcgtgataacatggcgcaactgactcggccttcaatttatagaaatgctaagcggtgacgtccaattttgaaaggagagaccggcggccgagaagagagatgagtcatcggcttgaactgtcgtggcgcttcctggggtaatttctccggcaaggaactgacctcttacggatatctacagcgacatggtacatcttctaagcacgtggcatggttataatcgccggcgaaatccgacgaggacactacagtccactgcgcggcatgtgtcgcggtgaatagtccgacgttaagcttctctcctttccccgagttgagatctttctctacccatgattatccgtgagtcccagtgcacgaatcgcgatgatcggcgttaatcacgacggagagtcaccggccgtgagatgcgttgcatccctaatattttgttaccg

SEQ ID NO: 17042 - DNA, 521 bp, Zea Mays
agagtcgcttgccgcggtgcacggtctgcaggagctcgacgtctcgcgaataggctcaacggcgtcgtgcctgacgcatttggcatgctgcagacgtgagtgggattgacgggaaagaaaaacaggaaacgcgctggtaacagcagtgaggcgtggcggaggaaggagaggacagacggaggggcacaactccctatcaactagggccaatactatatgttgaaaacatgagcgattataatgttatttggtcaattgacatgtttgtcatttctgcgaagcgcgatgaaggcgatgccactcttgcaaaaatctcgctcacgatggctaggtgcttacgtgagcactttaaatcctgcgcttcctttactaatccaacgatggcgggcatgttttgattcacccctcccacctattctgcagtagctatttttttttcttactgaacacccccaatccccccaaaagcattcttcttcacgccagaacctctccacgcctggagatggcaatagttaaat

SEQ ID NO: 17043 - DNA, 690 bp, Zea Mays
tagctaggcagccccagatcgggcagtacgtacatgatgcaggcgtgtcaggatttggaaatcttttatgctatgctgccactgccggcatatatgggacgcttttctccggaatcaggatcccggccggctctcctctcgctagtgatgtcactggtcaccgcgcgcttcctacgccctgccagccgcccgtcagcaggcgctttcggtccacccgcgcgcccatctacccgtccggtcgtctccacaggattggcgctctgtaaatttcgtagtactccgtaggaacgcgcatgcatgcacacggcagtgttcaggtgtatgggccatgcacgcatgtgaaggaacacagggcgaatgcagagagacgaccaaggctcaggcgagtttaccctccaaaaaggctgacgactttttcgtgaaggaacgaatgagtgaacgatgatcagaggttgtttctggtcgcgcgtcgtctcttttctgcagcagcagcagcttggcatgcaccatccatccattaattattcgctaattagactactatactaatcttctccagcttgtaattatgtcgtcgtcatttctcacctagttaaaactcccttcacattggagaaacaaccaaccaaccaagcaatccaagccatcgcctctgctagctgtgtacttttcagtgtttctcaaatagca

SEQ ID NO: 17044 - DNA, 1076 bp, Zea Mays
gagaggtgcgagaaactgaggaagtcttggctggccaggatggtcttgagttctggtctgagccccttcaggaagcgggccatcttcttgacttcggtgctgatgtcatctggcgcgtagcgggccaattcacgtgaacttgtgcacatattcactgacagatcttccgtcttgagtcagttcccggaattcatcttccttgagctgaacggtcccttggggcacatggtgctcctggaaagctgtttcaaactccgcccaggtagcatctctaatggtgacattgaaggtatcccaccaggctaaggccattctggaaagttgatgagcagccagttgaacacgctggttttctgggcatccgatggcttctagctttcttttaaccgtgcgcagccaatcatcagcatcgaggggattgctagatccggcaaacgtgggaggcttgagcctcaggaaatcccccatcctgtcttgcggtcttccaccattcggacgttgattttccagacttcgagtgaggacctcgatgagtcgggtttggttggctagaacttgggctaaatctaagggtagttctggaggtgcggggaggtgggtctcactttcctctctaccggcttctctttcagctctcaggggaaaccctgctccaatcccggaggcggtaggcgtggttttatccgaagccatctgctagggggagagagtcactattatgcacatgccaattgttttcaaccaagttattttattcattacaccaatacattacaagcatacgactactacaattcgtactacacgcgagcgttctctgaggtactaccgaactctttttctaaagtgtccccaaattccttgagaaggtcatcaaggctagctagggacatatcctcgacgtcggacaaattctctatcctggcgggagctggtgccggaggggccttcttcctccgctcagcttggcctccttggttcttggtcttcttttggattttctttgtgggggcgagcttcttcagcttcttatcataatccatctttaaggtttggtaggcttcacgggtgttggc

SEQ ID NO: 17045 - DNA, 813 bp, Zea Mays
agaattatttttgtattaaaattcaatttctaatattaattatctggttttctctgttgtctggactgggcgccaatagcagagaaacccaggggctaactcgcaattcctcccaagactcagtctaacccttaagtggacggcggcttattttgaggaaaactgaggggttcgtttagaaaatatccgggcgaaagggtatctagggtttctgaccgttggatcatcaatctgcgcccccgattagatcggcgcggccgtgaaacggtacgcgacgagaaccgttggatgcaaatacgacggggaggattttattattctggatttgattctatccgtccgatctagatcaacggatcaggccgaatgctacggaagggtatgcaatcatctaatctcagcccttgaattctagatctctagcccacggttcttcttctctccgccaaatccacacgacggctgagcactgctcacccacggtggagcatcgccggcgaacgcgcaatccgacgcccggacgcccctaacctaaaattggccggtgctaaacctagacggggtgatggcgagcacggaagggagattcttacccgcgattgaaggagtagcgagctcgtccacggttcggggcgggtctgcgacatgaacagagcgttgttgagggattcccgacgctctggtgacccacatcgttcaggaggacaacgcataggttcccggtgcccagaccatcatcccccacatgtcgtcgaggtcggggcggtggtccaatcggcgttcaaccgcggcggacccaagactggaccggcg

SEQ ID NO: 17046 - DNA, 283 bp, Zea Mays
tgcaagtgtcgtgggggtgctggctaagcatgagatgctgctaggtgtttgtgtgtattgattaattagtgaaatgcaagtgctaagtgcaccggtgtgtggtgacaaaaattccttagtatcttctgtgcctgagcatttagaggagtaatacaacatttcatatattttataagaatttgtctttgacaatagatcattttaagcttgcacaacattacacaaagagtgtaaaataattttggaagtcagattatattcatattagccttgttgactacct

SEQ ID NO: 17047 - DNA, 738 bp, Zea Mays
ctgggttgactccaacaacccagctgcacgtactaagcgggctccagcagggtctggaggccctgcttcttctgatgagccgcctcctcagcctcctcatcatgagtcctctcgtgccaccactgcttcgcgaacgatggaccacagcgggagaggtagaggtcagggccggggactgtttgtgcgtctaaccaagggcatcgctggcgtcttcaccatgtgtcacagccgggcgatcgaggagtccgtgcacaggcgccggactgaggcactgcgtgaggactttcatcattacatcgcctccatgggtcatcccttgcctccaggctctcctccgcctccaacccccacctaccccgagaacctcaacgagtggcaccaacaggagtatggtgtgccattcgttacccctgaggatgaggccgaggagttcgatgaatccttctatacctcggctcctcctcctccctacccgggtcagggacccatttccggtgaccccaggctgcccggctccggtcactttcctcctcctccctattcgggtctaggacccattcctagtgacccgaggccttctggctctggttaccatcatcatcctcctctcccttcttatcagggtccttcatcctcattaggttttccctctggtgatgagccccctcgggaatcatcattcgagaaagacatgatgcgtactttcttcacggagtacccttcctaccctccttccta

SEQ ID NO: 17048 - DNA, 484 bp, Zea Mays
gttgcaaaaaagaatattagatgaaagtccatatgctttttacatacattgctttgcacaccaattgcaattagtggttgtttcagttgctaagtgttgcgcttctgtatttgatttcttccaaacgtgcaacatgattgtgaatagtgttaatgcttcttgtaagagaagggatcaattggctcaacaacaccatgagaaacttgtgaacatgttggaaaggggggaaattttttcaggtagagggaaaaatcaagaaactagcctagcacgacctagggatactcgatggggttcacatcataaaactttatgtcgtattgttctcatgtgggatgctattctagaggtactagagattgtggctgatgatggctctagtggggataagaaatatatggcttctggtttgttgaaacaaatggagagctttgaatttgtgcttattctgcatatcatgatgagattattaggcaagactaat

SEQ ID NO: 17049 - DNA, 385 bp, Zea Mays
gttacggtgggtcgtgtcggtgttttagatgtaatcaaccgagtgattaatggcaacatcgacgttttagaggtaacagccgagtgactgacggtagcgtcggcgttttagaggtaacagccgagtgactgatggtggcgtcggcgttttagaggtaacagccgagttagaatgggccgtgtcggccgttttggaaataacggccgagcgatgacatggcacgccagcgtttttagaaataaccgctgagtgatgactggacgctttttggaaacggtatctggccacgaaaaaccccatatgtactgcatcgttgcacgcttccgctttccgtgccctaatgcttgcttttctgcatccaagctttccttgcgctcgtgcgata

SEQ ID NO: 17050 - DNA, 636 bp, Zea Mays
aatcgattctagagactttcgaagggtgttctgggctgaagataaaccttgataaatcagaaattttcccgatccgttacccggaggagctgtggccaaatcttgtagaagtctttcccagtaaaatcgctaagttacccgggaaatacctgggtctcccccttcacttcagaaccgctaaaagaattgagctacaaccattagttgataaaatcaataaaagactcgcaggatggaaaggaaggcttctctcaaaggcaggtagagagacattagttaaatctgtgttatccgcgcaacctatttatcatctgacgatcttcccggctcaaaaatggctattgaaaaaaattgataagataagaagaagcttcctctggaaaggaagtaatccagaatcatgcaacgggggtcactgtctgatcaactggtctactacttgcttgccaaagtgcaaagggggattgggcattctagacctgaatcgttttgcgagagctctaagactaagatggctgtggtttcgatggaaggccaaagacaaagcatgggtgaatttgcagctgccatgcgatgaattagatgaagatcttttcaacgcttccacttgtgtgaaggtgggtaatgggaaaactg

SEQ ID NO: 17051 - DNA, 489 bp, Zea Mays
tgaattcttctatcactgacatgctttctgttgctagattaaacaccattggatcattggcgggtggctgagcctgacaagagactgattttccttggtggtccgtgagaaggactgtcttgtttgcgcaacttatgatgcctttgtgcttggttagccaatccattcctaagatcacatccattccttgggatggcaagacggttaagtctgctaagaacactaccccacttaaaagaattctgacctaggagcatttgagctggcatagaaggtctgaccctggggttcgggtgaccaagggaatttctaggtgggtagagggaatgccatgcttttccacaaaactagtggctataaaagaatgggatgctcctgaatcaaaaagtatagtagcgggagtaaattcaacgaggaaatcaccgagcactactcccggagcttgctgagcctcctaagcatcgacgtggtttactcgtgcccttcctt

SEQ ID NO: 17052 - DNA, 674 bp, Zea Mays
acaaggaatgaaatgagccaccttagaaaatctgtctactacaacatatattgcatcattctcacgccttgttcttggtaaaccaagtacaaagtcaattggtaggtcctcccacggtgcacatggtactgctagtggcatatataatccagtgttttgaacttggcctttgtaggtttgacatcaggacacctttgaacaaactttccagtgtctcttttgagttgtggacaataataacgtgcttgcaggctggctatagtcttaccacacccaacttgaccactaaggtcacttgaatgtagttctctaattagcttgtcacgtagagaacttcttggaatacacaatctctctttcttgaagacatatccatcatgtatcgcatattcttcacctagtggttgcccttgtagatgctttaaccaaacttggccaaaatcatcatcattctcatacaagtcctttatttgctccattcctggaagttcagcttcaaatgaagttaagagacaagcacgccaactcaaagcatcaaccactctatttgttgccccagacttgtgaataatgagataattaaatctttctagatatgctgcccatcttggtaacatgcgatccacatgcttttgatttctaaaatgcttcaaggattgatggtcaatgtagac

SEQ ID NO: 17053 - DNA, 674 bp, Zea Mays
ggtcagtcgcttggcgcgttttctctactagcatgtcaccgccaggtgggcccgccatgtcatccccgattcaaccgggtcctcgttcacctcagccgatgttcaacagccgggtcgtgattctcgccactgcattcgcgcccgccaagctgttgagctgcgcacgaattgcgggactgttgcaacgaccgcggcgtccctggggtatttacgtcgtgcgcccaacgatacctcccctagtttccccgagcacaacagccacgttcttatcatcgccattggcggcgtagcaactttggtgccgggtctggggctccgccagtcgtgtaccgggaagctcggaccgtttcggggtcgtcgtcgtcggagctttagccgtcgggaactggcgggatctactggtggactatctccggtaagttggttttccgtttacgcggtgccttcgggatatgttggggcgttgcgggagtgtgggcgaaagcggccagggattagtgcgccaccgaagggcagcggtgtagtgcgttggctaggcagggccggtcagtacgccggatggccggcaggagagagaaagagactcggggaggacgcgctgccgtagtgcttgggcggccagaggttgaggacgactgtggcacgttaatttggtgatatacggttcagattag

SEQ ID NO: 17054 - DNA, 368 bp, Zea Mays
gagagattgtaggcgattgaatgaggaacaagagaggcacaggtgtaaataggtgtcggaccatgaccgacggtggcagtgcggacaaggaaccgagcaagcgaaaccctagcagagagattgcaggcaagtgaatgaggaacgagaggggcacaagtgtaaatagctcgaggaagcaacaggcttctcgcggacgcggccaccgaggatgactggcaagttgctccgtggccatcgcgaagggtggttgtgacggctactgcagagcggaggggaggatggggacctcggtggaggacgcgacgtgagaaacacacgaaactcggcgtgggccagcgggattctcgagggcaaggatgcgcggtgca

SEQ ID NO: 17055 - DNA, 367 bp, Zea Mays
tgtgcctcagaaatcagaagtgaagatggatatcttgagagaagctcataaaacgccttacaccgttcaccctggcgaaaccaaaatgtaccgagatttgaagcaaaacttttggtggaagcggatgaaggttgatgtttctaagtatgtggccgcttgtgaagtatgtcagcgcgtgaaggccgagcataagcggcctgcaggtttactgaagccattggaaattccggagtggaaatgggagcatatcaccatggattttgtggtgggtttacctcgttctcctcggggcagggatgctatatgggtggtagtggatcgcttgactaagtctacgcattttattcccatgaagaccacaaattca

SEQ ID NO: 17056 - DNA, 565 bp, Zea Mays
attaagtccttcaataaaatgctcatgtttcctctcatctccagcaacttcatcaggtgcatatctggatagctggataaacttgtcgcggtactcgctgactgacatgcttccttgcttcagcgatagaaattccatcttcttaatcttcatcaatccagctggtatatgatggttcctgaactgcgtcgtgaactacgcccatgtgatagtgtcagcagcatcgtgggcagcagtatatgaatcccaccaatcagcagcaggacctatcagacgtccagaagcatataaaacctcctcccggtcagtgcactgagcaatgttcaacatcttctctatggacttcagctaatcatctgcgtccagtggatcaggagaactagcaaatgtcggtggcttatggctcatgaactctcggtgcttatctcggggtggaactggtggtggtggtggaggcagtggtgcttgctgatgttgctgttgttgttgttgttgctgttgctgccgcaccctcctttcctggcgtatctcttctcatttttggcgcagctctcgacatatatcc

SEQ ID NO: 17057 - DNA, 525 bp, Zea Mays
cacccaaggggccaaacttcagtagaccagctggacccgccccatcacggttcagccagcagagtcagagctctttccattccccctcagtggcaagcaaccaacccccggcgaatgcatgttggcactgcggtgatcccagtcacttcaagaacaactgccggcaactgaagccaccaggacccgcctactccaactcggtgaatggccccaagaatacctcggcatccgcccccaaggcgccctcctccgtcagccagcagaacaaggccccgtaccaaggaagggcacgagtgaatcacgtcgatgcctaggaggctcagcaagctccgggagtagtgctcggtgagttccttgttgaatttactcccgctaccatacttttcgattctggagcatcccactccttcatagccactagttttgtggaaaagtatggcattccctctacccctctagagattcccttggtcacttgaaccccagggtccgaccttctatgccagctcaaatgctcccaagtca

SEQ ID NO: 17058 - DNA, 418 bp, Zea Mays
acaaactcagttgtcacggtctcgcaagactttgtggatgatctatgatcctagagggctactaggagtaactatcgctagttcgtgagtggctatggtgttacaaggagactaacgctggttcaaaagtggttagggtgtttcacgcttatgcacactaacacaccattgtatcccttgatgcttgtgcgcgccattgcagaaactcgatagtgaagatggtggggaacatccgagagaggccaaaactagagcaccacttgcacatagagaaggcctagggctatccacggagttacctgatcggaagcttggccttcgcgtgtgcattcccttgcgtggggctccaacagagactagaggaaagcgtgtgcgcttctagataccttggtaaaaatattggtgcatcagcaagatt

SEQ ID NO: 17059 - DNA, 766 bp, Zea Mays
tggtgagcggtgaatccagtcgctggctggaccggccgtcgtgtcccgccgcgattagtcacgctggcatcaccggagcttgtcgtttttctggccgtgacacgtaataaccactcctccgcgtcgtaaggtttgtggcaagccgtcggttatcgtccgcagaccagttccctcttgcgcgccacggtgagcaagccactgtgaaatatcctagtcgtgttgtcagaacttcaaatcgtgttgtcagaacttctaatgaagattaccatggtacagtgaccaaaaaagatctatgatgccgtgagctcaacgccggtgatctgccgccacaatttgcacccacctgggagatttgtgccgcgggtggagtagataacgtcagggcgatgtgaaaatatccggtgaggggtgaatccagtcgctggccggaccggccgtcgtgtcccgccgcggtcagtctcgctggcatcactggagctcgtcgtttttccggctgtgacatgtaataaccactcctccgcatcgtaagggtcgtggcaagccgccggttatcgtccatagaccagttccctcttgcgcgccacagtgagcaagccactgtgaaatatcctagccagataaccgtgatctcaatcccaaaaatcttgtccagttctatcgggacctatatattgaggatgccctctactccgcttcttagttacacgtacaacaaatccccagctagctcctatcgtgcaccaccgcgccccaatttcgcatttcc

SEQ ID NO: 17060 - DNA, 330 bp, Zea Mays
cagcggggaagggtgtctgctgcctgcttccatgcgcatgcgtgcgtcggagagatcggcagaaccgtgcaccaatccgtcgatggacacctacattagacacttaagtagtagtagagattcatcaccctaggtgattagccacccggtcaatcaccctgaccaaacccctgcgcctagactcccctcggccgcaccacgatcaggcaaggttcttctacatctcgcgtcgcgaatccacacccccatcgatcctgcatcgaatccgacctctccgtcgccgtaacgagcctcccatcatctcgtcgtcgtccgcttgacctcccaaac

SEQ ID NO: 17061 - DNA, 562 bp, Zea Mays
aattcgtgctatctgtggttggagagaggaatgagtgagtatatatatgtgtggtgtctagatctagccgtttgagagggtctgcgagatatgcggttgaactacataaaggaccggtccaaccgcttctcagtagatagaaaagcggttgagctgagcggttgaatcgcccacttcaaccattgtaggaccggttgaagcacacccagggcaggttcaaccgtccttcaccggagtggttctcggggcaggacccgttgaaccgccctccatcagagaagacctcggttgaagtttgctttgaacaggttgaactgcatacttcacctatagttgagcagagacaaaatgtgatgttttgaagcaagtattttgagctttagtgcaagtaccaatactcatttgtggatccctcttgatagtatgacgattcctaaaacccaatgacacaaaaattaaagcatggtcatttagaatctagagtgttgggtcaaatcctctgtagaactgtgtgattccacacagagatttgcttctatttgtcgttcgacttgattcaaag

SEQ ID NO: 17062 - DNA, 312 bp, Zea Mays
gttgacgtcaaggatttgatgtatcgaatgggtatacgccaactaatcccagccgcacgcgcacggatcaacgacttaggcatcaaacgcacgagatctattcctagccgtccacatgggaatcaacggccaacgagtcgtcctcctccctcccagaccgagccacggtggcgcgcccacatacaacggcggagctccgtcggagcacactgtacgcgcacaaaccaggccccgtagccaaattcccccagtgttatgcgtatagaagcataaagcgaactagatggatgggttcttaccttgattcaggca

SEQ ID NO: 17063 - DNA, 317 bp, Zea Mays
atctgacttgcaaaatctgaactgggcgcttcgggttagatggctatggcttagaaaggttgatccggataagccatgggctgctttccccttgcaggtcagcaaggtcattgataaccttttctccattacagtggcttcagtggtaggcgatggagtctcaacattattctggagagagagttggctgcaagaccgaaacttggagcaacttgcaactagcctttttggtagggttccagcgaggattaagaacaagaggacagtaagggaggccctaacaaattcaagctggatcaatgatatgcgtggaatgg

SEQ ID NO: 17064 - DNA, 554 bp, Zea Mays
acggtggatggcgggacgtggttgggattgcgctgggttcttgacaaaggggcggagcaagagaagcgctcaatttatagaagctggccgcggttgctctgaatttgaacaagatttggatcacgacggtgaagggatattgttactaaagtgagttcaccgtggcgcgtactggggcaaagtcttacgacagtcatcagttactctccaggattcgtgacgatgtggtaatacggcctatggcgtggcgcgactgagatcgccggcgtccccatcgacaccggccgcacggacacgtcgccagccaatcgagtgcggccgataagttcacatccgggaccaaatccacctcccttccgatctatttatctctcgcagttatcgtcgtgccatagagtatgaatcacagcactgacgcgaatcacggcgctaggatcaccggcggtgggttcacgacactgaagatcttttcatctactgtaccatcgtgatcttcttgagtcattctgacagagcaacttcaggacacttgttctttgattttcatgtgggaa

SEQ ID NO: 17065 - DNA, 592 bp, Zea Mays
tatcattttccacggtgtacatggcttcggtcatctacaacctataccacgactcccgagtgcttctgtagcagcgtggagggcatactcctctacctatcacatatcaggaatccagcaacatgggcacatcctgctcgtgcccaggccatccgatgtgggcacgacatgcatttgcagctcctcggacactccaacgagaccacggactgacgttaacagactttccattaatccagggtgggacaggcgttagactcagccccacttgacacatgtaaaaccctttctctaggtctataaaaaggagaggtgggccttttttggacatccttttttagacttggacactttcaggctctccttctcacaagcatccttgtgctcaggacttatccgttttcgagaaccattcaatccactcaaagaggacgtagagtattacgcctctcggcgagtcaaatctctgtaaacctttgcctccctctcgtgtgtgtttgtcgtgcacctcctcctagctaactagacatggcctaaccagtcgtgtagacataagcgatacaccaaattcttctaccaaatttatacggaa

SEQ ID NO: 17066 - DNA, 648 bp, Zea Mays
ccggagtacggctggccgcggtgaggttgggcttcgggtggcggagaacagatttggggcgaacgtgaaattggagagctgtggggagtaatcagagctacgcgtgggttctctggatgcacaataacctagcggaactggctgaggctttaatttatagggagcgacagcggcggcggtcaattcgagcaggttgtgctggcggccggagaggagaaagttcactggtgcgtgcgataggtggcgaacatcgtgtcaaggccttaggtaatagaaggacggtgtgtggtaatcaactgcgacgtggtaagatggccgacggcgtggcataactgcaaagaacggcggcacgccggtgatggccatgcggccacgtcgccggtaagtggaggagcgaccgagtggccactgtgctccaagtttatccacggtgagatcttttcagggtgagcaaaatccacacggccgcggcacaaatcactccgccttccacttccacgcggggcccgcgctgtcagggtctcctcctttcttcgccgctcgactcgggcatgctctgttatggcgcggatggcagaatctgttgaggtgggccgcgaacggacttcggccggccataagaggaccggacccggatccttatccccc

SEQ ID NO: 17067 - DNA, 364 bp, Zea Mays
aagggatccacttttgatttaataggttatataaggatccaatgtaggcgttcacatgtgcgccatggttctgcctccaacatccttgtccctaccgtgcccagatctccgtcgatggaaggcacaattttaggatgctccgcggccaccccatccatcctcggccttgctggcttcgcgtcaaccccgccatcctcgccccgctctccgtcgatggaagccaacgaccgcctcctccatcctcgccccgctcaccgccatccccttccatcaacaccccctccatcaccgccccacatccacaattgttgtgtctttccttcggcatccacaccccatgtacagctgccacaatcgccgcctc

SEQ ID NO: 17068 - DNA, 766 bp, Zea Mays
caaacgtgtgcaaaggtatcgggcgccagaggatggagcaaatctggagccggtggagcagatggatcaggggggcatggcgatcccaatggcatcaactccaggtggtcagttgatgttgcaattcccgaagtggatatggtaggtgccgaaacttctgcaattaaagggttagcaggcaaagatatttgtatttggtcataattcgtattagtactgttggtgcccaattgaggtgcgctgaaatgaaaaacaggagtggatgctggcatggatgaaggagaatgtggtggtgatctagaaaaaggaaagacaccctcatcaaagattacatcacgcgaaatatatacacgacccgaatcaacatcaagacacttgtagcccttgtgcaaagcactgtagccaagaaacacacactctttggatcgaaaagaaagtttgtgtttggtgtatggacgaagatgaggccagcatgcacacccaaaaattttgagaagagagtagttaggtgaggttttaaaaagacgctcaagaggacacttgttatcaataacccgagtaggcatgcgattaatgaaatatgtggcagtgagaaaagcctcatcccaaaattttatgggcatagaagcatgagctaagagagccaatccagtttcaactatgtggcgatgttttctctcggccgaaccattttgttgatgagtatgaggacaggaaacacgatgtgtgatgcccaaggaacgaaagaaagtattgtggattttct

SEQ ID NO: 17069 - DNA, 556 bp, Zea Mays
aaccctaaccctccgctcctcgacgtcggaccgtcgctaccggcttcggactccggtactccgtcctcctccctcgtccctccctccgtctatgtctgttcgcttgcttgtagctgtgcagaacacatcttgtagttgtgcggaactcatctagatttggtgtagtacctatgtagctgcctgcctagtcgatgttcgcttgctggccgtttatctgttcgcttgctggtggcttagtggctgtggttgtgctatgcatgttcgcttgctgtacgtcggtgtcagtgtgattcactgatgggtgatggttcactgtcgtggcctcctcaccgtcgcttgtttggacatctatactgataactcatcctcctcctcactcgccctcctaattcctattcccatctgactatctcccagtcctagactcctcacaagctagcacctagaatccaacctcttgttgtcgtctctggtgctccggctttcaaaggtatgtctttagtgtttactcgtctctggtgaatgtagcctatttgtagaatttagtttaatttca

SEQ ID NO: 17070 - DNA, 926 bp, Zea Mays
gcgcggcccaacccagtgcacccacgcgccgacatgctggtcccacgggaaagcctcatgccagcacgcctgtggctttgctgtcttcgccaggtagggcaattatgtcgggcttatcttcttcccccatcttcacgcaactgagtctgccgtcctcgcgggattgttgcgtgctgcgtgtcgtgatcctctcgtggctggcaataaaacccaattgcgtcgtcctgtaacccatcggtgctggcgggcggaaccacgaccactatcggggctacggccgcacagatttctcctcgtgctgtctgcccatctcacaaccagccatcttctcctccacggtactccctccgcccatcccctacctacaactcacatggcgctctcctcactccacgaacggctcctccacccagtaccctagctcggcctccatggcatgcgacatctcaagcgctggctctctctctccattcaacactctagtgccccgagctccctgcaccgaccacttttccccatggccgccagctcctgcgcctccctctgctccacacggccagcatggcagccgtatgctgaagatccatggcgagctccctcatgccctcgacttcctccacatcggcaatgaacgcgctagaaaatagtgtgcttcttccctgttgccggtatgcagcaacgacatcgtgtgcagcaagctccacctcctacaccaagcccctttctccaagaactacagtagcctcgacacctctgtgtcacaatcgtcaacccaatttgccgcgccactacgctacgtgccaggccacgggccatatgcctccgctatccatacctgccgccgtggtggatcgaaggtcctgccaggccctctgcaatccatggtcgccggatttcacagcacgacaatggcaggcactccctgc

SEQ ID NO: 17071 - DNA, 340 bp, Zea Mays
cttcgtagagcatgttcaacttatttagcgctaggaatcatactctggggcgttgggagcgttgaccaccggcgaaggcgccgccgtctggcttgggctcaccactggccggagtagacaggggagagggaaagcgtgtaggggcgctcctgatcgttgatctggtattcaacggctaggggtagatggagcaatgagtgaaggtgttcgccgtaggatttttattgagcgacccggattggatcttggtgtcgtgtggatggacgcaaccggggccgtccgatctggatcctgtggcctctattccatacccgttcgtgtactgcgtcgatctaacctt

SEQ ID NO: 17072 - DNA, 389 bp, Zea Mays
attaagagcatgctaaaaaatattaagagtgaattatgatgggtactccaacagtttctttaaatgtgacatgtggcgcaatctgtatagtcatcgagatgttgtggatgatccgatgcgttgaggaatggattgaggagggatggaacacaccaaaatatgagggagaggaggttatggatgcgggacgctaattttttgggggaaaaatgagggagctgttggagtaagaaaaaccactattcttaactaatatctgttttggtgttagtttacacgttcttttggagttgctctaaaggactcaaactcgtcatggcaactgaccacgcgataagctcggcacttcgtgtgccatccatcccacacgtcgtcaaggcatgccgtgc

SEQ ID NO: 17073 - DNA, 362 bp, Zea Mays
gcacgtcttaaagtaccctggctgattgctgatggcccgatctagatccatgatccagatcaaatcttgaatcattatcccagatctgctgtcgagacgagatcccatggcttctatctaatagcgcgaagtggtatccacggcctaatcatagtcgttccttagcctatcgatggttctggcacctcttcttcctctggccacgcaccacggcggcacggacgcaacaacggtggcagtcccgccggagtgcatgcgattcggtgatcccaacgctaccgtgtgaaaaggtcttgcgcgaagagggaatcaacatgaatcgatcttaggactccatacatatgatgtgcagtagaacgccc

SEQ ID NO: 17074 - DNA, 938 bp, Zea Mays
gcgagggcaaaccgagcagagttcttgagtgatttgggggaagtaagaaattggagctctctggtgaacgattggatgcaagacttggtggcttggtgcgtgattaccctatgaagcttgcagtgcgttcaatttataatgggcaagagcggtggccggtgaattagacaacgacgcgcggcgactggagaagacaggtgttactggcgcgagactcagtggcatctaccgtggcgacctcaccagcgacgagccagtgctaccgagcggtttctagtgactcaccgcgacggagtaaagcatcgaggcacgtagcccggctggataacggcgaacgccattgatgccagcgcgactaactacgacgagacacgatggcggtgagaacagtggttggagtttatccccagcgtgatactttacaccgaggagtgtttatctgagtttggtcgggcgtgaatcgcgtcgccggtgcgaatccgggcacacaggtcaccggcggcgaggttctctgaacctgatccaccctgtgcactgtaccatggcgcagtctattcagttgacctgacagaccaactttgagctcgattttctcctaaattcacatggcaacttgctgatcggctagtatcaaagtttttgtctaatgatccatctaactgtagtcatcatgctcaaacatccatgggatcatcttcaaaatggcccctaaagttcatcccatgtcactgaatatccaatttcaggtttcagacagactgacagcccaacttggggcacatttatctcagaattcttcatggtaccaaggcatgatctctatagtaaagttattctcctttcatagatctacaaaattgatgtggtgacctagggcaaaaactttataacttggcagatatagggctccattgttgagctaattacactgaaattca

SEQ ID NO: 17075 - DNA, 390 bp, Zea Mays
ataatgcagcagcatgcttctatgttctctgagtgttagtagcatgacagttctgtatctgcatgatgagccaaacgcacttgttttttttttctcccgccgggagcgagctgcccaatttgcagtagtttagttagttagtctatatatgacaggtgctaattcgggagcagccactgctaatactcctgtcctccatgttgcagcttggcagcgtggcggaactgtactttgagcattgcatcgatggctggccgcgtagcttatgagcacatgacgctcagctgcaggtgctgtagtatttttcttttccttcagcaacaatctgatgccactcctctgctcaagcctcacatctgcacccaggatccgttccagactccccaccag

SEQ ID NO: 17076 - DNA, 513 bp, Zea Mays
caaccgttgtaggaaagtcgagtaaggacttgtcgcctacaaacggcgtgcacacgcatcttagtatgtgtatagagttgtagtagatacaagcagcatgaaaagcctgacagtcactaacctggccgcttttgacgaaccagctgagagtgcaacgaaatcgcataacgtgacgcatgtgtcggcatcgaagtggatggctgatcaagcgtgttcatgtgttcgatagtagctgttcaaagacataatgaatgtgtggttgtctatgcgaaagggaaagagacatattgccctaaataaaggctatattgaacccaaagagcgcataatattagtgcagactccgcgaaattgccctaatcctaggcctagggatagcctagataaatctgtttctctccaaaaaagtatagttcgaagaatttgatgttggtgatacagttgagaaagagatatttgaaaagtaatataagttaatttgtattctaatatgttggctgagccatattttct

SEQ ID NO: 17077 - DNA, 601 bp, Zea Mays
attgtctgcagtgcttcccaacctcctttcccctccgctactttagaggctatagaatccctccacctgcatcgcagccctcttgctatcccctgtctcgccgcaacactctctctccctctagatgcgggggaacgctacgcaggacgattggcttcttcctgctccgtcatctcgttcgtgcgctactgctgaaatcgaggctcgctagagaggggaggcaggaggtgccgacgatagtgaccggtggcgtgcatcgtgctcgacacgccatgacggcacagaggatgttcgatgcccgactgagcgtgcagacggagccggggcgaggggaagaagacgacgtgtctcggatctgcatcctgctcgctgctttctgccgctctctgctccacggttcccatgatggcacagaaatgcggaaagcagcgagcagcttctcgagatctgttggtggagctttgtagaagaaaggaatgaggagtggggatttctgttgccgtgggcgtgtggggagtgaagatttctgttaccgtgggcgtgtgtctggaagatgtcaaatacaatttcgatagaaataaaaagaaaaataatgttgaat

SEQ ID NO: 17078 - DNA, 523 bp, Zea Mays
gaatgatgatgcattcatcatttactacaagcacaattttcaaccaatcaccacccttcccaaggaagtgatccgtgacacccccccccccccccttaactcccagttctttccaccaaaaacgcatagtcccaccaaacaaacaaaagatttcataaaccctatatccaaactcccattccatcctttcaattactgtcagtgtttgtcctattctatattcatatctataccaatatataatctatcagtttaaaatttacaaaactcacccaaccaaatcacctctccatccttaaatacaataaataaattacatccaaacttaatacaccatcaaaaccaagatcactggataatctcatctcccttactcacttaaatccaatggacaatattatttgaattatctcacatccctttcctccacgtcccctgcccccggtctctctctcccctctcctctgtgtccacaccgcctcctcccctcactcgcgttgttgtggttgtcaatccctcctcc

SEQ ID NO: 17079 - DNA, 597 bp, Zea Mays
taaaaaggcaatgaaggtggtaaaccatgctagtatgtcaaaggcagggagtgataaggccttggacacaatggatgaactattggagatgcttaggcgtttagagccagatataggatgtgaagatgctggtggtgcaagtactggagagggcaaccatgtgggtgttgttttatataaaattgttgtacattttatccgaaacttaattattgctaattgtaaaaattaaacgttacagggcgaagaggatgctgttggaaacgatgaaggtgaacatgtatcgcaatgtgataacgaggagcatgtggtagtgcattcacgacaacaggtaatattatggcaaaaaacaatggaatttatgtataatgcaaacacatgggatgatatatacattatttgtaatattgactataatgcactaatgagtaggatggaagcataaatattgatgcacatcatcaatctgaattgcaaatgacgcttgttggaaatgatgattgtgaagggacacaatatggggatgttagaaaggtttgaattttaaatttattaaattgcatatattctatatatttaatgttcgtaaatatttat

SEQ ID NO: 17080 - DNA, 304 bp, Zea Mays
gtttggatagagtaatgactgtaactgtggataatgcaagtgccaatgacagtggtgttgattatttgaggaagcagctacagaaaaccaacattgccaagggcaagtatttgcatatgaggtgtgcagcccacattgcgaatctaattgtaagagatggattgcaagaagtggaccaatctattaagtgtgttagggctgctgttagatatatcaaaaatgggacctcaagattggtgaagttcaaagaaattgctcaagaagagaatgtggacagcaaagcttttttgaaacttgatgtgcc

SEQ ID NO: 17081 - DNA, 793 bp, Zea Mays
cccgtacccacaaagattaagaatatatcaaaataatacattgtaagtatattcatctaaataccattataaaaattttagcatcattgaatcagtcattcaacatcaccacagataattagataaagtatcaaccgctggttgttgagatccgcagtagcagagtcctggccgctgcgcaaacttcgatgggtgggtgcaaccaaccggccgaaggtcccctcgcccgctctgggcgcttgccctgcccctatagaagtttggtgcgatcctcgtcctccccaacccgatgcaccgagccccgccattgcaagagaagagagagaagtcagagagaaatccgccatgggaaccgccgtgagctcgaggatgtttacgttgtcgtcgtggccctggggtgcgcctcatgatgttgcggggggctcctgattgtgttcatggcacctgggtgctcaatcgacgacgggtggaaatagggtgctcgcgcggcagccattgaatcgagctcggcgggcgttattggtgggcagcggggaatgaacttctcaccggcgctactccgccgccacggaacaatgcgtcagggaggtcaggatcctctgcaccatcactggagaacgccctcagccgtatgtcttcccgtcaccgcggaccaagctctgcaaaatcctatcaccagtaagtcagcccccagcaagttctccgtgtccctatctctgtttttcttagggccacgagcaggatagtgcgccgggttgttgaatggctgggcgccggtaatggcgccatcgtt

SEQ ID NO: 17082 - DNA, 362 bp, Zea Mays
cggggagcaggtttccgatggctggcctacttgcctctccgcagtcactgatgagaccattgacggatggacccccagctcggtgaggtttgttcaactggacatggaggcgagttcgtcgaggctgttgatgatggtgtcgtcgacaaggccgccgaggccaaggcggagcgagtgtcagcacattgccatgtgggatctgtgataggtgataaatgggcattttcagctatataaggagaccaatttaagctatggaggtatcgaagattcagaagaaacacatctccatctccattctcatttccttgtgttctagtgttcatctaatctgtccagaaatctctgcatctcttttccct

SEQ ID NO: 17083 - DNA, 348 bp, Zea Mays
cgcgcagcccactcaaccccacgccctgtgcagccacacaaccctgactcgcgggacccgctcaccagggatccccgcggccacaccttgtttggcttaccagtgggccctacctgtcatctctatctcttcccccttcttcgctgtgtctgttcctatccgcgtcaacaacccagacgctgtgcgcggagctcccccttgtttcgcgcgcgtagaccacgtccccccatcgaggtctcggggaataaaggctgggcgtccacatagctgccgtgcgctgacctcccctgggtttctctagagccatcttctccatcgtgggcggagccgggtcccacttcatcaccg

SEQ ID NO: 17084 - DNA, 608 bp, Zea Mays
ggcatgccaacgccccaatcccaaaacccgatctaattccgaagaggttgtttccgatccaccctaaccgttcgatccacgatcgatgaccactcgctttcttccccaatcggctgacccagggtggcgccaccaagccattacggtggcgtactcgctggagaggggcgacgccacacccgagcacacaaatttataacgcaagcagtgctacacatagttctggatgcggtgagcaaggtggaggagaccttaccagtgattacgccgcagggactcccacccaccacgcagggcggatcaacagcggtgttcacacatcgttgaagtattccagtcggcctggaggttattcctacccgagaagatcatgagcacaatcccaaaaacgtcacgaagctccccgaacaaccgccagagaccgagcggtggcacgcagttgactacgacccctagcggctgatctgtcccttccccgccatggcgcacaatagtggtcaatgaagacgggatgtaagagatcatggcccaggttttatagccaagcggcggagtccaatacagaagcccggagttcgcggagtacgaccggcgggggcggtcgagtt

SEQ ID NO: 17085 - DNA, 605 bp, Zea Mays
gggtactggaatgaaccttgaagttcccagaacactgcagatagtagatagacaagcacttgtaacgacgagcgacgatggctaagctgagtggtccagcagaatcgcagcaattgaaggcccttggctgctgccatgattctgggccaccgaacaaattggttgtgcagatacaccatgacgcattcaggacaaaagaacgaagaagtgctagacattgcaaaagactaaggcccacgcaatgcgtgctagaccgcatgtcttaaacctgcgccgtaggcccctgtggtggaaggattccgcagaggtccattagcgcttgcagcaccaaggacgacagtggacccttgaagaggttgatgcaggtctctagtgtggcacttgcagtagcctgatcagacagctggccttccttaggcagcaagcccaggcactttagcagtacctggcgtgagcgttcctggatgttcccacgcgaccatgcgatcgtcgccagccgcatgctcttgtgggtcggtctggcttcttgcttcttctttgtcttcaggtttggtcgtgcttgatggagctcctggagcagtggtggtgcaacagggcaggtgtgg

SEQ ID NO: 17086 - DNA, 387 bp, Zea Mays
gtccgcctatgtatcctgaccccatcgtctagtactatcgtagggtgcatgatcttgaggcctctctagatgagcatgcaccataatatcgtagggtgccacctctatcttcaaaattgtgtcgctaggtattggggccccaactcggcgacaccaacaaactatcacatggtggttttgaggctcaaccatggaaactgtcgtgggtagcgtactccatatgtgccgcccacgtcctagacacatgtcccgtcagtccacaatcacaccggcaacatgatctgctccaccatgttcttgtgccagtcgatgtccctaggtgtcaaccaccatggctattcactcgacttctctagtccctcggtcaagacctagctctcatccttc

SEQ ID NO: 17087 - DNA, 834 bp, Zea Mays
tgaggatcggccgtggcgcccaagccatactatcttcggaaagtcgactatcaaacagagtcatattgatgccatgagggggaggtattttcgcgacatttctattgtcagagttggaggagataggactgcccctactccggaggaaaacgaagttgttatttaccaaagcttcttgaaggcaggccttcggttcccactgagtaaatttgtggtcgaagtattaaagatattccaaatctttcttcatcagattacccctgaagctatagtcaggatggggatatttgtctggggatgtaaggagccaggggctagagccgagcacaaagtgcttctgcagcatgcatgagcttttatatgagacgaaggctattggcaaagaacaataccacaacaacttcggttgttacgggtttattgcccgttctaatgcaagccacctggtgccaacattccggaaaagatggcctaaggcctagttggaggagttgttttacgttaaaaatgatttaaaggcaagggaagacatcaaagaaatcattcagcgccccatctggtctcgcttcggcctccgaaggccgaaggtgtaaattgatggcaatgttgaagcatgtcagaaggcctttagcactgtgtgtgccttcattggcacgagggatttgattcaagagcatatagccttcagggtatggccacttgtggagagttgggatatgccgaaggagaccaccgccgattcaagtgagggtggtctggtccgattgaagtataccttcagatttagggagaagtttgatgagccggacaatcaatggatgtagtgtattgaag

SEQ ID NO: 17088 - DNA, 384 bp, Zea Mays
gtttccttctccctcatgttaagaactccatcgtgatccatatgtggttgttctcgcttttagttattctatgtaatatggtgttaaggctgtttcgtgatggtactcgtgattgtgttcaactatgtgcgccgggcctgtggttgatcgttgatccatccatgcatcaaccgtcgttggttatatcatcatttgccatctctcgcttgctattggacaggttgtctggtcgatttgtcgtattagttttagtataaataacgagaaagaaacacctagtacagtaatatgagactactatatgctataaatcagctcacgtcatggtgtttgtgtactggaatacatcatctgtccagttcttcacattttacacacctgcag

SEQ ID NO: 17089 - DNA, 272 bp, Zea Mays
caagactgtcggagcatccaccgaatatcatcccgaggcgaagaaaagttggatgctttgctctatatgtatgaaaatatggatgagatgactccgtatttcaagtaagatgaaatttgtcatttgtgtatctatgtagtaatcgtgacttaatacgctattgtttatttgttgtaacagagaattccaatcgtgacttaatgagaaattgtcctcgaggcagtatgaaaatgcacttcgaggaagacatgggaagcccaatttcattaatt

SEQ ID NO: 17090 - DNA, 738 bp, Zea Mays
ctgaaatcgaaacatttacataacattgtgcaagttagtatgatatcatacagtacgtgtttaatcaatatgagccatttattacaacatacctgtcaacattactcgtggtccgtcacatcccatgcatgttttgaaagtattgatcaagacccactcgaatgtatcaactgtctcgtctcctagtaaagcaaacccaaatattgtgcattgtaggtggtggttcgagccaacaaacatgcctaatggcttatcatacatattagtcttatgtgtagtatcaaaggtaacttcatcaccaaaatcaatgtactcggcttgctggctagcatgggaccaaaatatgcttaaaatcttcccttctttgtccagttgaaagtcagaaaaaaattgtggattatctttcttgcataatgaaaaaaaagataatagcttcgacacatcatttgcatttctttccctttgccatgctttcttcctgtcaaaaacataatgattatgcactacatatttttaacacatgtcgattgtttcgataatatataataccattattgtcaatgaataatacacttacaggttactcatgtcctgcacggttattggaacattttctggaccgcaatgcatttttgaaacaaaatccataatgcaatggaatcctgcttttcttgcattgcactaaggaactccatataatcacgatcatgagttttgttgcattgcaattgccctttt

SEQ ID NO: 17091 - DNA, 488 bp, Zea Mays
gcgcggtgatacatggggtcgtgcgatcgggtggggtccgcctgtcgatgacctagagaggggaaaggagggggtggaactgggaggcggacgggtgggtcctagctgttagggtccccgtctacccggtcgggcacacacagcgacgcttcaggcccttgccagtgagctcagaggcatggccatgagaacgggcgcgtgtcacggaggttcagccactcgaccagacgatcgtgaccagagagaaaggaaaaggcggaggtggtgtgagggaaggagaggggagggtagacgctcacccgtggggtcgcaggcgaggatgaagctcggctcgatggtgcgtgatctggtgcacgtgtggtggatggtgaggcgcggccggtggcggacaaagcgggcccacgacgcagagagcaggggagagcacgcgagtaaaggggtcggcgccgacagtccggtcccaccggacagagagcgggggagagccg

SEQ ID NO: 17092 - DNA, 690 bp, Zea Mays
gaaggtatgagcggacctgagacgcgctgatcacagtgaggttaaaccgagcggggttcttgcgcgatttgggggaaatgagaaattggagctctctggtgaataattggaggcacgacttgctggcttggtgcgtgattatcctacgaagccgacggtgtgctcaatttatagcgtttgcgagcgatggccggtgaattggatgaagacacgcggcggccggagaggaagaggggcactagcgcaagcgcttagtggctttcaccgtggcggtccctccggtgatcaccggatatacataacacgactaaccgcgacgtggtaagacgccagggcacgtggcgcaaggccgcgaggtggtagtctccggcgaactcatccaaagcaaccatgactagctcgggtacggtggtcggagtaaattagtggccagaacatatccacggcgtgatatttactcaccccaagcgctatccaaccgatctgagcgtgaatcgccaacggcgagcacaaatccgagcgcacagctcgtcggcggcgatgtgatctgaacttgatcctatccggttactgtaccatcggaatcctattcagtcagcctgaaagtcgatgtttagggcaggttttctccaaatttgtcatggcaacataaccaatgctctgcagcaaagttgtagccctacaaaccat

SEQ ID NO: 17093 - DNA, 807 bp, Zea Mays
gagccttaccagagtggtccggccacggagcgcggagacagtgctcgccggtgacagagaaaggggaaaatggcgtcgcgacggctctgggtggaattgggaggtgggattggggctacacggccgtaaggaactatagtttcaccatgcacactcaatttgggaagaggtggcagaggcagtgcgaattttgagctgcaatcaaactcactggtggagatgtgaacacctcgccatggaccatggtgctatttatagccatagcggtccggctaatgatcagcgaccgtggaaggctttgttcacgcatggcaaccacgtatagaagaggcactgtaagggaaatcgaggcatgggtgacaccacagcggaaatgaccgagccacggcgaccgccgatgggatatctccggccacgcacgactgagctcgcgggatggtgccacgttcaaagtttacatctccgcgatcaaatccccaccgattcatccgagctcattcgattcaacagtgcacagatctttgtttcagatatttcagtgcactggatcttcaaagcttgtctgaaccaacccccttccatccactcaatctcttgattcttgttaaggacagagcaaacttcattaataaagtttgttcacctatcaaccgtcttcaaacttactataggatatttgggtcataatcgagtgaatccaaagatatggcgcgtccaaattggctccattccactgtgaccatttctgctttcaaattcagtttcagttattcaacaccattctgacatagtaactttgagctgtcg

SEQ ID NO: 17094 - DNA, 922 bp, Zea Mays
gcaactggactgcagactccagtgccgtgacatagaatcctgcgtcttcctcgatctggcaaagcctggactcggtgttgacatccgacgcagtaaggtgggcctccatgtcagcacggatggactccgacgggttggagaggcaccgatctgcttcagcgacgtgggatttgaggccgccgacccgagacttccacttagcctcgagcgattggaacctcttgtctagttcggcgaggagcgaacaagtttgattctccagtgctagggtgagatttgtctctgcaggaggagtgtgtgacatgtttgtggcaagggatccacgctctgataccaatttgttagctacctacggaaggaaggaagaaatctgggaaggatacagaagggaggaagagttctgggaaaggagggagttcatgagaaggagaagaaggtagacgaggatgacatttccatagagtttcagatagtgttcattacaagcataatccctgaagacagacatcatctcttacatatactccacacacacggggtcccactaggcagactaacaaatagataaactcaccacacagagacctgcatcaagcccactccgaaccactcgtacgaacattaggacgacgcttgcgaactcctcggtgagtggtttcctgtgtgtgcaccggcaacggaggtgtaacatccacttcgcacagccgtggtgcggctggccctccgtgctgccgcgtagccgtggtgtggccatccatcttggaggccgcctgacccgccatggtcacatccacgggtgcgaccgagatcataggtcacggcttcggtgcccgggctctggtgcccgtgacactcccaggtccattcgatgtagttcatggtttatatgtgcctcgcacatgcatgcgctgaatttatcgct

SEQ ID NO: 17095 - DNA, 358 bp, Zea Mays
gggggggggctttttactactatttcaagatcagtaacgaatcaagagtagtcgaacatatcacactactatgaaaagacatccctgcaggaaaaatggaagtgtcacagatagtgcaccattgctggatcataacataagctagagaaacacctgaaatgttatcaatggacatggatggcttgatgactatacgtgccagttcatgttaccaaggggcatggataccttcataactatctgtgcctttcgtattatgaatcgccatggaaccttagcgtccctgttggttgatattacaatcccacaccgatagtttcctgtttcagaaattcataacttctttatagactctgat

SEQ ID NO: 17096 - DNA, 555 bp, Zea Mays
gactgggcgcacaattctgtggttttacaggggctaaaatgtaagttccaggggcatagattaaacctccctatactgtttatggaccgcgggttcatttcgtaactcaacaggggctcattagaaaagtgcgcggtgaaggggtatcgtgtattcacagccgtcagattagatccaacagccccgagcacgccagtacttaaaggtaacggcgatcaacagcgtccctatcatggatcagcggcccacacacgaccacgccacgatccaatcctgcccatccattccaatacctacgactcagatctaatacgacgaaagggtatttggcattctaatctacaccattcatccagatccaacggtgcagagtgcttcttctaccccgcgtccaaggccgagcaaggcacccgcgcccacgccggagagtacgccggagcacaccatcgcagcgatcccggcccgaatagtcttgcgaaagtgtgctacgtgtcgcggagacaaagacaagcacgttggaaggcctcttaccggtgattaagctccaggtattcc

SEQ ID NO: 17097 - DNA, 1096 bp, Zea Mays
cacgatggtacagtaaccgtgtggatcaggacgccagcgcagccaccttaccaccggcgaccgattgccgtcgtgattcgtgcgaccgccggcccactttgtgctctggatggttggatagtgtcgcggggtcaaatatcttcgccgccggtgacctggaagccactccggctagtcgtagttcatctcccctggcccaccgcccgcgggtaaagttggtcaccatcgtcgtgccttctccgttgtccaccgcgtgtcctaactgcgccaccgcatcgtcgtgacttcctctaaactccccatcgaccaccggagttactgccacgacggtgaacacgtgttcactgcaccagcgttcttctccccctccggccgccgcgcgtcctccctaaattcaccggccactaacgaagctgcctataaattgagcccctgggcagctgcgttaggtcatcacgaagcccacacacccgttcttcccctcgattgcccaccatagccggagaattccccttttcccccaaactggtttccgccgccgtaaaactcacctcaccgcggccagccctttccaggttagttcatctctctctttcccttgtttaagcaccctggttcctctgtgatgcttgccgatccttcaattcaaactaggggatcatcaatcgccgggaacatgatgatctagccgccatgcccgcggtcaccgtggccagagctccgtagttgatcataagcgcaattaagttagggaaaatgatcaaggtagccccgatttcatgtctgctgctcgggaaccctagccgttgccccaatcgaccggtctacgagctcgtcggagatcggccacgcgtgaacgccgtcgaggtcgtgtcgtgtaaaggaatagaagatggagggcctttctgtaatttgtcagcgacacatcagaacagtaaaggaacttgtatcctgttatccagaaccccgaggaccgctgtgcaaaatggccagcgcgggcgcgcttctccgcgaggttgggccgcttgggccagtttgagcccaatactgttgagtattttccttttctttttcaaaataactttagaaatccatg

SEQ ID NO: 17098 - DNA, 587 bp, Zea Mays
gtgcgggtacccagcgaagcagagtacctcccacaagatagagggaaagccctctcgggaaaggtagtcaaagctgaagcgggtgtctcctccataggcgggggtaggtgaagccatctgtgaaggaggggtaagtgtaagtgctaaggtagcggtaagaagataagcgttcttaagttaaaggaggatacttaatttggattaatctgttttaacccactttcctgttacccattcttaactaatgtttttaggggtcatgattctatatattcccttcaacttttaattaatcacttttcccttttagtgctgatttactacaatgcatgcatacttgaatgaacgtcctctcatcaatcataggggtgctcctagggcatcccttctatcatagtgttggcctatatggcctacttatatagccacctatctacctcattattcttaaggcctttcatcctaggtctagcgttctagtcctgacgatccaacactggtttctaataaagttttatttttgaaagattgacattcatggctcattgactcctctgtaatggtattcgctgcgatactagctctgg

SEQ ID NO: 17099 - DNA, 538 bp, Zea Mays
ctcaagcttagtgcgatcaagacctccgtggcgccaccagaaccctccagatcaacagctgagataagaagagtgcggtgaagatcttgctcagcctgccaaattttccatgagtgtttgatgtaactcacatgtcatccggaggaaacagacgggatggtggtatactggtatctgaatgcgaaagagggagagggggcatcggcggcatcacgatcaccatgaccaccagagctccgtccccgcctcttcctcggcccacggcgagtacgccttcgtccgccatcagcagagcctcccccggcacaccttgcatgatcctccatacggcctctaggggcttccatcggcgctgccacttggacgacggggcgccacacctggactcgacgcggatgatgagtagccgtcgaccgtcgcgggcacgctaggcacagtgcccaggcagccggcaatggaagcaccgcacctgccgccgacactcagcaacccgatgagatggcgagaagcagttgaagcacctcccacgcaagtccac

SEQ ID NO: 17100 - DNA, 637 bp, Zea Mays
gtcggaggcggcaccaaagccatcaaagccaaagagatggagccatagcacggctcgcttcccaccccaaagagttgggggcgcgagggatggagccgtggctcagcccgccgtccaccttcacgaggctggtgatcacccttccccctgaatgctggaggaagaagtgggaaggagcgtcgcctccacggacatcctgcggaggtaggcgatgatggccgcctaaaagatgaagcaggacgccacaggtagaggctggaggccaagcccctccagtagctgcacgaagaaagatgggatcggcagagccaacccgctggggagtttggaaacaaagaacacaaactcttcggcggaaaggtcgtcgagaggagagataccagcataagtcctcccagcaaataccggcgcattccatccaagcaggcagtataccatttcgagcactcactcagtctgggcgtgctcggggtgaagtcacaaggccatggtaaactatggcgacacaaagcagaaaccttgaagacaaagaggcgcagagagctcgaaggcgaaagggcaccgcgagtgggagagaagcaagacatggctgctactcgaggggtgaaccctttttaaaggcagatttccccgctcg

SEQ ID NO: 17101 - DNA, 517 bp, Zea Mays
cgcgagtttggagatgcgccgtgggaggaagaccgactacctcgacatcccactcaaggacagcatcaaaggatggagcctggaatggtttatcgtggagaatcacgggaattccctccccccacggtcagggaggcagccagatgttcgcacttcgagctggaccgaatcccccacagatctggaggtggctaaggcaggggctctacttgctaaggttggattgttgaaagagaggggtctgactatagaagctgtggtcgccgatttcattttcaagaacattcagcctctaaaggacagagcgtacccggcttatctgtatcgaggcctcgctgattcgacccgggttaccaacagaagaattcctgctatggatttggtcagccggctcgagatgatactcagaggcaaggtgtcgaacatcagtgctcctgttgcatactcagcctggaatatgcctccttccaaggtttttaccagttttgtgtcaaatcctcctgctggtgatagcggt

SEQ ID NO: 17102 - DNA, 413 bp, Zea Mays
ctttggaccactaaaacctgggtgtgacagtatcttaataaattcaatcacctcttccagtatgccattgatcacggggatacaaacctgaaaaagaagaattgttttatgaggggactaaatgatagactccagcataagatggcaacatgtttggacctcacatacagcagggctgtcaatacagcactggtagttgaagccaaaaatgcgggacacggaaagtcaaaaggatatgcgggtgaaagatcaactcaaggacctgaaaagagaacaaggttggtaatccgacctttcaatccaaaccgttcttcacctcgccaacctacatatccattcaaacaacccgtatttatttgtcccactcccgcccccgttccgaccaattagccgagtgcccctagtactcgttt

SEQ ID NO: 17103 - DNA, 413 bp, Zea Mays
ggattgttgatcggatgatgggcagaccagatcagtggagctcaacactttggccaggtgcaatggtgttcgtagatcatctagtgagagaacgagattaaaaaggaagaaaacgattcaggtacatgaatcgtggttgtcgatctatgatcctacgggcacagttgcataccggttcagtggatggatctgtgccgttgattgaacaatgcgtggtcaagatcataacagagacgacgttgacctgagtgctccagcaacgtagatcccagatcttgtgaccaatagcgcataccgcttcgatgtggcgccagatctaatctaggccctcggttttgatcgaacggctctggcacgaagatagccattcgcacggctcaattgcagatggaacccttgtgttttataaaatc

SEQ ID NO: 17104 - DNA, 423 bp, Zea Mays
attttaaaatatgtctaccgttaatctacatcgtctgtcctattgcccacatctccgctcgaagcctcctctgtcccttgattttctctcgatcccaactgctcgcgccgcctcccaaccttctccaactctccaaaggccgagaaaaccatgcctcccacacgcgctcacctagctccccactcccctccatacgatcccataccttcgccgccgctgagcgcatgcctccccacatcgcctcccaaccttctctgactctgcgaaggccgagaaaaccatgcctcccacacgtgctcacctagctccccactcctcaccaaacgatcctataccatcatcgccgttcgcacgcctccaccacacgttcacctaggtccccactcccctcccgatgatcccatgtcgtcgctgctactgagc

SEQ ID NO: 17105 - DNA, 511 bp, Zea Mays
tcagtttgaaatacatactggaccagcgcttatccaccataccacagcacacatgggtcagcaaactatttggatatgacatggaggtggagtataggccagggaagatgaacggcgcggctgacgccttgtcaagaagggatgaggaaccaacagcagcagtgaatctgctgtccaccccaaccttggaagtctttgatacactcaggaaggaagcattgacagatccgcaagtccaggaactaaagacatagttggcggcaggaactgcaggagaagggtgggttgaaagagatggattgttgatatgccagggcagagtcttcgttccagataattcaagtgtgtggtgtcagttgttgatagctgctcatgcagtaggtcatgagggagtagagaagaccttgcatagatggaggagctcattccacaatacccatatcaggagacgggtacaagaatttgttcggggctatgcagtctgccaaagaaataagtccgaacatcttca

SEQ ID NO: 17106 - DNA, 543 bp, Zea Mays
gcaaccgctgctgacgatactaattttatggtggccgcaaccgcagtgcctcctaatgacaatttatctggttctgaatctggttctttttcgtctgatggtgagtttgggagtccgtttcctagaccgaagagtcttcatatgaagacttggattattttgaggcattagatgtggccacggcggagtccttgctgcgcgtggaggttagcgaggtgtctgatcctcctagtgcgaggaccaagtgccggcgacgaagggtggtgtcgaagcatagcgttggtgaggtttcgcgaagtggtaggcaccgtcggatggggatggagtgggaccgtcttagagtagatcggtttggtaaacgagagttgatgtcttcgccgattgggacgagcattggtgagggggatctacggaatctttttgagggtgaggaattgaaaataatgttgttcaattatagggaggcaggcatcatcccgaaggttgagccgatgtagtatgtggtgccctcgcgttgtccggcggtaatggagggcgtagttg

SEQ ID NO: 17107 - DNA, 656 bp, Zea Mays
cgccggtgagtccgccacggtgaaagccactaatcgctcgcaccagtgcaactctccttctccggccgccaccgcgccattccaaattcacgtgccaccacccctggagcctataaattgagtgtgcctttgggtccgtaaggtagtcaagcacccaagccaccaagctgtgcctccaattgctcaccagagctcgccaattttagatttcccccaaatcagccaaaataccgccacgtgaacacctcgccgtggccacccttctgtaggtcagttcaagctttcttaattggtgttctagctttcctcatgtcccctgaagctcaactacccattcgattgaactagaccgccataaattgcctagaacaccttggattatcctcggtttccgccgtcgtcgtgagcaggcgtgctccggtccggatcagtgaaattagctgagggattagtgttggggagggttgaattaagtgacaaacaaaggataagtctagccgttgtgttttccggccggtattggttcgccggagtcgctgctccgccgctcacggtcgaggatctcgggttgtgaagaaacaaaaaggggaggggtctttgcgcagatgtcagtgagacaaagaaacagtagagaggattctttactggtatttcaa

SEQ ID NO: 17108 - DNA, 450 bp, Zea Mays
tttggtaacggtgtcgggcgagccccgggtgcaaaggaaatacccgagcctaaaggcaagttgatagtttttgaggccttttttgctgccggtcttcacctcccggcacatcggttcgtggtggaggtgttgcgacgatttgaggtccaagtccaccagctgatgcctaacatagtggtggcgcttgcgaagtatgtctggacagttccttcctacatcggcagccgtctgtggaggtcttcaccaagaattattgcctgcattggcagaagaggaagatagggaataaaatagcccaatttggatcatgcaccttcacgtcgaggactgggaagacttcggctgaggttgtggagatagtcccctgcgctaggaacaaatggggtaactggtgggatttttggttctatgtggctcctggtgatgtcgaagacttaccgagtctgcctc

SEQ ID NO: 17109 - DNA, 403 bp, Zea Mays
aaatgattctgtcagaacagcaaaggaatcctatggtttggagaccgattggttgttcccaagaaccctgagctcagaaagaagatactggatgaagctcacctttccaaattctccatgcaccccggcagtaacaagatgtaccacgatctcaagtccttgtattggtggaccagaatgaagagggaaattgctaagtatatatctgaatgtgacacctgccagagagtcaaggccagtcatttgaaggtggcaggcactttacagccccttcccataccatcttggaaatgggaggatatctgcatggattttatcgtgggattgcccaatacctcccgacatcatgattccatttgggttattgtggacagattgactaagacagctcatttcttgccgg

SEQ ID NO: 17110 - DNA, 684 bp, Zea Mays
ctcaaaaataaaaggaaaatagaataaagaaaaagaaaagacaggtggataacttcctggggcgggaacaccatttttggcccattctgccatttgtgtgcacagcccaggctgttgcgtcgacaacagggccccactcgacagccgcacgctgcgcacgctctgtgctctcgccactgtcacacgggtcccacacgtaaggaatccctgtagatcttcctcacccccataaccgaaggtcgcttccgctgggatctcgcgtgcctgaccgctaccaactcggagttcacccgtcgccttataagtccgttgctcgcatcctccttcggctagagactaggcttaaaccaccaccgcataacatcgacgagatacggggggaaaatcgacctcgccacgggagggagaccatgccctcttccctccaccatggattcccgcctgtgtggccaactgggcactgggggatggctttggcgcttcaccggtcaacagggatcatgcccagggcccgtgggatgatgcgagtttgtctgggaggatggacctcaccgcggtcgacatttcgttgcagtatcggtgagcgccttcacatcagttaatcacgtcctcgattatgtttgacgctagatctcatgcggggctgggcgcgcgacacttatagcgtgcctcaccggcgtgggc

SEQ ID NO: 17111 - DNA, 1068 bp, Zea Mays
cttgtactagccgtgtaggagtagcactatactatttttctctaaactacaagttacaggggaactggaacctgtactgcttctacacaagttgaaactcaactaaaactcaactaaagccattagaaagtcaaattcagaataggaaaaggtggagctacacctgtgtcaattcatcaaacgatctatgttatctgctagtgctgattctgttcagaatagcagcaaggtgaagatcagcagcaacatctgctcattcatcagttcatgctgcctacaagcctcagcaccaggcctctgtaatttactgccacaacacaagtaatagagtgaacatgtcaaacccagaccatataggcggatcatagacacacaagccttctgtgtgcataaaaatgaactcaggaacagacactgcgagcaagaagagtatgttccatcttccattcccataaccgcagcggccattcagttagagttaggacttctggacagaaaatatggaaccatcgttcaggggcaggagactaaaataggacccattctcatcgacacagcacgcctgccactttatctgataagagccttcagggaacgaggagacatccagcaggcatcctgagaacccctgcccactatctgttggttcaaagcatgcaaaggcagtcaccatctccatgacactatgggaattcttcttctcattcctagccttcctcagatcattctttatgtactgtagcagcttggagttcaattcgaccatttcagcggtcctgtgctgatcaaactgcttgcttcttgttcctgctgtatccaagcaggtctctaagcttgcggccaaaatgcagtacaatttcacgatgcgaatggtgcttctttctaacacacacttccacttcatgcagagggttagagacaatagaaaaccaggctctatagacattcctttttcattcaaatgatttgaatcaaatatgtaaagttcagcaccaaggcaaggcctgcatacatgccaaaaatgaaaacgtcatatcatgttgggaagctccatttgcccaaacatta

SEQ ID NO: 17112 - DNA, 770 bp, Zea Mays
ccaggagccacaccccataggcaatgaattcctcgaccaggtcacatccgctactcaggtgggtcgcgtatcgaagggccccttcgtcttcatcttcttctgccacctcaaattgtggaaacgccacataacaatgtgaacacagagtggcaggggcaaactcggcaacccttcgatatccccgggagttacataaaaccaaaagtcacaccaattgccccacttattcctagcacagggaactatctcgacaacttcagctaaggtcttcccagtccttggcgtgaaagtgcacgatccaaattgggctatcttatcacctatttttctcttctgccagtgcagacaatatttcttagcgaagacttccatagacggctgcccgccgtatgaggagacggcccagacgtacttcgcaagcgccaccactgcattcaatgtcaactaatggacttgtacctcgaactttcgcaaaacctccactacaaaccaatgcgtcgggaggcgaagaccagcagcgaaaaaagcttcaaaaacaatcaactccccctctggctcggggacctcttctgcccctggagcccgcccgacaccgttcccaaaataacctagccgctgcatctccaacacgtggcccaaaaaaatcctcgaggtcccgaactcgacggtatggccaggctgcagttcaaccaccgccaaattgctcaatgtctcctcaaatgacggcgtggccggcgacgcgctcgcagcagatgaagaagaagacgaca

SEQ ID NO: 17113 - DNA, 395 bp, Zea Mays
gtccgttgcatgctttctaatgccggtttatgggataagcatgatacgtgggtggaagctggttctgccgcctgctatttgattaatcgctctcccaattccgctattgattttaaaattccaaaagaggtatggacaggtaaatcagttgattattctaatctcagaatctttggttgccctgcttatgctcatgttaacaatgagaagctagtgcctagagctcaaaaatgcacttttattggctatggttctggtgttaaaggatatcgtttattatgtgttgattctaaaaaggtgattgtcagtcatgatgttacttttgatgaaagtacatttctttctctagaggtgtttctgatagtggtttctcatccacatctatgcctgaaact

SEQ ID NO: 17114 - DNA, 1727 bp, Zea Mays
tcatcgtactaaaatcgatggacgacgttgtggtcaagaaagtgcatagtcgtcatgtctacaattgcaggtgtacccgagaccattgtgtgatgtgcaccatcgttcttgaaaccacgcctgttgatgcacctgcaagcattataaaatataggcagctacatcgtttaccaactatgtcatacttaacgatatggactctggtacttgtcactggacccttgtcactgtgacaggacgtacctggtactatagcaggacatactcaacattgtgacatgattgagacgtgcactacgtatgactccatatctatgataaaatagtggttgaaccttcgctgaacagagcccaccgtccagcaggcacataactctcgtcgtgctataaaagggagtagagcaacatagtgggatccagggctaattctagtcgatccagattcaattcaacaccacaagatatatcaaatcaagggttcatagacgaaggtgaactagaggccagttagtctaaaactctcactagaaccaataggaaagggacaacaagctagtcatctggctcatgtgatatatgagcatgtaatggctccacattcatcaattcatctgccacaaagaggatgttgggtattacgcttacgcggttcgaacctctataaatcatttgtgtgctcataactatagtggtaccccaaatcaagcgtctagcatgcaaccctcactctcttcaaactctacgaacttcttgggtacctacgataccctggtgtcgttactcgacagcaaatatattctcaccataaagcatggtacaaaccttttcatgcaccttacaaatacattttccaccaaaggtaagacgccaagagaggacaaatctaacacatagaaaaaaggaacggctcgattaagcacagcacgacccagtgccatctgtgcccatgccagcaggaaccaatggctagtgtcgtgtatgggccacaccatcaacctatagtgtcgacccgagcatggcattagtaggcagccccattaacgtgccatcccaaaccatcaccatccacgccccacataatttccacccccaactctagccactcaccatactctcatgtggtctagtcacacgcccacgctatcctttctatcgtgtcacaatccactttagctctcctctccaccgccaccaccaccaccaccacccccccatactctcctccccactacaacgcagcaacacaagagctgctcccctcccttctttggttctccccttcaagacatgtgtggctgtgtcactcccttctcccttcacccgtccactatttgtgtaggagtgatcatcaaactctgacaaggtggtcagtgttgctctcctctgttctttctcatctactgtcgatgttgacagggtgagttgtaacagccacctcatgtagcactcaaatactccaccgccaacatgaatctggctcggtacaggaacttggattgatttgtgtatgtatggatttgtgttcatatggatgtaaagatgttgttgtagttaatctctggtgtctgtacttctaactgatttgtgtttgggagttcgttgggctcgttaggctggcacgacacaactaagccgccaatacgccatgcctaggtcgtcgcccaccggtgaagctcgtgtgctagcacaccatggctagctaatcatgccttgacatgccatgccta

SEQ ID NO: 17115 - DNA, 669 bp, Zea Mays
tgcggctaggcgtggatgaagcctgtgtggggaaggcgatgatctcgagcaggggcggatgttgcccaaatggaatctgcatgggcctcacattagggtagccttcctgttgcgcaactctacaatctttcttctccacgacatcatgtccgttctacggcttccaatcgactcttccccaccatatccagtttctggccatggcgtcacggggtgtgcagtgtacacaccacgtgcccagaagcgaggtgacgcgcgactacacgagtgggggtgacgctacgtacgagggtgaaccagcgaagcaggcgaggctgcgtcttcgacctgtgcacgagcggtcggtcagcacgcgcagccgcctctctcgttgtcgcctcgtgggtcgttgtgctcgtgatcctcttccactccctcgtcagacacagtgacggccaaagaggtatagcctcttcctgtatcttgcccctacgatttctctatcggtcttgaagagttagtcgtgtggctgcttttgtgtttgtgatcgtgacacacaaaccgatgccctggctgtcctatgcagccgatcagactccagtggtgccaacaaagtcagtcataacttgatagatctgagtgcctcgctgcattccttcgtaatacatatcgatgttgttagactcgctg

SEQ ID NO: 17116 - DNA, 392 bp, Zea Mays
tgcgcgcgccgccgtggggagctggctgcaggcatgggattgatgatggaccgatggccgttgatcttgcagcaaacggctaagattagatttgggcatgtgaggttttcaaccgttggatcggttgcaaaggaataggattagatcgcggtttcattaaatcatggtcgtcagatccggatctaacgatgggcgcagcataccgattcagagtctaatccggtgcctcggatcttgatcgtgtggccgatactcgcccgtaccctttcagcggggaattttgttaaagagtcctcgaggaataagaaaatagaacccgccgtcctgagaggcattgttcactgagtctagggtaatttaccagtgagcccctacagttttcagtatttgag

SEQ ID NO: 17117 - DNA, 668 bp, Zea Mays
acgagccggggcagaaggacctgcatcctggtccaagcatgacagtcgccgaagtcgcctcttcttcttcttcttttcctcaacaggtgcagtcgggtggctaacttggcggggacgctttgagtgagcaccctcaggcttccgagtctccactgctttgccaaactcttgtccagccgtgatagccatcggctcagcatgggtcgagtcagaagattccccagccaacatactaagcacaacatctatctctgcatcgtctgggctagctggcatctcaaaatgagtttgcttctcattattgggaagattctgaaaaggggcaatcagagcctcaatgtcctcgggagagggtcgcactctaagacctagaccaccattactagcaggagggttggacacaaactcagaaaatgacctatgaggtggcagattccaggcagaataggcaacatgagcaccaacatttgacactctgcccctcaaaatcatgtctagtcagctcaccaaatcttcagtgggaattttcttgttggtaacccgagtagagtcattgacaccactgtacagataagctgggtatgccctatctttcaaaggctgaatattcttgaagacaaaatcagcgaccacagcctcaacagtcaaacctttgtctttcaataaac

SEQ ID NO: 17118 - DNA, 894 bp, Zea Mays
agccgataggatcccggtcgtgtaacctccgtgacgatgaatggtccttcccatggtggtgacaatttgtgtcgttcttcccccgtcaggactcagcagagtaccaagtctcatactgcgaaggatcaatgttgtactgctttgtcgtgatagcgccttagggtctgctagtatctagctgaccggatgatcacatttagctgtttttcctctagtacatcgatgtcctctagcctagttgcttctgctttgactatgctttcgaatgttaatctaggtgctccaaagagtagatctgctggtaacactgcctctgacccatacaccatgaagaatggggtgtttccgtgtaatgctcggcttggctgggttcgcaggctctagactacataagatagttccctgatccatttccctgcgagcttctcgctattgtcaaataccttttttctgagtgcatcgagtatcatcccgttggctctttctacctgcccattagctcttgagtgtgccactgatgcatacttgatctggatgcttctctgatcgcagaagtcaaagaactctgaactggtgaaattagaacccaggtcgataatgatgttgttaggtattccaaacctgaacattatttcctgaatgaactccactgcttttgccgaggttaaagaggcgatggggttgtattctatccactttgtgaatttgtcaatggcaactagtatgtgggtataccccccttgagctttctggaagggctcaatcatgtccagcccccagcatgcaaatggctaggtcacgggaatagtctgcaactgctgtgcggatagatgctgctgctgtgataagaattggcacgcctcgcacttctggaccaactcagctgcatccttc

SEQ ID NO: 17119 - DNA, 531 bp, Zea Mays
cacgagtcaaggtatcaaggattttgataggatattccatataagtcagatcatcttaaacactaagatcctccataggtagttgttcttcgggtaccttgagacacttcttcaactggatacatggaaggcatcatgtacatccgcaagatgctcaagtaattctagttgataggcaacttcccccactctctttaagatcaagaaaggtccaataaagcgaggggacaaattccctttaactttaaacctcctcataccccggatcagtgacactttcagatacacgtgatcacccttcctaaattccaactgtcttctccaagtatctgcatagcttttctgtcttgactgcgcagtcctcaagttctcccgtatcaagcgtacttgttcttctgcctcttgtataatttctggcccaaagaactgcctttcaccagtttgatcccaatacaaaggagtcctgcattttctgccatatagagcctcgaacggggacatcttcaaactggcctggtagctattattgta

SEQ ID NO: 17120 - DNA, 543 bp, Zea Mays
aaggataggatttaatgcatgagcgatctatccagaaccgtggattacataatcgacggttcacgctatacttgaccgaatcgttacctctggaatctatctcgaccgtcaatatttaaatctacggttcctggtaactctcttcggccgacggccaggatggtggcgcaacgcgcacccgcggtggcggacttcgccggagctggcccgaggctaatacggtgtatgattctctacgcggaacacgtctaaacaaagcggggctcaaagcgagactatagaagggattcgtaccagaaatcaagatgatgtgctcacagaaccaggcgtggagcggacaggagcgcaagccgatctccggcgagcaattcgcgcttcaacctccaccgccagagtccgccaccgccactgctgcgtttggaccgagctagcgatgcttctacggtatgcaccccaccgatgtaacggcgcaacaccactgcccgcggcgctccccttatccaacggcgatggtggagtagcgtggacatgccgacgtcacgg

SEQ ID NO: 17121 - DNA, 409 bp, Zea Mays
tgaaatgcattctctcagccaccggaaagcaactgctagaagaggttcatgctgggcaatgtggggtacatgcagcctccaggaccctggttgggaaggtcttcagatcaggtttctactggccaacagcaaaaagtgatacagctgaattagttcagaggtgcgaagcctgccagtatttgtcaaaacagcagcatctaccagcacagcaactgcaaaccatacctgtaacttggtcgttcgcatgctggggactggatatgattgggcctttcaagaaagctcaagggggatacactcatgtactggttgctatcgacaaattcactaaatgattagagttcaaacccattgcttctctaacttcaactaaggcagtggaattcatacaagacataatattcaggtt

SEQ ID NO: 17122 - DNA, 587 bp, Zea Mays
tgcactggcaagaaatgagcggtcttggtcaacctatccacaatgacccaaatagaatcatggggccgggaggtattgggcaatcccacaataaaatccatacaaatatcctcccatttccaagatggtacgggaaggggttgcaaagtgcctgctgccttcagatggctggccttgactctctggcaggtgtcgcattccgatatatacttagcaattttccttttcattctggtccaccagtataaagatctgagatcatgatacctcttgttaatgccgggatgcatggaaaattttgaaaggtgagcttcatccaatatcttctttcggagctcagggttcttggggacaaccagtcggtctccaaaccatagaattcctttgctgtcctgacgaaagcatttgtatttttctgctttctgttcgatcatttccttgataacctgaacacccttgtctccaatctgtgccatgactatttgctcttgtaaggtgggctctactgaaatataattcaaagcaccgaaggaaacgacttctagctttagtttgcacaactcatcacatagggtggtgactcttgc

SEQ ID NO: 17123 - DNA, 468 bp, Zea Mays
acaacatttccccacagcacagctcaaccaaacaggtcctgcttctgtggccaactccaacaacatgatctgtcgattccgatcaccctcattcacaaatcaccgctgcaatggtccgtaggcacaatccttcaaattagggctttggttgcctccaaggctcccacactttctaacctatgattctacagtcacttgtccttgtatgtggcaatgaacccacctttcctaagcactacatgctgttgatggttgttgacctctggcgtcctgagatctgcatgctcctctgccctcattaaaatcttacaataggcaaatgcttatttccctctttctcccattgagtaatttctgcctgagtctaagacccggtgttccctaccccacttcaattttgtgcaaggcgatgaaaatacatataccaatttaagaagagattccaaagccatgaagatcgcagaattc

SEQ ID NO: 17124 - DNA, 372 bp, Zea Mays
gacgatgcttgagaactaacacttatgcaggtcacaatacatcttggcagccccgcactagtgctgctagctctaaccatgtgtttcagggagatgcttccaatagatcatccacaacaccatcgaaatcagcaccttctcgtgctattgagacagggaaaggatcctcccaagttgtagccaaatcttcttctattgcttccacgggatgaacaaaggacatccaatgcctccaatgcaaaggatttgggcacatccgaagggactgcccaagcaagcgtgtgctaattataagagaaaatggtgagtactcatcagccagcgatttagataatgatacatatgccatgcttgctacccaagatgttgaaa

SEQ ID NO: 17125 - DNA, 1577 bp, Zea Mays
tcaagcacactgtaaattctctctgtcatcttttacttcaaggaatggtatgtatcatttaacacttgcagtaaataggtacgtaatatgtttattttgggcagcaggttcgcggtgtattgatttcctttcatgttactggatatgtgtgaagcattgccttttgtgggtgatgggattactgcagtttgtatgtttcgatttgtacacttgtttttttttttctgcagatttatggtgatggatatataggcatgtagcagatggattgccatttgccaagcattcggatcatccgatgagtagtgtgggctggcttgctgacgaacatcaataagacaggatctctactcatgacacctgcacttgtttttgatgttttccccatagttccctttgatgctgaactttggcgtatgctagtgtgcagtctagctgtctaggtcttgcgcgttggtagatttctgtagctactgagatagcctgatgtgtattacagttgagaacacatatcataaatccctaagtctttcactttattttgtagcaaaccagggtttgtgtctacgctggctcactagcatgtagcacgagatgttcagtatttacgcaggtggcagatcaagatatatgccacggcattcacaattgttatggaccaggtgcgtactgcatactgtatttggcacaatattgcgttttgcagttggacagttctttactggttggtaggtgtttacagttgcactggactttcatttgcttctattctatgcatttggaaccaaacgcatgagtaaaactttgtaggaaccatttataacgggtgaaactattcatgctatctattaaagataactattcactgctatgtgcctatgttttgaacgggcatgttcctttgttgactgaaccttttgagagcaagatgttgacctgtgtagttgatcgaaaagaactcggtgcggttgcgtcaggcaaaaagcctgcttagcctgtagattgagcctatttgccagaaggggcacagaggataggagaggtgaggtagtgtcctgtgtgcggactgccgaatgctgctactgttacacctacagtaatcctttcgtgatgcccgcattattgcttacagtacagggctaaggcctacagcgttattggctggcaggtcaaggcaccttggtccataggaaacagtagctttgcttagaaagcgaaagatccttttactaacaggcatctaatccacgagcgcagtttgcatctaatcagttgatcgcgtcatgaatgaatgtgtcatgggcaaacacaggactggaatcacgcattttgagacgtctgatcgagcgttggttgcagcttgctgcgtcacggcctgcattaagggaggtgtttggtttctactctttaaactttagtgactaaaatttagtttttttagtttctaaaatgccaaacagtataactaaaagatgcatctctaatagaaattttaggtactaaagtttagaagggtgataaaaggaaccaaacacccctaaaacataaacgagggagaaagtgtgtggtgcacatac

SEQ ID NO: 17126 - DNA, 707 bp, Zea Mays
gggcacggcagggacacagagagtggtgaggcacattggaaccactagctggccaggtaaccactgtgaattgtgatgcactttgtttctggtcgcttccttttctcatgttctagtgatctgaattactactttgtttcataaaaaaaaatctgaattactacttacattcatcagtaaataataacgtataaccttactcgatatgtttcggttttctaggtcgagtgactctgacgaacaaggcactgtattttgaggcttccggaaaattttcatacgaatctgcaatcaaggttgatctctcagacaccggagtagaacaccaaatcagcacggcgtcaacaggccctttcggcgtgcctttgttcgacaaggccatcgtgttcgagtcactgtaagttccatctcacaaaaggacccttgaaacgatcaatcctacctggctacctgaaccattcatccgtgcagaccagagcctgtggtcttggagttcccggagatgaccagctcgacaaggcgcaacacgtggctcgctctgatcagggaagtgctgtccatccaccgtttcatctcagcgtacagcatagtgtcccccgtccacagatgggaggtgcactccagaaccatactaggagtggtacgtctccacgccgcgagggagatgctacggatgtcgccgccgccggcttccagcttcctagtgt

SEQ ID NO: 17127 - DNA, 774 bp, Zea Mays
gtctcatgttgaggtcagcctgggtgaatatatacttgaggcttttgttgtcagtgtagatgttacatcgggctcccatcacgtgcctccagatctttagagcatgaactacagttgctagttccaagtcatgggtgggataattctgctcatgagggctgagtgctcttgacgtgtatgcggtgatacggttgtcttgcatcagaacacatccaattcctatacctgaagcatcgcaatatacgtcgaaagacttgttgttgtcgggttgtgctaacacgggtgcggtgtcaagtgctgccttaagatatgaaaggcatcctcgcatttctggttcctttcaaattttacttccttcttcaagagctcagtcattgatttagaaattctagaaaaatcagaaatgaattgtcgataatatccagctaatcccagaaaacttcgaatctgtcggaccatagtaggaggcttccactccactacttcttgcaccttgtcgggatcaacagctatcccttcctgagaaattgtgtgacccaagaacttaatttgcttcagccaaaattcaaatttagaaagcttggcatataagcgatgatcttgtaggcgttgaagtacaatgtgcagatggctagtatgttcatcttcattctttgaatacaccaagatgtcatcgatgaaaaccacaacgaatttgtccaattctggcatgaatactgagttcatcaaatacatgaaataagctggggcattagtcaatctaaaagacatcac

SEQ ID NO: 17128 - DNA, 479 bp, Zea Mays
tcgtggccaagaagagaagaatggccacactgtgtgtctagctaataagaaagggaagtttcagcgccaccacccatatcacgggaagtccacgaaatctagtgctttaggagggagtactccatagtatcgggctgttcctaagcctggtatgggtttggtgtgctttcgttgtggtgaagcgcatcgtcatgctgagtgtcagtggaatggcaaatgttctatttgcagcgaggatcacaaagttgtggtgtgtagaaagaatccgaatggaaaggttaaatgggagctagtgacttcttcagcctctcgtgacactatcaacaagatgacatccactgagtagtagttccctgtaccaccccttagtaaaatttctctatgccagtgactcaacagtacctgtccatgtcgttctttcctcactacatggcagctcccactcctgcatcgaccactcctttgtcgcctcagtttgg

SEQ ID NO: 17129 - DNA, 602 bp, Zea Mays
gcaaagctgagcggatgcttcacactctgaacaatgttgttcggacgcttctgattcatgcggccatgcctccttattgggccgaggctctctccactgccgtgtttctcacaaaccggcggccttcatcgtccatacataacggtattccctaccatctcctttatcgcaaaatgccagattactcactccttcgagtttttggttgcctgtgctatcgaaacctcagtgccacgacccctcacaaattgtctcctcgctctgcggcgtgtgtttttctcggctaccctcctcagaagggctaccagtaccttgatctatccactcgcaagatcatcatctctcgccacgttgtgtttgatgagactcactttccgtttgcggcttcaaaacctcgaccggatttttttgattttctgctacaggatctactccccgcgccagcctcgtctacctcagacgtacgacaaacgcgggcctcagacgacgctagcgatcctgtcgggctggacccagccatcctgtggcacgacgctgcctacaagctgccccaggtgccccggcagacggcacctaccagcaccagtagcggtgcctccgct

SEQ ID NO: 17130 - DNA, 589 bp, Zea Mays
ctgacgccccgaaataggtttgtggaagtagaatacaattaatgcacatctcggctggttaaagtcggtcccacgtttgatcaattattatccaagtacgtcaacaaaaggtcgttccccatgaccggccatcaaagtgacctctttcgagattggagagggttgaggtggaaattagttcatttccaccttgattatcttgtatgtttagggggtgggggaggactcgagctctttcaagaaatcagatcagttatgttgcactatggttgctacatcaagtcgagatggttacttctagtatggacgacaaccttggtcctacacaaataaatggacatgtgtcatctatatggcctcccttcttggcatggatacattatactttgtgcttcctcatctatacctacaccactattgatgactctcacctgcaacgatgttcccacttgtcaatgattgcacatttgtggtttgcctagtggtgcttgagctcaaccaacatatatcattctttcgtcgtgtgttgcacatcaactgcattcatcacaccatggtatacagatgtgactgacatcatgagcacatg

SEQ ID NO: 17131 - DNA, 559 bp, Zea Mays
tagcagatgaggtcaaacgaaacgatgatgcgcttgagatgggaaaatggctgctcgacacggttgagaacttgagatggcatacgagcaatcaagcaggggtcactaccacttccggctataaataagagataaataagagatgagaccattatctcatgagacagccatgcaatgtcgccaaggatttaggaacaaatagtttttttgtcattaacgacaacattgcgtcgtggtttagttggctatcacgtcagtctaacacattgaaggatctcctggctcaacatttttttcccttcccttaagtccgtgttaaagaaactgcatcatgcaacgctggaaattttgctaaacaaatgacggatttgcatcacacagattcacactccactgtgcccacagagacactattgctctgtttggttaccggcatcctcggtgcctaactcgagcaggtcttcagtagaaacggacgattcttacttccccacgcttacagaccaacaagggatctgcacacacaacaatgtagccaaaagaacacctaggattttcc

SEQ ID NO: 17132 - DNA, 596 bp, Zea Mays
cgaggaggaggacgaccctcgctccaacactggcccccaaggggccggttcaacttggtgagctagtcccgaagtcttttctgggagatggccaaaatgctgccctcgtcaggttgaagtggtcctcggggggggattttgaaatatgaccgttgaaaggtgacattttactgtgggactgttggtttcccgaggcaccatttcgggtctataaaatccattcccggccacggcggaaacacctttacacactggcttacagaaaccttggcttctctgcctgagcacactactatgcgctttccatttctcgctgccggtgaactggcccgtttgaagcaaaccgcccgccgacgcagaagatacgttatgtcatcttcttctttgtcaccatctgtcgcgatagcttcatcgaacgtgtcatcgtcggagaagacaattagtgatttggcggcagtagtggagttgttaccggggcatattgtggagtttgggacatcaaggatctactcgggccacgtgcaggagacgcatcgtttggggtattttagggatggtgtggggcacgctcctggagccgaagtggtcccggagcc

SEQ ID NO: 17133 - DNA, 621 bp, Zea Mays
caggggtgctagcacagactcactcctagaatagtgaatcgctagggttcaaacgaaaggtttgagacaacggggttatactggtttgggttctcaccctactatagtgcagtgctgatagtagtattacagtgagtgtgttacaacaagtgtgctcatgtgcctatggaagaaagaaggtctgcccttctatagttcaagggtaggaccttgcaggggtgacttgttctctactttgtatgaggttggtctattgccccagcttgacgttgtgcacctggtgtcgtgctgcccataggaccatgcgtagttgtacccctagtatcgcgcaccgtctcgctcactcatcatacggatccatgtagcgagtccactgctaatatctttgtagtagtgtgtggtggatattgtggatcagtcccacgacacgatagcacgtagcgtagcttcacctgtcgtcatgggcatgcgtcacttgtcggcatgcatagacatacaccaggtatggtgtattcgttacatctttccagatattctggtcactgtatacatttagatgctgagatcccttcgactaggattgactggtcctatccgccggtggtagttcgcgtgaaacaa

SEQ ID NO: 17134 - DNA, 551 bp, Zea Mays
attagctttgtaaattgcgaagggtttcccgagcgtggagaaaacttctggcaggcttcgcacgacctcgtcacccgattcgcggcgcagatcatagcaggccagtagaagccttgacggatcactttagcagctagggcccttggccccgcatgagagccacaagttccgctgtggacttcgcgcaggatccggacgccttcggtcttggtgacgcatttaagcatgggttgactgacccccttcttgtaaaggtgtccctcaatgagtgcaaagtcctagcttcgatgtttgaggcgcttggcctcgttgatatcgcttcgatggtaatatccctgcaggaacagggttattggtgcccgccagtcttcggtcatgatgaggttgactatgcggtggccctcggtgtcgttggttatttggaggccctctgggctgcggacggctggcgtgccgatgacatggtagaatacgtcggagggcaaggcctcgcctctggctgttgctttggccaacgcatcggcctcctcgttcttggaacggtccacatg

SEQ ID NO: 17135 - DNA, 350 bp, Zea Mays
ccgggccaggcacgaccctgttcgtgccgtgcctaaccgggctcgagccgggtccgtgccgggcggcccggatggacatctataaccacacttaaatgtgcaccatagcatgacgttgaggcttgtttcagctggaaactgggctagaataagattacatggtccaagtttacagctagtcgatacagtgggggacaggcaaccaaacaagagctatttacaaggtacctagagccaactcttgaccggcacaatccagacagctaggcacaaacattacgcaactacaagtgcagagccattccatctactaaagccagctgaacaatccatccacaaaagcgataaac

SEQ ID NO: 17136 - DNA, 553 bp, Zea Mays
cgcgattcgtgccctgtgtgaagtggataaccgcaggaggtaaaaagatcggagggggaatggatcgagtcgacctcaccgtacccacttgaccggcaacgtggccgcgcgaccaccaccatcatgccgccgttaacttcagtcacgacacgccttaagtcgtttcaccacgtcatcacgggttgtggaggataaccagtgacggtcgtaaacctttgcccagtgaatgccacgttagcgaactccggtgactcacctttgctccggccgccagcttgtcttccccaaattcggagccaccgcttctggacactataaattgtagcccccgcctgctccgctaacttgttacgaacccagagcaccgctcctcgccccagattagccaccataaccgaagaatttggattttcccccaaatcggtcgtcgcgccgccgtgagacatcccgccgtggccagccatcctcaggtccgctcatccccttctgtgttgtgtttaagcatccttgactgtcagcattgctcatcgacccaatcgatggaatgctaccg

SEQ ID NO: 17137 - DNA, 701 bp, Zea Mays
tggtggctgatcccactagcgaccgaagtcttgtcggggcgctgttgtacctcgtcttcacccagcccgacatcgcctacgtcgtctagcaggtgtgtctcaatatgcatgccccgcgggagccacatctcaccagtatgaagcggatcctgcaatacctctagggcactaccgactttggcctcctccttcgacgatcagcgaccaccgacctcgtcgtctacaccgatgtcgactgggtcggctgtccggacacgcgtcggtccacctccgattttgatgtgttccttagcgacagtcttgtctcctggtcctcgcacatgggtggattggctttcatgggcagagtattgctataatacttccttccacaccgctcttcggacgacaccttttgaggtggtgtatggcaggccgcccccgcccttgtagtcgtactcgcctggcacatcacgcacggaggctatggatactctcctacagaaccgcgacgacatattgactgaggttcgccagcgccttcttcaagctcaggagctgtccaagaaacactatgacaccgaccatcatcccttggagttcgctgttggggactgggtgtggctacgtcttctccaccacaccactcagtctatagaggccggcgcacggaagaagctcacgcctaagtacgcgggatcatttcgggtactaaagcgcat

SEQ ID NO: 17138 - DNA, 580 bp, Zea Mays
gccattgaatcggacgacgacgcacggcgttcggaggagtgggaggtcactggcttaaggaattcttggcatctaccatggcagccctcatcggtgatgatcagatggccaaagtgagccacgacgatgcgatggacgtgccgaggtatgtggcgcaaggccgtgaagtggctgtcaccggcgagttcatccgaagcgaccgtggcaagcttggtacggtggccggagtagtttaatggccggagtatatccacgacgatgatacttactcaaccccgagcgttatccagtcgatccgaacgcgaatcacggcggtgaaggcacgaatctgtgcgcggctcgtcggcggcgaggttctctgaacctgatcccccccgttcactgtaccatggtgattaccatgcagtcagtctgtcagagcaaaatcagagccacttttctcctcatttcatgtgacaaccccatcatcccactgcatcaaagttatagcccaattaaccaactacaatcttgctatggggatcatgcccaaacttgcgccggatcatgttcaaatctgggttcaaagattgcctcatca

SEQ ID NO: 17139 - DNA, 424 bp, Zea Mays
tgaactctacaccaaccaattaagatctcaactgtaacaacttgcagtttctggagatattgcgagagtttggaagagaggagcagcgggctttcacacaattcagcactggagcccctcatctcccacttggcggcctagcttcgcttgatcccaagctcactgtcgtacgcaaggtttgttagcatagcaaattatacataccactagggcacagacctattcttttgttgaatacttatctgccatgcatcttgcccgacagcaatgcgatggcaatgtagacgacgaattgccaagcgtcactacctgccggcactttatcaagctccctccttactcctcgaaggtaccaaatatgcctgatatagactttatcaagcgtcagtatctgatggcaatgtagacttgatatacctgtttg

SEQ ID NO: 17140 - DNA, 460 bp, Zea Mays
tgatggagcgcccctaggtccttcatcgcgaactcctgctgaagacaggagatgatgtgacgcaggagcccaggggaggaggcggtgagcacaatatcgtcgacgtagagtaggaggtacacagtgttcgggccgcgacggaggaggaacagggacgtgtccgacttggcttcgacgaagccctgcaaacacaagaaagtggcgaagcgactgtaccaagcccgggggcctgcttgaggccgtagagtgacttgttgagcttgtagaccaagtcggggtgagcagggtcaacgaacccaacgggctgagtgcagtagaccgcctccatcagggtgctgtggaggaatgcgttcttcacgtcgagttggtggaccggccagtccagggacagagcgagagtcaggacagtccggacggtggcaggcctgaccaccagaatgaaggtctcgtcgtagtcaac

SEQ ID NO: 17141 - DNA, 476 bp, Zea Mays
cgagtgtcgggcgaccgaattcactccctttcgcctgctatacggatcggaggccatgaccccgcaggagatgaaacatgggtccccgcggacgagcgcttcagcagtacccgacgtagacgagctaacctccaaagatctcatcgatggagaccgtgtcttcgccctccaggccctcaacagataccaagcccaaacgaaggcctgacgcgaccacgcagtcgtcccaagagaattcaacgaaggggacctcgtacttgtccgcacaacccggacagagtcacggggtaagctggagccaaagtgggaaggaccatttatcatcaagacgaagtcgtctcccagcgcgtacagactaacaacgcaatctggcgaagacctagaacattcctggaatattaacaatctccgtaaattttttgtttaaatccttagggctaacacgcccttgtaattcaccaaacagttttattccg

SEQ ID NO: 17142 - DNA, 492 bp, Zea Mays
caacacctaggttgaactggctcggaggcaagttcaactagttttgaccagagagtttcacatttgaagttaagttcaactcagctgaagtcaaagctcaacccagctgaagaagctcaacttagctgaagaagctcaactgagctgaagaagctcaactcagctgagaaagttcaactcaattgagaaagctccactcagctgaagaagctcaactcagttgactgcctgatcttgaccacgatgtcaatgacatacacttctatagttctcctgacaaggttgacaaaacatttgaccatgcaccattggcatgtggcccccgcgttcttcaagcgaaacaacatcgtcatgtagtagtcgagccaaaaggggtgattaaagttgttgtcggttggtaggattccttcatcgtgatctagtgatagcccgagtaagcatcgaggaaactcatatcttcgcaacctatggtggaatcgaccactagatcaa

SEQ ID NO: 17143 - DNA, 528 bp, Zea Mays
atgaatagggattgttggcccctgatattttattcctgactccgccactgcactcttcttcaactccttgtctatcatctcctagttatcgaggacaacctcataagagaaaagaaagttggtcatataacactccaccgactccacgctggcctatgccatcgccaccattcaggctgccctggccgcctcgcaggagtgcgagtgcgtcatgtccctcgccctagagcaagagcgtgccatgagcgccactctgactgcctagatgaccaccacatagcgactcatccttggccctcctccggtcgcccttgagggccctttgtccactcctgaggccctctcgcctctggacttgaccagaccacatcgctgccctctacgcacaagccatcggactccacaacatccggtccctcttgtccaacgtgttggacctagcgtcctcccactaccctcgctgacggggtcaggtcctcactcttcggcgctatgtgctcgccgaccactccttgatgacatcatcgc

SEQ ID NO: 17144 - DNA, 592 bp, Zea Mays
cttgggtcatcctggctgggcacagcgccgacacagggaacctgggtggttagcgtcctctcccctacgcactgtgtcattccaatatccccctccactcacctttgagagacaccaggaaacacaagttacagacttaccaaagggaagtcggtaacagcatatcatcatccaagcaaaaagcagcagcagcttctccaatagattcatcagaattcagacaataggaaagataggaagggggagatggggggggaccttgagatgaggagttcatctcgtcgctagtgttttggagccaccgccggtgttctggagctgctggtggtgttctagagccgcagcgtgtgttctagactcggcagagcagaggaaaagtttcaagggctggcggtgcgttgcctttattttactgtagatgggctgaaaaaatagaagcccagtagcccactagaaaaccttagctgcctggacaaatcctagtcgatttaccatctagtcggacgactaatcgcgcttagttgacgactagtcggacgacctggacgacttgatactctagtcgagtcgtccggctgatcggccactaccg

SEQ ID NO: 17145 - DNA, 385 bp, Zea Mays
attggaggctcggcttggtgggttgggtgcttgactaccttacggccctcaatttataggatttgggggcggcgaccagtgaatttggagttggcgcggtggcggccggagaaggaagaggtcactggtggcgcaatcgtggcgttcaccggtgcagtggttcagagagggtaagctcaagtgtgccacaattactaccgcgtagtaaagagtcacggcgtggcataattgagatcgccggagtgtccacgacgacaccggcggtccggccacgtcgcaacgaccacatgcacagtgataagcttcccccgcgaccctatctgcctccccgcgagatctttcacctccccgtgaatatccacagcgtgcccgacacgaatcccgg

SEQ ID NO: 17146 - DNA, 382 bp, Zea Mays
cgcgtgcaaggcatgcagcagctggggtattttggtaatggagttggacgagttccgggggcggaatagattctggagccggagggtgagatagttgtgttcgaggcattttttactgccggccttcggctacctgcgcatcgttttgtggcggaggtgttgcagaggtatgaagtgcagatccatcagttgacaccaaatgtcgttgtggccctggcgaagtatgtgtgggcagtgactttgtatggaggtcagccttccgtagaagtgttcaccaagaattactgtttacactggcagaagaggaaacttggaaccaagattgcacagtttgggtcatgcacctttacgccgaggactgggaagacttcggcggaagttg

SEQ ID NO: 17147 - DNA, 738 bp, Zea Mays
cctgctcagccctagaaggaggtagtaaaagggagacgagtatgtcagccaagttgacaagcatgacagaggccctcaaaatgtgccatattacaagaagaatctagactgctggagatcttggtcatgacgtcaggtctagggtggtcgagacgacgatgccaagtggtggaggtggtggtggagaccgggacgggaggtggagacacgccggtggaagagggccggagcgtgtagaggggcccaacgctgtcacatcgggtgagtggggtcttggtggccagatacttcacagaaaaactagaggggtcaaactcaatggaacaagcattgtcggtggtgaaccgacggacagaaagaagattgtgagtgatgtgtggggctacgagaacgtcgttgaggtagaacggtctagggagcaccgaggcacctactgaggtgactggaagagtggaaccgtttccaacgacgatcgaggtagggtgtgtggaaggaggtgggtgtgagcaagatagcatgccctgtggtggggagtggtgtgataggatgcaccgggagtcgatgacccagttagaggatggtggagccaacaccatgttgctgtaagcggcagcgaaggcggtagggtcccagcctccagcgaacgggggccatggtgtcgtggtagatgtccctgtaggcggaagctgaggcgggaccggggtcgtcaggggcacgccgtacggaggcatgctgtag

SEQ ID NO: 17148 - DNA, 546 bp, Zea Mays
gtctctgacagcgcagaaaaccccctagggtaaccctgaaccctaaatctaacccacggtccttcctttatttaaatagtgctcgcggtggaggaaagggcaagcggcttaccgacggtgagatagctccggtgaggcatctagggaggttggggaggttacaacggtcacggtgaggtacgggtcggcgttagaggtggtcggggtcggctggtccacgtgcacaggcgagggagttcatcgacaacaagaaatctggcctgctcacgacgagatagtccaattggttggcttgggaggcttaaccaggtgacatagaggtggtacacggaaggaatttgagaatggcgcagagacttacccggttcacgttcgccagtgagcggaagaagtccggcgaggtgattcgggtcctccggtgaggctctatcggttctgagggcttggggagcttcacgggtctctggcaaagctagccaagccgatatcgaggactgggaatggctggagcgagctggctatggtggccaaagctcgggtggcttg

SEQ ID NO: 17149 - DNA, 859 bp, Zea Mays
aaaatagtctgttaaacactctgatggtaacccaccatggtacagtaactgaaacagatcacaagtttagcccctctcaccgccggtgacctttgcgccgtgatttgcgctgtagccgcgattcgtgctctcaggtgaggggataatcacggcggagtaagaatcttggcaccagataggctcgggctcggtcgcagatgagtttcaccatacccacttgctcgccgatcaaccgggatagacctcatcgtcgttggccacttactgctgtgcgccacgtgctcaagcattgtaccacgtcgctgtgaatcgcgtcttgcatgttcggtggtcgccggggagcttgccacggtgaaagcaactaatcccgagcgccagtaaccttcttcctcttcggccaccagcgcatcttcacgaaattggacgccaccgctgtgggagcctataaattgccgaccctgcctgctccgctaagtaattgtgcaaccagtagagcaactcgtgcctcgaatcatccactagagctccccaattagggattccccccaaatcacccaagaacaccgagcggtgtgacctcgccgtggccagctcgtctcaggttcgttcatgcccactgtcctcttctttcagcacccttacttgctcctgatactcgctgacccattaaatttagctaggcggtgctagatcaccgggaacgcgtttgaatgtccgtcgtgcccgctgtcaccatggacagagcgttgtcgagcctcattggtgaaattgagtgaggagaaatgattaagagatgtccgatttggtgtctgccacacgggagcaccggtcattgcgagatccggccggtacaagctcg

SEQ ID NO: 17150 - DNA, 641 bp, Zea Mays
ctaaaatagatgtaactaaactcggaacaattgctttagtgtttaactatttataaatggccttttcgtgcctaagtgtatatttgttgttaaatatgtgtctttttctttagctttgaatatgagtgacgatcgaagaagggcgatgtacgatggattcgatagtgtcactcatgggcactctaatgcatgggtgagagttgcagatgaattcgtggcactcgcatttgctggtgatgctcgtttagcgaggtgcccgtgtataaaatgtcggaacttggttcggttgaaaaaagtggagctctcgtatcatgttttcaaacatggctttatgccgaactatctagtacgacatgagcaaggagaggtggaccatactattgagtcagatggggaccaggatgttgaccgaatggaagagatgttggatgatattaggaatgagtacccagaactacagaataatgaagcttttccagaggatgtgagagagttctataagcttcttgaagcctcaaaggctaaagtgcatgaaggaaccaatgtgagcgtactgcacgtggtaacacgtctcatggcgatgaagtcaaagtacaccttctccaacaactgttacaatgattttgtgaaactgattattg

SEQ ID NO: 17151 - DNA, 432 bp, Zea Mays
atcttttctgctaccatggtgttccttgggcacatacaatacaaccagcccagtcagcatgtcatgacagcttgtgctatgcacccagcggtagaagctgcttctgttgtttacgttcttgctgtgcatattcagtattagataatggtgcaaacaattattttaggatatggttttctatttggagcagcaattttcaaccacaatctccagtggtaaaagaagtcgaagatattacagtattggatttcgaaaatatcagtaactcccctacctgtatgcagttgcatcaatatttgaccaagtgaggaagataatgtagtgaatgatccacgcttagacgactccttgtactctgcaacttgtgtcaaaactaatgcttgccgttccagcatggtagcaatggttgatgctgcctcaacacgtacctgc

SEQ ID NO: 17152 - DNA, 805 bp, Zea Mays
gtggaattggttggctatatccacggttggttattttggttgaaatgacctattttatcctttggattagagatgttaatggggaattccccaccggggattaactccccagacccgtacccatgaacatagacccgctcctatcctcgaaccctacctcgggtacgaaattctttccatactcatcctcggccgggtactagatacccatgggacctgtacccgacctgactattcaacatttcagaatttcagcatatggattatggacacaattcaacattctagcatgcatatcttgtagtttcatcaacatactcatgcaaaacaaatattgtcttctagtatccacatgtccgtatatcacaaatatgatcaaacattaaatagaaatctctctcaatacatgttttatcatttaagcaacaagacaaaagcaagagtaacaagcgagcatcaagtaataggctttatgtcacccaaacttatagcttgacgtccaagtccttccgggcttcatcatcacaaacccatatgtcataatataagtccctacattaaagagatgtaatcaattgtagagttcaaatggccgcacagatcattgaacctagagcaagtagcacgtgttcaatgatgcagcctctataacatgtgacatgaaaacgtaataatgcagtagctgccagcagcaggagcctgttcgacacagatgcctgttattgttgtgcatgagtatattcggttgttccatatctagtagcagtcagcaggagtgcaccacacagcgcatgccgcatgtagc

SEQ ID NO: 17153 - DNA, 533 bp, Zea Mays
atttagggcagcttaacacaatcgaattggtcaaggagcatcaggagaacctaaggatgctgaaacaagagagcagggagcacgaacagacctggagtacgctgaccacagtgagatcactttgcgcggtgcttgggattgatttgggggaaatctaaaattggcgagcttgggtggataattggaggcacgacttggtctctcaggtgcttgactaccttacggtcctgacggtgtgctcaatttatagaacttgggggcggtggcttgtgaatttgagttggcgcggtggcggctggagagtgaggagagcactgtcgtgagagctcggtggcatctaccgtggcggcctcaccggcgatgaaccagtagtatagagtggtttacggtgactcactgcgacgtggtaaggcatcgaggcacgtagcctggccggataacggcgaactccggtgatgccagcgcgattaaccacggcgggacacggcgaccgggccggccagcgaccaaattcaccccgcgctggatattct

SEQ ID NO: 17154 - DNA, 510 bp, Zea Mays
gagcgcaaaaatgctctatgggcctctagatgacttgcctggcaaggcatgccctatggccacaaccagtatggataagctagaacgagtcatgcgctgatgctcgggcagggaggttgagcgtacaagaagtgctagatactcagagataactcagacgaagggcaaatgaactccaaatgagcaggaatgcatgccacgttaaaaggaggattcaggtagagttagatagtgataacgacttgtaatgggataaccctcttgtcgtccatataaggccgaggggtgcccctacgatctcatctcgtctctgaacatctgatctctcatctcatcacatctcagctcgtcaccacctcatagctcatttgctctatcacagtaaccaggccgccactagatcaataggagaactcactctccaccgcctacagctcacttgtaatctgtgtacattagtgacactcaaatactcagcctcgacaagaagtagggtgttacgcattgcag

SEQ ID NO: 17155 - DNA, 795 bp, Zea Mays
ggcggatccaaggggtgggcaaggtgggccatggccccacctcaattttttaaccccttatacctaggtttaggtacacagcaaaataaacaaacttttgtatagttagcatggacaaatctaatgaaaactaggttttgatctatttttctctcgtcgcttcactgctcagtccactctttacctgagccatttgattctcttccctagagcaagcacactcccactcgtggttcactcgcttattcgatcatcgactgaccagtaagtcggtgacctaacccgcccgctgcagcgcaccttgccttctcattactcatcagctcgtcgactcgtcgggatcctgcacacaacattgatattttgcctactagtccgcaccagcagatgagcaagttgtgggtgggaccatggcgtcacatgtacctagctaacttattagggtcccaccacgttgtcgcaacacgacaatggctttcgcttgccgttaccgtcatctattgctacctcgcctcctgcactcgctcctcccacctgtcgtcgtctcaccaacgccatctcacgacaaattcgatgactcgctagaacgacgtgtcgatgcggctgctccgccctagtgcctcgtcctcagtcggtccacctattttctctctctagctctcctttaggtagccaaaaaggtttttttggtattcatatcattttagaacactaggtattatcatttaacattcatgttattaccattaatctacatttatggtctagtctagtgatttgtctcttacactgttg

SEQ ID NO: 17156 - DNA, 637 bp, Zea Mays
cgggggctcaatttataggcagcttcgtcggtggcgcggttaggacacgcgacataaggccggaaggtggccgtgcaccggcgaggttatctgcccagccgcaaagtgaataagaaagccacggtgagtcaccggagtgacctccagctcaccgccgacaaggatctttcactgcacgtccttatccatccaccccgagcgcgagtcctaacgccggcggcacgaatcgcggcggaggagtgatcgacggcggggggataaacctgagattcttcttcagtcactgtaccatggcgagtggtattcagacaacctgacagagcactttggagcttggttttctcttaatctctaatgacaacacaagtccaactctgcagcaaacttgtagagcattataccaactacaactttgctatatggtgttgtcacaaaaagtcattgaatcatgtctgaaattgggcttgaagtcggtggtagttcactgttagtctgaaaattcagaccaaatcagcctgacagccaaagtttgagcatgattatctctaaatttctcacaagaacatgacttgcccacttcagcaaaattgttctcctttgtttgctttacaacattgatgtggttacctagggcaag

SEQ ID NO: 17157 - DNA, 799 bp, Zea Mays
ctggtaattcctccagaaatacgtctgggtattcacacactaccttgatattttccaatggcttttcttccaagtgatttatcgctatcttcccttttgcatttgttgacatgtctgtgctaacttggactctttcaccttgaggacttgtcaacataattgttccattgccacattgtatcactccatcacgacttatcaaccagtcacatcaaagaatcacatcaataccattggatcctaggaccactaggttgactggaaaatatattccttgaatcttgagattaacatggaggcatgaatgtgtggccttcatgtcacctcctggtgaacttatgtgtaacatcttcttaagatggtgctttggtaagttatgcttttccacgaatgactcagttataaatgaatgcgatgctctagagtcaaataaaactgatgcaggtatggagttaacaaggaacataccatacaccacgtcggcatcctcaggcacagtttctgttgtcacatggttgactcttcctctactctggttctacggagtcctgttctgtgcagatccacgagtaggggtgttctggtcattcctctgattgttgctcttctgaggtgtctgctggttgcgcctagggcagttgttagcataatggccaagatgaccgcacttgaaacatccattgggttggactggtgtgttgttgcttctggcctgcgtgttcacggtgccaccttgtcgagtctgcgaactaccaccagatctttggttggtctgagagtagttcctctactagttttg

SEQ ID NO: 17158 - DNA, 507 bp, Zea Mays
tttgcaagttgtgttgcaaataacggattaggacttgctggaacctgagctgtcagacatgctgggcattgaatattgttcagttttgtgtaacctgtctcagtttggacagctaggagaggaaggaggcggcatgcccatgctgcacgacgacaggtaattgcttgcttgtttcctgtatgctcggcgtgggtagcagaaagaagtttgagtgtaggttctgctggccgaagcttttaggatatggaaaagcaaagatctccacgtctctgtgtgctccacaggtgctatttcagattgaaactgtgggcagatttttgtattggggtagcggtgggagatttctctggtgcgtggatgagcagttcaagataagagaggatgttgctaggagtgtatcagggtgtgactggaatgtttctactagccaagccgtgagattcacgctgtaaaaatctaaagcgtcatagttatccacagagacctcccctgcctgcttgtctcctg

SEQ ID NO: 17159 - DNA, 781 bp, Zea Mays
cagataccgaattaggggtacccaaatcataactctaaaatgcctagacgcttgagtaagaaaaggtcataagaaaacacgctcccaaccttaccaaggcgcgtagaacctaagtcgcaactcgcacgaggccaacctcgggcggaaaacgcattcccaactcgcccgaaggtgtctcgggcggtgccccggagcatgcccacctcggccaaccactccgatcccagaacgtgtgtccgtacgttcacctgccccattgaaggtgccaaagtcaacaaaggacgatacggttacggtctaatctaccttaccgctcacgacgatggtaagggcgcgaatacggggcactgttcccccactccgatcactgtttcaaccacccagagcgtggctacatgtaatgtctaatcccgaccttggcttcgggagaaatctttgcctcgcccgagcccggcctcggctaactgccccagtaagggagcacgcacattaaatgccacctactctctcgcgaacctcgcagaagaccatgccaagcactatttcaaccactccgactcgagaaacttggaaaacatctcatccacaccctgtaccggctagggctcagacgtctgtccatgctcctgaacccagcctcagctgtctacccaatcaaaggaacatgctatagggatcagacgtccttctcctgaccaaaagacaacacaaggacgagggccatcctaccggccatgccgctacagggctcgaacacatcttctctaaccacaacaataac

SEQ ID NO: 17160 - DNA, 347 bp, Zea Mays
gtgggcaaggcgaaacaagctgctggatgagcttgagctcgaggccgaggagaaagtgaagcgtctggaagggaaggtgcgggcgctaaaggggcaggttcgccagttccaggcggcacaggcgacacagtcggccctgggcccccaggcagtggaggtgttgaggaagacacttgacgacctccgggcagagcaacgcgccggagctcagcgcatcgctgcttgggctggcgaggcgagcacaacgctagtaccattggggatgagtcccatcccagcattggtgcggccaacgtccatctccgacgcgctcccaatactggattccgctgttgaccacctcgccc

SEQ ID NO: 17161 - DNA, 681 bp, Zea Mays
gttgtaataggccagcaggtttttggtgttcggccttcgtccgttggcagatgtcacatcgggccacatactgagctatttctttcttcatccccttccaccagtatctggtcttgaggtccaggtacatcttggtagatccggggtggatggagtaggctgagtcgtgagcttccttgagtaggacctctcgggcttccccttttggtacacatagacggtgcttgaaccaaaggactccttggtcatctgtcctgaggtccggcagatgttccttgcgggctttctccacgagccttgctgtctctgagtctagacgttgagctttgccgatgaggtcttctagcattggcttgacttcgagactgtcgttgtttccctgacatgcatttagttgtgctgattctttcttccagtcttctagaaagttggtcccttttattccgaatggctttcgactgagggtgtcggctaccacgttggccttcctggggtgatagtgaatttctaggtcgtaatccttgatcagttctaaccatcttcgctgacggaggttgagatcaggttgagtaaatatatacctcagactcttgtgatcggtgaaaatgtggcatttgtttccgatgagataatgcctccatatctttaaggcatgcactatggctgccaattccaaatcat

SEQ ID NO: 17162 - DNA, 317 bp, Zea Mays
agatgccaggtgcttctgtattattcatgaattttcttaccagacgagggcaactgggaaggagcagtaccataacaacttcgggtgctacaacttcgtgccccactctgatgcaagatatcccgtgccaacatttcggaagaaatggtcgagctcttggatgaaacaatggttttatgtgaagaatgatctgggtgagagggaagatgtgaggggcattattcagtgtcccatatggtaacgcttcggcattagaaggtcgtcaattgcaattgggaacgaagtgcaggcatatttaatggctttcaacaccgtgt

SEQ ID NO: 17163 - DNA, 416 bp, Zea Mays
cttgttttcctcgtcctcttgatgtttacctccagtctcctcgtcaagctctaccatttcattcacatgatttgcaacggttccatcagtgcccccctatctataaataaaaacatgaaatacgccatcatccaaaagaggatagctgaagtctgaacttaagagtagaagacatatgttggtgctgagccgcgctaccgtgtggtccgtcgccatctgagcccgatgcgccgcgccgacaccgtcgtttcacctgacgccaacgtcatcgctgcgaccgatatggtggatagggttagggcgtcgtgtgacgctggtgtgggataggagtgtcgtgcgggtgcggtgttgatgcccttgtgggttgagccgggcaattggttgcctgcggtgtgagattttctcattctattgga

SEQ ID NO: 17164 - DNA, 1191 bp, Zea Mays
cgaccaagtgcgctgaccggcgcacacgctttttttgctgactgtaccacctagttacgtcaattataactacgcgttatgctcaatcttgttacggtttacactcttttggtgtgcgcatgtttcgcggcatccgggcccacgaaaagattgtgtccccgcaatctgggcagcttacgtctatcgggcccacgaatcaaggaaccgagcactcattttttcagctcatctctcccgtaactctcgcggcggccgaaccctagccaaatccgccgccgtatgctgcttctcctccacgcccgtcgaaccctagactaatcgccgtcgtgagcttcttgtccaccgcgcccgccgaatacacagagattctccccccgtcgttccaccaccgtcgcattctccttcaccaccgcagagacccggactcgccttctctgccgcatacacgccgtggccttgttcttcgtctctgggaagggacccggaatcgcggagccggttgtgccgccccttcgttcttctactccgcaaagaccgagacctcgatcttctccaccgcggcggccgaacgccaagtcccctacgtcgtcgcgagctctgtccccaacgtcgagtcccctacgcatttgacacagccgcgcgtcgccttgggttgtcccctgcagaggggtctcgaattcagccgccctccaggcccatccacactccggtaagtcatcaacctttaactcttacaatctgaatcgtaaataggtttcaccttattattttgccaactgcttgatttatcaaaaaccaattcagcataaatttatagttaaacggagacacaaatttatactatgcaatctctcacacgtttatgcagtttacaatactctgtttatgctgctttgttgacagaagtatgatacatacatcaatatgttatgccataaacatcttgctgttcaatttgggtcagcacacacgaaataaccaggttatacattaattggatgtcgcatatgagcagtttttttgatccatttagtctcacacgtttatgcaatttacaatactgtgttatgctgctttgttgatagaattatgcaatttacaatttagtagtgatgctgcatgatttgttgggatctaatggaatgcatggtcatgaactgaactgaattgacttgcgcttatctttttttt

SEQ ID NO: 17165 - DNA, 692 bp, Zea Mays
tgacgtcccagcctcgatgactgctctgtggggttcgatgggacctaacgaagaggtacatgggctaaccagggccgggcgtcaagcacggcgcggccaattgctcaccggagcaacgatgaccgcggaggacggcacatctccgtgggcggggatctctacgcaaccctcaatggtaagaaccccaccaaacgactcgtgtctgtttccccattgtgttgcgtggccggattggggtatggtgcgcccagggttggatcggtcgctcgccggtgactttcggtagtggtgtagtcatgagcgccgccgcttggtctggctcagggaagaagagaacatcgtggccgttgatggggttaatcaacggtgtggattgggggctggatatcgggccgcgggagccgttggatctccaaccgatggtggagattggattccaaggtacgccctctcgtcaaatgaataggggccgctgatcggccgatgaacaaacctaattgagtagtggcgctgattgtcttgtgccgtggatctctaatcccttggcccagattagatctgtgattcattaaaccatgaccgtaggattttgatccgagggatagcgtacacgtaccggttcatatcagggctgatctaatctggtcggttagattgtgatcgggcggctgaaaatcaaagataccccttcg

SEQ ID NO: 17166 - DNA, 928 bp, Zea Mays
gacgacggcccctgggcgagcgagccgtgatggtggtgcggtgtgacgaagtagaagctcgccaagtctgctgcgccgagcgtgtggcacaccaacgtcgccatgtcgtctctctgcatgattggaatggaagctaatagctgttgcagggtagctctccctccgaagttaaagttgcaaatgacgaggagatggtttggaagctagctgttgtcgtatcctcttcctcctctaaatctaaagagggactcttcgatcgatgaagggaccgagggaaggggacgacgacgacgacgtatttatatatacagatacagatcgaggtgagtgagtttctttaaactgcacacacagagagagagccctaaagcttcaggcatgcatgatgcatcgtgctgacggcgaaccttcctttttgcgtccgattgcgtctccatgcaggattatcctgtcgaatttcggggtgcgattgctgtcgtctggctgcaaaaaaatttgttcgccaagtagcacacgtcaacaaccatcgtagggcgatagtagcagggagaggagatagatatatagggcccctttctttattcagaaatagtcgtcttctcgtgtggaaaactatatatgccatggagtcgctccaattcctgcccactctttttcattcatcggaaattttgcacgcagaaagccttggatttcgaagcgttgatttgagatttcgcgccttttcttttttctgtgagattactatcatgttaaaggtttttttttacgtcgctcaagagcgcgcgtgaggacaagaatagtgcacttgtccacggggggtatactttagtgagcaggtcttttcattgcgtgacgaagtgacgccattgcctttcgcgcctttctttttttcttgtgtgtgtcgagatatgatagcaatatgttt

SEQ ID NO: 17167 - DNA, 319 bp, Zea Mays
agaaaacgcgcctggtgaccctaaaccccacaccgattactcgaaattggaccagagaagatagctagcatgggggtgcattcaatcggaggtccgaggcgacggaggtggcctgcccacaggcgcagcggctccgcgttcaacaaccacaccggcgagcaattctaagggctccggtcatctatagtctagcccgatcgatgctacgtggcttctagatggtcgcaaatcgagtgggagtgcatacctaggatccctgggcgaaggcgagctcggccatgtgcgaatgaagtcccgccctgatgccggcgaggaattg

SEQ ID NO: 17168 - DNA, 408 bp, Zea Mays
cagttatgaaccatttactctgatacactcagatgtttggggtccttgctctgttacttctgtgaatggtgctaagtggtttgtcacctttattgattgttacagtcgtatgacgtggatctatattcttaagcataaaaatgaggtgttccagtgctttcaagactttcataaattggttgcaaatcagtttaatgcaagggttcaaatcattaggacagataatggaacagagtatgtgaataatgagtttagatcatacatttcagatcaaggaatcattcatcaaacaacttgtcctggaactccacctcagaatggtatagctgagcaaaaaaaccgctatttgttggaggtagcaaggtctctaatgttttagatgaatgtacctaagtacttgtggagtga

SEQ ID NO: 17169 - DNA, 318 bp, Zea Mays
cttgattgatccgagtaacaactatttatatttctctctctcaattttaaagctcattcttcatatagcatacgcttatttacattggtactttatatgttattttctatagttactttctcagcaccaccatctacgaactaaacctgctcagtttggttctgcttcctgatcttcttccacacatagctgtctgcttgacaaatgggatcttgtgacatatataagccaagctaaccctacgtgcttccacagttccatatgttgtgacctttgatccaccccaagttgttagtgtgtcctgttttcgccaccctt

SEQ ID NO: 17170 - DNA, 927 bp, Zea Mays
atcctcccaggttcgactgtatacaagaatgtcgtcgaagaagaccagtacaaatttgtgaaggaacttagagagcgcttcattcatcaaggcctggaaggtcgaaggagcattacacagtccaaaagccatgaccaggaattcaaaatgcccatggtgagtgcgaaaagccgtcttttccacatctacttggtgcatccgaacctggtggtaccctgatcgcaaatccagtttggtgaagaattgagccccatgcagttcatcaagcaattcttctactgctgggattgggaatttatccttaatagtcatggcattcaactcacgataatccacacaaaaacgccaagacccatctgccttgcgcgctcagagcaccggtgaagagaatggagaacgactaggccgaatgataccttgggccagcatctcagtacactgacgctcaatttcatccttctggcggtgtgggtaccgatagggtcgaacaaccactggatccgacccttccttcaaacaaatgcgatgatcacacggacgggagggtggcaggccctgtggctcttgaaaaagatccttaaatgtatctaggatcccctgcagacgaagatcatgtccaacttccaaactgcgtaactgaactgacttcccatgatgtagaaggccttgcaaactgacatgtccaccctcgaggaaaagagacatttggagggagtcaaagttccagctgatatcacccaatttctggagccattgcaccccgagaactgcatcaaacccttccaagggaatcaccaagaaggaatccgagaaggaatgatcctgtataccaaactgaacggccgacagacgccccagacatggcagtcgagctccattggccacctgcacctgctgcttggttcctgacagttgtggaatctggag

SEQ ID NO: 17171 - DNA, 1331 bp, Zea Mays
agaacaagagttgtcagtggtaaattgatggatggggagaagaatctaaataatgttgggagcaacaaggacgttcttaaggcgaaaaggggtgggaagaaccgcatcacctattgaggtgatgtggaggaccgacccattttcaatgatgatggaggatggaagagaggagcgaggaggaattgtggtggataaagcaccaacattaggggtggtgtgttaggaggtatcaaactcagcaatccagtctgagactgaggtgggtggagccaagcagttgacgatcacgacttagatttaaggtatgacgagttcgtacaaccgatattgttggtcagacgaggaaggtgatgaggcggcgtcgagcgttgtgctccgtacgcgtcgagggctctaacaccattgggcattgggcatagtagttgcaagtggtccagtgacagcagctatcgccgaccatgccttgtggttctacgatggatggatcctgactaacctatgcttaggcgtaaggacagaaccgtatgcctcattagtcattagaaccaacaatcctgagcggcaagaagcagtgccacaccgcgtgcaacatgtttgacgaaatcgtatgtctgctcctgatagtgtcgacctcgcgactgaatataatccatgcaacgcgttttcgtcgagcagcattagcaaatagtactagcaagtagcaagcagcatgtattttcattctgtcccatactcccacgtctcgccgtagtcgcatagttgtggactcccttgcacctgccccaataccccacgaaagcaaggtatggcgagcgcaagggactgtgcatcccacccaccatcccaagggccccatgagaggagggcagtggaggcaggaggcccgactagagcttaggtggggtcgggtgcgcagctatcaccaatgggggcggagcagcgtagaaggccggttgtggggctgttggacacgacataggaggtcctatagacggtccaagccacatgatgccatgatggatccggtccatgggttgtagaaggatgaccacgatcaaccgccatgggccactagtggatcacctaggccaccgccacaaccacgaccgccaaagttggtagttagacgaggagtgccaaaggatggtggaggagcgctcggacgatagggcacacacccgaaggtggtaggacaggccttctaggtctgccccctgggttggcactatagagggccatcgcgacgttggtggtggtggtggccacattcgtgagttcctcgggcagaatatcattgcaatcccaaacgaaggacggtaatagggtgatcc

SEQ ID NO: 17172 - DNA, 485 bp, Zea Mays
gaattggaggggatctccaactcccttctcaccaaactagcccataaggtctcaggcagtaaggattatttaccttcttcattgtttaatagtttagaaatcccaaagttattaacgtgccaaaataggtgaaatgcatgtaagtgtaaaggtatgtaatcccatccaacacaagcatcagaacttagccctcaatccctcatgatgtagacgaccaaacatggagccgcttcagtaagatgctcctcatgctaacattaataggaacagctgaaaccccattccagcctctgcacacgaacgaaccaacgatagcaaggggagcaagtaacatggcagacagtaagacaagcaaggagcgagagaatgccgttgtacgtactgcaaagtggccaaggttgacgagcgtccatgccaatgttgggggcgcacccaaagacggagagggcgaggatccagaaaaagaagatgatgtaggcggtcca

SEQ ID NO: 17173 - DNA, 743 bp, Zea Mays
ccgcaaggcccgcaactgccatcgtcctctgctcgtcgcgtcgttctcctctcgaccgcatcgcgcccgtggcggggaacgagccatcgacgccgcgtcgcgtgcctttcttcttcgtcccccccctgcctgcctagctgtctcaggctgccgcccgcccagccccaaaacattcggcagccgagtcaaccgagaacacgagccatccacccaccctgtcccttccccggctttcccccgtcctcggctccaccaattgctctcgcgtcagtggaaggaaaaaccaagggcgagggagggaggagcgcatctccgccccgcccgcgttcccgtaccccgatccgccacatgatctgacaccgcattgccgccgaggtgacccctcccgcccccagaatggaggcgctcaacgagctctgcgacctggtggccgcgcacccggatctcctcctcgccgacaagcttgcatggctctcctcccgctgcgccgccgccccgggtgccgccgccccgcagcgtgcgtcgagggcgcaccttcattcgctcctcgcgttggcgcgcctcctcccggcgggtggcgccggtgccggtgccgaaggcgatgcggcgcccccggccccactcctattcttcctcgcgtcccacgccttcctctcgccggccttctggccccagtctttcgccccggcgccgtttctcgctaggctcctcccgctcctcgccgcggccccatcctcccccgc

SEQ ID NO: 17174 - DNA, 446 bp, Zea Mays
cagccactcttggcaaggttctttaaattgtttctcaaatttaaaccgataaggaagtcgcacaagcacaagtcccttcttcattccttttagcttcggcatgctaaattcgctcaaagtcagagatgttttgttagccaaatattcttgaactagatctctggtgctgatctgttcggctaccaccttgaattctgccacggcctattggattggtgaccccgacgtcatgcgacacaggggcctagtcaacccgaagcttaaactcagcgggctcatcactagcattttcaacttctccctcttcttctcatcggcctagacatagaaccactcacttttccaaccggttggccacttggtgtggtagctaagcaccgaggccttcatatccttgcgatatgcgaagttataacagccaaagttttcatgcagcccgtcttctc

SEQ ID NO: 17175 - DNA, 280 bp, Zea Mays
cggtaaataacaactttgttttcctcaggagcaggggcagtgctgtctcctccaaccctgacaatagacatgtcgcgaaaatatctccccctcatggcgttaatatgactttgtttgatggtcgattttctgaagatagtatggcttggccgccagggccggtcctcagaatcttcatctccactctatacatcataactatcactctcatcagaatctttagacaaaccctctattatctctttagtaattttctccgtattcatctttgccattgact

SEQ ID NO: 17176 - DNA, 449 bp, Zea Mays
tttggtggttcttggaagttcgcttgggaacataggatttggttctgtatgccagattccatgctgaggcgctacatcgcgctccaggctccctttctgcatttgcttttgctgcttgccaatgcgtgctctggtgtcttttgggtccatggcctgagtctgatcacttaatggcagagcgactatagatactaagctacaataattgtatgtgttgtgtccccttttgcaaattgtttttttatccatagtgcttggagggacctaatttcggctaggaccatgcaaagttgtgtgcctaattgcccatattccttgatgtttgttgcttaatctaagtgttaaacgcatcaccacttatgacaatggtttctgcctcacatccaaaatggagatatagacgacataagtctgaggtactcctgacttgctttgatattgtataatac

SEQ ID NO: 17177 - DNA, 372 bp, Zea Mays
ctttgatcttgttgatcttgtgtcagggagggaggtgcgtattagggctagtgagttggggacaaggacccagggcctcgtcgtgtgttggtgggggccgtaagtggtgattgcgccttgaatcaagttagcgagtcggtctttgggcttttttacaagggattgagagctagagatcatgctatttaattgcaaggagcgagggctgatcccgaaggaggatccctcttgtctgtgacttcgtagtttcacagttatgtaataacgaactcacgttgtttgcacatatgttgtgtgtgtacttgtgcatagggcggtttcacggcagtcgtcgtcgatcgaaaaaaattagtgtagaacactgcctctccc

SEQ ID NO: 17178 - DNA, 933 bp, Zea Mays
ctaggccatagatcacacgatcgacggtcagggcatgctccaccgaagaggtatgcctggtctaatctgagccgccgctcgtgagatcgacgccccacgctctttccctcaacccgacaacgctcaggcggcagagctcagctccccgcggtgccctgttcaccggcgggcacgaaatccagtgcctaactacccccaacctagaaattgatcggaactaaactgagagggggagatggcgaatctacagagaggggtctcaccggcgattgaagaggtagtgagcctgtccatggtgcggggcgggactgcggcacgaacagggctccggtgaggaattccgcacgacccgagcaccaatacgtatcgatgtggcctcgtcttcacacaagggaacaccacagaggtcactatgttctccttatgcttcaattcacagcgctggtgaggagcggccacggcgtatgcaaaatggtagctagggctttctggtagtcacggaggggtggcagggtttggtgcctatgtaggccttcccgcggagggcctgggtgtggcgcgaagcgtggcaaaaggatcggccaggttgttgctgggtagctcaaggagaagttccaggcgaggcggggaccgtgcggcgttgcggagattggcggactaggcccacccgtcagtacacgattcgggcaggtgcggagtcaaggcaccgatgccagcgagcgtggggacggtcaaaccaaaatgacggactacgtgcagcaatggcggcgttagttcaacaacctgttgcccgcggtcatcagttgaagggggatctgacgaggcggtcccacccgccagacagagaactgaggtcgcgacggggtgagtggattaccagttgggtccgcccgtcagtaccgcggccactctgagagggagagactgccaaac

SEQ ID NO: 17179 - DNA, 345 bp, Zea Mays
ttttttgtttgactcatgagggctgattcgcccttgtaattcgcaaaaacaattttattctggcccgcactcttttcctcccggggggtgaggtttttaacgaggcggagccatgtaatatacaagtgaaaaatcccccgcaaaaacatgcgtcgaaaaaagaccgagacgacggtcttcgacattcgaccaatacgaagtcaccgcgaggctcagcgctagccaccctcgcgtgcgacaactccgtgcagaagtcgcctaagggtgcagccggattagcacaacaagtgcgaaaaatcaaagtctaccgcaaagacttaccgtgcagaagttgcctaagggtgc

SEQ ID NO: 17180 - DNA, 638 bp, Zea Mays
cgcggtggacagtgggtttatttttcaaaaactagagggctctttagcaattaggccacgacgaaggggtatcttcgattgccagccatccaatcccgatccaaaggctcagaatagatcgtgaagcgatacacggcaggcaccacaggatccaagatccacggtccaaaatctctcccttgcattaaatcgttctagcctttggatttcaatctacggccaatacaacccctcttacctcaatccttcatcgcggatccaacggtcctcccccatcttcttcacgcgaggcaccaggcaactgtgttgtggctgttcccagctcgcgacggtgtccgccggccaggagcccgagcagccccggtgatctccaccctgcccgatccgcagtcgcccctggctctacggcgaagtctccgctggcgagcaacgaaccgaggccattcctccctacttcatgcacctgaggaagatctgcacagggtgttcttactctctctccctcaccgctctgctcaatggaggtgctcgggtctgatggagggggaaggaggggtggaggcgcatatatactcctatagaacccagcgatggccgaggaaatcggagtccgttgtggagtttgctgtggagtttgt

SEQ ID NO: 17181 - DNA, 297 bp, Zea Mays
gtcggccagtagaaaccagacctgaagaccttcccaaccagagtcctggatgttgcgtgtatcccgcactgtccggtgtggatctcatctagcagttgcttcccagtagccgaaagaatgcacttcatgaggactcctgttgcgccccttctgtatagtgcctccccaatgagggtgtagtgagatgactgccttgcgatgcgttctgctgcagctttgtcatccggttcctcttcattctttatatatctgatgattggctccctccagtcattagaatctgactctggctggctc

SEQ ID NO: 17182 - DNA, 534 bp, Zea Mays
ccgaagaggtattcccttgccgtgaccgttagatcgccatcctacgatctggattagatatgatccccacccgaaccggtatggattataacccaccggatctatatctgatggctacaacttaatgaatcgcaatccgttttcgagccataggatgccgatccgatggcacagatccaaacgccccaagcggtatgccagaactaatctgggccacccattaatggatccacgaccccgcgctcatctacggtcacgatgtcatctcttcattccttcccccagcgaccaacacgcaatggcggcgtcgggcatcccacagttgcgagcacgccgacgaacggcggctcagcccttcggcatgccaccccgaacgctatgttgtgcaaaagttagcagagattgcagcgaacacaatgggggcagtcttaccggtgcttgtgccgcgcaatccccaggccgcgaccacgcgcggcagcgcagcggtgatttaactccggcgaggaagttcattgggtttgagctagctaccgt

SEQ ID NO: 17183 - DNA, 376 bp, Zea Mays
ggtcagagagagctcatgagataggagcctccgagctaccaggggccacttgtcagtgagggagtaagggaatcgtctacctcagaagcacccacccccagataagccccaggcaccgagcccgggcttgggcgtggtggagcagcagattggggtcgggcgaaccaaaaggaaaccactcatgtgggtttcttgcctggcccgagaccgacccactataagtggacggccgcattaactacgcctgacaccaggacgcagtagagagtcggtccgcctcccactcatggcatgcacagccccttggcttacagcgcactcatgacctacacagccccttggtcaagtggtgcactcatgacctacaagctcctcg

SEQ ID NO: 17184 - DNA, 2097 bp, Zea Mays
gtgacagagtccaagtcatgccctgccctgcacactccgtagtgggcctgtgattcaattaaagtccagcccgacatcctcactccaaattgactgctaaatcctccaccagctccaaccactagggctgcaatcatccaccttctgctcgccgcctcctccaacgccgactcatgctcatcggtcgccacctctccggactcgcgtagctccctcctgctcgtcgcgtcgtctacggaatctagcctgcggccattggcggctagcgccccgccgtggtgccccccaccagcaatcagtgttcgcggtctatcccttctcaccccttcggatctgctaagcgtgaggcacagccgcgtctatggtctgcctggctggtccctccctctccgcgcgcgacgcgcctctccaggtccgaccggcgtcgagcgcgccaccgtgggccccctcctctgccttagatgacaacatttggtgagtggtgatgcaactgggcagagtggtgaactggtgtttgacgcgcttgccgacgagttgcaaattgggtgaggatcgacttctcatctgcttgttcttaagtctgaaaattcactcatagttcatttgtgttgtgttttttagcccatagcttttagatgcctggtcattttggagatagtatgggggtcatgtaggtttttggtttagaaaatggtacttaaatgaaagcaaatgagataaaagggtaactttgtatagacaaggaacattgtccagcactagacaggagagatcatgtcacataaaatcctcaagctgaaacaagaacatgttccactggattttattatccttttgttattaaatttggcctggggctttggtaatatctgaatttgccactgcatagagtagtaaacctaaaaaattcagctaaaaagttattaatggcccataccttttctgtgatatgttttggtagttgaaattgattacaatgttaccttttcaaatatatcggcaacatcttttaggactatgacagttatcaaatttgtggagttcctaaacctgtgatacatctcgactgttgtttgatagagatcgtgtgaagataatttttaaaatcagtgttcacataaaggtaccattggattcatatttgaaagcacttccatatgctatgagctttgttgtcatgataaacatcataatatatgatatattggtggtcaaagtgtggtgttggcaggtcaaaccgcactttacatttcgaaaaggatggagtaatattttagccttgattttgacatccttttttgcagagcagtggatcaacattattcaaaattttgctcctgacgtctgatatgtggacagttgccattcaagttttactctatcatcaacaggtgaagattcctgatccagaatacttgtgtaagattattaacatgttacccaataataatcttacataatttggcccaacccaaagatatgttaatttaaactccctagattattttgtggaatcccaacagagtttattcatttgcttgtactctatgaagtggaagttcttgagatgccaaaaaagcagggaagtgcggacacaacagtcaagatgagctacttaaaagtgaggataattcaaaggagcgtggtatcccgagaatatgaacactccagagatgcaatatttgaggttagtatgcagtagtcgagcctattcatagattattgttcctgttttctaatcttggtcttatgactaataatttttaatgagtggttctaactggactgcttccaaatgtagtcattggctaagccaaaatttgaatttcataaagtaactaagatcagtgtttgtccggattgtgacaaggctatagcttttcccttaatcgatcagaccatatcctaggattaactgattaaggatgtgcaacagaacccttttgttgtcgacgatatcaatgagcttcgtttttttttcacatccataactatataccaagcctttttgccacatttgcaagccacaccatcgctatgaacagaaaaactattatgctagatccatcttctatccgcatatcataaccataacga

SEQ ID NO: 17185 - DNA, 614 bp, Zea Mays
agtcctcggtgtgaaggtgcaggacccgaattgagcaatcaagccacctatcttccttttctaccagtgcagacaacaattttttgcgaagacctcaatagacggttctccaccatatgaggacacgacccacacatactttgcgagtgcatccatagcattcggggtcaattgatgaatttgcacctcaaacctctgtagaacttcaactacgaaacgatgtgccagcaaacgaagaccaacaacaaaaaagcctcgaacataaccaactccccttctggcttagggacatctttagcccttggagcctgcccaactccgtttccaaaataacccagccgttgcatctccaccacgtggcccgagtaaatcctcgaggtcccaaattcgactgtatgcctgggctgcaggtccaccaccatcgccgaatcgctaatcgtcttctcagacgacgtcgcagtcgaggacgcggtctcggtagacgacgacgaggaataagacgacatggtaacgtaccgtcaacgatggtgggcagtctgcttgacgcagggcagatctccggcacagtgagagcagaagagggcaagcaaacagaggaagtagctagggtttct

SEQ ID NO: 17186 - DNA, 680 bp, Zea Mays
aaaatctctttctaaatttatttatttaattttcatgagctctggaccgggcgccaaataatacaaaactcggggtccaatctgtaacaattccctagactcaggctaaaccagggaaggactgcgggttgatactgaggaaatagaggggctcttttgtaaagctgtcggccgaaagggtatcacagaacacgggccgtcagatctaaacagacggtccagatcataacgtgaatcggtacttgccgtgagcgtaggattccaatccaacggtccgcagtgtcgcctcccttacgaccgcatacacgctgatcaccggtcgagatcgatttgactgaatcggtacgcgcaactaaactcaagccgttgatttctcatcccatggccgcaagtcgaaccggtcgacccaacgccccccttctaatctcagccaaccgagaaggatcggtcggcccacgagtcctctccttcccccagcctgctaacccagggcggcgccaccgattccccgcggcggcgcaacataccgacgaccagcgccccagcagatgccccgatccgtgaccaacgagtgctacgcaatgagaaggacaaggcgacatggcaacgacgacgtaccggcgataaaagcggtggaaggacaacaaccacggcgcggggcagcatcacgacggctttga

SEQ ID NO: 17187 - DNA, 481 bp, Zea Mays
ggggaggaaagaagtgacatgaggaggggaggagggctcacctgcacacgaaggattcctggtgacggcgggctctggctgctgcgtggggagggacagaggagggcgccggcacttatgcgcatgcacacatggacgttagttccattttatgcgcacgcacgacacaaaggtgcgggcggggtcaagaggagaggcggttttgggaaggatgattatgacgtgtggggccgatagatcagtgaaacggttgagcaagggggtatgcttgtgctgctgacgggcgggactcaagtcaggaacagtttcaggtgatttcgtgcgcgcgacatggcacacaaccgagctgaaccgggcgtgaggagttgtcgcgcgaggatgaaaagagaggtggttcgcgatgataaggtgtgtgtatatatatagaaagaagagggcgcgaaagtcagttgcacgatttcgccacggctcgtgatgggag

SEQ ID NO: 17188 - DNA, 377 bp, Zea Mays
gtgaaggaccaccgaagcgctgaagcccggcgggagacagggttcaggatcaacgcgcctaaacgccatcggagcaggaaccgaggatcgccagctagcagacgaagacggagcaggttggggttttggtgaggtgacgcccaaagaaagcgtcagggactgaaggggtgtcgattcaaaattttttaatacctcccgggcgaactcctcgaagcaactgaatatgggcggtccactgatcagagacgcaaccggtgtgcgaaaccaggtactgtgatcaggagaattttggtttcccaccaagaaggcccgactcccaaaggcagggaacgaagtcagagaagaaccgaaggaagtatacttgctgggacaaaaaa

SEQ ID NO: 17189 - DNA, 826 bp, Zea Mays
ggcggatgaacacaggctgtttaaaggggtaggagggtggacaaggtgaagaacggttttgattgaatggttggatcactaacctttgtcgcttttcaggcccttggttggacttgtcacctccatagccctttgacttacctgggcctgcatatttagcttcaactgctagcgctgtgctgacatccctgctgtaggagaggtcgaggcaggtagccatcttccgttgtagccagtcattaaggccccttataaaacagttcctcttcttcaggtcagtgttgacctggtcaatggcgtactaggacaaatgattgaacttgttgagatactgtgtaacagcatctccaccttgtttaagcttcatgaattattcttatttcatatggagcactccttctggaatgtagtgctctcaaaatgccaatttaaatttgtccaaggtaacttgatggccgacaggctgaatagccacataatttccccaccaggtgctggtagggcctcttaactgctgcgccgcaaacaagggtttctgaatctccatgcatcggagaagtccaaacttctgctcaataacccaaatccattcgtcatcttcaaggggatctttagccttgacgaatagtgggggacgtgtttccgagaaatccaaatatgaagtttcgcggggtccttgtggataagctctcccaccttgttattgcagctgctgtctcgctagttcgtgaaggaagcgagtgttgtcagcggtcggggcgaccaaggcggcgatagcctcgaccaacgtgggtggaaccggtggcggatttggtgcatcttcttg

SEQ ID NO: 17190 - DNA, 540 bp, Zea Mays
cgatgggagcggagtagagggggatgtcggagggtagaagggtagaaccgtgcaccgtaaacacctacactgaagtagtatatatatatattcattcccacagcgggagatacatgagctcagcagaaccttctgcgcaacagcagtagtcatcgtaccctacaacatgaccgccaggaccctcatacccattagcgtagacgcaccaaccctccgcgtcatcatacccaccggctaacaacaaggacgacggcggccaatacccgaacgacgacgacgacgcgcatgcgccttcgtagtcgtagccatcggtgccgtccgacgacagcgcatcctcgatcctgtccatgctcacaccgccatcgtcgtcggcgaccatcgctaccgcctcaccgccgccgatctctgcctcgagggaccggatgacatggctcagccggcgatcgccatccccatcgccatctagaagaagcaagtcggaggagggcgggtcctgctcctgcatcagctccatgaggaggagcgccccgtcgacctcgc

SEQ ID NO: 17191 - DNA, 513 bp, Zea Mays
ttctcttgccgcggatgacatcaccttgatgtaatgatgacatcaagctagcaaagaatccagcacgctctgttttctcttggccatcttcttcgtactgcatgcaaccgaaataccaggaccatgccatagaatctctccgttgttgggtagttgcacgatttgcctgcatgccgtaaccgtcgaccatctagtaactcggcgtggatctcgccatccgcgcggactcggcttgagccccaggtccatcttctccttcctatcgcccgcaacggaacaggccgtagttcacgcaggaagaatcggcctcgcccgcccgaccaaaacggacttcacccacagctatataaatctgttgctgtgcctccatgaccctgcgtgggagctcgcacactccaggcgccgggaatcacggaccgcggatctgactgtacgccctcgtcctcctcgacacctcctccgtcgcgtccagccatccatcgttccgcgcccagctctcctcctccccctcac

SEQ ID NO: 17192 - DNA, 544 bp, Zea Mays
ataattgcccctctgtccctacatgagacacaccaaccttgtcttcttctgcgcattgacgaatgtagtgaaaacgggtgtcaatatgcttgctacgttcatgatgcactggattcttgattagatcaatagctgacttgttatctatcatgagtctgaacttgcacacttgagttcctgtgagatcaccaatcagtctactcaaccagaccccttgacaagctgttgctgctgctatgtattcagcttcacaggatgacagagccacaaccttttgcttctgtgacacccaagtgatcaggttttgcccaaggaaatatactacacctgtagtactctttctgtcaccttgatcatctgcatggtcgctgtcactgtagcctgtcaagttcaggttcagacctgaacctttgatgtatctgcaaccatagccgatggttccagctaggtacctcaagatccttttcactcctagccagtgtttctcttgtggtgcctccatatgtctgctcattactcccactgaataggtttactgggttcg

SEQ ID NO: 17193 - DNA, 542 bp, Zea Mays
ctcatgagactgacgcttctgccacggatggggtacaaggaggttgccactcatattcagctttggctacttagtgccctggtttctcactccgagtttgatgttgtggatttcctcatttgtgagatcgaggacaccgtactggatggtctacgcgctcgtcgacagctgccttatgctcactatctgtgtcacatctttgctcagctgattcggccaccatagtttcagtgtactcttgaggcctctcgcctcctctttgggtcctaccgtccagctccagaggatactgtgccggcacctgctccagtggttgacactcaggccgaggacaccacttttcaccagtttgagactcagggcgcagcagtccctgacgatgatgatgatgatgatgatgatgatgactttggggttccacctccacctccgcctcctatgcctccacgcactaatgatcatgaggctgggagttccagtggtgctacccctgatgcccctcgtgccattgaccctgctcttgcggcaatcctccagactct

SEQ ID NO: 17194 - DNA, 684 bp, Zea Mays
cgggcgggcagcccaactcgacctgccagcgagagcgacacggggacgacaccgtgggcgtgggcccacgtaccagcgagggaggggaaacgacattaggggtgtgtgacggggggttccgctggaaggaaaaccgttcgccggagctcgacggtggttctccgccggtgatccggtcccgggtggttggggaggtggcgaagcacgggttggggtaggggtcatggtggaggggtcaatttatccggtgggggcttggaacagtcggttcgcggcgaggtggtgggcgccctcggcggtgaggtcgccggtgtggcctacaggcgtgataggtgaaggggaagggtgtgtcatgttcgtggtgaagtggcggagctcatgagctataataatttgacttgaaaccatcagagagagaggagggagaagctcatcggagaggaagacgacggcggcgctggctcgattgagctcgggaaagggggagagaggtggctgaggctggtgtgaagaaaggtggagctcgggcggtccattttataggcgcccgtggaggaagcggctaaaggccagctggtgtcggcgagggacaccggggcggcgatgagggcgcacagcgccgaggacgagaccgctcgggcaggctgccgtgaaggggtgcgagcacagtgaactgagggggcg

SEQ ID NO: 17195 - DNA, 595 bp, Zea Mays
ctcgcgaacctaccgttggatttgatctggctgctcccactcctagtatgcctatcctgagtcctctggaaagctctgccctgagaagaagcgaggagtggtgacgggagggcgacatcgcctcggccgcggacgacggcaggcagcctcgtgttgtggttgctttcttcctccatcgcttcctattccggtttcttccttctgaaggtgacgctcaatgctcccaccctctccctctgttatcccttctcatattcccttcccgaagtcacggaggtcttggcatcgaccttgtcgaacgccgatttgatggtcagaatatccgtcacgcaccgtccggtagtcggcgtgccacttactcccactgttcgcccatccgtgtcctgcgccgtctattcaccttgcctcgctcgctccttccggccgttggcgtctcacctactaccgtcgtccgcccctcccgtcccgtgcgcagccatttctcagtgggccacaggatcgtgcttcctcgcctcgtgcacacatcggtgtgcaacttgctactgtcgtccgtctttccatccccgttccgccagatctcatcacgtggcaggcc

SEQ ID NO: 17196 - DNA, 276 bp, Zea Mays
gggagggccggtggctgccaccagtatctgacggtcgttgagcttctgttgcctcttactttcctgtgatccatgtccgccgaagatgacgttgacttctccatcgacgcgcgggaacgctccgcttcctccccactcctgctgttgaggttgtcgaggttctccaggtcctcctcgtggtgggggaggtggcagaggttggaagggtcggtcgttccccacggagtgcttgaagtctctgcagttccggagggtgtggcgcatgtctttgtggta

SEQ ID NO: 17197 - DNA, 715 bp, Zea Mays
ctttggagccatctgatacggtgccttatgaataggctgcgtacccgaaatcagcttgatttcaaaagctgcatcgtgctctggaggaacgcctggaagctctgccagaaacacgtcggcaaagtcacacaccacccggatgtcctgcacccgcaaggcagcctcaccctccaccaccatggagaaaaagattcccgacttccttgaccggagatccagaagaaattgcgccaacaagggtaacatgaactttggggaacttcccaagaataccacctccctacccgacggcgcctgcaataacactgtcttccaaaaacaggatataactgcgcgatactgagataaccgatccatacccaagataacatcgaaagcccccaatcaaatcacaacaagattagccgaaaagacctcattagcaagaatgacggaacacccctggcaaactgaacagctactaatggagccattagcagaaccaaccaaaattgggtgatccaacctctgcaccgaaagaccagcccgcgacacaaaattctccgaaacaaacaaatagctagcgctagagtcaaaaagagcatgggccacaaacgaatcaactgaaatcgtacctgtcaccacgtctccttgctctctgccatatgcagcgggtagcacataagctccggaaatacccgaagaagaggaagctccgagagtgaaattaacagaa

SEQ ID NO: 17198 - DNA, 352 bp, Zea Mays
gtgccatatagttaggtagttgggttctcttttcctgctctctccatttaattcgtctatagttacctcttttctctctctaccccttttcctcttgtacctgcttagttggcaaagtccgagttgaaccgaagaatctatgtgccaaccttgttttcttgctaatcttctcttgaaacacaataccatcaaacctatccctattaaaatataacaccatccttgtttcacgctcgctgtcacttcctttctattataaatgtctaaatgtccttgtttcatatttgccctttgtatatatcatgaaccttgtgaaaccttgtctcactctccctttttcccctacctagat

SEQ ID NO: 17199 - DNA, 550 bp, Zea Mays
tccatggaaaattcaccttcatactgctaagaaaaatctgagtcacccgagcctcatcaacaagccaagcataataatcggctaagtcaaccatgtattgctcagcaacctgggcataaacctccatgacctgagtaggaggaacaccatcagtccctatagtgtgctatgcatgacgctttggtacatgagaaggagacagaccagtaaggtgaacccatatgcggtggctattgagacacatgcgaagcatggtggaccactcccgaaagttggtgccatcaaatgtgacgaaaggaagttgcgtaagaggggtggaacgaggacgagcgaccatgttgagtgtgatgtggagtgggatgtggaggtgggattaggcatacgaagttgcagctagattgaggaaggtagaggagcaacgggaagagggcacaatgggactggactgacacagaggacgcagtggaggtgggcagagggcgcagtggccgtaggcagaggagcactaggcagaggtgctctggacaggggcgctgtggaggcgagcgca

SEQ ID NO: 17200 - DNA, 759 bp, Zea Mays
acaacaattggacttacatgtgaatgcagtatttgaggcgtatccgtctccctggagctaatattggacatcggaggtcgaaccctttgttcgccttcctcccctatgctcatctcgtcgattacatgccctagtagagcaggaggtggtgtaaccagtaagttaccatcaactactccctttgtctctggatcaagacgaacgccatctcctaccatcgccggtgattgtccagagccggccatctccaccgccaactagttatgcagtcttggggtattttttcgaatgaaaggaaatcacggatgctatactaaacaagtaaccgcatccacgtttccagggtattttcattatttccgaaaccgtaccgatattatagcaatgtacatgtaatacaaatatccctaacacactacttacgcacaatgactcaatgttttacgccaaacggtatatactatatatgcaacatttatagtgtatctgttttatgccatatctttcaacatcttattcgatattatctttaactcccaccattataccccatgcaagatccataaattccgtgcccacgtaacaaagtaagcacgtttgcatgtggaatctaatccctataattccgcccactaccatatgtttaccgcctagccattaaccaaccgcgtcacggcgccgtctgtcctgcatgctgtctgtctcatctccattaaacacaagcgtgcttggttcagcggtctagaccccgtaaccgac

SEQ ID NO: 17201 - DNA, 542 bp, Zea Mays
ccgtggtgtcgatcctgtgttcccaataatctacgctcggattggtcaaacggccactacgaggagcttcatgaatacagagagctgctaaaacaaagcttgaatcggacagggccttaccagagagggctggccacggtggagctgttcttcgcggtggcagcgacaaatttggggaaagtttgaaattccagagttcgggtgaacgattaagggtgggagcgggtgctatggctttgggatgacctagcgcagttgcccgggccatcaatttataggaggcttaggcggtggcgcgggatttgatcgggcagtgcgggcggccggagacagagaagaacacagtggctgtaaccgtggcagtcgtcggtgtaacgacgcaaggagaatactcctaagggtgccacgcttgctaacccgcagtaacaagcttcggtcgtggcacaaccgaggtcaccggcgctgatgatcggacacggccgggaggagggatggccgcgtggcagccggagttagtgccctccaccgcggcggtcttaccc

SEQ ID NO: 17202 - DNA, 819 bp, Zea Mays
gccacacccatagccgaaactaaagtgagtggtgagaacttttagcgcactaaatgtgataggttttagctgttttagctggataatagcggatattagcttctctgatcctttagcgcgaaaatatgattatcttaaccccagtcgtctccagcggctatatctggatatagcggccgctatatccagctattttaaacattggtcagatacgaacgagacccgtgggtcaaattatatacctgaatctgaatctaatggatcggatatctgacggatattcaaactcatgggtaaaattgtcatccctatgtggtcatggtaggaggctatgttcgtagcatgccctttgtagaggctcatggcagcaatcaccagcggtgaggaggatgcttagggttcaggcgcgcgagagtatgggtgagccgcgaccagtaggaccgacaacaatgcgggagcataggggaggagggacccatgggttagggtttgggagctgccaagtgagggctcgtggtcaggagagaaattaaagacacaaaaagaaaatgagaaataatttttcacacgtcagcacgatgtggtatcgtcgtacgtgccaaacgttaacatggagggaggagggttcaggttttaaaaaacctgaagagatatatcatcaaactaagttgaattcattatttactacattttttcacaatatgtctaattagaaatatcatatgaagacagtttcatatttagaagtgtctagtacacccactaacatctaagacaattcttattgtctaaacgactcaaataatatctttatttgag

SEQ ID NO: 17203 - DNA, 489 bp, Zea Mays
taggcgacgccttttaaaccatggtcgtcccacttggtgtagtccagagaggtagctgtactgatcaccactaattcatcaagaagtagatgacaaagcgtcaaccatcaccaggaaggagaggacgaaacgagcagttgtgccgcttgcggactcccccaaaatgtgattgtcttcactcgagcaggtgaactctcggacgacactcgtttcagagtcttactctctcaatacttgtgcgcgtaaggattcaaatgaggagaacttggccaacaacagaactgaagaaaatgaatgatgataggatgaaacttttatcttcgagccagaagaaccgagtgggcgtgggagaaccgagcgggcgcaggagatcaagagacgggaaattacttctgtcatcatatgagaaactctcgtaacttccggagttacaaacgaagatttctagaaattcctttcgtcatcatacgtgaaactcccgaaactccg

SEQ ID NO: 17204 - DNA, 1031 bp, Zea Mays
cgcgcccgcacgctctggctattttgcacaaagggcctcggcttactggataactggaagcggggccatggcactgtttaacatagtcgctgacaactgcagaaataaccctaggcttctattccttctctaaaaacacccttggccatggcgcgctcgccgttcgccccagacgacgcacggactagccctggccggcgatggctgctcgggttaactagcggggaggcttcactgacctaaagagaactaggaacaaccattaatttgacaggaaacccactgggagccgtctgcccacgatcacggcggacaccaagcttgggagcacacgttcccgcctcaccatggtcgactagagcaaacggacgccaccgtgagcttcacaagcacacagaggcacgaaaacaacacatggattgaatagggacttaccagaacgagctggccacggagcgcagagctctgggttcgccggagacaaagaaaggggaaattggtgtcgcggcggctctgggtgaaatcgggagatgggatttgggctactcggccgtaaagaaccactgattccccgcgtacaaccaatttggagagtgggagaggagacacgacgaattttggtttttacccgagctcacagaaaaactgtgagtacctcgccgcagctcccagcgctatttataggcacgacgccctggctaactatccgcggtcacgaaacacgttgccaacgcatgacgaccacgtagtaaaggagcacagtgaggtagaattgagatgcgagtgacacggcggcggaaatgactgatgcggtggccgccggtgaatcactccggctgggctagggcggtggcaccacgtatgggttgtcctgccccgacgttatccattctcgactgcgcacgcgcccgggcggcggcggcgcgaattttggcgcaaagaggtcaccggcggtgagcaagccgcgttggcaaccatctccgttcagttactgtaccatggcacacctccatcagtcacctgaaccgacc

SEQ ID NO: 17205 - DNA, 1292 bp, Zea Mays
agacaaagatactctgtttttcatacatggaaataattaaatactaatggtcgagattttaccttcccatggttctttcttagatcaaggaactcgaaaatatcagcatgccaaggctccaagtatacagcaaatgcacctaagttttagaagctcataagaatttctgaagacgatgttactaaaagtggaaataatgaaaaaaagcataccctttcttttcccaccaccctgatcaacataacgagcagtatcattaaagactcgtaacataggcacaattccatttgatgttccatttgttcctcgtatgtaactcccagtagcacgaatattatgaactgagacaccaattcctccagctgatttgcttattacagcacactccttcagggtttcatagattccctcaatgctgtcatctttcatgcatataagaaaacagctgcttaactgcatcacagaaaagaaacagtaagtaaacaatttcaacccacaatgacatcgtctggcaggaagcaagacagtacttggggcctcggtgtgccagcgttgaaaagtgttggtgatgcatgtgtaaaccagcgctgggacatcagatggtacgtcctaatggcagactcaatgtcttccttgtgtattcccactgaaaccctcatcagcatgtgctgaggcctttcaacgaccttcccaccaagcttcaagaggtaagacctctccagagttttgaagccaaagtagtcatagtcgaaatccctatcataaattatttcactgtccaagcgagcagcattctgaaatgtaacagcatttggagcgatatgagggccaatttacatcaaggtgagtgaagggcacaacagatttactgtatgagataaacaaccttaataaaaaaaggaatgcaacagtaaattcaactgccagaaacacatcggcattatctacacagatgctctgtcagaaatgtgccaggagcaactagaatctcacattcatgatgatttcataaacatcttcagcgaccagaggggccatcagcccagacctctcgttaaagtgcctgtacatgtccttaatcctgcatccacaacggccacattccaactcacaacccaatccaactaatccagccttcaccctgacaatatgaatgaatgaaattaaaccaaattgagctgccacttacgtctccgagaaggacttctttgtgttcttgtgcaggttagacacagcaatcctcgccgccaacttcacgaatcacgatagagaagagaggaaaccaaccccac

SEQ ID NO: 17206 - DNA, 780 bp, Zea Mays
ttgtcgttgtcgaatgtaaccagcaaagtccactgttggcttcagttggacgctataaataggggctcgctccgtgcttacccccaacagacttcagtcgttgctttgtgttttctaaaagcggtatttagttgggatggttttgttgcctccaacctctcggggtctcatcggctggtcatggatcacggtaagcgcctagcttcggagtgctcttactagggccggtctaagcaccgcacatcgtaggaaaggtgggtagtgaccaagcactcactcaactcccgcccctccatcgtatcggtgactaaccttcctcacagggcgatgggctcaagcgtcagaggagagatcatatcgctttcgttttctagctcgccgaacggggagtcgaaggttggcccttatggtggcgaacttgcatcgctggttccgtcggccggtgttatcgacacctcgatcattgtcggtcgtcccataacggtcgtgaggttggtttgtgctggcccctaacctggtcgtgttatcttatgccggagagtcgtagctttctcctccctcgtccctcatgtgtcgtcttgcgaggttggtccttgacccttccactgttagcgatggccgagctgcggggtcgactggaaccatctcgatcagtcgtacgaacatccgacgctcgtgacgcaggtcttcaggtgcgactggcaaggtgaaggctcgtgcggcgagtacgccactcgccctaattctcaatccctttcttactctcgtggacgctcagac

SEQ ID NO: 17207 - DNA, 509 bp, Zea Mays
catgcgcgagcagaccggtggaaaggaaggttgctgtcggtaaggctggaggcgacgcggacaagtgtaggaagtatgcccaggtgtatggcaaaggaggcagcggatgatggaacggcagagggcaacccggtgatgaggtgagaggcacttgaagcaccgtcctttaaaggtctccagagcttgaacaccaaacgacttctccaggcggcgtctctgcttctgtgtgcggcgactctccacgagtgtgaaaccatcacgatccaccagaggcttctgaagcctgggctgaaccaaagagcgcagtggggaagaccgacggacaaaccgtccaccatcaccagaggaattctgcacggaggcctgcaaggtcctagcctgggcgccatgggaaactatgtccccagacgtcaccgagactgaggccgagaccgttcccgcgagcaggatatccttgaacgaagaagggctcccaacatccaacgaatccgacgaagggctggagtctc

SEQ ID NO: 17208 - DNA, 1049 bp, Zea Mays
gcggactccatggggttcgttgtacccaactccccgcaatccgtgctggctacccgggccccaagaccccgcacctcgcggctagataagggagggtcgccgctccttcctccatgcgcgacgacttcgctgtgagctgcaatccaccgcttgccgatttaaaagctcggtaggtgagagagagagagagaaagtcacaagtgtcgtggatcctagcagcgctgcggcttcaagcaagggccgggggatcgctggggaaagggaagctctgcgtgcgaactaccgtgggtcgacggcgtgacgcggggaccggattgctcgtcggtgccgaggttacgtcgcggaatcgagcgcgtccggtgttgggtgtccgcgccatgtgactataggtgagtagctacctcggaatttcctcctttctctattctatggcttttacgcggtccgtggaggagcggtagccctgagcgaagtgtagatgcggaccgagatctgtgtgcacgccggtggttcaccgggagagggagaaagtgttctggaggccgacgcatgtgcctaggaggctggaggaggaagaaggacagtggatcgtcgatttcaccttcaacggtcgcgattagattagaaataacctttcgctaaggggaaaatctgaccgctcagtttgaatcggacggtcatggtgagtcgaaacctaataaaatctggggcgttggatcgggaatgggcggttctacgttgtccgcaaatttataatgcgcaggatctaatccggggcatcggctgttgatccaacggccagatccattccgtaccccttcgggctggcatatttacacttgaaaccctctggttctaataaaataacccgccatccacaaggatggtttcctgtgtcttgggaacacttacaccgagacccctgctttattctgttattgaggcccagtccagtgggttattaaatcagaaaaatgaattagaaaatgagtttttatataaaaacaattcatagaatttgtataattcatagaaaatgcatttggact

SEQ ID NO: 17209 - DNA, 881 bp, Zea Mays
ccggggggcagcatcagctggttggggggtgctagtttggagatgcgtcgtggaaggaagacttaatatcttgagatccctctcaaagacagtatcaagggatggcgcttggagtggtttattgttgaaaaccacggaaattctctccccccacggtcgggaagacagccggatgttcgcactccgagttggaccgagtcacccacggatcaggaggtagctgaggcaggggctttgctagctgaagttggactgctgaaagagaggggtctgactactgaggctgtggttgctgattttgttttcaagaacattcagccgttgaaggacagggcatacccggcttatctgtaccgaggcctagctgactcaacccgggttaccagcagaagaattccctctgtagacttggtgaaccgtcttgagatgattattataggtaaggtatcaaatgttggtgccccagtggcatactcggcctagaacctgcctccttccaaagccttcactcattttgcttcgaatccacctgttgctgatggcggtttgggccttagagttcgaccctctgctgaagaagttaacgccttagttgcctcgctcgagggaattcctgatgatgaacgacaggttcactttgaggtgcctttggatcctagtgacgcggagataagtgctatgcttgatttgctggctgaggattcttctgacgctgctcctgctgggacattggtggtggcgcctctcccagaaactcatacagccttggatattcagagacctgtcagtgttcacccaaaacgcccttgccgagccaatcaacttgatccttctgctgatgagcagaagaagaaaaagagacgccttcggcgagtatctag

SEQ ID NO: 17210 - DNA, 708 bp, Zea Mays
gataaattggagctaccttttagaatatctacaagctcgcggatttggacaccgttggcgtgaatggattaccatcctttttagcacagcgagttctagggccctgataaatggtgttcaaggagacaacttcgaccacatgcatggggtgagacaaggagaccccctctctcccatgctattcatccttgcctttgacccaatgcaaaggattttagaccttgcttcagagcatggcgtcctgacacctctccctcttgctgcagctaagctcagaacctcgctctatgttgacgatgtggctatcttcatcaatccaacccgtaatgacctgcaagcggccaaacaggttctcaatgcgttcggagctgccacgggtctaacaacaaattttgagaaaagctccatccaccccatccgttgtgaaaatgtggatttgtccaacatcctccagccgttcccgggatgctgcaaaaccttaccttgccaatacctcggccttcaactccacacccgcccgctccaaaaaattcatgtccaaccactagtggagaagatcgaacagcgacttgccggatggaaaggtcgactgcttaaccacgcaggacgcctgaccctaatatcttcagtgctctcctccatgccgatctaccacctaatcgtattcccccttgcaaaatgggctagaaagcaaattgataagattcg

SEQ ID NO: 17211 - DNA, 462 bp, Zea Mays
gattgatgtttgccaggacaactgtatgcttttttggaaggaacatggcagagagcaaaaatgcttaaaatgtgggaagttgaggtacatggagcttgtaaatgaagatagggagaaggtggtgacaaaggttgcacataaacagctttggtacacgcctctcactcctagtgtgaaacgtttgtttctctcgaggaagaccgctatgcacatgaggtggcataaagattgtacggacagacaagatgggttaatggtgcacccgtcagatggtgatgcatggaaggctcttgacaactttgatccagattttgccagcgatgcaagaaacgttcgtatcggcttggcaactgatggtttcacgccgttcaatatgaccgttgtgtcgtatttatgttggcctgtcattgccataccgtacaacctttcacctgctctttgcatgaaatatgagtctatgtt

SEQ ID NO: 17212 - DNA, 442 bp, Zea Mays
attcatggtatggatcacacccatcacgttcgccttcctctcaacgtcgtataggatcgttcggattgagtcttggtggtgaatttgggctaacagcgtcggcacggctgcaaatcgaggcctccgccatgggcagggatctgtgctcgatggcggatgcaattggttgaggaattagattcagggagtcatcgatttggcaagggtagagctaattggagaatggtgctcgggatggtcggattcgcagtcccgacgatctcgccgccgcgtggtggctttgctctggtggtctgctgctcggggtagacgatggattagagccgcccgtttaatgatgtgtggttctgattagaacacgtgtacccgttgcgcgattcgatcccgaccgatggatcgagatcggatgggttacatcagaacgagcttaatccaatatggg

SEQ ID NO: 17213 - DNA, 384 bp, Zea Mays
ccgacagttatgctaaaactacagcagggaggtctttgaaaccccccttcgttacttcccacctagcaacaaaaatacccctgcctagaggaaaagacttcaggccctatcaggaagagatcctactgagaatgaccccaccatcgtctacatggccagatatctccacaccctcgataatcactatgacgtcctttcctcccactgtacccacctaaactcccgggtggagagcttagagcaataggtcaaggaacttaaaaaggagaaggcatccctccaagaaattctcgaaatagcagaaggtgaagaggccaacactcgtgaagcctaccgaaccctgaagatggattacgataagaagctaaagaagctcgcccccac

SEQ ID NO: 17214 - DNA, 643 bp, Zea Mays
ataacctattccacttgtgagttgttttgctgagagcttgagaaagcttgggactagttggagatgcctccttggagattcaagtgagtctgtccccttgtaccgcttgtgccatcccttttatagtccaagggaggcatgctacaggggagctagaccctaacaggtgggcccagtgttctagtattaaatatatacagcatggagctataagtgcaatggcgaccgagatctccttcccctcgtccgtcgcacgtatcttctgaccagatatgttcttcatcctgtttgccagcctaggcctgtagcgggatgttcttggtatgttgacgttgttggggcttggccggctgaagtgcgtaggagttaatgtgatatctctatgttgtaacctccatcccatattgtagagggagtattaccgaccgagcggtggctcatgatgtcatcaccaacacatatgagataactgcctcaataacccgtgttatcataagcaggcattaaatgcgcacggcgtggccgcgccattgtatgcctcggtaacgcgcagggcggtcttgttgggttgtttgttctgccagacgcctgttgcgctctgcgtatggcagagcatgccaggattgctctgcattaaatgcag

SEQ ID NO: 17215 - DNA, 386 bp, Zea Mays
ctcaaagaggagggatggcgcttcaaccctcacgagggagtcttattccgtcaaccctcggaaaagtgtgccatgcacaggagagttccccgccggtggtgtaactaggggagatgaagccactgccaccgtaaaagccaatggaggaattgttgccgttgatgtcgcctaggaagttgtggctaccgacaaaacagaggaaccccgcggggcagagtctttcgtagtattgaagaccgtcggaaatcccgcaccttgagtaaatgggattgccgtcagtcccataggttccagaagctgaatctcattagtcgcattcaaagtgggcgacaatccttcgagcatgagtttccgagctggtgagcttatccctttgtgtgccacgc

SEQ ID NO: 17216 - DNA, 519 bp, Zea Mays
ggagatttctctatccaatcacctacgacgcattaccagacaaccgtttgcttttcgtacatccatagaaagcaatagatttcatgtgtaggtatagctgaccacgagctaattaaggtcttcgttcaatgccctagctagaaagatatgtatgttataaggtttcggtatggatgaatttgtatttttggttgtatgtggttgctataataatctggtttacatcttcccagttacaattagaatgtttggttctactattcagtcaatgtaatctagttttctatttctgtttacgatttagcgatcccaatattacaaaaagatggcggattcgcctactaaaaatgtattgctgaccgactactaaaaaactcctcatcttccgtccccttctgctctcttctgttgttggcccacattcccctttagatttgcttctcttgctcctaactttttgttgcattatatataccttttgacaacgtttctacttaaaattgctggtggcagcaaaag

SEQ ID NO: 17217 - DNA, 507 bp, Zea Mays
gataactccagcccggcatcaggcacatcagcacaaatatccatcattccaccatctgccggctctgacaacagatcttctgggaccatatcttcaagagtctgatcaaagtttgtcagagacaattcttgcagaccaatgagggcagacaaagctggagaaggaacaccactgctttccccgctagctatgtagcgtcggctgttcttccgaactagagggatttcatcctcctcttcctcatcttcatcaacaatgcggatggtacacccattggggtcagcatcatctaagttacacccattggggtcagcgttggtaggatcacacccattggggttagcgttggctggatcacacccattggggtcagcatcatctaagtcacacccattggggtcagcttcagcaaaaactggtactggcacttcctcagcagcaggagcagaaggaccaacatcctgatccaagcatgacactcggcgaagacgtctctttttctttttc

SEQ ID NO: 17218 - DNA, 434 bp, Zea Mays
actagaccctgcaggtcccgagcatgtatcaaaggatggctagtgtcagatggtgggtcctgtgggtgtactactaatgctcgctagtcgaagctgtgtgcaggcccagggggccattgctaactctttcttaggtacgctggtctgcagcctcgacaaatcgagcctacatcccaggggggccaagcaccaaggaggaatcggttacaccacacacaacagggacaagtggtacacagataagtgctaatactgctaatactgcttgataaatagtactcaaaagtaccttacaaaaagcaaaagtattacatccgccttcaagtggagtcctagctccatctctactctacaggtatgaactacctccacactagtagggccgcgtgggaagctagctccggacggctcaccagcggaggcgaccacctctg

SEQ ID NO: 17219 - DNA, 776 bp, Zea Mays
ccctttgctccagcagcttgccatttctccctcttctcattgacaaaatccaagagcatggtgaggcttggtgacacaccatcaaataccactccgttcctatgcttccaaatcaaccatgccccaagaatgaccagagagtccaatccttgtcaagccagacacaatggctgaaattcttttccaccacaataggaagtgagtgtcatcatgaagaggagccaaactttcttagaatgttataccagcacacccttcagaaaacacaagataccagcaaatggttggtctctggctcttaatcacaaatggggcatctaggagggtgattcaagcctcttttttccagcctgtcagcagtccagcatctattatgagccaccaacaacaaaaaagaacttgcatttgggggtgcccaagacttctagatcctttgataatgttcaaaggaaacagatccaaaaagaggccattgtatacgaactagcagaatattggatatcgggggcaactgaaaaaatatgtttatccttagtattaggttgcaacaccataccagataaagagttccaaaggtgaagatagtcagtcaaagctcccacagttaatgcccctctaatatcagcaatccaacctctgtttaacaaggcttcttcatttggctagcctctattaatcattgttggacgactgatcgtctagcccgtagaggtttgggccacccccagtgttgcttactttgtgataagcaggaagagacggtgcaacacttgttg

SEQ ID NO: 17220 - DNA, 369 bp, Zea Mays
tagtctaaaacccttaattttttccatcagcgcacgattggacgccgcattgtcttctacttctcgttctctcgttctctggtagcacctgggctgagcggctgggcagtacgccgcactctggcggtctagtcgagcggccaacgggcagcggggacaggacaggacagccgtccaccactccaccaagcaccaggcgtccaggcaccagcaggtagcagcgtccgccgccgagtttcttaatttctttcacccgttctttgatgtttgatccagctaggtgcctaggtaaaataataaattagataattaccatttaccagctgtcaattatgtttatttggggcattgtcattatgtaattttgca

SEQ ID NO: 17221 - DNA, 482 bp, Zea Mays
ccggaatccatgagccacgtgttctccaagcctctgtcctgcatcaatagtaatacacggggtgagcaaatggcacaacattggggaaagtaaactgtgaagaatactagtgctgtggcatttgcccctaaaaagtgtttgggaaaacactaaacatccccggtctcgaagggaagcgatcaccacatgaaagaaattatggtccgctggggaagtaagaaccaaagcctctgtcacggggtccttggccatatggcacacaaccagcacctcatcagtttttttttttacacgtggtctcgctgcctgaggcctagcagccataggcaaaacacctctaggcctcgcaggacatctctgaacaggctgagcatgaacaccatgagaggggcggttcatgtccttcctgctcgactcagaaacccgccgctcatctctcttcctcctaaaggaaaccgaagctagatgcccatccctctcac

SEQ ID NO: 17222 - DNA, 426 bp, Zea Mays
ctgggatttatcgcgtggatgagaggaggccaagagtctgttggtgtgggaacgaagcgaatgggtgtgtgaaacgaggagataactacggtggcatcgaggtgtagaccatgaacgacatataattttggacaaataaaatgagctaaaacgccagttaaaaacttggacggagggagtacacactatcggttgccttcatgccttgtccactgccagccagccagccagggcaaggtcgtgcggggatgatgaggaaacgcagcttttgcaacgacacaggtaccactagtagctttctgccaggggcatcgggcggtgcgctgatgttccaacgaccgctacaaaggctgccgataggacaaggagtccaggacgcagtgcagactagcggtgtgggtatgattggaggcacgatattagatc

SEQ ID NO: 17223 - DNA, 632 bp, Zea Mays
tcccgaccttcctcgtctcttgtcccgacaagctcatccgcatggacgtgcgcctacaccaccataggagcaaggcgccttggcaagggtacaaaatggtggtgtcaagtgtcattgtgacaaggtaatatgacactatgtcattcatgcgatgcaggtaggcgggacaagcgtggtgaagcatagagtagttgcgtttgtgagacgtgcacttgtggagggacgaagggcaaggacaacacagcgtgcgggggttggacctagatggtatagtaatatgagtttagagagtctaccacacaatttgcaagtacaaggagcgagatgaaaacatagaacaagtttagggagccgagcgtgcaatgcaagtatcgacactaagaattcatgacaagttttgggagttgaatgtgcaatatgcaagtactaggggcgagatgtcaacatagaacaagttcaaagatagccattgaaatttactcttgtagagacattcctctgtcggtttcctattcccaacaacttatagggtgaaagggtctgtagtctagtgggcgcaacaaccttagtaccaccttaggtattaggctcgactacctgtgagatgcgtctaaacatgcctaggttagaaa

SEQ ID NO: 17224 - DNA, 639 bp, Zea Mays
ttgaatttagactatatccacaacaccttgtgagtgtttgtttccgactaatttttccgttgaggcaatttcgttcgttttcgattaattttcggctgtattggttcgtttccgcaaacccgtataatcttgactcatttacgtctgtggttgttccaatcccgcacccgtttccaacgatgtattgcgggagcggaaacgagagattaagggagggggttttttccgtccgttttcgtcgctaagtctgaggccaatagtccctgttagcctattgtaattatagaatgtgtaattatagtaggccttgatttatggcatgtatgaggtacggttgcttggctctcacgccaccccttgcctatatgtactcacgtatattgatggaatacaatcaattattccactcttacatggtatcaatcgcggtttcgatccgctactcttccgcaacctattccgcgcctgtcgctgatccgatcgttgctccagtcgcagacgccatcgcctggagtattgccgatccaatcgccagcgttgtgctgtcaatccggcctcacacgacgccgcacatcaccagcactcccagccgatcgcccgccccgtgctgaccttctcgccgggtgtggtcgccggtca

SEQ ID NO: 17225 - DNA, 658 bp, Zea Mays
gggttcgttcgatccacaggacagttcgacgctgtccaaggatggatgacacagatcggcagcaaatcagcgagcgactaatcattgggcaggggacgccacatgcacggtccgtggtcgtgtcgagtacagtagtgtacagccgggtaatggacgtgccgatcgagctggatgatgcgtgtagcagcagatcgagcctcctgattgattgatcgatcgacgaaacaagctgtatgctgctgtaccttttctcgcgagcgtgccagcagcattattgttgttcctctcgtcattacccatctgtggctgtctgcagggggttttaaaatccgatccccgccgttttgcctttagattccgtagcacacatatgagtttgtttgttttaagatttttttttcttttgctgtggtatacatttatctgctgatgacgtaattattggtttttacgttattggtatacattttttcttggctgtccccttttttttgctgttttgtttctattgctgctatctatttcctttccttgctgtttttcgtttaaccacaagtcacggcattgcttttggcgtgtgatgtgatttgtgaatatgcgagtattctccgatgcagaaaaggcacgcgtgcgtgatggtcgtggatgaatgcaccac

SEQ ID NO: 17226 - DNA, 507 bp, Zea Mays
gacctcgaattccgacgcttctatcggaatgacaaaagaaagattaatgaatcatcaaaactcacccataacaaaaagttcgggatatttctactgcatcagctcctcaagttcccaagtagcctcgcgctcagactgattagtccacaagaccttaacatatttaattgatctccttctcatgacacgctttgaggactccaaaatacgcaccagacgacactccaaagtcagatcctgctgcacagcaatcggttccatctcgatttgatggtccggatctcgcaaaaacttcctcaacatagagacatgaaataccgggtgtacccctgccatggaatccggcaattgcaagcgataagccaagctgcccacccgggccaagatagggaacggtccaatgtatctcgggctaagcttttcggagacaccgaaccgaacaactcctttagtaggtgataccctcagaaggacttgatcacccactgtaaattccgagtctcgcct

SEQ ID NO: 17227 - DNA, 277 bp, Zea Mays
gtttgatgccaaccaagggattgaagtagacaccagccaacacctggttgcttgctgctcttgcacttgaaaaggacagtgtaatggtcctcgatggcgaccatagaggcgtcatcgaattgaacggtcatgcagacacctatgttgagcttggagaaggatatctgctccctcgtcatgtggttcattgcgccgatgttagggattcagcatgtgctcccgccaccacccttctcctcgagccggatgaagaatcgattctcatcgaggtggatct

SEQ ID NO: 17228 - DNA, 555 bp, Zea Mays
tagagttcctcgttgatctgatagtaatgggtacatgggatgtagacatagatgtcatcctagggataaattggctaaccaaatatgaagcaagcctgagctgtgacaagaggactgtgaagttagtgtccttatcaggagaggaagtgttggcagagctggtcttgtctgaaccaaggaaaggaagctatcaccatgtcattgcccatagtgaggaagtcaatccacttgaagctatcaaagtagtatcataattcccggatgtgtttcccgaggatttaccaggcatgccacctgagagaaaagttgaatttgccatagagcttatccctggaaccacccctatttctaagagagcctatagagtgtccggaccagtattggtgcaactcaagaagcatatagacgagttgttggagaagggttacatcagacctagcacctcgccttgggccaccccagtgttgtttgtggagaagaaagatggtacaaataagatgtgcatagattaccgagctctaaatgaagtcattatcaagaacaagtaccccctgt

SEQ ID NO: 17229 - DNA, 365 bp, Zea Mays
gccatgtcatcactcggccgttatttccaaaacggccgacgcggctcaaattgactcagctgttgtttctaaaaacgctgacgctatctgacttcactcggccattactttcaaagcggtcgacgcggtctgttatcactcggctgttacctctaaaacaccgacgtcgccagtaatcgttcggctgttacctctaaaacgccgacgtcgccagtaactgctcggtcgttatttctaaaacaccaacgtgacccattaccactcgtccatcacctctaaaaggtcccgacatcgctgataatcactcggccaccactactaaagcgctggcatcgtgaagaagacagtctgaagcacggctcaac

SEQ ID NO: 17230 - DNA, 653 bp, Zea Mays
aaatcgctgtgtttgatctagtttgtgtcgtactaattcataacaattttagcgatcaaaagtaatcatatataagaatccatccctaaccacagcacacccactcctcccaacctcaacgtgtgcatagcacgccccccttccccatgcaacctttgatttgaagagaggttaccatgcaaggtctccccaatagatatgcttcaacattgcatcgaatgctaattacttcaaaggctattgctattgctgcaaaacagtagtgacgggaagggggttagttaaccacgtcctgctcagcccaacagcaaccaattcatttaataaaatctcttctggagggaggcatagcttcagcttcttctcctcccatccttcccttctgcatatcctgctgctgaaacaggagtgagaaagagagaagaaatgtcattttatcctcggaaggatctagttttgtcccgatattgggaggattgattatctttctcctccccttcatcatcatcttcatcccctcgatcgaccctctcagcctgaacaagatcagctttgcttatctctgaattgagaggagcatgacatgtacgccttcaggtctatctcgtcttccctcccattttcgccttgcaccatctgcacctcctcgatgg

SEQ ID NO: 17231 - DNA, 687 bp, Zea Mays
tacctcaaatcatatggttcacatatttgaggatttgcaaatcaaaccatgagatttgggcttatttgcaaaaagccactatacacctctcatgtgactaagtctgaaaaccagtgaacagggctgactttggagctctgtagttctaaaaatattaggaatttgcctagggtcaacacatcaaacttgtagagctactataggagtacaaatttgactaagtgcttaagccttggtattgtacaagattaggagttaaatgggtctgaagtctggctgtcagataatgcagaggctgaatattgtataacagtgaagttgggcaacctttgagctgggattcgactgtgatccagtaattgtttggctatggttggtatagcaaggttatagctggatcatagggctacaactttgacacagagagcaggtcgagtcactacatgaaattaggagcaaatctccctgcaagttactctgtcaggctgactgaatgaggatccaatggtacagtgcactgaaaatatcccaatccactgaacctcgccgccgacgagctgtgcgcccggatttgcaccagccgcggtgattcgtgcccagcgcagatggataacgaagaagggtagaaatatcacatcgtggatgaactccggccactattctactccggtcgtcgtacctgcctga

SEQ ID NO: 17232 - DNA, 644 bp, Zea Mays
cttcgccgtcctcgatcccaggtactcctcactttgcaacgctacgcactcgacgaccatgtccccgctgacaccgtttcccacctgctcttgccttggcgtcgatggactacatggtgctcttgtggctttttggcaccctcaccgtcgagctctaggatatcgtccacgagcggggggcaccgctcgccaggtctgggctaccttcgaggcccagttcctcggcaaccggaggcccgcaccctccactagtccacttcgatgcctccttctgactcttctatcagggtgacctctccgttaccgagtacggtcaccagatgaagggcatgacagtctctcttcgagatctcgacgagcccatctccgattgcacgcttgttctcaaccttcttcatggtctcagtcggcgctatgatcacctgaaggtcctcaagtgcttcatgcccttcctgtccttccacaatgtctgcaatgagctgcttctcgaggagctcactttgggcaccgaatccaccgctctgccacaaccctctacgacgtgtcctccggcagccagcccccgccctccattaccgatgggcctccttcgtgccctcctgcctccacttctgctcctagggccctcgtcaggttgccagctc

SEQ ID NO: 17233 - DNA, 472 bp, Zea Mays
atttgtgcaatctgagaactgagacgcgacagtaaaccgattgagtggtaacatatatatcttctttgcaacagggaatccttagtgatggatataccattgctgtccgcagactccttagattccagggaattgagatgaaacaattcgacaatgaggttaatatactcatggagcttagacacaaaaatattgtcaatctcctgggatactgccacgaggttaggggtacgtacgtacagtacaaaggaaaacctgtattcgcagaaacctccgaacagttgctctgctacgagtatctgcactgtggaagcatcgacaagtacatttttggtatgattacgaagtctgatgggattaaccctttacctgctgcttaatggtagattcacttttctaaatgccataccccaccaaccatcagccaccaaagacgttctagttttatttttagtcagagcatcaagtttga

SEQ ID NO: 17234 - DNA, 716 bp, Zea Mays
cccccgtgagcccacgttcacctccctccgctcgcggcccatccgcccgcaagcgccacgctctccccctctcccgctgaccgaccggccccacccgtcagctacaaccgccccgctctctcgcgcctctctccctctggcagacgggcaccgcccatcagccctttcgtccctgctcgtgacttcaccggtgcaaaccccgccgaccgccaccctctctctctcatcgccattactcccgctctagcggagttaggcaccgcttcgccctccctgtgcactgtgcgagaaccctcacacgcagcttgccccgagcggtctcatccccggcgttgtgcgccatcatcgccgccgttatgcccctcgccggcgccagctggcttttggccgcttccttccccgggcacctataaaagggatcacctgagctccacctctccccgcaccggcctcgaccactccctctcccctcccttggacccaatcgagctcggcgtcgtcgtctcccttctctctggtgagcatctcccttccctctccggtggcttagagtcaaattaatatagttcacgaacttcaccacctctccacgaacacagcacactctcctccctcacctatcccgccccgtaagcctcgtcggagacctcgccgccgcgggagcccgccacctcaccgtagatcggccaacccaagcccccaccggtcaaattgac

SEQ ID NO: 17235 - DNA, 415 bp, Zea Mays
atctggatttgatggaaaccagagtaagcgtctaagaatgacaataggtcacacccggaggtagaatccacgatttggtctatacgtggcagtggatacgggtccttgggacaggccttattcaggctggtgtagtcgatgcacatccgaagcttcccattcgccttggggacgatgactgggttggccagccatattgggtgatgaacctctttgatgaagccagcgtctagcagcttccggacctcctttcggatgaagtcctgccgctcaacagactgtctgtgaggcttctgactcaccggcctggcgtcggggttgatcttcagatggtgctcgatcacctccgtggggatcccatgcgaacacgtcagtatttgcctggaggaaggcgacgacggcgagttcctatttc

SEQ ID NO: 17236 - DNA, 1431 bp, Zea Mays
ctgcttcggtcaaggtgaccgccattcaatctggccttggtgacagcaccagtccacttccagccgggatccctatccactccgttccatccctcaatctcatctgctactacactctcctctatgcacaccacggtggcaacaccatatcactatcataacatatgttttcccacaactatcttgctctaacttaaaaaagttacactcagtaatcagcatgagctttctatatcactaaaagaatgcaaaaaattataacagtaagaggctatgttcattaagaatgattgagatcatatattgaggacttgagacatagcattaccatttttcaattctccccacttactgcactgaatacatgcaactccaacaatcttctgtactggccttgttcaatctcagcttcatttgcaccatgcagtagcaggagctcaatgatgcaatcttcccaatcaatactgtcacaggaacctcttcgtctctttttcctagcacctgaacaacctgtcatattgtcactgggaaggatatgatcgatatcatccttcttctttccccctcgattcttcatggtcaatttttttcttacaacgtcttctgagttatttgcttttgcagctggagcagcaggagccttcctagttgcatcaattcgctgcttagcagcttcaatacgtgctctcctctgcttctgcaactccaaaccagcagtaaacgatggtggaggtgcatcatagccaacgtcaatatccaccacatcctcaagcagcatgtcctttctccaaccattattcactgtgtccatgcatggctccagctccagtcctcctttcaatcgcttcctcctgtcagtacctttaccaaccttcccaagtttctgtagctgggcaagcctatttaagacattttggtaagcatctgataggcccttctctgagatattctgattttcaaattctttctcctctggctcaagattatcgaaatcaaagtcatcagaacccactggagtaatgtgaaggtatttagacacttcgtcatcaactttagagttagcctgcacaattgcagcaatgttcggagcgcagctcataagaaactcttcagaagggtccgattgtgaccgcatctccatgagccggagcaagaccggagcgttgaggagcaggttcttggcattgacatcggcaccccatggaagcaggtgccccgcgacatgcaccagggcgtcaacgagctccttgtatcggagcaggctggtcctcaatcctgccgagatgtcccttgcaatgtcctccaaagagacagaagtgaccccgttcacctccgcagagaaggcgagcagagccgcgacgaggggaagtggaaaccgccccgtggtgagcgaccacttggatgcgcagcggaagaggaaccgggcctggg

SEQ ID NO: 17237 - DNA, 293 bp, Zea Mays
gtggcgactggatacggcctcgaatcatgcagcgcttcgccccaccatcaccatcggtgagccatcctttcctctgtgtaccctcttcaccgcttgttgatgcttccggggctaggctgggcaacctgtgatttcggtggggggagagctgaagaagaagggggggtccgatcgccggtaaaacctacctgctcgtgatcgtcgtcgtagtagcttcatgtagctttttgcattttggataaatgatgaccagatcgccgggatggatgtctccggggaggccctcgccgcgg

SEQ ID NO: 17238 - DNA, 431 bp, Zea Mays
aacagctcctatgccttatcacaagcatcagtctcaaccacaaaaggtatctcaaaccttggtaaggccagaacaggtgtttgagtcatggccttcttaagatgttcaaaagccctctgagcttcaagtgttcacacccatgccttcttgccttgaagtaatattgtcaagggctttgccaaagtaccataatggctgacaaacttcctataatacccagtcaaaccgagaaaacctcttaactcagtgacagaagtaggcatcggccacctgaccatggcctcagtcttggatggatcagtagcaaccccttccttagaaataatgtggcccaaatactgcaattccgcctgagcaaacacacatttcttccttttgagataaaactggtgatgccttaacacagtgaaaacttgcttcaaatgttgaac

SEQ ID NO: 17239 - DNA, 550 bp, Zea Mays
gcaatccagtaggacatgggtcagatcagcgcagtccgactccggtcgaccaaaccgcaactagccccaagtcaacaccattgctagtcaacaacagactggagacacccgctcattgccaagagtaccccacacaacagggtcatgacagcaaccctagaggcagaggcaaaggccgagtcccgcaaccgcgaaggttctactgcctttttcacgacgaagactccacgcaccccaccagggactaccctgaaaccaaggctaccaaagataggatggccaaaaatcaactagctaacaaccaacaagtcgttgcacacacctaccacccccaacaataccaccagcaataattccacaatgaaccattctacccccaccagcaaaaccatatgtaccagcaacaccaagagatccaagtccttcctccaccaccacatcaccaaaatactccaccactcccaccagtaccgaaacaagaggacttcggtgatcaaccttttcatggggtcattcacatgattaccggggttcgagcgcagactttgac

SEQ ID NO: 17240 - DNA, 622 bp, Zea Mays
ttcggttcctgctgctgaggaagtgcctgtgcttgaatttactgacgctgaccccaatgggtgtgatccatctgccgctgatcccaatgggtgtgctccatctgccgctgatcccaatgggggtgttgtctgtgttgctgatgaaaacgacggggaggaagaagatgaggtccctttgactcggaagaacagtcgacaatatgtcgccagtggggaaagtagtggagttccttctcctgctctgtctaccctcattggtctacaagaattgtccctggcgaactttgatcagactcttgaagatatgattccagaggatctgttatcagagccagcgaatggtggtgcgacagatgtttgtgctgatgtgctcgacgccgggttggggttatcccgggcagcgtcccacgcctcatcgaccttgaagcgcggtcttgagggtcaggaagctgacttggatcatcttgttcccatggaagtaactgagggaccttcagccttagaggcggctactgcagagaacttggtcctcgagggtggtgttgtcacttacccagcccccgagggtgttgccggggatgattcggctcgagtgggaagcgcaagccacgacccagccccc

SEQ ID NO: 17241 - DNA, 717 bp, Zea Mays
caccggcatcttcttctgagtggtatgctgattccggtgccggttcacacatgacatctgacgctggtaaactttccaatatttccccaccttcttcctttactccttcctctattattgtgggcaatggtgccttactccccgtcactgccactggatcatccattttttctttaccacatcgtaatcttgttcttaacaatgtcttggtgtctcccaacattattaagaatttaatttccattcgtcgcttcaccactgacaataattgctccattgagtttgatccttctggcctttctgtgaaggacttgcacaccaggaacgtgatcgccaggtgcaatagctccggtgacctctacccgttctatctaccatccaccagcacctccgcgttcgtcgctgcacctatttccctttggcatcgccgtctcggacaccttggccatgaagctctgttcaagctccttagctccagtgctatttcgtgcaataaaaatgatgtcaagcatatatgtcatgcttgtcaacttggtcggcatacacgcttgcctttcagtttatctagctctcgagctgtttgcaattttgatttaatacactgtgatctttggacatctccccttgttagtgtgtcaggctacaaacattatcttgttattcttgatgattgttcacactacatttggacgtttccgcttcgccagaaatccgaga

SEQ ID NO: 17242 - DNA, 344 bp, Zea Mays
caagaaatgtggttattgtttgtgtgcttgcagatgtgtgaacctgatgcacacacatctgatgatgagagggaaggacaattgcttgttgccctatatgatgtagacatttgggggagctcgtccagtggggtttctagaagaacaatggttgaaacaggtattcaatgggttgagcgaactttggagaatagtaacgactgctttgacatgtttcgcatgcggcgtactgtttttagacgtttgcatgatacgttggtggaaagttatggtctgcttccaagccgtggtgtcagtacaacggaagctctaggtattttcttgtgggcatgtgggggtccaca

SEQ ID NO: 17243 - DNA, 742 bp, Zea Mays
gttttttggaatggggcagccgatgcccaacttccattttcagttcgacctcaatattcctcctgaggaaggaatcaatgttgaggaaaatgttgctgtaaatgatgatgatggctgggacccttggcctgttgagcaggctcatccccctgtgccagaggtcttaccaaataatgtaaacactgcgatcaatgaagaagaacagttcagctatcagctatcaggtcttgaggatctcccttctgacgattcggtgggctattttaacgatatcattatccctcagggagtccagttccagcaggatgaagccccggcgccggctgaagcggttctcgccttgcctgctttccctcctgagaacatgaatttggagggaaacaatgtcgagggacatgacgacatgcaaattgaggaaaacatcaatgtgggcctcatgttgcacttggatcaaaccatccctgatcctgcttttgaagatttcatggccagaaagcgttcctcctcttgggctgatttgttccctgataatgatggctcagtttctgttccaaaggtttgggctgctttcttcatgggccttttaatgaggccgaattcgtttgattgggccagaaaattcctattgtcgggagctatctctgcattcgtcgcacccagcatggacaccatttcaatcaggattccctctaactgtcttcctccccccagtcaggactcccctgctaagcctcaatcctct

SEQ ID NO: 17244 - DNA, 324 bp, Zea Mays
gccgaggaagtgccagtggagatttttactggcgctgatcccaatgggtgtgacccggctgatgctgaccccaatgggtgtgaccttgatgatgctgatcccaatgggtgcaatccggccagagctgatcccaatgggtgtgttgttcgtattattgacgatgaggaggaagaggaggaggaaatctccttaattcggaaaaacagtcggcgttatatagtcagtgaggagagtagtgatattccttctccagctttgtctgctctcgttggtctgcaagaattgtctctggcaaattttgatcaggctctcgaggatgtggtc

SEQ ID NO: 17245 - DNA, 461 bp, Zea Mays
aacgatagggcctgatatgcactggggtagctcctggcaccaagggcatagtgtgatcacaaaaccttgaaggaggcaagccgactggtggagcaaatatctctacaaattcagtcaacaatgacaccaacagaggaggcaacggtaactcttcaaaagaaggaatgaactgatccactgctgttacctccacaacttaacctagcagaagaacaactgataacccatgtagtagcgctaaagaattatggtacgagatcaccatccaattctgtaaccaatgaatcctcatgggactatgcatggccaaccagtccattcccacgatcatgtcataagaggatagatccaatatgcgaaaattagtgagaaagtcacactattgaacagacctagcagcattcaacaattgttgagagcaacgaatgcgaccaccatcggccacctgcaccagaaccgga

SEQ ID NO: 17246 - DNA, 285 bp, Zea Mays
tctattgcttgccttcaatgttgctttgagcgggtgtgtcggggttcctcttcggacaagcattgtcgtagtgtccaacctcaccacacttgcagcaagtggtgactgtaccctatccagcaggtctcaccagggtgctagtgggggcagcctgccgagtatgcgaagtttgtggagtcgcttgtggtgtataatgagcaggtcgttggtatgactgttgctctcctctaggacgagctggtataccctagggtggaacatagcaaggacgaatgctacttctcc

SEQ ID NO: 17247 - DNA, 615 bp, Zea Mays
cactgtcggtaccctgaatcaggggtaccccttactacagtatgaagacacggtgcccgtgcgactatctctagccgcgcggtgaacaacactcgaccccaacatgtgggccgttacaaaggacgccatgtggacagaagaggtgatatactccaggataccatcagtaggtccggaccccctcaagaaagcgtcggacccctgtacacatagcccggacctccgagtacggcccgggactcccaagtgagcaagccgaactccttggatgaggtccggacccctctaagtgaggtccaggccacccacagcaaggtccgggatagggaataccctggcctaggtcaaggacaggcgagggtctggtactggcacgtgcccaggctttatccagtgcgcttccactccccgctcaggcggaggcccgatgctgccacatggactattgcccgtgacgtaagccagcgagcggagcctgacgtaaggcctctgggccgtgctgcctctgcatttactgcagagaagacacgccacctgtctatcccgctgacaaacgatgtgcccccttagcatttaatgtgtcctgtccactccgctggcaggcggcgtccaggc

SEQ ID NO: 17248 - DNA, 562 bp, Zea Mays
gcagaataggttttggagattttaagtgtaaactgttgtctctgtgatactgaacctcggttgctgcgcaggttccgacgtttgggcctgcgcaagcaaccgctgctgactatactgattttgtggcggcctcaaccatagtgcctgccaatgataatttgtctgtttatatgtctgatgattttgagtccgatggtgaatctgggagtttgtttccttagacggaggagtcctcggatgaaggcttggattattttgttgcgttggatgtggctgcggcggaggcttcatcgtgtatggagggtgccggggatcttcctagtgcgggtggagggcgtatgcggtgaagggtggtggggaaacatagtgtgggtgagttttcgtggagtggcaggcgccgtcgtattgggatggagcgtgaccgtctccgtgtaaaccgggttgataaacgagaattgttgtcctcgtcggctggggcgagcataggcgagggggatcttcgggagctttttgagggtgaggaattgaggataatgctgtttaattacaaggagatgggtat

SEQ ID NO: 17249 - DNA, 461 bp, Zea Mays
cgcggaaccaccgtttctgcctcgctcgagcccgtctcgggcaaggaagacaaccccgagccaggcctcagccaaaggccccaggggtacatgagcattcaatgtgcgtacctaccccgtgcagtgtcacaggcgaacaggagcgacaggaccgctgtcccatcggctttcaccaactacgatgacgcatgcctaggtacaacggctattattcccccacgtcgtctgccaactcctgatgggacgcgtgtagcacagagcgtgggctgaccctcggggagaaactccgatattggcacttgcctcaatcaacctcagggacttgggatccttacctctcccaaccaacttgtactccctactgcaagcacttaggtacaagtaatataagacgcatccccctctattggaagtaggactttgtctagcccaaaccaggataaacaacttgtgccaccttg

SEQ ID NO: 17250 - DNA, 539 bp, Zea Mays
gacatgtgagccaactgactcggcgcatgacacataggctagactcgctgaggacttcaccgagcgaattaccgggggtaagttggggaaagacttgattctgatcagggttggctcagggagtgcaaagcgatgggttgtgagggatatacctgtgttgtgcagctgcgaagatgtcgtattagcctgagtggcgatggagctgcttatattcccttactcgcataacatccccgatgtcattgttgcagcaatggatccgaaggggaaggtgcctgcttcaatctacggagtggcgaacatggaggggcggacaaagaagtggaaggctcgtgctgctgagcctttcgtcatcgctacttcgctaggtcccaaagagtcaaggactacaatgattactggggtgacgacaactagagcggtcaaaggggctctaacacccaaaatcacattttgatgatttaaagaattatataaaaattttgagacaaaatgtcttttaataataattttatttctttataaaagtatattcccct

SEQ ID NO: 17251 - DNA, 805 bp, Zea Mays
gtcaggctgtcaggctgttaaagtctgaatttcagactgacagtgcaactgcagtgactttgggcatgaattcaagcaggattgagcaagaatttgcttaggattgctataacaatattgtagctggatcttagagctaaaactttgctaaagggtgatgatcatgttactgcacaaaatcgggagtaaacagccctgcaaatcgctttgtcaggtgactgaatgggctttcccatggtacagtaacctgaaatggatcagatcaagcactcagctcaccgccgacgatctccgccatgattcgtgttgcctgcgtctcgattcgtgctcggggtaagtgcataacgtctcgggtagaaagatcatcaccgccgttgagctggacaccaatccggctagccgccgtacctcccccttgttcaccgatcgctcgggtaggatctcaccgccgttgatccctcactgccgtccgccgcgtgtccaaacactttaccacatcgcagctaactatgctacgcacgtccgatgatcgccggaggagcagccacggtaattgccacgttgcgcggccaccagtgactcacccagttcatacctatcgcaatccgcgctcctcctccgattccggtcgacgacctataaactgagcaaggattctgcttcttcaccacatcccgcacctcagtaactgagcaatcggctcaatttcaccggagaactcacgcagcccacaaattccctcctccctgttcttaactccgccgtgaagaactccaccgtggtcagcgctcttcgggttagtaac

SEQ ID NO: 17252 - DNA, 662 bp, Zea Mays
gtgaggtaaggccaagtttgatgcgccatatctttgaatccactcggttttagtccaagaatcctatagttagtttgtagactgatatatggtgaacaaatcttagtaagggagattgctctgttcttaacaagaatttagagattaagaagggagaagatggtcggttcaggcgactgaagaacaatctccatggtacagtgctttgagtggatcagtacgccagattagctcgccatcattgatcgccgtcccgattcgtgcgcggtactggatggataacgccggggaaagggtaactcgtacgtggcaccatctcctgagctcagccggagttattcaccggcggccaccgtgactcagtgagctctcgtcgtgctgtcgcacatgctttgatttgcctcactgtgcctcttccttacgtggttgccatgcgttaacagcccacctcgtggccgcggatcgatcaccggaccgtcgtgcctatatataggatagggagccacggcgaggtgctcgcagttcttcaagtaagcttgagtaaaaccaggaattcacacagtctccttctcctcccctcaaattgattgtgcacggtgaaactacagtctcttacggccgtatagccccgatcccatcttccaatttcacccagagccgcc

SEQ ID NO: 17253 - DNA, 412 bp, Zea Mays
gcttgggaccctcagattcatgatctgtggctacgatgcattgggatgaaaggggtgtgagaggttataatctgtgacgctggctagggatccaacggttctcgtgcgcccccccaaatgcaaaccctaggcacggcggagtcgaggtccatggtggcgcccccgccgacggcgcacgacccagtgcataggtgccctgaaacacgaatcaaaatcggatttacaaagcggtggctacgacgaacctacagaaggaggtatttccagcaactgtggaacataagtctctggccacgatacctagcgggtgcaagacaacgatttggctgcgatgagtgattccggcctcaccagtttaccaccgcgctaaattctgccgcgcccgggttcccggcggcccgctcgatcactg

SEQ ID NO: 17254 - DNA, 548 bp, Zea Mays
gttttatttgttggtgcatttaatcttggaaaccttgaactttgaatcaaatttaactttcgaatttgaaattgggataaaactaaaaacataaattagaaaaaaaagaaaagagtaaatgggaggttgggccgattgctcccttgcccatggcccacttccaattccctgcatccgtgtgggccacgttctcccggcccagactacaactgcaccgtgaagccaaacgcacgctcctgcttcgtcgctgactgtgggcccgctctgaccgggatctccttcctcgcgtgagcaccccagccggaggaatcgcggggttcgttgaggtccggccgatttccctgcttctaccgaagtccgtttcaacagaaaagaaaatcccaccagtcattggctctgggcgctattggtcgttcacctcctgccgcaaccacctaaccgcgtcgcacgccgccatggccgcgcggaatccgccagctcggctgaccgtccctgcggactataaagccaatgtggccatgggactcgttcgctccataccctcgcac

SEQ ID NO: 17255 - DNA, 486 bp, Zea Mays
aatttccctagttccgctctgtgctcggccaattttggcatcatcggtgctcggtcgtggtggtccggcgtgctcacacggtggctggcccaatttagcccgatctagttccccggtgtaggttcctgtgtcacccctgcctctgctgaagctttcccaagccttagcatgcctcaagccccctcccggtggctagaatgcctcaccggagttcctccggtccgcccgaggccttctctcctccgttctccgctctctgccctcggattcgtggccttttccccgccattgagttcgtcgtggcattctctccctttgtgaccaattctggcgaccccggaaccccccaagcacacgcctgcctcaactccggcgagttcaccgccacggagaggagcagcgccgccagcagccgttcatcctccccggtctgattcccccgtccgatcttgatcgaacggcccagatcgcggataccgcttcgct

SEQ ID NO: 17256 - DNA, 614 bp, Zea Mays
ctaatggaaactattgccaatattattgttcttgctgtgaaccaatagtattgttcttcccctaacttaattcgtgtgcctctaaaacagattggtatggcaagtggactggaaactctatgcggtcaagcctatggagcaaaacagtatgataaactggggatgcacacctacagagctatagtcacactcattgctgtgagcattccaatctcacttctgtggggcattcatagggcaaactcctgatcctcataggtcaggaccccttgatctcaagggaagctgggagatacatagtctggttgattccaggtctctatgcatatgccatcagccagcctctcacaaaatttctacagtctcagagcctgataattcctatgctttggtcctccattgcaactctgctcttgcacattcctctttgttggttactagtgttcaagaccagtatggggtacattggagcttctttggcaataagcttgtcgtattggttaaacgtgatgatgcttgccgcttacatcagatactcggattcttgtaaggagacccgctcacctccaaccgttgaggccttcaaaggagtcagtgtgtttctacgcctggct

SEQ ID NO: 17257 - DNA, 474 bp, Zea Mays
cagctgaattggcaccttgtgcctgcctcgagccatcccgtcaccccgtctgcccgagccatcccgtcgccaccactatgcaccatcatcgccgatgcggcaagcgtcgccggtgctcgccacctctcctctcccccctctcaccagtcggctataaaatggaccgcccaagctccagcttccttcacaccagcttcggccacctctcttcccttcccgagctcaatcgagccagcacgccgccctcttcctccgctccggtgagccctccatttcttctctggtagcctagagttcaattggtttggctcgcaaggttgaccgctccatcacgaacacggcacaccctttcccttcacctattacactagtcggcatcaccggcgacctcaccgccgcgggcgcccgccacctcaccgcggaccaaccgttctaagccccaccggccaatttgactcctccaccacgaccccc

SEQ ID NO: 17258 - DNA, 403 bp, Zea Mays
ctctactaaagagaagaatgtttgggttttgcatgggggagcaatatagttttcagttcacaaatatcacaaacacaaacatgcagatacctaaacttttatagtatttttttgaaatacggaagcgcaaatgcataatgagaaccaagttcttctaatggttgctacttgttgataggattaacaccaacgctacttcgaagaaatctgttacatgaccgtgattctcactgtgtactttgtcaggatgtggttgatgaagacattgaccacctcttttttagtgtgctttggctaaacactactagagactacttaacatccggtggaacattatgcccctccaagagagacgggtacatgctttcaaaaattctagattaaaattctttctggagatttg

SEQ ID NO: 17259 - DNA, 849 bp, Zea Mays
cattcgtcggggaccagtgaagctgtccgcgccttcaatttgaactgtgtggcctcggggcgacgggattgctcgccacagctccatggccgccgcggatccgcatgccctgtgggcagccagctctactgcgcgtcgaccggtaaggatccatccattgtgttagtcatcgcctcctcttgatattgcgctagttcaattattcggttggacaccatggcactggttcgtcttgcgccggcgacgttgccgccgcgggtggattcgcgcggcccctgtctggccagccgggggaggaagaaggctcttgtaccgttggatctcttcttgatgggccggatctgttgccgcgttttgcttcggatagaactgataggaacccttagatcgtgatcagacggattcgaccgtgcgtgctcgtttaaaatcatccaccgtccgatgcggatccggcgctcgggactcaatccgttcatattaaatctgatacgtccatcacggatcgggtggtcaggatttgataccggttcggttaaagagtgttgtaatctgagccgtctagatcagatcgggtggctgagacatgctcgtttccctttgtcgtttgcgttttctaaaagagaccctaggagaatagagtatcaacctgcagtccaccgcgggtaggttctgagtctgtggaacctttgccttttaaccccgagctctctgcaaattatgcacgccatccaggactcgaaaaaaagaaataaatgaatatagaaaatgaattcctagtgtaaaaataatcctaaaacttgtttaattcatacaaaactcattttaactcctttttagtccattcaagtt

SEQ ID NO: 17260 - DNA, 381 bp, Zea Mays
gctttaccttgtagcatgtggaccgagccaggaacgaggaggccgacgcattggccaaagcagccgccagaggcgaagccttgccctccgacgtgttctaccacgtcatcggcacgccagccgttcgcagtccagagggtctacaaataaccaacgacaccgagggccatcacatagtcaacctcatcatgaccgaagattggtgggccccaataaccctgttcctgcaaggatattaccacccaagcgacgtcaacgaggccaagcgcctcaagcaccgaagccgggacttcgcaatcattgagggccagctatacaagaagggggtcagtcaacccatgcttaaatgcgtaaccgaaaccgaaggcatccagatcctgc

SEQ ID NO: 17261 - DNA, 818 bp, Zea Mays
cttttactggattattaagtggctacagcaacagtgaatgatcatacggttagtagaagcccagagagaccatatatctacacgcgttgcaatttactctgagcaaaatacgactatagatataagcaaagctgtcaagtggacaaggtgagctgaggctcacagcagggaatctttgtggaggacaatccaagcccccaaccaatacaccaacacagatatgatatgagtgccacccatgcacacatggatatgatgctgtcaattgcacacagaggcatcgatccaatcaaatgatggttttctttgccccgctgatcatccattccactcaccactcaccttgtgtccgtacgtcccttcttctccctcagtgaaagacagaaagggtgggcatggactgcagtgcatctttggaagaagggtgttttttgcacagatgattattagctacctcttgcccagggaagaagcagctgcagctagcagcatcattctctttccctcaactttcaccagacccctactccatttgcaacaggaattcattattgatgcaatggcagatgcattcaataaatggaatcatgctgattttgtgccgccattgccagccagatgctgcctcagacgcacccccaccacgtacactagcatcaaatggggaggcgaggctagctgatggtgcatgtggttacagcagggagcaggggggcatttaccagctggaattagtcgatgcatgtactaccattgttataggacttagctgtggtttcacatgcaaggcacacccctctcttcatgtgatatccttg

SEQ ID NO: 17262 - DNA, 677 bp, Zea Mays
gtgtgctgcgcgtaaacaaaatcctatgaatttatgctcgacttcctacttatagttaacgcggatgtagcctcaccgcctcttgaacgatcataagtcgagctgctcaaaggtgcttgtgtgccacctggattattttctctacatacttctaaagtaatccgtacaacatttacacatctttgcttgtagagacctacaaagatcgctcatactatggtggcccatcagacgagtgcccacattgtggcgccgttttctggtttcaggaacgggtcaaaagtctgtctattgtttcgcagcgcaggcttgtgtacaatctttgttgtagaggaggtaagattgttttggagccttacaaatgtccaccggcacccttatgtgacctactgcgattcgatggttatagtcgtgcaagaaggttccttaggcaaatccggtcatacaattcccttttcgcgtttacctcactaggtgctgtcgttgatcgatcgataaataacggtactgcaccttatgttttcaaaatcaatggcgttgtacaccatcgcattggctcgctactgcccagtcatggattgcgcccacaatttgcgcagctttacatatatgacactgaacatgaggtgcaaaataggttgggcatgtttgagaatgaggctgatgtccatgatcgt

SEQ ID NO: 17263 - DNA, 662 bp, Zea Mays
gccgtgtactgggagcagggtatcgggctttgcgatgaagacctcggaagtactcccaccgacgatgaactacgccgtgaaccaatcaccgtcgcgccttgtggttgtgtcgccgtcaccctgcacagcgattacgaccgctaggatcgttgtgttccggctcgggagcttcggtcggacctgcggttggtgtttccgggcacactgcgcaggattgacggccggagacgagtggatttatcgccggagtcgaagcaccgccgtgtccacgcgcgctgtcgtggccaggtagttcggcgccccgattcaaggtaacgacactgcccttgcattcgcttactctctaggatcgagtaggtaacctcgggtttgattagggagggcggcgagtcgcctgcaagcgcctgtggtcggtcgtcggcgaagccgcgccgctgcaatgtcgtctgggcggggaagacggccttctggccgttgatcttggcgtgtgcgctgtagatcgtggcgcactgtgcgactgcgatggctcggtgcataggttgaccgggaccgtaggatcggcattgatcgggcacgattagatcaggggaaattaaatccgagccgttgggatgtgatcgggtggtccagggctggcgataccccttcgcgatggccttttc

SEQ ID NO: 17264 - DNA, 547 bp, Zea Mays
aaatgctttcgtcaggacagcaagggtgttctatggtttgaagaccgattggttgttcctaaaaatccagaactcaggaagaaaatattggacgaagctcatctttccaagttttccatgcaccccggcagtaacaagatgtatcatgacctcagatccttatattggtggacccggatgaagagggagatagctaagtatttatctgagtgcgacacatgccaaagaatgaaggctagtcatttgaaggtagcaggtaccttacagcctcttcccatcccttcttggaaatgggaggacatttgcatggatttcattgtgggtttgcccaacacctcccggcaccacgattctatttgggtcattgtggataggttaaccaagacaactcatttcttgccagtccataccacccacaaggcagagaaatatgcagagatctatattgaccaaatagtgcgtttgcatggaattctgaggactattgtgtctgatagaggagcactgtttgtggcacgtttttgggagcagctccaaaagtcacttg

SEQ ID NO: 17265 - DNA, 576 bp, Zea Mays
gggcgctaccaccggtgtttcagcaggggccgcatcagaggaatcttcaactaacatatccagcatggcacttatctttgcatcactgggattcaaaggcacctcaaaatgaacctgcctctcgtcgtcaggaatttcgtccagtgaggcaaccaaagcatcaacttcttcgggagagggtcgcactctaaggcccaaaccgctatcaccggcaggaggattcgacacaaaactggtaaaggccttggaaggaggcagattccaggctgagtatgcaacaggagtgccgatgttcgacaccttgcctctgagtatcatttcgagccggctcaccaagtccacagcaggaattcttctgttggttacccgggttgaatcaaccaggcctcggtacagataggccggatatgctctgtctttcagcggctgaatgttcttgaaaacaaagtcagcgaccacagcttctgcagtcagacccctttctttcaacaatccaactttagctagcagagcccctgcctcagccacctcccggtctgtgggggattcggtctagctcggagtgcgaacatccgg

SEQ ID NO: 17266 - DNA, 537 bp, Zea Mays
cttcaactgggggcagttattcttgaagtgactggggtctccgcagtgccaacaggcatttgctggcggttggttgcttgcaacagagggggcctgaagggagctctgactctgctgactatagcatgacgaagtgagtccggctggtctattgaagcttggtcccctaggtggaagcccaaaggatcgagctctccggtgacagtcttgctgctgagctcggagaacctggaatttcctcttgaggtgccctttttcttcctcttttgccctttccacttggatggctttgttggagaggtgagagaagttgaggaaatgttggctagcgaggatggtcttaagctcgggtcttagccctttcagaaaacaggccatcttcctagactcatgctgacatcgccaggcgcgtaacgggccaactctgtgaacttgtgcacatactcactgacagttcttccaccttgagttagttcctggaactcatcttccttgagttgaactatcccctgaggtacgtggtgctcacaaaaggca

SEQ ID NO: 17267 - DNA, 584 bp, Zea Mays
catcgttgtcccaatagcttctgagatgtggctaggggtaaaacttcctgagatgttctatgttccatgagttcccaatttctgtttcgtccatctgagcgagtcgatatgatcccggccgagtgacttctgctactatgaatggtccttcccatagaggtgacaatttatgccgtccctcccctgttagaattcggcggaggacgagatctcccactgcaaagaaccgatgccgtatggccttatcatgatagcgcctcagagtttgttggtatcgtgctgattgaatcaccgcatttagtcgctcttcttcgagtacgtcaacgtcttctagcctagtagcttcagcttctgctatgttatcaaagattaaccttggtgccctgaacttgagattggccggtagcactgcctctgaaccataaaccataaagaagggggtatttccatgcagagctcggctgggttgagttctcaggctccaaactacatatggcaactctctgatccattttcctgcgaacttttcattcttgttgaagactttctttctgagtgcttctaatatcatcccgttggctctt

SEQ ID NO: 17268 - DNA, 374 bp, Zea Mays
ttttgagcgtgcagtaatcttgcagtctgctgaactaacatgaaattgtcttggatgaatcggcccttgataaacgcactttggttcctagaaatcaacttgtccatataaccactaagtctgtttgccatgatcttcgtgattaactttgcgaagctgtggatcaagctaataggccgaaagtccttggcaaggatggcatcctctttcttaggtaacagagtgatgaaggcagtgttgaggtatctgtccttgttccagacagccaggatagcagccataatgtcttttttgatgattgaccaacaggccttatagaaacggcctgtgaacccatcaggccccggggctttgtccggaggaagctgtttgat

SEQ ID NO: 17269 - DNA, 605 bp, Zea Mays
acccctagccagagttgaacggcggcacagagctccccatggtgaagatctcgccggcacaccgccaacaagcgaccccgcgcccaaatctcaaaatcaatagttgttatacgacgccgaggacaaagcgacaccgttcagggtgcacttacccgagacagaggtgctggacttgctgctcgcttcgtgtcgcgccctggtcgtgaatcccttgctccagcgaggaattttgttcacaattcacgccaaccgaacctagcgataccacgtgcatgcgaggagtaagcagtcgagtccccccgacccaactacagagactctacgatgccccatggtggccaccctcttcttccctctcgacggccatggcggctgcttctctatggcaccaggtgtcttgctctcggctctctctgcgcggttttggttttggagggccaatgggggcggttgacttatatgtacgcggggcgagggtctgatgagagggggatccggcgacccggtcgccgcgcgatgtccgccgtagatggcgctcattttgttgtgggtgcgcccgtggctgacatggtgggtccacacagtcagcgattcatccacgcgcg

SEQ ID NO: 17270 - DNA, 744 bp, Zea Mays
cgccccctctattgctccattgttccgccgtcctcgctgggcctctaccgtcgtctcggccacggtgagcttcgctggagccttatgcactgggaacacgcagtggtttcccatctcatcgatccctttgcccggtccgtgctcaacctctcccctgcacaggtcggagttcgccaccgccatggtttcttgtcgtccggccatccagagtcccctcacgccgtgccaagccgccccgagtgcggtatctgggtatgtgaccttcccccgatcttcttatacacatattccatctcaccgtgggtaatttcggcttgctagagtggcctatggtccgcccaaggtccccccctccgctgtccgcctgtctcagccccgtttcagtgaccctgacttcgccatagtgttcgtcgagtcctcccaaacctctttggctaccagaccaccctagcgcccctagaaaccctggtctgtctcgccttcgacgacagcaccgccacgaccgtgaacagcgccgccctaggccgaccagagctgataaactccccgtggcgcccgatcctgaccgttcatccttgatccgttggcctaggtgctcggataacggttcactcggttcattggaccaggaacgttgattcgagatccggtggccagagtgcctcacgcccccacgcatcagcgtctcgctctgcctcgagccccacatgtcaggcgtccacgccgagccctcgcccgagccgc

SEQ ID NO: 17271 - DNA, 404 bp, Zea Mays
gcaaaccggggctcaggagccctcgggagaaggaagaccaatcagtcggggcttcattaacccgaagaacttcgttgtccaccatgcccactaaggagtggacacagatcacttggaagaaggaagtaaatgacccgagtcggggatggagaacacattgagccacctttccgatacctccaccctcaaaggaggacgggaaaaagaacaccatcatgtcggctcctttctaccctgatgtcctcttcatccaggggagattggagtcagcgccaatctccgacgatgagcctaccatgcaaggagaggaacctccctagcgtgatgcccggcaacgaagaaacagaccccgaaacgtgcggcgacatcatgaagccgaggaacgagattcgacgcaacccgtg

SEQ ID NO: 17272 - DNA, 1189 bp, Zea Mays
tgttcaaacaccaatctgacatgtttcacatgctcagcccatgaagcactgtagatgagaatatcatcaataaaacccataacaaatttcctttgaaaagggtcttggaatgagttaattgcacattggaaagttgttagagcattggtcaacccaaaaggcataactcgaaattggtacaacccatggtgagttttgaaggcagtcttgatctcatctgcctcacccattctgatctagtgatagccagctatgaggtccagactagaaaaatactgagttcctaccaattcttccaggatttcctcaactaaaggcattgggaatctgttctttatggtcaagtcatttgattttcggtaattcaaacaaaatctccaggttccatccttcttcttaaccaatagtactggtgaaccaaagggacttacactcggcactataagtcatgtttctaggagagccttcacttgcttctctatctcattcttatgaaaaggtgagtatatgtagggcctagagttcataggtactgcaccagaaacaaagggaatgtagttatcatattgtctggagggaggtaactgctgtggtacttcaaacagatcagcaaactccaacagtaagctttgaatctcctccttctgatcacaatcctctctgtcttccacaacttccaacaatacaaatgcccagacctcatgtcccttcagccatttatgcacttgcaatattgacacattttgtatagaagtttgaggctaagaactatccccctaattatcatgactcacttgtgcatgaatttcaatatcttgtggtccaagtcacattgcattggactaaactgcctaagccactcatagcccaaaatgacatcaaatgcacttaagggtaggactctcatatcagtgcaaaatgaaaaaccctaatagcaccattccagtcctcttaccattctatcacacaccatagtttcaccattaggcaccttcaccttaactagagaacaaaccacctctactaaccgcaactgatgcaccatgtgagcactgatgaaatttgatgaacttcctgagtcaatcagtatcactaaagtctgtttgctcatagtttcacttaccaccatgctattctcattatccctaccaaccatatcttgcaaggacactttgcaacacatttcttc

SEQ ID NO: 17273 - DNA, 639 bp, Zea Mays
ctcagaaagtgccttgagctcgacaatcttctcattcatggctcgggagagcgcccgggatgtgtcaatagaaatgtcaaggtctcctttgaactctgaaaacaatcaaacaaaaacactgaggcatagccaaagtgactcgaggagataaagcataggtaagtgcacatacctccaacttgggtcctcaaacctaggaccttggaccactcagccttgagatcctcggcgaggaatatgacttaggaagaagcttcagtggcctgacaccgaaaaatctcccgctcgccagacaccttctgaaggttcttcttcagtaagcggacctcctcgggcaagggcaccacctcccgtcgtgcgtcctcagcctcctcccaaagctccgagcacagcgtcgagagatttgctgcctcagcactttgaacgatctagcaagcccttctagcgctgcagcacatcccagacatcacgctcgcggcgaagaaagatggacttggccacagacttcaccattaggccctgagaagaaaaaggacaacatcatgacacgccctgcgaaaaggaatgtcacgatggtagatggtagatcctcatacccgggccatgatttggaactcggaccacatctcatgctcctcc

SEQ ID NO: 17274 - DNA, 1023 bp, Zea Mays
tcgtaacaaaaacttcacgcgagctcgggcgaccttatcgcaaccgactcggtgtccaccacaacgaactccacgagctccgcgcgatttccccgatcccatcctcctttggactcgcgacttcggggcacaaaaccatggcaccgccctcctctctcctctcatcttcttgcgccaccgtcgcacatacagggagagaaagggagaggtcagtcgccgccggtgtcgacatcgatctaccttgtcgtttggtcctctgtgtccaggcctgggcatctcaggggtctgctattgctttccgtgcgactaattgggggtgtggttggtcggtgaccacttaattcctcgtcggagccgggcgggtacgcggatcctctgtagggctcttacacaaattccccctccgttctcggtgagttctcggtttctcaccctcgacctgttcctttccttagttaatgtcgcgtcgttgccaattgcgtgcggattggggcgaattcgacctcttgggtcgggaatttgccctggcgccacccgtatcgtgagcagtagggttaggccgtgtggtgattggcgcagtcatcccccatgggttcgccatagtcttagcttcgtgtggagcggacttccttcggagttggtgtagccaggcctcgccgggatttttccggccatggccccgccgtgagagggcgggtgccgccgcgtccgagcaccttgcgcgcgttgagtagtgaccgtggatgcgtggatgaagggttgagattagattccgcgtaccctttcgccacattcgttctggttcattcatctagatcggacggatccgactgaccacgcctgtttaaaatcctcgctgttggttcccaattggatggtggagggcgcgcaccgattcatcagctcgccgatctaatcgagaccgtgtaattgtgattggacggctgtgatagctctctaccccttcggcttggatattttacttaagagccctcggagaaagtgaaaaacaacccgccgtcc

SEQ ID NO: 17275 - DNA, 612 bp, Zea Mays
ctgggatatagtgtgttctctgatccggtggtggggaaacgaagagcgatgactgccgccgctggtgcggagctttgctgcgctcagctatcagcggtggaagacgaccgatggaccgttagatcttggtgcacggctctgatcgagtctagacgtaagttgacggggccgttgatcccatagcaaacgactaggattagatctagacgaaataaatcctgagcgacggattagatatgggtggccacgatttgatttggcgtaccctttcgtctcaatgaatcgtggccgtgtgtcgtggatcggatggatccagggggatctcgacttctttaaatccctacccttgatttcagatccaagggttcctgctgcgtaccggttcgggagcgtaggattctaatccgagccatgtgttgccgatcggacggctcagatctattgataccccttcgccgagcaaggcttgcaaaagagaccttatacttttaccaaataaacccgccatccctccattataggaagacttaatagttaggcccagaactttatgcagagccccctaggctttgttcaaatagtgtccatagcccagcaaccatgagaaattta

SEQ ID NO: 17276 - DNA, 367 bp, Zea Mays
cgaaagggtgcataaccgtggcgtggttgcatgctcctagcgtggcggttcgcccttccgtccgctggttccggcgaggatggggggacgcctataaccgcagggcagttttatgccttgcgtgcagcgtttggcctccttcgcgtctcgagtcagttttgatgatgtgtgggacccggccctcgcgtcgtggggcgggaaccttggagcacgtcggtggagactttgcccgtgacgcttgggggcgcaagtgaggagatctgcctataaaaggggatcgatccctcgggcagtggtcatgccttcgttctcccctcatgtgttgcgtccttccacctttcgagccctcggatggggtgcaccggcg

SEQ ID NO: 17277 - DNA, 688 bp, Zea Mays
gtgaagatctctggtgaagtggcagagcgatgcaatggcgggtggtagcaggcgagtgcggcaccagcagcacgacgcggaggaaggcaacgcgaacagaggaagcagggtgaagagcgtgctggagacagaagaatggcatgctgctctttttatataggtgaaagggaaggagaaaggacgcccaattaatgcagatttgatggctaattgatgcgttgtgaatttccagagaaatgaaagcttcaaactccattaatggagaggcaggaaacgctcgacacagtggagaagaaacggatgaaaacggacacaggaagagcaagggcgacggatggtccaagagcagcacggagattaagaaaagagtaattgctgggaagggaaccggcacgggcaaccatcattgatggcgaaggcagaaacggtgagatagtggggagggggaaacaaccgtcgacgtcacagccatcggggagacgaggagccgagtggcgctgtcctcagcagagatgaggagcgggaggcatggaggccgacggctctgtcaagcgatggtgactgcgctcgtacagagaagacgaacgaacaaaaaaattgagaaagggtgatgacgtgtgggtcccacatgtaagggagagagaggtgagagtagtgtgtagtgtgtttcttggctggctgagacttg

SEQ ID NO: 17278 - DNA, 627 bp, Zea Mays
agatagtcatggcacagattggtgacaagggtgttcaagtcattaaggaaatgatcaaacaaaaggtggacaaatacaaatgcttccgtcaggacagcaagggaattctatggtttggagaccgattggttgttcccaagaacccagagctcagaaagaaactattggatgaagctcacctttccaaattctccatgcaccccggcagtaataagatgtatcatgacctcagatctttatattggtggaccagaatgaagagggaaattgctaagtatatatcggaatgtgacacctgccagagagtcaaggccagtcatttgaaggtggcaggcactttacagccccttcccataccatcttggaaatgggaagatatttgcatgaattttatcgtgggattgcccaatacctcccgacaccatgattctatttgggtcattgtggataggttgaccaaaacagcacatttcttgccagtgcataccacccacaagacagagaagtatgcagaaatctatattgatcaaatagtgcgtttgcatggaattccgaagaccattgtgtctgacaggggagcactgtttgtggcacgcttttgggagcagctccaagaatcacttggga

SEQ ID NO: 17279 - DNA, 422 bp, Zea Mays
ctgaaatccgcgatccatatctaaatccggtcaatggcctataaattgcgctcgggtttggtttcttcgccacatcacacacctcagtgcttaagcaattgactcagtttcacctgaaaccgtgggcagtacacaaattttcccctcccgtgttcttagctccgccgtgaagaacccctttcgtggccagcgctcttcgggtcagtatttatcaaattacttcttgttctagtttgcttttgatctccaattgctctcaatgccaaccaattgaaattcggccgaagcccatcactggaacgcacacttgctctgtaaaacgccgccatgactaccccctctgtcgacccactctttgattcctattttgccaaaatccaagtgagtacctaacctctggtgaacccgtgaacctttcccca

SEQ ID NO: 17280 - DNA, 626 bp, Zea Mays
gatcaaagagcgacgatggagatttaaataacgaggatcgcttctcacccacccgattgaccatcaacgacccacaatcaaccctgaggcgacacgcccaggacctgatctatgtcgcacgttcaccatcccacggccaacaatgcttcatccgaagcggtatcctaactctgatctttgtcgcaccctttgagatcaacggtctaaaaggtccttctcctacctcccatgcacaggcagtggtgtgggctggcaacggcggcgccatggccgcaaccacccagacccgagcaggggaccgccaactatgcttcttgtcgagctacacgcggggaagacgaaggcaggcacaatagtatgcttcttacctaggtttggcgtgcaagggtacgcagtcgtcggagggaagtggccaggcagtggattttcaagtccggcgaggaatcgccctagcattgacgccgtacttctcgaattgatggtcgccgtgtcttccgtgcgctctagcgaggctacccgaccacaattgaatccctagcgctagcgtggatgggaaattagcccacggcggcagtcccttttctctcccctccgcctacggttcaattggtgactgggtactcggc

SEQ ID NO: 17281 - DNA, 1146 bp, Zea Mays
ccttttctcacaagatccgatgcccgggagctgctagacttccaccacgactcaaaggattcctcatgagctggatacagaccccgcagcgccactgaattaaggaaatcaaaccagaactgcctagcaaaaacacacttgaccatcaaatgatttatggtttcagcctcttggtcgcacaaggggcactgctctggtcggtctagccctctttttctgagcctgtcagcagtccagcacctattatgttccacaagccatataaagaacttgcacttcccaggagcccaagatttccacacacgctctgctggttcgaactgaactgaaccaaggaagagagcattataagcataactagatgtataatcacctgaagcgctgaatttccataaatgtcgatcccttattccaggctggagcacaactgcatcaagcacttcacaaagttccaggaattcagcaatgactctgactgagattgcccctttcgcatcggagatccaatggaaattagggagagcatctttgaccaaccgtttgttggcaagacgtaagggcaccaaatcaaacattgcaggagctatgtccttaatacatctcccctccaaccatctgtccttccagaaaagggtattggctccatcaccgagcttagtaataatggctgcagcaatcagatttttaaccaccttacaaacatgaatggggaagtccgcccaaggcctactggggtctgttttctgcagccatggccagcgagctctcaaagcccaacagaggttctttaactcactaatcccaagaccacccaactccttgggactggtaaccttaggccaagccaagaggcagtgaccaccacaaaactctttcctacccctccagaggaagcccttcctcagcttatcgattgctttgatggcccaaacaggaaggtcaagtgccagagctgcataaatcatcttagccgtcatgacaaactgcacatgaatagctctaccagccctggtcataagttcagctttccatcctggcaaaaggctggccactctatcaacaatggcctgaacctggtcccttgtgagtttcttgggagacaaaggcaaaccgaggtacatacagggaaaaactgaaatattacat

SEQ ID NO: 17282 - DNA, 650 bp, Zea Mays
agcatcttgaaataagagttgctaaaaccttgggttcagcaaaaatgtgttaggaggtgttgaggtccggatccccgagccccttagggccacgactcagtggacgaataagcaccagggttcgtttgtcgtaggtcaatcaagaacctgtcatgcccacggggtgactccctgtgccaagccaaggggtcaggcaaggcgaaggaaggttgatatggccagacaaactagacaaaacccactcgagtgggccttgcacgcctctcaaactgattacattgtcagtcccgtgtacgtagcattaactacgctggtcgacggggtgcagcgcgaacgttatcggtcctccccctcatgacctatgggtcctaggcctaagtcccagtcatgctatatgagtcttaggtctaagtctcactcatgacctacggtcctgcacaacgacaagagagaataccaacggacaggctacaaagacagaaggtcggtgtaggaggtaaagtggacaaaaacaaataatgatgacgcccgaacttccctcgatagcccgaattaaatcctccctcgacaatatcagagatagggcaggaggcccacgcggggaaagaaaccacctaacatgtgggccataacaacccgttaggatgtaa

SEQ ID NO: 17283 - DNA, 540 bp, Zea Mays
cgaggttaatctttgaaaacatagcagaagctgaggctactagactggaggatgttgatatactagaagaagaatgattgaatacggtgattcagtcagcccggtatcagcaaactctgaggcgctatcatgacaaggccatacgacatcgatccttcacagtaggagacctcgtcctccgccaaattctaacgggggagggacggcacaaactgtcaccactatgggaaggaccattcatagtagcagaagtcactcggcctggatcatatcgtctcactcaaatggacgacacggaaattgggaactcatggaacatagaacatctcaggaagttttacccccagctatatctcaaaagctattgggacgacaatgtattctgtaaactgggaaatatatcatcaataaaaagacttcaaaggcactcaaattgtttactgtcaacctgcttgcttacttaactcagggtgaccactataccctactaacggagcgatcggcttaagtcggcaatggcttaaggcggtgtgacatgct

SEQ ID NO: 17284 - DNA, 715 bp, Zea Mays
ctgatagttgctcggggtagtaaatatcgccttgtggatgaacttgagccactgtttcactccggccgccgtgtccgcctaactcacggccaattcagatgaactcaccggagttagccactgatcaaccatgcgtcacgtgccttggtgccttaccacgtcgcagtagctcatattacacatgtccggtgattgccggtgagctcgccacggtaaaagccaccaatttcttgcgacagtgctctcctctctcttcgaccgctaccgcgccatcccaaattcacgggccaccgcccctggagcctataaattgagtgtgtcgtcggctccgcaaggtagtcaagcaaccaatacaccaactcgtgcctcaaatcgtccaccagagctcgccaattcgagacttcccccaaatcggtccagagcaccgcgcttagtgagctcgccgtggccagtgtgctacaggtccgttcatgtcctctgctctcttttttcaatacccttatgtgcccttgatgcttctcgacccgaccgattaagctagaacccattagatcgccggaaacactttgaattctccccggattgcgcggtcaccgtgagcagagaggttgggagctcgaatcgtgcaattgatcgaggggaaacgattgttagatattgaattaggtatcaaccaagttagagcaccgaccattgcgtgtcttagccagtacag

SEQ ID NO: 17285 - DNA, 318 bp, Zea Mays
ggagagcacatcttcctaacatgtttctactaacccatctaaccacgagcaatagaggcgacactagtctcagatgaaggggtcctctagagtgaggggtgtctaggctagaagctgctcaatctcctcggggtcctcctcctcgtcgctatctccttctgcctccatctcttgttgcatctcctggtggtgcatttccaattgagcattggtctcgtccagttccacctgcacatcatggagctggttctctaggacctcaatggtattgtcctagatttccacctactgctcaagctcacgggtgcggttactcat

SEQ ID NO: 17286 - DNA, 375 bp, Zea Mays
tttttgagggtgaggaattgaggataatgttgttcaactacagggagatgggtatcatcccaaaggttgagccaatgtaatatgtgatgccctcgctgtgtgtatgtaaccataatttgtatgataaggctgcgtgccttcgttgatacagccgcgcccataggcgacttctgcacggagagtcttttgggaacgacttcgattgtgcgcacctattattccggctgcacccttagacgactttggcacagagagtcttttgaaaaagagttcaattttgcgcacttgttgtgctattccggctgcacccttaggcgacttttgcacggagagtccggctgcacccttaggcgacttttgcacggagagtctttt

SEQ ID NO: 17287 - DNA, 303 bp, Zea Mays
cggggattgggaggagggttatgagaagttatccaacatctgtttctcggcttgagccgcttcccattcccttgcatcttgtgctctcttctcatctgccgccttcaacctcctatactctgcacgcttcgggctatcataaaaggcagattttgcgtccctacgcatgtcgcgtatgcgatcgttaatgtacgaatcgacgagctgagatccacaacacatcttctgtcccattagtctcttggactctattgtgcgcatcacctctcctttgtcgtcgtaactctcccaactgcattttct

SEQ ID NO: 17288 - DNA, 318 bp, Zea Mays
gtatgttatcggcgttcatcattaacaccattaacaagacgatcacattttatttatttacgcaacacaaatacgatatgacaattacacgcacattttatttatttggatacgactttttattagttctcctattaatcgcgcaaaagcatcaccgaccacacaagtccaaccaagacaacgtaggcttgaatacgacataggcatcactaactacggaactcctatatcataatcaactagagcaagaaacatacaaaacatgacacatgtgcattattaagcttagtcatggcaagtctacattacttaagtgtc

SEQ ID NO: 17289 - DNA, 502 bp, Zea Mays
cgcacgtattgctgtatccatatactagttcgcactcgactctagatcgcgtagcacctgagtttgtggagtctggggcatggaaacaacgttggggcgtgggccggtgtgacctcagccacgggcgatggccgtctgccgtggctggctgtcggagggtagaaggagagtccttggcggtcggtttcttgatggacggctcggattcaaccagagccataccggttgggtggataattcgtagcccctggatcgtgatcctgcggctcgagatggaatcgctcgtgattaagtgcccacagttgatccttgatcttgtggactggaatgcgtaccagttcaattggggtggggatctaatctggaccatctgggtcagatcttacggccctgtgtaacccatacccctttggcatgtgtttttataaaatgaaccctagaaaacctatgaatcaacccgtcgtccaatgcagcatccctctgtgtctgtggaatcttgcgc

SEQ ID NO: 17290 - DNA, 507 bp, Zea Mays
gacttgttacgctgttaggtgggccccgcatgccaggatcgcctccttcctcggctggtcgttgtacccacctcgcgagaaaccgggagcggacctagcgaccgtggcgtcctggggataaaagccttctgggtgcccggtcgtgttaccctagcgtccgcaggcaataccgaaagccaacgccacctcgaattgcgcggagaatctgcgccgccattgtaggagagagtgccgccgtatgtgaggaacccatagtttgccgccgcactgaaatctcgagctcaacgcgaccgtactcacgtcgagtgtccaattgggttcgcccggtcttgggaagggtggtcaactactttccgtggacgaatcgtgctccagcacctcggaatttcccaccggactttgttcggtggcgaccgtccgccccccgccgtggccggcccccttcacgacccaatcaacaggtaatacccttcccaattgattcatcgcatcgtccggtatgtattt

SEQ ID NO: 17291 - DNA, 734 bp, Zea Mays
atttcctttcacccggcgtcgtccagatcgatggtagtgggaccaaggaggaggcaccgggcatcctctgcctcattatgtgcttcaagccgccgctcctcgaccacgacatcgagattgagctcatcgtcagtcgagtccgtggacatggccaccgccttagttggcttctctggctcctcacggtgcgcgacgcacacacacggcacacctgaacaaatcgagcttagggttagggttacgtgctcacgacgacggagtgagagactgagaaaggaagacggctcatggcagcggagcgaaagaacgagaaaggaagacgagacctagataccgagaaaggaagacgacacacaccgactcatggcgacggagcgagaaaggaagaaatgaccgagagaacgagatttagggttacctgcaacaccggagcaccggatccaacaaccacaaggcagacggcagagccgcagaggtagaggagcgagcttggcgcagatcgaggtttagccgtttagggttagggttagggtgcaccgttatagtgaacaagcggagcgagaaaggaagaggataggacagaccgagagaggaagaggaagattagcgtcggccatcggtcggagttcttctccactggcaccggccgccagcaagcgctaacggcgggcggcggcacaaaaatcgccaaaccgagtcgcccacgaccgcgagagaggagaaaggagcataac

SEQ ID NO: 17292 - DNA, 274 bp, Zea Mays
gtcatcacggctaagcccggccgacgagcctgcgtagatggctgtgtgccgaacaccagcttgcctatgccgtagtgcgtgccatcgtccacaacctggaagaactgctcgtgggccccactgatgctatttactctgtggtatgcatgcagccaactaggaaaactgtccctaatcccctcgcgcatatgcacgacagagcatgcaccctccacgatttccttcatgcgagcaaccaatagaaatttaccgtcacacaagatctcaagacttt

SEQ ID NO: 17293 - DNA, 391 bp, Zea Mays
gcatcgcaagatctgggcgggcctgacgcgtagaatgggaagtactcgagcatcagaaggtccaggcagggctgacgcgtagaatgggaagaatgagatggcggggtggtcctgcaaacttgcgatgggatgcgggccgatggtggtcttgtgcgttggatggcgatgaggggattgggttgcgattccttccatggcggcgaggcgggggttgcgtttggggcgcggaggatatgggcggggcatccgcggtgtatgggaagaacgattgggcggggtggtcctgcgcgtcgtcggcgatgggattcctgcgtgctggattgctgcgaggcgtggatagcagcgaggggatgtgttttcttctgtggcagtgacgagatttttccttcca

SEQ ID NO: 17294 - DNA, 308 bp, Zea Mays
cgcggggatagcccaggtggttagctcagtgctcatcatggagaggcaggaagaataaggtgcgcgcccgctttagcatcctatctacttcataggtgaactcactcactaatgcaaaaactcgctactcggaggcacacaacttattgtacgtcattttaattactaaaaggaagcttaggcattattttgagtcgcatcctatttctatggtgacttcgttccccctgggcgacatgacccgcaatctagacatttctaggaggatcgccaaatgggcccttgaattgatgggatacgagatctcc

SEQ ID NO: 17295 - DNA, 380 bp, Zea Mays
caggggccatccactccggctacgggtcaccggagaggggacggagcaaaccatcggtgacgagggcctccagatcgtccactgtgacggtggagaaaggccacggatcgcgcggcggaacgacggtcaccttgtcaaccatcgctgaacgaagggggtggaggcagaggggacaaggtgcacagttttcttttctctggctattctcttaggttgcggaaaccaaagtagaaggcaagcacaaatggcagagtaaagaaccaccgccggcccctcttccgggtatataaaggcccgggcgagatccattcaaaacttcgcccgaacccgccgcaaaattcaaattcggaggcgaaacgcctgttcctcgaacgactcgc

SEQ ID NO: 17296 - DNA, 1069 bp, Zea Mays
gcaaatgtgtattgggagcagtgacaaatgtgaaatgtgtattctgaacacaagcgtaactaacccctctaataggcaactagttgcagttgctaacagttctcaaaaaacggaaccaattaaatgggtgcattcccatagacaactggttaggggaaaacaggacctgaaacttcaaattggtctgcaatggcttatgccacactctacagtaccacaattgtacagttataaacatgactgctatcattcactggtaatcactggcaggtcagaaacacggactttttagtcagttaatttagttctccaacttaagaatggaagttggtatagttataaccaaccattaaatatttaagtgcaaggaaaatgcaatcaaattatctatcaactagttaagcaagtgtaacatgacaataaaccaatacaaatgcctaccattgctcagataaagttggccgtatgaatgcatagtagtgaccaccatgtaccccaccactatgaacaagaacactgaataaaagatgataaacagtattagtacacaaagaattgcagaagcaagtgttggcttaggtggtggagaagaaaaaaggactgaactgtagatatattgtacaagaggtgaatccccacaaccccagaacatggcagtgtctgcaaatctgcatgttcatgtggctacattttgtacatgatcaaccattttccttaaacatacgtcttcttaagtgtagcaataaatagcaacctatgccccacatagatgttggtaaaacaaatagcaattgtttttagatggaacaaataactagaaattctcttgtgtctcagaactttaaaaagacataacaaaagaacatgtcatggtgttcaagaaaaaaaggacatgtcgcggacagtaaataaattggttcgctttaaagccaagaaagatgtgcagtaagtggtaaaagccattgcctgtgaagagtgtaaaggtttcgtgtacttcgatctgcatttggagcaatgtatttgccaccatctctatccagatcaagttgcagagggaactcatagcgat

SEQ ID NO: 17297 - DNA, 1174 bp, Zea Mays
ggggtatctgcgcttcagagccatcggatccaagtcctgcggccatgattagatcctaccgttgaggaatctgtatgtgccagggatcgttggatccaagatctacgggtaaggttctatcagacaaaggggtatccttgattcaatctcagccgcacactatccatcccacggccgaacggcttcttcatcctccatatgtctttgcctggagccagccgtgcgccgcacagccctgatgtcgaccttccagcaggagcgccaagcatcgcgcgggtgcccgcgatgaggagcaagacggccagcgatgccgccgagggggaggagtgggagtccatcagtggcaagagacaccggtatgcgggtcaaggcggacgaggagcgcagtggaacgacggtcagatctcactgtcactcaagcggcggtgtcttcctcccgccgtatacagtcacgccgcaccaaccccccccacgcgagagccaccccggtgacaagggcccacgaggccacgacgaacaggtacaactaccgcagtagctaggcgcggggtacgcggttatgtgactcactgggaggttaacgcaccggagattcggatggggacgaggaagatggtcaccggtggacttgcggcagagcgcgaatctctttggcgagttgtcgaggtgcggtccttcacctcctgcccagcaccccgccgtcgagcgcgaaggacgagaatggcaacccgaagactccctgttgactcccccttcacagcaggaggctccttcaactccacgacgtctagttcatggctcctcccgtcggttattagcagaataggagaagagaagcgcactgctttatgggcgagataatggccgagttggccgggtgaggtgggcgtatttgcggcaagctgcgccgccaatcccgcgtggcttgttacgatcccgcgattcttccgggaagacgacactgaccaggtagtcccacgcatcagagactggccgatcatcgtgtgcgcccggtgttgaggctggtgcatggggcccatgtggcagctggtaaaggcaggagtgggctggcggtcaactggctccgtgcgagagggagtgaatggccgagcgggcccaccagacagtgccaaaccgcgctagctatagttgggccacgcgtgtatggtgcggg

SEQ ID NO: 17298 - DNA, 296 bp, Zea Mays
tggcttcggagagcccatataaaaacactgagcctaacaatagcattgggtgtcaattgatgaaggtatatctcaaagttctttaaaacttcccctatcatgtcatttaaggggaactgaagtcctgtctgaagaagctcttgaaaacgacaacttcgtcctcttttggttccggaataatttcctccctagcaaactggacaagctttctctcagcctccccgaaacagccaagtttcctcatcataaccatgtcatcctctgttacagtagatttcccaaactcaatgtggcta

SEQ ID NO: 17299 - DNA, 580 bp, Zea Mays
agcgggccagggtggtcagcggccgggggtggggaagcggactgatcggtccggcctagtgctagaggcagaagcgaccgacaggtgggtccaggcgcagggtgcgcgtgcgcgaagcggtatccgatgatccggaccgcgcgatagagatcggacggccgaaatcaagcaccagaggggttaacggttgctggttttgaggtcgccggggttggtcagaattgtcgaggagggctcgacgaacacaatgcgggggttctggtcacgagatcggggctagagatgggagaatggtagagggagagctccaggcgggtcggggtacctccggcgaggaatctcaatcgaggagaggggatccgagacccgctaaggcctgtactagctacgatagggtgaggggaacatcacgaaccaatgcaggggcccagggccgggctaatttggtcagtcaccgtgcaggcgcggcgaaccgccgcggccgaactccgtgaagtcgaattggccaagacaaggcagaatcgggagaaactgagcatgggaactgatgtcttaccttgggacagagctcggggcggct

SEQ ID NO: 17300 - DNA, 386 bp, Zea Mays
atgcgcccctactggacggtcgtacaggcccatggcacccacgccccccagctcatcccccttcattacgccccatggccccttattgccacccaacgccatgtccggtgcccctgctccacccgctagcgggccccatgcccccgcctagcccaagcgcggtggccagccagccgtctgatgtcgagccctcggctaagctttcccccacttacaaatggtgcgacccccctaatcccctattggtcgttgtgtatccttgtgacccccgacgcccgatcatgaaatccccgacaagcgcctgacccccgaccaatgcccccctgcgggctagccactgtcatgccttaccccttcacaccaaatcccattcagtctggtcctat

SEQ ID NO: 17301 - DNA, 464 bp, Zea Mays
gccataatctaattcacagcagcattgactacaaggaaaccgaatggttatactgctatagtacagtagtacaccgttattttctttacaaaagatctccacttaaacaagcagcaacaaaaggaaatggaatgatgtaactaataaaagcctccaatagtcaagaaggaatcagaagttgtagaaaagtgagaactgctttaagtgaagcagataagaccttttcatagtcaaaacatgtcatggagttttgttgagaatctgaaatagggcgagagaatttccatgcacattgttcccaaatcctgccagtccaacgactaagaagctggaagccttcaacaacaatatcatacatgttccctttgatatcgcgggaccagtcattatacacaccatctgatgacttcaaccttatcatctgaaagaacaaatcaatatcaatggatgaaagagcacaccaa

SEQ ID NO: 17302 - DNA, 855 bp, Zea Mays
actaatttttacaagttattttgtgcgttagaattaccatacacaatcaacaacgtattcaccacaataatcaaacccgacatacatatatatcggtgcgctcttcacttagtaatttgcatttttaacttggacacgacctgagcactactaatttttacccgcgaccataaccatacgcatttagaccataacactcaattcaccatgtttacgaacttaacccaaaccatctaacaaatctgttaacgagagcaacaacataggccgctatacaacatactggtcggctagcctcttactatcgaaatccgagacatacactcattacagcatttttgtaaacatacatattcacaagtattttcgcacaccgaccaactcatacgaatcgtaaaccactaatctctaactcgaaaccatcatgcgcttacttcccaaatcatgaacacataacgcgtattgacccgactcaagatatagaggaagcgatgactactttggcatgtcaccacctctctatataagccaaaacaatttctactatcgactaagagttctaagtattaaacacattattactttccacgcgcaaataatcctcaacttaacactagtgacactgatggacttttttctaaactcatcatgcgcataacctcgtctcgtatacaaccatatggtggcgtgcacccgagacactacaatcattatggcgtgaccactaatatacgaactccgatactcatgttttaacaatacatcctccacgcaaactagcattttctaaactactcgtcacatcaataaatatatcccctatataatcacgaatcccatcacattgcataaaac

SEQ ID NO: 17303 - DNA, 580 bp, Zea Mays
atgcatcccaacccatccgatcgaaatccaatgactcagatttaaaacggacgatggggggtacatcgaacgtgatcacagtcgtcaatcctcgatcaaatggccaccacacctccagccaaaccgttaccccttaactaatctcaggcgcaccttcccaatcgaacggctagggaccgccctcgcacaatccatccgcccagtgccggagtgcggcggcgccgacccaggccatggcgaacaccacatcggagaacaatgatttggcccatgagtggcttgccccggaccaaaagtgtgtgctatgtgacgagtagtgcatggcaagcacacctagaaccccaattttgaagatcatctggccgatcgacccagcctacggcgtcagacaggtcgtggcggacccacaccccacggtgagaaatccccagccgcccgaggcatcacgacacacgatgttcggagctacgcgtcaccgatgggataacaaacattatgaaggtagccttacccgaaatcgcaaggtagatagcacccccactgcgagcaacggtccagtggtgagcttcgaatccagaca

SEQ ID NO: 17304 - DNA, 421 bp, Zea Mays
ggttcgaagctgaaccctagatcgatgcacccgtggcacggaggctgcggtggcgatgcccctcaccgcggagcgagcctccctcccctcggtcgtccatgtcgcacgcatcaccggggagttctcccagctatcaacatcacctctgctttctcggcgccctagcctccatcgtgctgtcgctcgtgcgcggccctcggtgtggactgtgcaaggcaagtgcgtaagagggcagtaatctacagtggtgtgcggagctcttatctcagcacgacgcacccctctcgacgagatagaatcgatgggacaagaggtccgaatttctcttcccccctccttccctatgaaccaagcagcgggtgagctttccgtccctctatctagccccacatatcccgttatacaaacaccacctaatttt

SEQ ID NO: 17305 - DNA, 291 bp, Zea Mays
ggcaccacagccggttcaatgtaacgcgaccggtgggtcagaaccttcacctttttgctcttcggcacaggctcagctggggtgaccgaagcagcaatcttcctctttttctcttgtcctcacagcgggtagcggtaatcagggtacacgaagccaatagcatcaaaaaccctattcaaccttttcttcccctgacctccgaaagctgcggacagagcattatcttcggccttggagtaagctccaagcagctcatcgctggtagcttcaatacacttcagccaatcatcg

SEQ ID NO: 17306 - DNA, 839 bp, Zea Mays
atgtttgtgaaagttggtatccatcaatgtgccccaaaaaacatcaaattagagctgagtgtgaaagaattgaacatttgtgtctgatggcagagtatattgattgagagttctcctggagcaaaattctgccatagagaacctcctctttataaatgtccatcatgtgatgtcaattggatagtcaggatgggtatgcggaatgtcttctgtgtccatagattcactgccccagctgaggattgggcctctgagtcagtggttggagtgtagtcagcatcgtctgcacgagggcgctttgatttgaagcgaccggcaagcttctttcgaagaccacccagaccactgcaataaatgtgagaaacatccataggtgaatagttgataataccacaatcatagagcaaggaagtgcaattctctgtcagggtccggactgtctgcgctagagggccggactgtccgcgccacaggtccagacggtccgcgaccgttcaggggcgactctctagaaccctagtcgcctcaatcattcaaacgacgattccgcagaaaatatctaaccaaacttgttcaattttttgcacaacattcacaatgagtagcactaataatcccaccaatcagatttgtgaatctattgctcaattatagatcagagagaaaatccgaataatcccaaatttgaaaaaaaaaattgataaaatacatgagattatgaaataccgggatgaagacatgtttgttgaactttccacaggctttcggactgtccgtgcgcaacttctcttcaccgtccgcgcacaatcgacgaaagtgaccttttggcgagtggagag

SEQ ID NO: 17307 - DNA, 778 bp, Zea Mays
gcagacttcaccatagaagaagttaagcaggcgatcttccaaatggaacataacaaagcgcctggccccgatggttttccagcggaattctatcaggtattctgggagacaattaaaggagatttgatggctctatttaatgatttcaataaagattctctaccgttgcatagtcttaattttgggacgattatcctcatcccaaaattggctgaggcaataaggatagaacaatatagacccatatgcttattgaacgtgagctttaaaatcttcacaaaagctgccacgaatagactgataaacatagctcataaagtcatcagtccgacccaaaccgcttttcttccgggacgcaatattatggaaggggtagtggtactccacgaaaccatccatgaaatgcacaggaaaaagctaagtggggttgtgttcaagattgactttgaaaaggcgtatgataaaattcgctggtcgtttgtgagacagacgttaagaatgaaaggtttttcggaaagatggtgtgattggattaataggtttactcagaaaggccatgttaatattaaactgaacggacagttaggcaataatttccaaaccaaaaagggactacgacagggtgatcctctctcgccagttttattcaatatagtagtagacatgcttgctattttaataaacagggcaaagagagaaggtcagattagtggagtagtaccccacttggtggatgacgggctttctgtccttcagtatgcagatgacactattcttt

SEQ ID NO: 17308 - DNA, 531 bp, Zea Mays
ggtggccatagaaaagacgcgcgagctttcgctagctcgcgaaaatgtcgttgacgcgggatgccgagcgaactccacgagctccatctggttgttgctggcatggtgtgtgtccacctctctcctccactgtggctgaagcactcctggttgatcgcctgcgggagctgcccgaccacgtggagcgctctgtcgccgaaggtgtttgccgaggtggtggtgtcgcccttggtcaaatggtttctcacttcgatgagatactttcttcgctctggtgagaaattcggccacccccgaggatcttttcttcgctctggtgccatggaccttgctccttgcgcctccatcaatccttttgagccactggcgcagacacacagccacaatcgccacaagtcccccgcggtggtgcttcttcaaatcctcacggtttggcggccacggatttggtttgcgaggatgaaggatagcatcgaggatgaatcacaaccggaatttggctctttgccgagtactaaatattttgccgag

SEQ ID NO: 17309 - DNA, 675 bp, Zea Mays
ttttgaaagatctgaagcccctggtcgccgttttgcggatcctggcttcggttttctgaagagatgcgatatcatacctctggacctctggacatgcgggttcgttctatacatcctcgcattttctcgaaggtccaacaatctgcttcaaatacaccagtgaatcataagaattgttcttggcagtttgcattttttttgttttttctattttttgctatgtgaatctatttgaatgaatcatatgcatcttgaatccgtgacgacgaatcgatggctcgatgatgattattcttgctttaaccacaccgaactaaaggctattggaagggtgctttcttccttcctccatttgcgccaggctcctctttcttggtgtttcctcatgaaaccttgctttcttgttgaagaatgcagttcctgttttcttccgcgagagtgcgaggtagaaggattcggtaagatttggtagcgtagcaaggggggaaagctggaggcctcgtccgctggttcttggcttgtagaaaaacctggcctttctctgagagcctttgccctgtatttgcaattgatacccctctttgaataagtatttcccccttttcaagccaatatgttccgctgatcaattatttatatgggtgttggacgataatctggaataaaatttgtcgc

SEQ ID NO: 17310 - DNA, 575 bp, Zea Mays
gatccaccagcccgacggcgacagccgatgctagcacatctgccgctgcccctggtaagcgctccaggaggcggggaccgacctctaaggtttggttgcattttgaggaagttactgagaagcagggaggtaaggaggtaaggatttccgccatttgccttcactgcaagcacaccctatctgctaaatcttcttctggaactggacacttgatctgtcacctagaactttgccccaataagaaagataaagaaaaaactggtagatctcaatccctgcttaagtttaatgctgatggatctgttatgcactgggagtactctccatctgttgcaaggactgagctttgtcgtatgattgctagactagacctacctctgtgttttggtgaatgtagtgcatttcaagaatatattactcgtgctcataatcctcggtttgttaagtcctctaggcaaactactgctagagacataattaggctttttaatgattgtgctgaacaacttattaatgtactcaaatccgtttcatctgttgcacttacatctgacatttggtctggaaaggcaaaa

SEQ ID NO: 17311 - DNA, 620 bp, Zea Mays
tttttggcatgatgtcgactttagcacttgtttctgatttagtatcaacaacacgagtcgaggaatattattcttctgtgatggtaaagaatctagggaatactgcagtaacatgggggttcttaccttgcaatagacctttccgatgggctacaacgacgtatataatcgtgcagtgtgatctgtcttaagggtatgcccttaagactgtgtatgaccgaatgacgcgatattcctcaagggtatgcccttgaggtctttggaaccagtttctctctaaggtatgccttagagagaggtgcttgatggcgagttttcttgccgatggagatggagcctggtgaagcagtaatttctcgatgtagaatttcaatagcctactcacactcctcacgcgaggtgacctcacggcagcctcaaagcagtagcttttgcgatgtgtatgatggcacttttgcgtcgagcagcaagcgcggcagcctgacagcgtcctttctttttgtccaatcccctgaactcagcgatgtgaccttgtatttataggccgaaggagcttagtggtacgctagcgtcgcatcgcatgggagaaagaacgtgtgttcgtgcctggtgagtcagcg

SEQ ID NO: 17312 - DNA, 773 bp, Zea Mays
gaagaattctcgacctcgagattaagatgaactagggaaaaggtggggaaattctacttgcaattcttcttctctctcctaggtagccttgtcttatccatgatgactccattgcactttgcatatttttatcactttgttcctcgtaactcgagtgagggtattgatgaccttgataggatgctcgatgtaggttagatcacaatgcacactaagttcttccataggcaactgctcctctaggacacgaagacacttcataagctgggatacgtggaacacatcatgtacatctgacagatgatctggtaactcaagctagtagcccatctccccaactcgctttaggattttgaagggtccaataaagtgagggggatagcttgcctttaactttaaatctcctcataccccgcatcggtgacacttttaagtatacgtgatcacccacttcaaattccagtggtcttctccgggtatccgcatagctcttctgcctcgactgtgctattctcaagttctctctgatcatccgaatttgttcttctgcctcttgaataatttcaggcccgaagaactgcctctcaccagtctgatcccaatatagaggggttctgcactttctgccatataaagcttcaaacggggacattttcagatgggcttgataactattattataagagaactccgcatatggtaaactcttgtcccaactgccaccaggcttaagagcacaaggtctcaacatatcttcaagcacttggttggtt

SEQ ID NO: 17313 - DNA, 408 bp, Zea Mays
aaccgtttgaaaaactaaacttatttctcgcttgccactacatcactcctcaatcacacgaccatcatgagcatccttcacacgattatataatagcgacctaagtgtcgtgttacacaatgcatacatctttcctcgttgcgagtataaccatattacggcatatacccgcacacctcaatcaaatatcttacgccaccaccactataatacaccacagcacaaacgcacctacgtgtccccatgttacgcacaaggcatcaacaacatagtgactctaacaggattaatcatactcctcattcgcctcgactatcccaatcatcgatcacatgcataaaacaatacacttttcacgtagacacctatcgatgcattccccaacacataatccgcattttaaaaatt

SEQ ID NO: 17314 - DNA, 280 bp, Zea Mays
aaacggtcataccctaacacaagtcgcctaagagtgcaaccagatcaatataagcgtattaacgacacccaagcgcgcgaaaacatctaaagatgtagctcagatagcgcaaatacatttcaaaaggtaccacaacgaaaggcacctcatatttcaaatacaagatgcacaatacgtccaacaaaatcattcacatacatgttcccataatcattcacatacaggaaaagctcatcgtgtataagtgtacatttggaccgggtctgatgggctggcccga

SEQ ID NO: 17315 - DNA, 614 bp, Zea Mays
ttagaacggaggctaaagttctagaaaaaatgacgccgccagcatggctcagactactactgaaactggacctgcagaagctcctgccgaagctggaacttcggaaacgacagcggaaggttttttaaaggatagccttcctgagaaaccctcggcacctactctcgaagcaccttccagggatgatttgaattttattattcggcatacttcaggaaagcaactattagagagcaagttgccgaagcgcaacattatgccaaggatctgaagtacccccaagggtctttggtgtatggtggcaatgacgaagatgatttcctttattacctgccagacaataaagagataaatgtctgctgggaaatggcggacaatataggctatccgaagcttgaactcggcttatctgcgatgttgaaggatcagcttgcggacagtcttgcatacaacagcctgaaggggtgtatgttttggtttgtcgttctataatgtaacatttctaatggtttttcttaccctcatttcatgctcatttgtcgtttttcagggcttgattttgagtaaggctttatgttgggggtatgcttcatcgccgaagatcctgtaagaag

SEQ ID NO: 17316 - DNA, 617 bp, Zea Mays
gagatttgctcccctgggttggcatggtgggtcctctttagggtcttgtgtagtcgtactctcagtatggcgtcgttcgtccagttcttgtagcgagtctattgctgatgtctttgtagttgtgtgtggcgggtcccatggatcagtctcatggcgtggtcgtacgtggagtggctttgccttttgtcatgagccctgcatcacttgccagcgtgcgtgggcacacactcggtatggcacgttgtctcatcttttccgatatatgggtcattgtagagactccggtgctgaggtcctccatgactagggttgactaggcagtggggatacacctgagaccgttcgtgggggcgttcagtcgtgtcgatggcgacttcctggcacccgtttggtgtgctgcgcgtacgcccggatgtggcttggtgatgatgcatcctatggtagttgacgtgggtcattggatcttcgtctcgccaggttgctcggcggggactttgtcgcccgctccgcctcgcagacttgctcggcgggggcatgatcggtcgctctgtctcgcaggcttgctcggcgggggcttgatcgtccgctccccggcgcagggttgctcgccaaatggg

SEQ ID NO: 17317 - DNA, 353 bp, Zea Mays
ggaacatctatcttctgatttattgataatgggaaatatacattttatattttgtagacaaagctatagacatttcctaactaacccatgtgactgatacttaccaatggatacatgacccattgggacactttgtcgcacaacctgcttggcttctgatgaaatgttgagcccattgaccaactaatgttgcactaatctagccagaatttggcagcaacacatgcccctaagttttgataatatcttcttattctgaaattacatcattaccatgtagcatttcattagtcaggattgtcacatcagtagtcaaaaagcgcacttacctaacggtaggctctacaacatgc

SEQ ID NO: 17318 - DNA, 575 bp, Zea Mays
ctactcccgaggcttgctgagcctcttgagcggcgacgtggtttactcgtgccctgccatgatactgggtcttacttaggtggctgttggagggtgctggggcactcttggggccattcaccgagtggagtaggtaggcacaaatgtcttcagctaaggacaattattcttgtagtgactggggtctccgcagtgctagcaagcattggctggaggttggttacttgcaacggagggggcctagagggaactttgaccctgctgactgaaacgtgacggagcaaacccagctggtttgttgaagcttggtccattgggtggaaacccaaaagatcaaactctctggcgcctgtcctgctgctgagctcgaaggacttgaaacttcctcttgaggtgacccttttcttcttctctagccctttccacttgtatggccttgtttgagaggtgcgagaagctgagaaaatcttggctggcaaggatagtcttgagttatagtcttagccctttcagaaaacaggccatcttcttggcttctatgatgacatcgtcaggcgcatagcgagccaactcta

SEQ ID NO: 17319 - DNA, 604 bp, Zea Mays
aaaagagaggggtgaaggacaaaccaagtgtgttgataatctcatttatatcttttttagatatacttgaagttgcgctatcatcaatcacaaaaatggggtgattaaaagcatatatgcccctagttaggttttggtgattaatggacatggaaattattatgacgaatgtgtgttttatagaggcattatgggttaggtcacaataatggttattgtttgggaaatcaatggttttcatgccccttactatggaatttgttttggtttccaagggatggagaacaatgttaatgatggaatagttcatagtgtcaattagagttgggagacaattagagtaatttagacctttgtttttttctttggtcttactatagagtggggtgtgaagtagtagctaggcgagtctattgagttagtgtgatgcacacttatgaaacttagcactaggtagcttagagaaagcccaagattcaagtgaaagtagtgtcattcacatagatggttgaaatggaagtggatggacacttttcggtatcactagattagtctagtgatgcgcctaaggaagcagtagatcaagcgatatgtgcatatgcta

SEQ ID NO: 17320 - DNA, 538 bp, Zea Mays
ccgaatccggcgggcgctctcgccattaccgcgggctcggttgcggcggccgagctcaacgactcacgcctatttctccggggggttgcgtcgcccgcgctcatcacttccactggtgtgtgggccctagtcgtcaggtccatctcccaccccaagttctgttggccgctgcaacaaaccacgacgaattcggcgttgcccggtcgtgcgccactgcgcggactccgtccttgccgctataaatctaggaccacccttggccaactccaccacggttcatcacgagaggaaaacctgcgacatgagccatggcgacaagcagagaagataaggagggaacgagagccacctcaccttagggtctctccacattactagcgctccctagaatcttagccctgatgctttgttggattgcaccagtactcacggtactctcgcttagctcagcgttggtctgggtggccggaatttctcgctggtggtcgtgcacaaccgcggatccgcccaacgtcatgggaagccccgtatctatcgt

SEQ ID NO: 17321 - DNA, 499 bp, Zea Mays
ggcgaacagagcgggagccgaattgcagagaggatctggaggcaggaaagcaagaactagggcacgaaaagcagaggcggctgaaagcgcagtatatgtgggatattcccgagtcagataccgtttccaaaagcgcccagtcagcacccggcagttacttctaaaaacaccggtgtgccacgttgtcacccggcagctacttctaaaaccctggtgtgccacatcgtcactcggctattatcctcaaagtggccgacacggcccattctaactcggctgttatttctaaaatgccgacgttatcaccagtcgctcggcatttatctctaaagtgccgacgatgtcttcagtcgctcggcggctatctctaaagcgccgacgatgtcctcagtcgctcagcagttatctctaaaaaacgctggcgtcgtcacaagtcactcgactgtcacctctaagagcgccgacgtggtcaacagtcattccgacgctgacatggttt

SEQ ID NO: 17322 - DNA, 357 bp, Zea Mays
tgaaaaccgtatgggtgggttagctaaaaagtactatctgaaagactgcaaggtaggaccatggagcagcaagatggaactatcacaagagcacaactgagggggtagtttctctttataactcgtcatgcatgggtgcagactaattggccgggtttgtggggacagaccccaccggatggtcgtacacgtatgagttacctagttacaaaaagggaaacagattcgaccccttagacttgccctatggatagaacttacagagatgtttcggcatcggggtaaggcactcctttagtcgtagctagatggttgctcccgggtcggtgtattcccgttaccttgaagggtccttcc

SEQ ID NO: 17323 - DNA, 410 bp, Zea Mays
gccggaggagcacagccttgtcctactgacgggcaggccagtttgtccagtttgttggtggctgggcgtatggtgcgccgcctcctgctggtccaaatcatcccttcccatgccaaaattttggcctggaccaaacatccaaacgcacaccgtgctcgctctcgtccgaagctactactcgcagcagcatctcaagtgtccctttcccggtacgcctacggccatgagagattgagagtagtgttggcagaaaggaaggatggcccacctagacgggaacgcacctagcagcaagcagtatacatgggggaggcttccattctaatctgcttggagggagattaaagggagccacccaatgaacactttgaatagcacccaattccattttttttattttttttgcattc

SEQ ID NO: 17324 - DNA, 345 bp, Zea Mays
tcaatgggtgtgaagggtaaggaagctagtcaaagtgtcaaaccaactaggcttcatgtaggtagttggaacgtagggtccctaacatgtagcttacaagagctagtggatgtagcaattaggaggggtgtaaatattctatgtgttcaggagactaaatggaaaggccagaagacgaaggaggtggaggatactggcttcaagctttagtacacgagggcaagttcaggtatgaatggtgtcggtatcttgaaagacaagagccttaaggatggagtcgttgatgttaggaggcaaggtgatcgaattatcctaatccgactggtagttggagatgcgggtttg

SEQ ID NO: 17325 - DNA, 463 bp, Zea Mays
ctttctccctatgtcgctcgctccaaggacccgcccattcgcccattagccgcatggagcaccattgctatcacactggctcgctcatcattgagtgtgtgcctcttccagctcccctccccttccttcaattggccacttgcgacatcatccatcaaatgcttgctaccattgtggataccatgctagtggccacaacagaatgtcgactgtgcccctgcttcctctcatccatttaagatactatcagccctcgcaaaccctagccctaactctatcctccactacctcattattgtcattggagttctctctcgttggcagcaatttgccctccccaccacccctctctttgatttgtcgcttgccgagcttcctcttattatcctcgtccttcctttgtagttatgtcctcttctctccactgaccatgccactgccatcattcttgttcgcctccgag

SEQ ID NO: 17326 - DNA, 1209 bp, Zea Mays
atttttctacatttttctacatatttctaaagctctgctggaaaaagaaaaagaaaaggattaaatagaactgggccggttctggcccagacggcctaggtctagggcaaaacgcgcccgcgccctggcggttttgcacgaaggccctcacggttttggctaactcaaatcaggtttgtttactgtttcactgggtcactgactgtttgcacaaaagtccttcctcttctacctattctgtgtttaaagtccccgacggcgctcgcgcaccgccgcgctccggcgagcactgtaccggccaaacggggctatgaccggcgctcccgagcgacatacaccggattaaacccctaaggagtatttcccctcactcaattgcgcttataatcaactacgaagctctggccacggtggccgagagcatggcggctaaagcgttgtgttcccggcgatcccaggcggttcggttcgattaaatggatcggggagcatcaccaacatgtaagggtgctagaacaagaacgagaagggaatgagcagacctggggaaggctggccgcggtgaggtgagttcacggtggctgagagtggatttggggcgaatccaaaattcgcgagttctagcgaaggactgccagcgattaacagtggctgggtggatgatgatgttatgcagctaggggagagctcaatttatagtgtccacgggcggtggtgctcaatttggccgagccgtgttggcggccggagataaagaagaaggcggcgcagtgaatacgtggctaacgccgtggcaataactccggtgatcacctcgcggccacggatagcatcactatggcatgtcgaccacgtcggtaaaaggtacagtggggaagaactacggcatgcgcgccaccgcggcggaatttcaccgagtcatggcggccgccggtgagtaacttcggccgggttcaggggatgatgccacgtacgagttacccctccccgacgttatccactccataccgtactcgaaccaggacggcggcggcgtgaatttggcgcaaagaggtcaccggcggtgagcaagccgcgctggcaacctgatccacacaggttactgtaccatggcgcttggtattcagtctgtctgacagacaaggtttaggctcgattttctctgaaatttgcatgtgaacttcattaaacctctgtaccaaagttgca

SEQ ID NO: 17327 - DNA, 795 bp, Zea Mays
ggaattgtcaggggcttggcaaaagtgtgaaaagtgagttccttcgtgatattatcatgaaagagaaagttaacttcattggccttcaagaaaccaataagaaagactttgaagaatcttggctgaattttattagtggtaatagaaattttgtttgggtttggtctcctcctaatggtaggtcaggtggtttgttggttggttttgatgcggaaatgtttgatgttagagaaaaagagttgggggaatttatgattaggttgttggtgattcgtaaagtttcaggttttatttggaattttattaatgtgtatggtgctgctcaaaatgatcaaaaacagaaattcttgagtgagttatctgctttttgttctaattgttctcaccctttgttgattggcggtgactttaatattttcagaaaggaatcagataagaacaaacctgggggtactaacaagtggagctctctttttaattctattattgaggttcatgatttgattgagttggatcttagtggtcgtcattttacctggtcgaataatcgtaatcctcctacttttgagaagttagacaggttccttgttagtcctgattgggatctgcattataataatttgaatgttactggtctgagtagatccttttctgaccatgttcctttatgtctaaaaactgattacatttctccggctagaagagaatttcggtatgagctttgttggaaattaagacccgattttatgtctttagtaatgaataattggtctttgcctgttagaagtaagattg

SEQ ID NO: 17328 - DNA, 560 bp, Zea Mays
aagtgctggtggtatggactgaagagagatgtggttgcacatgtggctatgtgtgatgtgtgtcaaagagttaatgctgaacaccgaggccagatggactactgcatccactgaagatacccgaaaggaagtgagaagggattggtatagattttattactggattgcctcgcacccagaaaggatatgactatatatgggtgattgtggatagattgactaaagtggctcacttcattccggtaaagactatttataaaggatctcagctagcagagttatctatggctcggatggtgtctctacacggtataccgaagaagatcattttggatagaggatcacagtttacctctagattttggaaaagttttcataagaatatggatacgaagttgaattttagttcggcctacctcagactgaaaggactaatcaagtattggaaaacatgttgagaacttgtgcccttcagcatggtagtagttgggacaagagtctaccttatgctgagttctcatataatagttactaggccagtctaaaagatgtcaccgttc

SEQ ID NO: 17329 - DNA, 459 bp, Zea Mays
gctgctccgctcggacttccctgctccctataaggcccgcccgaaccgccatggggtgttggtaggatccgtcatcgatctggcagagggtagagagagaccggggaaggaaacagttggatgccgtgagggagagagggaggtgctcgcggggccaccattgaatcgagcttagaagccccgtcgcgtcctgaggatagtatctgggcgctcgctgtggaggttggcgaccgggggtcaagtgtgtgctcgccggagtctaggaaccatggcggagaggcgccatcacatggaacgggaattgctcattggagcgattgaatcctgcccgcgatccacctcatgttgcgggctgggcaccgtccgactcgacgaatcaatccaccagagcatagcgaatcgctcatcagtgtcgaacctccgccacggtgccgcatcttgtcgcggggcgagtccgct

SEQ ID NO: 17330 - DNA, 357 bp, Zea Mays
gtccaccgctggatctttggcgaacgggtcggattggaggttgtcgtgggcagattctggcccttgatcggtaatccaagggttcgcgtagaattacaggttctgacgtctatggatctaatccataccgcccaccattgatcgaacgaccatgattggcccataccccttcgacctaggcattttgcgtaaaagaccccgtgaaatatctgaatcaacccgccgtccactgtagggtttggctgagtctgtggattacttatgttttcgcccctgcacttctgtttatttagcgcacagtccagacacctattaaaaccaggaaattcatttagaaaatggtttttcagtttaaat

SEQ ID NO: 17331 - DNA, 573 bp, Zea Mays
agaggtagataacatcgaggcagggtgaaaatatccgaggaggggtgaatccagtcgctggccggaccagccgtcgtgtcccaccacggtcagtcgcgctggcattaccggagctcaccgttctccagccatgccacgtgcttaggaacgttaccacatcgcagtgaatcgtaagagggagtctatccatcgccggaggctttgccacaatgaaagccacgttagcgctcgccggtaattcccccctctctccggccacccacgtgtcttccccaaattggatgccaccactgttgatctctataaattgagcgctcaatgtgctccgttaggttgttacgcgcccagtgcaccagccctcgcctccgattagccacagtagcgccccaattgcgtttccccaattctgttttccgcaccgctgtgaacatctcgctgtggctagccatctgcaagtgagttcaagcttctctgcttgatgttttagcctcccttaagtctcatgttgctcgtagacccgtttgattgagctagaccgccctgaatcaccaagaacacctcgatttcccctcg

SEQ ID NO: 17332 - DNA, 475 bp, Zea Mays
attttccaactgaatttccatagtgtattcccttattagaccgcgcacattattatcaaaacgttcaggggcttctacgtaaaccgttctaagaccagagcactctacgctggactgcgggttcatatgccagaaatggaggcgctcttgtgctaatgtcactacaagaaatttgtccttttatgacaaaatacctaatgacaaggtcagttattgtcatataatgtcacataatatgatggaattttttgagtcgtcataatttcatgaggccatgaagattttatggcgatagtgtttttttgtcacataagggtacgaagattcgtcatatattgtcaggcgccagaagctggtagacggttttacttttatgacgcttagatgtgcctttatttgatgatttggcagcgtcactttatgttttttccaaaaaaggaccgtacccctttctattgaccgcattcactttccc

SEQ ID NO: 17333 - DNA, 544 bp, Zea Mays
tcatctactaattaattaactcgctgcccatcgtcttcactggactagaaaccataaggtcaaatccaagcggcaacggcagtaaggacatggcgacgagctgctgctgctggtgcatgttgtctgtggacatggacgacgatgtggcagtggtgcaagatagcttgccatcgttgatggctcgacgtgccatgcggcggctgtgaggagctgatacggaggggtgcgttgtcgtgcatcatgtcaataaagacgctgccatccacaaaggcggaggggatgatgtgctcgaggaggcgtgggatccatgatccagaggtagtacgtgaggtcctcgtctttatccaccacggaggagcgatggtcggggttctgttgccagcacctgcctcatccgcaaacttagtttctatctgtgcgcgcggaggtagagcgggcagaggagatgacgtgcggatgtctgtggcgccgatcgtggtattggtttgatagaaacagtagctggctggttcttgcgggttgttgcaggttcttactgttgtcg

SEQ ID NO: 17334 - DNA, 495 bp, Zea Mays
tcaaatggaggtctacgagaatctccatgccttgaaagttcctccttggggtagaaccaaacaagttgcctcccgatgatccaggtaccacctgtgactatgctggatgacaaggcatcaatactctatcgacaagtggtgcctcccataggctcggtgtagcagtccgcaaagctcctcatggaagcggctcctagtggttgcatcccaagagatgggcaatgatccactcctcgtactcgtggtcctcggtatagttgttgggaagagggtcatccttgttgacatcgacatcatcatccccatctctagggtctcctccagcagtagcatccgatgtcagtgtaggggtgcctcctgctaggtggtcggggtggggtgctcagcagtagctagctcctcctactctactttgtcctactagagactctccaacttatgcgactatcctggcacgatcaatcgtagcaagtactcagcaaggcaggacagtag

SEQ ID NO: 17335 - DNA, 885 bp, Zea Mays
tgcaccactacctgcccggcgacccagtgcttcacaacacctaccccgggagatacctcgccttcttctactgcaacgccacggcgttcgtcgcgtccttggtcatactcatcctgctgctaagcaacgtgttcagcacccaagggatcaagtactgcgcgctgcaggtcgccatgatcatggacctcctcgggctcatcggcgcctacgccgccggaagctgcaggcaagtgtccaaatccgtctacgtctcggtgctcgtcattccagtcttcctctacgtcggcgtccatgtcatggtcttcatgctccaagtcttcccaaacatcgggacgtggaggagaaccgtgagggacaggctggaggaagctgtacccagatgcctcaagaagctgttcgagctgccgccggaggaagacgacgaggacatgaggtggaaactggagaagaggcgcaagctcctgctcctgcttgccatcctcgcagccagcctcacctaccaggcaggcttgaacccaccgggcggcttctggcaagagaacagcacaggccacgtcgtcggcaaccctgtgctcaacgacaactaccgccgccgctacatggctttcttctactgcaacgcgacggccttcgtctcgtcgctggccatcatcatgctgctggtgaacaggaagctctcggcgagaggaatacagtcgcacgcgctcggcgtgtgcgtggtcctcgacctggccggcctcatgggcgcgttcgccgccgggagctccaggaaggtgtccacgtccatctacgtcctcgtcctggtcgtcgcggttctactctgcatcacgctccaggtcgttctggtcgtgtcggagtcggtccagcgtctcctgcagagactcc

SEQ ID NO: 17336 - DNA, 432 bp, Zea Mays
gattctttgatttggtttcttctttttggcaacaagaacgtagaggagaaactgccatacagatatggcagaacaagatgaggtcccttcggcagtatttaaggggatgggcaaagaactcgacggggttaattaaaaaggagaaacaacaacttttagaattgattgatgaactcaataaaaaggcagagtttacttgcttatcgcctatcgagttgaactctaaagcttttgccaatgataggcttgccagtatcttgagagaggaagaagtacgtctcttccagagggccaaggtcaaacatctcctcgaaggtgacgataacacaaaatatttccatttagtggctaacggcaagcaccggaggcaatggattttttcgttggaggatgaggatggtgcatgcatagcggataaggaagaacttaaat

SEQ ID NO: 17337 - DNA, 445 bp, Zea Mays
ccgccgtatccctggtgactgggcggagaagaaactgtaggggcccgtcggatacgcgatggatggacgagattgggacaccgcattcctcttcgtgtgatcggattcgggccgtagatctaagatccgatgggtgcgcggcaatctcggttatgaagagcgtggaccgtagatcttcaatccggcggtgggcgctgcgtaccaattcgttaaaacctagacctaatctcgcgcgttcgtttgaatcggacggctcacgggagccgataccgcttcgtgagaccaacttgcatatgagcccttgaacttcctaggaatcaatccgccatcctacgtgactatgctctgtgtcttaggagttttaccccgagccccctgctgttctcagattttgaggcgcagtccaggaattaaataaaaccagaaaattagatttagaaattga

SEQ ID NO: 17338 - DNA, 2165 bp, Zea Mays
gggagggagcacagagagatttgcgcgcgcagggagcagccgcgcacgcacaaatagatttgccgcgcgcgcacagtggaagaagcccaaaacgcgcgcctaaaccctaaagcccaaaacgcgcaggtctgcaaaccctagaggataaggcgacgcccagggaggataaggcgtcgcccagacgcctactacgcctaggcggacgccatacacagttttctctgggcggcgccgacgcctaggacatttctccgcctggacgcctaggcgtcgcctaggcgacgccttttaaaccatggaatttacaatttcctgaacccacaaaggttgcacttcactgacagcttgtaagcacatcaaatgaccaaccctggaaagtgcatctgccaccacattatcctttccctgcttgtacaccactttaaactgtaaccccatcaatttagtcattgccttgcgttgcaattcaaagtggagcacctgatctcccagaaaactgaggcactgatggccagtccttatttcaaactcagctctttgtaaacaagacctccatctatctactgccataatgagagccaagaattccttctcatatatagatagactagtcagttacccgtttgttactgcagtttctatattcagaatatttacaatatctattctttgttgaacacagatggttgtgagctccggtggttagaacctgggcgtgagaagagggagggcgatggttcgaacctcaacaccgcgctcatttttagacttttatttcatttcgctcactgcgctcgatggaggagacgactcacgaaggggaaactcccatttaaatttaaatatagtagagatgtttattcttacttccaagggccttgctcaaatatgccagtggtctaccttgctgcattaagactgtccctaaacccacatcacacgcatcagtttcaaccacaaaggacagtgtgaaatctggcaaagctagaacaggtgtggttgtcattgcccttttgagagtttcaaatgcaagatgtgcctcctctccccagtggaacttccctttctgcagcgatcttgtaaggggtttggcaatagtaccatagcccttaacaaactatctgtagcaacatgttaaacccaggaagcccctaagagctgtcaccgtagtgggttgaggccattgcagcatggctgctgttttcagtgggtcagtagccatcccttcaaatgaaataatatgatccagataaatgagttcttgctttcccaagacagtaagacacacttctttaagaaaaactggtgttgcctcaaagtagtgaacacaagtctaagatgctccaaatgtttatgccagtttggactataaactagaatatcatccaaaaataccatcacaaacttccttaggaaaggtgccaacaccatatttattgcacatcgaaaagttgcaggggcattagtaagcccaaagggcattaccttgaattgatagtgtcctttgtgagttttaaaagcaatcttgtgctcatctgcctcacccatcctgatctggtggtaccctgcagttagatctagacttgaaaaatatttggttccaaccagttcatcaataatctcatccaccaaagacataggaaacctatttttgattgtcagatcattcagtttcctgtaatcaatacaaaacctccaggaaccatttttcttttgcattagcaatactggtgaggccaaaggtcttacactgggtactaccagccctgatttcaataatcagccacctgtttttctacctcagtttgtgatagggagaatatctatagggtcgagagtttactagaatggcaccagggatgagtgggatatggtgatcaaatgatctgggaggtggtaggcagtaggaacagaaaacacatcctgaaattcttccaacaactggtgcatctccatggtactgtcaggcacaaactcagtctcagttatattctccatcaaagcaaaagcccacacatcatttcccttcatactcttctcaatctgcaacacagaaatctccttcacctccttcaccctcataccatctcccattaaccgacattgagctcacgcgtaaccttcacagggcctaagttgttggggaaggaagtagtgtgtgtgtg

SEQ ID NO: 17339 - DNA, 824 bp, Zea Mays
agatggctagagtacgctcgaccgcgagggtgacccgtgaaggagaggagactgaagccaccgagacagccccgatctccgaggtcatgatacaatcaggcttagttgtgacggagggagtctttgaagaaggtgcacctgctgccgaagctgaacaagctgatgttgaggaagaaaacgctgatgaagaagaagaggattataacattctaaccccgtcaaaacccagccacttggattttgaaaaatctactgtgtctgaagccgacatgcccatgatgatgaagctgggttacttcggagaagctaaaaagaagcttattcgttttgccggagaagaaaccactctagagctgaaggacgacgaaatagtggttttcaaaagctttttcagggcaggattaaggtttcctttgaacgagatgattggagaagttttggataattttgagatttttcttcatcagctgacccctaacgccatcgttaggctcatcattttcatctgggcccttcgaagccaagggatggacccaaatggtgaagctttttgccgagttcatgagctgcattaccaaacgaaggccagagaagatgggttgcatgaaaattttggttgttataacttcgcgtatcgcaaggatatgaaagctccggtcctcagctatcgcaccaagtggccaactggctggaacagcgagtggttttatatcaaggccgatgagaagaagagggagaagttgaagacgatggtcatgaacccactaagtttaagcttcatgatgaccagacccttgtgcaacatgaagccagggtcaccatgc

SEQ ID NO: 17340 - DNA, 602 bp, Zea Mays
gaaaggtgttaagcctgcgcaaaaataagagataagtgtacttgttttatgcatgtgatcgatgattgggatagtcgaggcgaatgaggagtatgattaatccggttagagtcactatgatgttgatgccttctgcgtaacctggggcacgtatgtgcgtgtgtgccgtggtgtattatagtggtagttgcgtaagatatttgattgagatgtgcgggtatatgccgtgatatggttatactcgcgacgaggaaggatgtatgccttgggtaacgcgacgcttaggtcgctgttgtataatcgaatgaaggctgtattgttgagcttgaatcaaaatgcgggaactagtggtacgctaggcaggcgttgttccaaataaatagatcggttgatgtggtagttgtcgtgcgtgatttattgttagtgagcgttgaattatgagttatgtgaaaagcatgttagaaactagtgtgcggcgtgaaactgtgttcgtgtggtgaatgcgttaattaaatgtgtatgttagttttcaggcgtgaattgacttgtataaaaattagtaagtctacttgttagttctcccttggttatgttaactctaa

SEQ ID NO: 17341 - DNA, 416 bp, Zea Mays
cggcttcgtgtgggcagggctggcaggcaggaattgttgtcctcgccggctggggcgagtgtaggtgagggggagttgcgaagtctttttgagggtgaggagcttaggataatgttatttaactatagggagaagggaatcattccgaaggttgaaccgatgtaaggtgtgatgccctcgctgtaagtgtgttactatggtttgtatgaagaggctgcgcctgttgttggtctgtgcgtggatagtttcttggtgtagacttgtgcatggatgtaatgtgcttgcgtcttggcgcgcttgcacggatagtcttttgggagaagacttcgcttttgcgcacttgttgtgctagtccggctgcacccttaggcgacttttgcacggatagtcttttgggagaagacttcgcttttgcg

SEQ ID NO: 17342 - DNA, 618 bp, Zea Mays
tgccagttcaccgtgcccgcgcagtgactggtcgattcggccccgtcctgagcccctactttggtatgtattgttccccttaccccaccggaacaagccctggccttagcgtgcccgattccccctccctgcggtcgagattcctcgccggagttgcccgacccgcccagagcacctcccttcgccattctctcgcctctggtcctgttctcgcggtcgaagtcctaccaacaaattcgccgaaccttcttcaccagttctagccctcaccagcgaccctagaccccctcggaggccatctaacccatctccggtgacttcgccgctgcggaggaagcagcatcggtcaccaagccgtaaaccctcgcgcgcctcatctcaaccatccatccctaatccagtggtccggacatacggatatcggtccatgtccgtgcgctctgttcctggaccccgcctgtcagtggcctgcgccccatggcgctgggcccgactagtcagcccatctttcctccctagtcactgacacccctggctcgcttgacaatgctcggccgtgcgcctgcgctcatatctaatcttagccgtcgatctgcgatcgaggggtccagatcatcc

SEQ ID NO: 17343 - DNA, 651 bp, Zea Mays
gcagtttgggatccctcgataagggggtccggcagcctgggggccagttctagaaaacggacacacgtcccctgggtggtccagagctatgtagccgcatagcctggtcccgtaccctaagcctacatgctccaccactctgcaatgggtgccctagtattcggaactgtaacccagggggcccggacacgtggattggcttcccggcctaagtcctgcaggtcctgttgcgtgaatcaaaggataaaagttaccagttagcgggtcctatgggtacactattaaagcttcctagccagggatttgtgcaggtccgggtcccagtcgagactacctcctaggggctaggtcaccaattctttcttaggtatactggcaaccagcctcgacacgtcgagcctacatcctagggggccaggcaccagggagaaggtggtaacaatgcacacaacaaagacaaatagcatacagataagttctgtcactgttagattaatacttcccaaaagtatcttacaaaaaacattacaagccacaccctagcggaaccctggacctatctctacagatctggctgctaatcatcggtaggatcccactggaagcgctcggccaccacctccacagtatcttgtatgccctcccgggcgg

SEQ ID NO: 17344 - DNA, 430 bp, Zea Mays
catgggctggtacttctccgctacacgtgccggtaagaaccctattgtgatcttagttgttgtctacgcttcgcttggatcgatcggatttggagctttggggcagtagagcggggaccatacatcaccggcgatggtgccgccgtggtacctctgcatagtcgcccttgagtcgttaggtaggcagggccccgtggccgtagatctgaacacgagcagctgtgattggggcctggtggccagttcaggcgggtgaatgtggttcgcccgatctgcatcgatggtgtggggttgattggctggttgctctgatctcggccgttgatcaccaatccacttgcccgcgtcccataccgcttcagtgaaacctagatctcatcctgaccgcaaaatcataatcgtgtggtgcagattctaagttaccccttcg

SEQ ID NO: 17345 - DNA, 445 bp, Zea Mays
gaaattttcacacacacaaatcctattggggatgtatttctttgagaggctctgagtacttctttaaggggagttgattttgtccagtggggttttgagagatgtgtcttggtagttgtgttgagtcatttgcctctttctggagggactagctttgcctttagctttattgcttccttttctccaatttggctctaatctctagctcgtggtgttgagcccattctcttccttttcttgatggctagccaaactttgcttggttgttttgggccgttgcccataactttggggacgaagctttgctcacttttgatgacttgcatattggcctttatctagcttcttgtcatttgagtgagttcctttcttatttccttatttttgctgatctttgtgtttgtgtcgtggtgttcataatgcactcattaagggggacattttg

SEQ ID NO: 17346 - DNA, 308 bp, Zea Mays
cagcagaatcgtcaaggtagtgttgtgaacacaccgaccaaaaataacaatacaactactccagtccaacctagtggatgcttcaagtgtggtgaacttggccactatgctaacaattgcccaatgtgcaaccaacaaacgcctcaaaggaacaacaatccaaggtttgaccaaaacacacatgcatgcaacacccaaggaaaaggccaggaatatcagagcagagtcaaggtcaaccacatcacggttgagacaactcaggaggaaccaaaacttgtacttggtacgttccttatcaactcaatatc

SEQ ID NO: 17347 - DNA, 1096 bp, Zea Mays
caccaacaaggataatgtgaacttaggggaacttcccaagaataccacctccctacctaacggcgtctgcaataacactgtcttccaaaaacaggatataactgtgtgatactgggataaccaatccatacccaatataacatcgaatgcccccaaggaaatcacaaccagattggccgaaaagacctcatcagcaagaatgatggaacacccctgacaaactgaacagctactaatggagccattagcagaactaaccaaaattgggtgacccaacctctgcaccgaaagaccagccccgcgacacaaaatcctccgaaacaaacgaatagctagcgccagagtcaaaaagagcatgggccacaaacgaatcaactaaaatcgtacctgtcaccacgtatccttgctctctgccatccgcagcgggtagcacataagcctcggaaatacccgcagaagaggaagctcccggagtgaaattaacagaagaaccccactgagctgccgggtgaggcagacgcgaagctccaaactgagacgacataggagtagtcggtgcaagagtaggcgcagccagatactgaggaaaaccctgcatcggcacgaactgagaagtcccaggcacataaaactgctgcggaggaagtggaactaaaaactgctgctcagcacttgacaacatgttgatagtgccctgagaagaggaggaagtcaccggctcccatctgagcttcccattaggattcctcctacacaccacatccttgtggtcctgactgcagatagaacacctgccactccactggcactctgcacggcgatgcgcatcaccacaacggaaacacaccagccccagcccgggcttaggaatagcccaaaacctctgagtacttcctcccgaagtacccgagtcagaagatttgccacggtaaggatggtggcgctgatgctgagacttgcccctcttgtgggctggacctccagtgttgcccctcctcgcatccgagccacaaggctgaccaacacccgaagacttctacgactccatggtatactgatgctgcatctccacacccagtgcctgctccactgtagt

SEQ ID NO: 17348 - DNA, 478 bp, Zea Mays
atgggttcaatccctatggaatgagcgctgccacgtacacatgttggcccgtgtttgttatcccaatcaatctcccccctggtgtgtgctttcaaaggcagaatatattcgcgtcgttgataattcccggacacctggggaataaaatgggtgtgtacatggagcctttgatcgatgaattggtacgtgcctgggaggaaggggtatggacgtatgaccgagctacgaagacaaactttagaatgcatgtttggtactagtactcaatgcatgacttaccggcgtatgggctattctgtgccgggtgtgttcacggtaagttcacatgcccagtttgcaaagaagctctcaggttcatttggttgaaaagggtggcaaatattcgtccttcaataaacatcgacaatttctccctcctgaccatccattctacctagacatcaagaactttacgaaaggtgtcatagtgacagaccac

SEQ ID NO: 17349 - DNA, 755 bp, Zea Mays
tggcccgcctcccatgcagtgcctcgtctgtgcctccctgcgtgcccgcgctctccttccccagtatcgccacccgtgtcgccttggctcccttccccgccacgtcgaccccctacgccgccgcgccgaaccctacctccaccgtggtttatgtgcctccctatcgtttgcgcttctcacttcacaccggacatcttccccggggcacttttgtggccttgaatcgggtcatgaaccctgttctccgtgattgcgtcgagctccacccttaggcgggtcgccacgctactgggtcatttgtgttccctagcgtcacgattgtctccatgatgatcgagatcttaccttcttccccacccatgattgtcgtcagcatgctcaccactaccggccctagcaccccttcctgtggttctatgggggtgcccccgatgtctctctcatctttccccatatcatcgccaccaccacctcccactaattgggttgctgactccgacgtctctttccacaccattcgtgaccccagagcggtctctttacctcatcctcccagccccatcttccctttcttcttcactattggtaatggaccgactatgcctgtcacctcagtaggtgacatgatccttcttggccctttgtacctcaacaacatccttgttgccctcaacatcttccagaaccttctctcggcgtcatcttcttcggcgctcttccccgagccgtcctctgtccatagtgcgctcgccgac

SEQ ID NO: 17350 - DNA, 1776 bp, Zea Mays
cctaccaacacctggtccaattcccagaggttcggtaatccagaggtctctagtctgagggattaaggccaagtcaaaacaccaaccgtaacaacgaaagacatccaaattcttgagttgtaaagtctcatcatgtacctcctggacccaggcaaacggatttaaaagttgttggacagtggtcagttcccaggcatgtattggaatgccacaaagctcgaattccatagggataggcaaactagcactcgaagacccaaagaacttggaccaccttttataatgcagggaaaaagcgcctgcacgaatagtgttccatctcactgtcaactgttcagcaaactgcagggagggaagcatgagcaggaaatgtccatgagccaatttccttagaattagcgaatcagaactgacttcaagcttttgagcaaccgcatctgcgatatcagcatctgacacaggcacatcactgaccacaaagatagacactgcatacttcaagtcctcctctgctttttccatcaaactgttccaaccaatcacacaaggttgttgatgatgcgttgtcccagtttcagacagaggggcctcgtcatttccaggttgatcagattgcccccaacccggatcagaaccaccctagaagatgacttgcgtttccgatggcgcctgcgtcgcgagcgaggcgggagggtgcccagcgaagccggcctagccgcagctccaacctccctgggtggagaatcagaaacatgtgcatccactccccctgctatcatcttgtgatgtgctggacccttctcaatgcctagaggggagattctacgccagatataggccttcttcttgcatggaaggggcacagaaggctgaagtctcttccagaccgggacctgaggcaactgatgctgcgaaacacgatcaacgatcgttggctcaactgtcgaaagtctgttccaaaccgttcctctcaacaaccgtcgatgtacatgaaccttcctgtcacctttcacaggcatggggcaggagtaggagcgatgaccaactgtcttgcaacgaaaacaccttggctctaggtggcagaaagcaacgaggtgatcatccgtgaagcaattgaaacaacgacctttcaagtcttttggcaccaggcgacgtgcccgcagtgcactaaggcgatgcttcttcgccttcctagattcaactctggtccacccaccaactgttgtcttcggcgcactctccaacccacgaaaccggctatgttgatgctcgtgatgagggttaaacgtcctggtctcaagtggggagggctccctcggagacgaaatagtctgtgctggaacaagcggaacccgcgggtgaagcagaatatcacggaacagaggccggccagcccaagaacgtggttgtagaccgtcgtcaggggaacccgccgcactctcaactccatctctagaacttggaccgtccctgggtggcagaggatgacgatttcggggaaggggaggaaggggcagatggtgaggcgacctagcggagggaagtagcggtggcaccggatatggtgtggacggtggtcggagtgggatggcaggcagccgaccgtccctgggtggcggaggttgacaattccggggaaggggagaaaggggcagatggtgaggcgacctggcgaagggaagcagcggtggcgccgtttatggagtgtatggcggccggagttgggtggtaggcaaccggaccgttgggaggcgcggtgctgtgggcagtggaggg

SEQ ID NO: 17351 - DNA, 687 bp, Zea Mays
ggtcgaggagcatcacgggtacctgagaatactcaattgagggagcaaaaggcgtgagctgactcgaattgtgctggccgcggtgaggcactcttcgcggtggcggaaaacagctttgggggaagtttgaaatcagtgctctctggtgaacaattgtgaacgattcttggagactggtttcgcgataatctagcgcagttgcctgggccatcaatttataggaggcttcaatggtggcgcttaatttggccgggcaacgctggcggccggaaacaaggaaggaccctgacgcagtgggtttgtgtcctcagtcgtggcgagctcaccggcgatgattggatagccatagcgagtcacggcgacacggtggaaaggcaaagccacgcggcacaaggccgagaggcggcagttcaccggtgagcatatctgctctagccaccgagtagggggggtacgatgggagtcattggagtggagtccagctcaccggcggcgaagattcacttgccccacgatattatccggtagccaccagtgcgaatccgggcggcggcagcacgaatcttcacgcagggaggtcgccggcgacgagcaagcagcgctggcagtctgatccacccgagagcactgtaccatgggctaattcattcagtcaacctgacagtcataatttaggctcgattttct

SEQ ID NO: 17352 - DNA, 338 bp, Zea Mays
acggtaacagccacagtcaccgcgctagtgactcagtccctctctccggccaccaccgcgccatgctaaattcaagagccaccaccctcaggtcctataaattgagcgtgccatcggctctgctaggtagtcacgcagccaatgcaccaacccgtgcctcagatcgtccaccagagctccctaatttgagatttcccccaaatcggtcaagaacaccacttgtgtgagctcgccgtggccagctctccacaggtccgatcatgccctcctcgctcttgttttagcatccctgtgtgcttatgatgcttctcaacccgaccaattaagctagaacccat

SEQ ID NO: 17353 - DNA, 768 bp, Zea Mays
aaggaggtggccgagctacaaacgggttattcaagtgagatccgactgaaccttaatagggcttggactcggcgagcagtcccatggtggtgactggtgatgcaaatcttgcagtcagtcatgagacgaccgaggtggtgtcaggctgtttgttgaggcagcaacgaagtctgttcagcccatggctccccacagcagaatgccatggtctcgatcgtacccctcacgatgtctcacttcctcttgatgtcgtctggcatgcaatgcctcgatgctggttcgtgtgtcacaccggctgttgatgtggtggcgcatgtcaccatccgggtgggctggtggaagaaggtggttcgccgctcgagtgaggatctatcggtagccctcattgtcgagcgtgcgacgtagatcattcgccatctgagccaacgcaccatcgagctgtcttggagtctacatggccaaactcaagttgcaggttgcagggaagaggtaaatgctcacgtgggggtctagcattactcccgcccaccccgcgttcatgctcttgggcgatgtggcgactctgacgatggacattcccttgtaggctaaaaccctgctcgggagtctccccaacctcggatgcctcgtctcgggaaacaggctgagttgggtcctgttcccagcggcgtggtgacgctggatgttgtggcagcagttctgccggtgatgtggctcatgttgtggggctcctccccctacacgattggttcgtcgttggagacagag

SEQ ID NO: 17354 - DNA, 508 bp, Zea Mays
gtgagcatgttgcaccgtcttaagtcgttgccgacttaagccgattgctctgttagcagggcatagtggtcaccccgagttaagtaagcgcgagcatgttgcaccgtcttaagtcgttgccgacataagccgattgctccgttagcagggcatagtggtcaccccgagttaagtaagcgcgagcatgttgcatcgtcttaagtcgttgccgacttaagccgattgctctgttagcagtgcaaagtggtcaccccgagttaagtaagcacgagcatgttgcaccgtcttaagtcgttgccaacttaagccgattgctccattagcagggcaaagtggtcaccccgagttaaataagaatgccggtcaatcatgaacaaattgagtattcttgaagccctttttattgaagacacatttcccgttttacagagtacattatcgtcccgatagcttttgaaatacagctaggggtaaaacttcctgaggtgttctatattccaggagttcc

SEQ ID NO: 17355 - DNA, 953 bp, Zea Mays
taattagggttattttagggtttgggcatgtttctcactttaagatgcatgatatggttaaggtatgatccttaagatgaaaagacttagttaaatctttgctcctaaattttggtacctttggctcaaattgatacacatgtggtaatgatcttgaggttagcactgagaagaaaccctaggtaacactggggtgttacaaagacgaagaagttcagaatcctgaaggtgttcgtcgcaagcgatcacgctggacgagctatccagccacgcctgatgaggagaaaagagaaggaaacgactctggcggttatcatgcttagaacaagatgttggtccctcaacatcactcctcggtgatggcccagcgagcaccaccctcgaggatgatgttagaggttgtgttgatgctagggttggtggttgtgtgcttgatgaggatgaggaggacgaagaagaagaaattcccttgattcgcaagaacagccgccgcagtaggagcagtgacatcccgatgcaggccttatcaggacttgttagcctccaggggttgacaatgtctgcttttgaccacacattagaataaattatccctaaaaaccttttatgagagcctcatgaggttgaaagttccatcgtccgttcagaggtcccggatgatgttcctttgtcatgcgatcctgtcgggcaagaggtaacccggacagtttctcgtgctttgtcgaccttggagagtggtctagctcacgaggacacgctgtcccttggcgctgctggtcagagtcacctagctcctttgggtacgatcgagggtgctttagctttggagggtgccgctaaggatgacccagccccgagggtggtgctaagggctacccagcccccgagggtggtgctaaagacggttaacccctaatgatgccgggccaggatcctcttcggctgcttcattg

SEQ ID NO: 17356 - DNA, 558 bp, Zea Mays
cacacccggggacgggagttgatgggctggctggctagggagtggagagtagtagactcgttgctgttgcgatcgagagatattctgggcggggtccgtgactttcagcgaatgcactgaagtcagacatcttgtcagattcactttagtgccactgaactttacgcatctatttctgactttttaatcctatccgtctcctggaaggttgggttgggcttggtgtcgtatgtacatgtattcttatacgtgtacgtatagtagacttgatcatgaggcatctaattcgatccgatacatccgaaaaaatcgatccgacccaatcaatataatgagtgggtatgggccatagtttttatccgcaataatccacgggccgaatactgaccctgatttttttatacaaaattggacccaatctaaaaaacccacttttgaacaggtctaatgcatagtaaactagatgcatacaagaacacgtgctttaaaagtaaagataaatttgcgtacaagggaggggttcaaaccttagttattggctccaaatttacacccaca

SEQ ID NO: 17357 - DNA, 689 bp, Zea Mays
ggaaatttggaattggcgagctctggtaaacaattgagggcacgacttggtggcttggtgcttgacaaccctacggacccgtcggtgtgctcaatttatagtgtgcttgagcggtggagttcaatttggacgaattgcgctagcggttgagaggggaactgagtcactggcgtggtgattcgtggccttcaccgtggtagacccactagtgatgagccaggactacggggcggtttatgatgactcaccacgacgtggtaaagcgttgaggcacatagcctggccggataacgacgaacaccggtgatgccagcgcgactgaccacggcgggacacgacggccggtgagaacagtggccggactttatctccagcgcgatatttcttaccgaggagcgctatctgtgattggtcgggcgtgaatcgcgacgccgacatagatctgggcgcaagatcacctgaggagaggtgggtgaatctgtgatctgtttcagtcactgtacaatggaattcctatatagtgcgcctgacagcccaatttgaagggcctggatctcaattttccatgtggcaacttactaatccaccagtaacaaagttgttgcctgatgatccagctacaatcttgctatagcaaccatagccaaacactcactagatcatggttgaattccagtccaaagatttgc

SEQ ID NO: 17358 - DNA, 325 bp, Zea Mays
tacttcatagataggtatatatgagtgaatatgagtgaagtgtgagtttggtttaaaaatttgcggagaaaacgacattttggcacccgactcagaaacgatttctataaatggatcataggggtatatctagtgtctgggatattggataggtgtgaattttggcgaggaagttactagaggtgtcatgaggatgctggaaaaatttggggttgatttgagcaattttgagtggtttgggcatttcaccgagcacctggcgtgcggagttttgaaacgacggtgaaatggctatttaaggatgtggaacctcccaaagggagag

SEQ ID NO: 17359 - DNA, 624 bp, Zea Mays
caaggccgcgcacctccagcagaggaaagacaagaccagcagcaccaacccgctggggaggacaaaaggcacaaactctccagcggcaagttcaccagggaggagggtgccagcgtaaatccttccgccgaacgccggcgcatcccatccaagtatgcggcacaccatgtcgagcacccactcagtctgggcatgctcgagatgaacttacaaggccatggtaaactatggcgacacaaagcagaaaccttgaaggcaaaggggcgcagaaagctcgaaggcgaaagggcaccgtgagtgggagagaagcaaggcatggctgctactcaagggatgaacccctgtttaatggcagactccctcgctcccgcctcgaaatgtcgcgagaagtctccctcgatgcacaccggggtatccatcctagcgtgttggtcttcgagtgcgaagaaggcgaaccaccgcataaggagcgtgctaccgccccgcggtagtgcgccccctcgtcttcaccgcaactagcggtccaacctctggcatgggggcccaggcccacatgtcatgcacctggcgcgccggtttctgggtgcggagaaggcgaaccgacgcgtgaagagcgcgcctccg

SEQ ID NO: 17360 - DNA, 443 bp, Zea Mays
accgaggtgacgctgggaagaagaacggtggtgtcgaggaccggctaactttgacggcgcaacacatgagcatgagcgcggcgtcgacaaacgacacactccgatgatcagggactgacgacgtccgcggcgagcagtaagcagggcgaggctgtgccagcaagttcatggccgatgaaagggacttggctacgacgacatgggagcagctggcagtggagaactccgagaagaccaaatcaagcactgcgcagaggagtgtggcggtggaggtgagacgagtagctgggacagggtggggagtgtggccagcatcgacttatatagccacaggagagggaggggagaagacgtcgatggggagagggacggacaccattgatggtgtggaatagaaactgccgacgttaatggtgggagctgaaacggacaaagttagggaa

SEQ ID NO: 17361 - DNA, 509 bp, Zea Mays
aagagcggttggccccggcgtggcgtcacacggtggcgcagacaacagatttgggggaagaacgaaattctctggctgtggtggctaatcgagggcaagggttgccgctctggcttcgtaacaaactaatagagctagctgtgcactcaatttatattatccgtgagtggtggctttgaatttggaagagggaagctggcggccgaagaggggggtgagtcacctgcgcgaactaccgtggcgttcaccggggcaatgtctcaggcgatggacaggctacctacggtggtctactgcgacgtggtaacacttctaagtacgtggcgtctaggcggcaagcggcagactccggcgagggtcatcttgaccagccatagggctagtgggtacggcggccagctcatgacctcatccgcggtcaagatcttttcaccgccggccgttatccacacccagagcgtacgaagcgcaacgccaacgaggatcacggcgcacgcccaccggcggcg

SEQ ID NO: 17362 - DNA, 411 bp, Zea Mays
cgcgcagccacaagcccgacgatccatccacccccgcgaaaacgcgcaaaatgaaattcgtatactcgcgaatttgatagagggtgccttaccaccgatggggatggcgaaggtgcatggccacggcgcgaggcgaatccgcggcgcattcttgcgacggcgaggaatcccgaggtccccgattgctaaccccgcctgatgaagccgcgaacaccatcctcgtggtccagtgaagcccccaggcacgacaccgaggacgcggtggcgatgagcgcacgggtcaacttatggcggcggcagcaatccctctctctctctctctctccgcttctctccactgcggccggtatctgcgaccagagaacctccgggcggctagggttttgaagcctttggtcccccgccggctac

SEQ ID NO: 17363 - DNA, 463 bp, Zea Mays
aaactttggcttattctatgcatatcttttgcctttccatcgttcctttatagtcgatcgacagcttgtatttgtgcccaacacagccgttgttctcagagatatcgctcgagtaacgacttgtaattgttgcgtcgtatttaatcctgccttcatttacgtagagaaaaaacgactgagttactgctggtgtcttcagaggtaacaactgaattatgctagattgcatcggtgttttagaggcaacagccgagctatactgggccatgccggcgttttaaaagtaatagccgagtggtgcttggcgacgacaacgtttttagaggtaacagccgagtcatgctgagccacgtcggcgttttagaaataacagtcgagtggtgcttggcgacgccgacgttttagaggtaacagccgagtcatgctgagccacgttggcattttagaaataacggtcgagtgg

SEQ ID NO: 17364 - DNA, 815 bp, Zea Mays
agctgaaggtaatcaattgtgtggttgaactgtctcatcagtcttctattaattgttcctttgtttttctcccttgctctccttatcatgttaaaatcacctaaaatcagccattccggcttcatcagattacgaatatggcgcaactctgctacaaaattcattttttcattttcaggttgaggaccataaacccctgtgaggtcccacaccatgtcactcatacgggagcagattctgacagataacgagtatactgatggataaggaatagcagttatgtcaaacagatcctcatcacatgcaattagaatcccacctgacgctccaagagatggtaaatgaaccgtctaagcagctaacttgtaacccagtgcttcctttagaaggttattattccagctcattatctttgtttcttgaagacagacaatagttgccccagtagagagaatcgtatgtttcacacttgcccttttagctgggtcatttagcccccctcacattccatgaaaaaatacaacagttggcattcattaatcaaaagtagttcccctacatacccaagtagagccacacaagaggaacacggatgaagaaacaggacctgaccagacaaccaacgtcagcagcacgttgccagctgggaacagcatgcaacccatgcctgaaataatgacagactaaaacaccgacagagcaagccaaatgaaaaaacaccgacaatcccacaatttgctacccaaagcagtcatcaaaagcagttggacgacccacagactattacacatgcgagataacattctgcaccagac

SEQ ID NO: 17365 - DNA, 473 bp, Zea Mays
caaaattgatctaaatttctgattatttctctggcatgaaatatcattgtacatctacgcttctctggcatgatcgatggaatgggcaatgtttatctgaaaagttcccggagctctggtcttttgcctcggtcaaagagattaacatccatcaaactcgattagcttccccaaatgaaatgtttcatacccccttctgctgaagcgttcgagcaacttcttcaacttcaagacacccttggtaatactcagttgcttgatcacaatgatatttggagatgcagtgcctcctccactcggttttcctcagtcggtttatgcacacttgactggcacccgtcaaacgctccctctatttgtttggttatggaaatctaaatgtcagcccaagcacaaagtcttcttctggctgctgcttaaaaatcgattgaatactcgctccatcctcaggcgtcgcgcaatgccattagact

SEQ ID NO: 17366 - DNA, 445 bp, Zea Mays
gacgactttgtggtcgtgttcctggatgatattctgatttattcaaagtcagaggaagagcatgagcggcatcttcgtctcgttctgggtgctcttaggaagaatccgttttatggcaaattgaagaagtgtgccttttggctgtccgaagtggctttcctgggtgttacaccaccgccaccacctgaaggtttcccttcatctgccgcatctcctcctcgcgcaggtctgcctctgcctttaggggcggacttcgtccgccagcggacacaccttcacgcgatcggccgcaccctcttcttttagtccaacgcaccaggacgtcaactccaccacctcggcgctcctcagcaccagctactctttggaacaaagtagcgtggccgaaatgtcccgttcacggcaaacgaagatggacttttccattgatctcgttataacctcc

SEQ ID NO: 17367 - DNA, 433 bp, Zea Mays
ggaaaacatgtggctaaataagtaggacctatgggccagtcttaggatttcaaggatgccctaaaaagcacccttctgattcggtgaggagacgctctttacagcatgcatgcattttaaaacacaaaaggattagaaattaaaggagtaaaaatttgatcgaacccacttccttttaacaacccaggctcacatattttctttcttctaccataacctttacgtctgatcctcttccacaggtgacttcacccacctccgccaatggaggagacactcgtttcagttccgatttcctttctcatgagggttttccttccatcttgtgggaggtgctcaactccgccggttaccctacgccccctttgtacacggtgcagctgtacgaggagcatcgggtgccatgttgccgagtctggctgactctggaggc

SEQ ID NO: 17368 - DNA, 624 bp, Zea Mays
gctacgtgtcgtactgggttgactccatcaacccagctacacgttccaagcgggctcccatagggtctggaggccctacttcttctgatgaaccatctcctcagtctcctcatcacgagacctcctctcgcaccgccgctgcttcgcgtccaatggaccgcagcgggagaggtagaggtcaggtcgagggcacggtcagcgtcggggcctgtttatgcgtctggcaaagggcatcgctggcgtcttcgccatgtgccacagcctggcaatcgaggagtctgtgcataggtgcccgactaaggtgctgcatgaggactttcatcattacgctgcctccatgggtcatcccttgcctccgcactctcctctgccttcaacccctgcctaccctgagaaccttaatgagtggcaccaacaagagtatgatgtgccatttgttacccctgaggatgaggccaaggagtttgatgactcctatacatcggctactcctccctacccgggttagggacccattcccggtgaacccagggcgtccggctctggccactttcatcctcctccctatccaggtccgggaccaattcctagtgatcccaggccttccggctctggttactatca

SEQ ID NO: 17369 - DNA, 366 bp, Zea Mays
gaatttataatataaaactagtagtgatctgaatgaaaggatttgagaacagtgcatacaggtggcaattgggagttgtaaccaatgaactggagctgatctgttgtgcagtaatattagtaagagttgtttatttcttttacacttgtttcttttaaccagcaaataagattagcctcaactttcattgactaatatctttgcatactaggttagcatcatatgcatataccaaactcgtcaattatggtaagaacaagagtagaatatcagttctaaatcatcaactagcatatctattctcaaaccgatatcaacaaacagaccagcaaaacaggtctacaaacagaccaataaataagctag

SEQ ID NO: 17370 - DNA, 556 bp, Zea Mays
atcacgaaccagcctccgattgtaccatcctttgcttgtatttcgtcagacacttgtaagagcttggtaagatacattagtgtgttcctgtgttccacctgagaggagcgtgtagtgaaattattagggataaccgtcaccgttagtttcctatttttgtgtttcgatggcaggcgacgaagaagaagcaaggatccctacagacttcgatgaatgtgttagctgccaaggtcttgaggcaaacaacaagctcctgaaggagcaaatggagaagacggtccacaagtcagtgcaagataccttcattgacatgaaccttggcaagacttacgagaggctggatcgacgattgtcccagatcgtcgatagacttgctgtgttggagacgcaacaacaagcaccaccaccaccacctcctcgtccacgtcttcccgatgatgtagtgtttgatgaataaggtaattatgatgaagcggccaccagagatttgcgcctaagtcgtcgtcttcatcaaaacacagaaggtatgccacaccgccagcaaggtaataacaat

SEQ ID NO: 17371 - DNA, 474 bp, Zea Mays
ctaagaatggctggccatggcttgatgcctcacggcggcgttccgaccgatttgggggaaatctgaaattcacgatctatggttgatgatcaggagtgaggagtggtgcattgggttcgtaacagagagacagagcaaggggaacactcaatttatagcgatagtcctcgtgctttgcaaatttggaatggaagtgcacacggtggtgaatagatgagtcaccggaactcatctaccgtggtgctcaacgaagtaaagtctcggggtggtaatcgactgtctctcacgaccaactgcgatgtgataacacagtctatggcgtggcgtaactgagataaatggtagccaccatagtgacggctgcacggccacgtcgtcgggcaagtgggtacgacaagcttgctctagggcccaagttcaccccctcggcgatcttttcaccctccccactgatatttttacgctccagcgcgc

SEQ ID NO: 17372 - DNA, 331 bp, Zea Mays
cagggttctgcctacatgacatcttctacctttccatcacccgaggtggagtttttagccaccaactagagctactcaaatagagtttcaacatcgatgtcataggggagctggctagaggcaaataaccaacataacatggcaccgggaaatactgctcgatacataggatgaatctccatggcttggttgaatgtaaacagtagggaaactgtctaggcacttccaagagtacttcgctgagcaccacctcaacagacaacacccttaatgatggtattaggataggcaacccaagggaagcgagagggggcccaaacactggtcaaca

SEQ ID NO: 17373 - DNA, 392 bp, Zea Mays
ggagaaccagccatggacatcctctccctgcagcttgtacgtcctgtccatcttggggaagatctcagcgacagtcgtcgagttatcaagggtcagccctgtcttacagaagcctatgcggtcgcttgagaattgtagatcacataacagaacgacgtcaggcaagctggtagacaaggcaagctggtaggccatctggctcgagtcaggaaacaaaccagagaatcctcctcgagctacgacttgagggggacgacctgtagtgtaggatgacacagcaacatcagcattattaattagcagccaaaccacatggcccgcccggcactgcaattgtacaaaaacaacacttggaatttgataggttaccgctcagagtctgccattttggc

SEQ ID NO: 17374 - DNA, 1325 bp, Zea Mays
cggggtccccggcggccgccgcccgttcccaagctacccagggcggattggtttctgtgaatctctgaggcggagaaggccaccccagggccgaacacagtccgggaaccgattggggcgccgctcggccgacgatgtcgtcgagcaggttctcgccggcgctgcaggcgtccgacctcaacgacttcatcgccccatcgcaggactgcatcatctccctcaacaagaacacctcctcctcctcccgccgcccccaggtactggcacagctctctcctccaggtttcgttgtttaccctagtattcgtgtccggggcgagtgctggttgggtgcagtttgagttcactcgccatacttgtttcgaaccctgatatggtgttatgtgcgaccattggacatagcatcttcagatgatcagaaatcgcatgtccatctctcacgtgcgcgcacgcacacaaaaagccctcatgttcattttgtaatgccaaggtggtcctctgtaggcattaaggataccaaataccttgatctcaaagttttacaatgaaatgttagcctaatactatctcccctttttttaccaaacttgagcagaacaacacccctacttgttacagaatagactcctggcagcatagcttcgccataatttgcatctatgcaaaaacgaccatttgtatgattcaggaaagaaatttctagctttatttatttttatcagaacaattaggatgagtgtcacagcctagtcaatgaaaccggctgcatttgctgagaacctacaactttgaaagtgcataggatatacccatgttcatttctgctaacaattagctttacatctgcatcgttggaacttcatgggtcagttcatcatctacagcctttccagcaaacccttgcccatattcctgacacagaaattttacagaacaaacagaaagaaactacagtgagctcaaaacctccagaagaagcagtcaagatttcactaaaagactgtctggcatgcaggtttttcttttattttctttttttactcttttgatcagttgtcaataagtaacctgatcaatttcaatcaatgctgactgattcatctttgtcttagtggttgtataacatcggcagagacggttatgctggagaagcaaagcttgggtgacttcattgatcgtataaactctgataaagctgttattgtatctgtatctccccagtcaagagcatcactagctgcattctttggtctttctcagtcacaggtaacaacatgggcttgccatatccattcccctgtcagaatcatggtagatacgctctt

SEQ ID NO: 17375 - DNA, 573 bp, Zea Mays
ctcatatgcaaaactcaacgcctagactcaaagacagcaagactggtggaaaaagcccgcaaggaacaacttctggacctcaggacagatgaacaaggagccctttggttcaagaatcgtttgtgtgtaccaaaaggggaggcacgagaagtcctgctcgaggaagctcacaactcagcctactccatccacccagggactaccaagatgtacctagacctcaaaaccagatactggtggagagggatgaagaaagagatagcacagtatgtggcccggtgtgtcacctgccaacaaataaaggccgagcaccaaaagcctgcaggcctattgcaacccctcccagtgcctgaatggaagtgggaagaaataggcatggattttgtaaccggactaccccagatgcaaaaagggaatgactctatctgagtaataatagatcgtcttaccaaggtagcccatttcatcccggtgaaaactacctttggaggagccacccttgcccgaatttatctcaaagagatagtcagactccatggcattccaagaaagatagtgtcagacagaggaacc

SEQ ID NO: 17376 - DNA, 274 bp, Zea Mays
cctgggttgatgccgtgagggaaagaaagggtgaaacacctcgtgttgaaccacatcttcggcgtcgctccgaccggcagtcaggggcagggtgcttcgtcgtggcatggcacgagtgtctgtagcaccggtcgatggtaggcggcttcggtgatcgcggaatttctcaccagcgcaatatttctccgtgggaccacatcgcgtcgtgaacaacaccgcggggacctcgtgcttcggtaatgccctcggatcgactctatacctcctctgcatt

SEQ ID NO: 17377 - DNA, 471 bp, Zea Mays
cgcgagaaaccgaggccgtcaccgggtaggacaacaagcgcctcaccgcgggaggccctcccgaaccaaacacccgctccaggatgaggagttcgaacgaggccggaatgagttgcggccgatagcaccacccgaagaccttgaacgaagaaaaatcgaaacgattgactgtgtcgggatgaagctccacatcagaacagatatcacgcaacagattttgcgccgtagctagctcccaagcatgcacgggaattcctccgaactcaaccatgaccaaagatgggaacgaaaccacctccgcgtgagctagcccagaccaccggatgaacttgaacgaaccggagggagaattgaacaccgaaccattgttgtacacctcaatcgctgcttgttcggagttgaggatcaaaacaaaatcttcaggggaagaacggtgcactgagaaggagtcttctagcaatccaaacccag

SEQ ID NO: 17378 - DNA, 445 bp, Zea Mays
tcaccgatcatcaagggaagtcagtttcttgtcaagcccgaccgacagctcaagacccgatgatattcagtctagcagcagaaagcatatccgtggtggaagaattcatggatgcgtttacagaagagaagtagagttctacattgatccccttccaggaacaacaccgatcgtaaagagaccgtattgcatggcacctatagagttggtagaattgaagtcgcaaatcgcagaacttcagcagaaaggattcattggccctagctcatcaccttgggggagcccagtcctgtttgtctccaagaaagatggaagcatgaggatgtgtatcgattaccggtccttaaacaaagtcatgatcaagaacaagtatccgttaccttggattgttgaccttttttatcaactccagggagccaagtatttctcgaagattgatctaaga

SEQ ID NO: 17379 - DNA, 325 bp, Zea Mays
ggttctctccacgaatacgcagaggaagatgcctgtacttcgtgttgtgcagctactgccggtaggtgtggctgagagaccacagagttcgcctagcagcatcgctgaccgaagcagcataggtggatagcggcgccagagactcatgtgctgacagagtcctgaaccctctatcacctgcatccattaccctgacatgaatgcaagtgatgtagtaccaagctcgaggaggctcgtacactcgcctggtctcgtacaggggtcggacgtaggttcccaacgcgtgcagaacatcctgcagcaggttagggaagtaccctgtctc

SEQ ID NO: 17380 - DNA, 705 bp, Zea Mays
ggattcctagcctataaaaccatgcgcaagctgtaaccgagagaaggggagagcttcatcgccgctggaggaagacagtgggtccgccgcaggggatgacctcgattcgctagcgctggcgccccggatggtggatgggggtttctccagatcgctttggagcttggacatgcattcgaggggcgtgttgatcggctggttcacctctaatcgctcgccggagtcaatcctcggcggcagaaccgcacatcgacgtggtcaaccgtatctgcttcacaaaacccggtagggatcttctcaattgattcgtttccctctgtagaccgtgtaggaccaatctgattagggggtatggctctggggtggcggcttggccgactccggcgggtcctccgccgcggggaaggcttgcgccgctgtcttggtggtcgtaatgagggagatgagctagagccgttggatcggaggggaacggctgagattagaacccgtgtaaggcttaggtcgggaaatcagatccgttcagatctgatcagatggatcaggagactctagtgtaaataaaatccacgccgtggattccagatcctggggccgggattacgtaccgattcgccggatgtatgatctaatctgtaccgcctgtttctaatccagcgactagaataccaccgtaccccttcgcgggtacgttttacaaaagaa

SEQ ID NO: 17381 - DNA, 643 bp, Zea Mays
ctcgtgtcagattggtaagtcttgttaggttgtgttatgtgtttctcttgccttgctatctaggtggtattctgaatgttcaaccctttttacaaaaaaaatgttgtctgttctgctcatgaaaagatttccccctccaaacaaccttgagtttagcaagtgaaacctccaaaaaaaaatcatgcttgtgttggtattctcttgcccttgtgtgttctacacttgaaattgtacctgcacaacttatagacacccacagcttgaccgctagaccaacccaagtctccttgtgcacttgttgtgtcaaaacaaatgttgtttggtgtctagttgcgcaaaccctatcaaggccatgtttctttccataaacccttgcccctaaaacttcataacattcctgttgatcatccagctgatcctgtttgcctacctctccttttgcctggatttggtaatcctttttcttgtaaatcatatttgccttaccaaccaaatcccctattgattctgccccgttatctggttatctgctataacccgttctcaagtatcggatgttgatttgcctaaatctctcatttctggtcagtctcatacccctcctccgaggatcatgatgttgtgatcaatttaatctctaaac

SEQ ID NO: 17382 - DNA, 284 bp, Zea Mays
aaccgcaccgccgagttttgaatcccaaacacggacgaaacctaccattcgtagcactgggtggttttggggctcaaccaccaaaccgccataagtagcgcaccgcatgcacatcccccacgtcctagacctgtatcccttcggtccacgaccacgccggcaacacgatctgctctaccacgtccttgcatcggtgcgtgtaccaagtgtcaacaccacgtctagtcattctgcttctctggtccctcggtcaagtcccaacgctcgtccttcaccgctcccga

SEQ ID NO: 17383 - DNA, 590 bp, Zea Mays
aaaaagagaaaagccctccccccctctgctgggctgaatccagcccatgccgcggccgctctcccccccctcgcgcccgcaactccctcccccggcccatttccggcccgctttcgcgcacgtgcgccagcccgccctgcgctctctctctctctcgctgacgagccgtccccacccgttagccgccccatccctcgcctcgctcgcgatcactcccactggcagtatggccccgcttgtcagtcgcttcgtcgtcttccccgtcgtcccttcatcgcggtcacctctggccatcgcctccgtcccctcctccgtcttctcgccgcacagggaagtttggcaccgctccgtcctcccccccttgaccagcgtcctcgccggtaccgccccgccgtggcgtctcatcggcggcgctgtgcaagctcaccggcgccgtgaggctccaccgctccccttccctcgcgcgcctataaaagggacgcaccgagcccctccttccccgcaccggcctcggccattcctctcctccctcgtccgagctcaattcgtggaaaggccgccgccatcgtcttcctccccggtgagtcatc

SEQ ID NO: 17384 - DNA, 862 bp, Zea Mays
ccgggatcccctcgcggcccacttactcatttgtgcccacgcagcccagcttctctcctggcgtcacgttgacagatggggccaggctgtcagccctcctcctgggaaccacaacctcctggtcacctgcttgtgggccctcttggtcagtgacccccacaacctccatgactcagtcgcatgctgctgcaccctcaactaccgacaggcggggcccacgttgtcagctgtgtatgtggtgcatgtgcctgggtgtcccgtctcactgccaggtgggcccctgttaccgggtctccttctcccccgcgcgactcgctcgcgagctcaccggccgccgggaaattcgaggtagttaggccggttgattacctccgcccacctctgcaactataagtccctgccgcaacctcttgcctcacctctctgtttccctggtcgagccatcatcacccccgcgcgccatagccgacgtagagaggagaggattagggagggtggttgcgccaccgttgctgctcaattcaccgctgcgcagagccaagacagggtaccagggagatttgctgtgacgtcggggtcttctaatcatgatctgggcgaccaaacgcacgggcgacgactgggccaggaaggatttctcgccgtaattcaatcaccaccgtggagctccacctccgcgtggtcagggccaccaccgccacaatccgaggtgaagaaaccctcatctagtttgtctcgttggttaaatcgtgtagctccgttcaatttgacaaagataggggggtagcaggatcggtctgcgccggcgtggggcacgccgccgtggagatcgaagtgtcgctagctgtgcgctatgggtaga

SEQ ID NO: 17385 - DNA, 641 bp, Zea Mays
cttaggatgaaatcggccttagcccttctccatgtctttccaccactaggcgacttcatctcttggtttggtctatcacataatgctaccagatccactcttgcctttacgtcatcctttgacttatcaggaatgtccataattgttgcccaaactgtcttggcaacattcttttcagtgtgcatcacgtcaatgttgtgtggaaggagcaggtcgtcataataggggagctgagtcaagcccgacttatgtgtccacatatgctgctcaccatatcccacagaaccaccttctagattggccacaagcccatctatctattgacgattttcggcactagtcatcattgcaggtggatggtctgtcactacgacacctttcgtaaagttcttgatgtctaggcagagtggatggttaggagggacaaattgtctatgtttatcaaacgatgaatatttgccaccccttttcaacctaatgaacctaagagcttccttgcaaactgggcatgggaacttaccatgaacacaccaggtgcagaatagcccatacgctggtaagtcatgcatggagtactggtaccaaacatgcattttgaagtttgtcttcgtagctcggtcatacgtccataccccttcctg

SEQ ID NO: 17386 - DNA, 480 bp, Zea Mays
accgcccgaactccacgatacgaaggggtacgcaagttttaatctaccccatccgctcaccatcctacggtcctggcttcttcatcccgttcctctaatcctcgccattcgataaaagatctatggcccgtgctatctcttctcctcctacccaagcagcggcgtcgccgccatggctacacggtggaggacacgaccgagacccaatcggccattcctgagcacctctgtcaaattaaacggggctacacgaagctagtcgaacggtgagcgttatgatgtagttcctaccggcgattgtaatgtgatgaactcctcccatggagttgtgcggacccacggccaagctgtgcgatcggtgagaaattcaccacgcacgaccggcacccggagcaatacaactatgcgctactcactatggtaaatagagagcaccgatcacgaggcctattaccttcaatggcgtcttgacgtgatcca

SEQ ID NO: 17387 - DNA, 523 bp, Zea Mays
gtgaattattatcatttatgttataatttgtgaactaaacagtatctatgttcttgggtttgaatacgaatgggcggaagacagaaaaaagaagaagcttatgccggtgggctcagaacgaacccatgcaccagccagaatctgtgccacccgtaatcaaaacaaatgggcctaaaggcccagcccacacggacaacctatcaaagcaaaatgggtcctcgcacgcattcgtgccaggccaagtgaactcaatgatatacgtggcccaccatcgtggctttctttctttctggaacggaacggaagcacaccaaggtcctccgccttcttctcactgacatccgggcctccctgcacagcgacagtgaaggacccacatcagtcgggaaacggagcccacagccacagcgtgtggtacgcgagtggattgaactaaccacccccggcctcgtcttcttctccgcgccccggtgtgttccccacctaaccccaccccgaatccaccatggccgccggttctggc

SEQ ID NO: 17388 - DNA, 786 bp, Zea Mays
ctccccttgcgcacttgaatccaccagcgtcttcatgagaacgcctcgccattgtcgctgaccgagaagaagaagagagagaaggggggttaagagagctgtgtgtgccgtcgggggaggttctcaactgtaacgtcggtgtaccggaattttcccggcattggtgcgcatgtgcgtgtggcgggaatcatcgaatcgacgccgccatggggaggaaagctccgccacaacccagtgagtatcctcaatacctgtagcttatgttctcaagtcgatgggctcttattttcgcatgatgcctggcgttgtggccctactagcgaatttccctggcgtggcaccctgcctgctggtgcgctgccgatgctttgtgtgccggggtttgggcagcaggcgggaggttgacgatggcacgtccgccgtcggatctggaaggagtgtgcgagattcatccaagtggggcgatgatcgttggccgttagatgacaatcgtagagccacaatcacgcaacaggtgtaccggttcgaggttgtgttctccccgtagatctgggatccttcgatacagattaggattggcggcattaaattgcgatctttggtttctgatctggcgggcaacatcgcccactgattcgattggggaaaaatctaatcttggcggccgatagctgatcgaacggctaggatggctgcataccccttcaccccagcgttttacataagaaaccctctggagttagataatgaacctgtcgtcgtgctcagtgtggctcagtgtcttgg

SEQ ID NO: 17389 - DNA, 654 bp, Zea Mays
aaaagttggaggggctctttacaaattatcttggccgaaggggtatccttcacctagagtcgtccgatcacaaccgatcggatgggattagaaccatgcgctatataacgttgcaacctgccctggcaacccgatccaatatcaacggatgagggatgtccacgcccccgatccgatcctaaccctgcacccgcgatccaacgaccaagttttcgtgtacgcgcgttctaacatctcccatgcgatctagggctaacggttaggattcagttacgtgcgaagggttacgcatttctaatccggatcgcccaaaaccaatcggacagtcctgcattcctgagtcaatcggtacgcgttgccctaatcccgaccgtccgagggtcatccaacgatccaggactgtctcccttacccaaccaatgatccgatgtgaacagggtcctcgccacgacaccgttcttgccgaagttgagcgattccccctaccaccgacacgctaccccggcaaccaatcctgactaaagcgatggtgatagcgaactagagggacattgttttaccttggttcacggtagtgaagacccaaccgaccacgtggtggcacaattccgcgacggagctccttccacagcgccggtcattcgtagccacagc

SEQ ID NO: 17390 - DNA, 553 bp, Zea Mays
cttgtgtgggtgtcacgttccttgtgtgagatctcaagcagcagaaaaagcacgagtaggcatggcaattctgtccgcaggcacgggtatccgcgggtttcgtacccgatgggcatcgatacgggtaagaaatctcgaccacgggtaaggatacggacaacatttctcacccgcgggtaattgacggatataaaatttcgcccgcgggtattacccgttacccacttaatttactagcccatcaaaatatccccatgccaccggcccataggccacaacctagtcgcccactcgcactcgattcctaaatccctcagtatggtatattctggcgcccagttggaactatgttccttgccattatattatgtctgtcaagttgttgatgttcttggtgaaacgaacatgaccacatgctcgtatggtattttctggcgagtaacgggttgcccgatatccgcggataccctgcgggtatgggcacgggtcgaaaattttacctgcaagctatcgcgggcacgggtaagcactagaggcgcggatatgttggcgg

SEQ ID NO: 17391 - DNA, 746 bp, Zea Mays
atatgcaataggccgaccttgctgcattaatactgctccgactcctttttcacaagcgtcggtctcaacagcaaaaggcaagtgaaaatctggtagtgccagcactggggtagtgaccatggcctgtttcaagtgttcaaacgccatttcagcctcctctgaccagtgaaaagctcccttctgaagcaaattcgtcaatggatgggctatcaccccataattctgcacaaatcgacgatagtaacccgttagaccaagaaaccccctaagatcagtgacattcctaggtctgggccaattcaccattgctgctgtcttctgtggatcagtggccacaccccggacagagataatatgtcccaagtatgttagctcctgtttgccaaacacacacttcttctgcttaaggtagaacttatgctctcgaagtgctgcaaagaccaacttcaagtgttccatgtgagtagaccaatctggactatagactagtatgtcgtcaataaacaccataacaaaccgcctcaggaatggagccaacaccatattcatggcacattggaaggtcgcaggagcgttggtaagtccaaatggcatcacacgaaactgataatggccctggtgggtcttaaatgcagtcttaaactccttagatgctcccatcctcacctaatgataccctgaggtcatatccaaactagagaaaaaatgtgtgcccgataattcatccaaaatttcttccaccactg

SEQ ID NO: 17392 - DNA, 739 bp, Zea Mays
gtgcaacgtgctagcgcttactcgacttagggtgaccactataccctattaacggagcaatcgacttaagtcggcaatgacttaagatggtgcaacatgctcacgcttactcgacatagggtgaccactataccctactaactggtcaatcggcttaagtcggtgttgacttaagacggtgcaacatgctcgctcttactcgacatagggtgaccactataccctactaacggagcaatcggcttaagtcggcaatgacttaagacagtgcaacatgctcgcacttactcgacatagggtgaccactataccctactaacggagcaatcggcttaagtcggcaatgacttaagacggtgcaacatgctcgcgcttactcgacataaggtgaccactataccctactaacggatcagtcggcttaagtcggcaatgacttaagacgacgcaacatgctcacaactactcgccatagggagatctctatgccttaccagctgatcaattgacataattaggaaaagattccaaaaaccagcatgccacacttacttctgcaaacgttcataacgactgttgaattataaacagcagaaacaaaatgttatagctttcagcgccaagaacacattctaatatcctaccgagtattcgagcgcactgatcacacacacatatagttcacaaatgcattcagtatcttctaaacacaacaaaacatctctatttggcaatgtct

SEQ ID NO: 17393 - DNA, 1031 bp, Zea Mays
tagaaagtgcaggggctcggcataaattttcccaagactcatcctacagctgcatggacggcgggttgttttaacacaagtccagggtctcttacacaaagatacaaggtcgaaggggtatggggacactacgaccatccgatcggaaatcggccgccaggattagaccgtgattcacacagttgggcacgtcaagctcaccatgggattcaaatcgaatggttccggttttatggagccctatctaattttgcccctccgattagatctcaacggtcgagacccacccaagggaacgggtacaccctttaatcccgtgcgttgctggtagatcggatggtgcacggtgtctagacgaaggggggtatggtcacatcaaatccggaccgcccatctaaatccaacagcctagaggccaccatctttcctctacccttttcctctaatccacaccatccatcgcgagatccacggccacgcacacatcttcttccccctggtctcccacggcagccagggtagcggcgtcgcatcccgccacgacggcggctaccaaccagagaagccccgcgcggcacccagagcacccaaaccctcatggtgaattacgcagcgaaggtcgcggcaattgatacagggcattcttaccaatagtatgccgactgtgagtgagggcaacgacgaggttgactggcgacgagtcccagctgctccggtgagcatttctcacatagcttgcctccattcctcatctcgctgatcccgaatacgattcgcaccccttggcgaatcagctcgacccaccaggattggttgaacggcggcgcacgcaggacgcagttgcgacggctcgatggtgttcctcggccatcccctagcggcaacacacgcacgggacgccgcagcaccatcgtcggccagaaacgtcgcctgggaacacgtctacgccacccacgggggcactgcagagctctccaataatcctcgcactctcttcgctacccccgcagagaacagctgcgacgacattt

SEQ ID NO: 17394 - DNA, 322 bp, Zea Mays
gaaattttctgagttttctgtcttaattaccacatcatcaacataagcttctacctgcttgccccagtgatcggctaagcatgtttgaatagctctctggtaagtcgctccagcgttcttgaggccaaatgacatggaggtatagcagaaagctccaaacggggtaatgaatgcagttttttcctcgtcttcttttgccaggctgatttgatggtatctagagtagcagtccaggaatgacaacatagaacatccggcgatcgaatctaccacctaatctattctaggtagtccgaagggatccttcggacagtgtttgttg

SEQ ID NO: 17395 - DNA, 276 bp, Zea Mays
gtgctacctaccataccactcccaaccctggtatactcacctctgttcgccctccttcttcctctctcccttcgtccatcatggtggcgaatggctcgtgtctttctgtcacatctgtgggtgccgccggccctcccggctcttttcgcattccagatgttcttgtcgctccttctttggtccacaatcttctttctattcgccgttttaccactgataattcttgttctgtcgagtttgactcttctggtcttactgtgaaggactcgacaactc

SEQ ID NO: 17396 - DNA, 522 bp, Zea Mays
cttgggacgtatcagagggtagccaaagaacgggaagacatacggattagtggtcccgtctgcgcccttgcggacctccatggcttctctaagcgaacgagcaatttccgcatcgctgggaggcaaggcgctcagttgtgtgccctctggtaaagcatcggcggtctgcttgtacagaggtagctgcctggccataaggggagctaccccatggtggaggtagttcccaatcaccccttcaagcgtaacccctcggtcacggagaatcgaaacgactgtaataggtccagtcgtcctcttctctcattcctttgggacaccccacatccagctctgaggagcctcagggggtgctttgggcaaaaatggtggaaggctgcgaccggtggcaaggacccgtagccgtagatgtataggtagaactactggatgtgtcgacccttattggacgagcacaatcataactggacgtaccccttgggttgagcccctcagagatgatagccgcgcaaccgatctatg

SEQ ID NO: 17397 - DNA, 897 bp, Zea Mays
agaaccttggtgaagacaaagaaattcagaaacctaaaggtgctcgtcacaagcgatcattgcgggtgaactatccagctgggcccgatggggagaaaaagtggaagaaacgactctggcggttatcatgcttagagcaagatgctggcccctcaacattactcctcagtgatggctcggtgagcaccaccctcgaggacaattttagaggttgtgaagatgctcgggttagcggttgtgtgcttgatgaggatgaggaggtggaggaagaagaaattcccttgattcgcaagaacagccgtcgtagtaggagcagtgacatcccaatgcaagccttatcaggacttgtcagccttctggggttgtcgatatctaattgtggccatgcattagaagagcatattcctaaaacctgctatcagagcttgctgaagttgagagttccatcgtctgttcagaggtcccggatgatgttcctttgccgcgcgatactgtcgggcaagaggtaacccggatagcttctcgcgcttcgttgaccttggagggcggtctatctcgcgaggacacgttggcccttgacgctactgatcagagtcacccagcccctccaggctcggccaagggtgcttcagctttggaggttgccgctaaggaggacctagcccctgagggtgttgggccaggcctcttcttcggctgcttctatggatgttcatgttgggtcaccactggttcagtctgaggagctcgtggtgacaaagttatctgctgctctcgtcagtccggtcaccgtagaggccagtgatccagatgctaggagtctgttgcatgctgatggagctgaggtctctccgagtcgtgctttcaacatcattcctgttgacgccccctcaacga

SEQ ID NO: 17398 - DNA, 631 bp, Zea Mays
gttggcagtgtgcgcgggtgtcgcgctggggaagaaaacggggctaccggcgagcagacaacttgaagagagagaaagggggggatggtagagcgcggggaggaagaaggccggtggtccgttgggtgaggattagacggtggagattcgacggtgtccaggtcgcaggatcataatctggcggtcggcggacgaaacagatctcgagtgcgttaggccattgatcgggctgtgtacggataagattagacggataggtaaggggctttcgaccgtggattggtgatcttacggctggaatccaattaaacgtaccgtttcgatgaaatgctaggaaccgctcgatttaaatctaatgtgtgggagtcaatcggctttggtaaaatcttgtacgttcatcacggatcctatggacctcatcgcataccggttcacttaatggctgggggtgatctgggccgttcatttctaatcggacggctatagactcgcgataccccttcgcggtgacgttttgttaaaaagaccctgagaaatataagaatcaacccaccatcccgtctggattgttcactgagtcttagaaattttatagtttaacccccattgttctctgtatttagtgttcggc

SEQ ID NO: 17399 - DNA, 662 bp, Zea Mays
ttattttgcggccttggatgtggctgaggcggaggcttctccgcgtgttacggatgctgaaattttgcctggtccgagtgttgggcgtaggcggcgaagggcggtggcgaagcgtagagtgggtgggtttgatggtggttgtcttcgtgtgggcagggctggtaggcaggaattgttgtcctcaccggttggggcgagtatgggtgatggggagttgtggaggctttttgagggtgaggagctgaggataatgctatttaactatagggagatgaggatcattccgaaggttgagcctatgtaaggtgtgataccctcgctgtacgcgtgtaactgtagtttgtatgataaggttgactgccttcgcgcagctgggtgtgttcgtaaggtgttgcgcacctagtctggtacattattgtgtcgatccggctgcgcctgtagactttcggactgatgcaatgcgccttcgatttttacacttgttatgctagtccggcggcacccttaggcgacttttgcacgggtagccttttggagaaggcttgaaatttgcgcacttgctgtgctagtccggctgcaccctttggcgacttttacacggacagtctttttgagaagacttcgaatttacgcacttgttgtgctagtccggctacaccctt

SEQ ID NO: 17400 - DNA, 337 bp, Zea Mays
aaaacgtcgtagctgctgcggcgcttctggacaagctccccaggtggaaactgcaagcgaatgaaaacccaccaagagatccaggtccttctcggtcttgttgtgcaacaactagacgatagctccatgtcttgacgccgcaaacctgagaccaaccactacaccgtgtctacaccaatgacaaacaatgccacatcgcagcaacccctcaagctcaaaggaagcatgacatgggtcccacctcaccggccccaaaggccgagtccaagcgtgcggagcatgcctggtcacaagacgagggaggagagatgtgacgagtcgtgtgtctcccgttagt

SEQ ID NO: 17401 - DNA, 747 bp, Zea Mays
cccctcctctgcacgccctcacagcaagctctggtgagtcctgctccccctctcctgcccacacagcaacctgcgccacccctctgcacgccctcacaacaaactgtgccaccctcacaacaagctctagggagatggaagatgcatctgcagatcgaccataatgggagtcaggaagccagcagccatacgatccagctaaacatcctaagagaaaggcaaaatcgaaggatccagcatggaactattgttattggccggatttgaacaaaaaagatgtggtgaagtgcatcctttgtggcaaaattgttcatgcgggtgttagaaggttgaagcagcaccttgttggtgttcatggtgatgttgataagtgcccgaagacaacatcggcaatcagcaaagagatgagtgattatttaaagaagaatgctagacagaagccgattgagttggatgatgataaagagggtgataaagacgatgaagttgaggtatttggagaaggggaaagtagagcatcccattcagttgttcagcccagttccggaacaacccaaaagtgaaggctgttagctgaagcaagccaaaacaattaacgcgcgttgaagtcttctaagtcaattgcatccatgcttcgcaaagcacatgaagatgtggttcctgagaggcattgcaagggcaacactcaaattacattgcaacgaaagagcaaggaggcgaaggaaagaacagatatgtatgttcctg

SEQ ID NO: 17402 - DNA, 512 bp, Zea Mays
ccaagctccgccccgccccatggaaaactatggctttcatgcgttctgctttgcactgctttgcatctcagcttcgtactaccaattgcgactggtgccggacttgaaaagactttgcctgataaattacacccgtccatctacctcaaataaaagaaaaactttgcactaacagatcagatgttgctatccaaatgatttggggaaagtgaaatcatgctacgagagagtctgctgctaaggtacagtagcaagatatcttaacactgaagttgttctataccttactgttagcatacaaataaagttttgcccatgtttgtcatcaagatcctttgcagcgtcctgctagaaaaaatgggttcacgggttacgagtgttatttaatgtaactaaagtctaaacagttgctttgtgtgttcacgggttcttatgatgcgaaggtcttgtgcagcagcctgtcctgttgattggctggttgttgctttagctgatcggttatagtgcaacgg

SEQ ID NO: 17403 - DNA, 277 bp, Zea Mays
tgtcagaacaattcacaaccctagtgaaagcaaagagaaaagcaattacaatcaaaggcaacagcgcagctcccagtcaacagggacgcaacagaactccttcagaccgccagccccaagaggtagaggaggacgaagctacggagggagatacaactcccaaccaagaagatcgttctgcctattttgcggagaggtcaagggacatacaacaagaacatgtcaagtaacgatacaaaaacagaaggaaatagttgaggctgaagcacgctagaac

SEQ ID NO: 17404 - DNA, 479 bp, Zea Mays
atggacaccgttgcgatggcccatgatcatgcaggatggagtatttggtatcgtggccgtttggtgagatctgatggggttggaaagaaaggaacaggcacttggatatggccaggcaggagcaaggaacgaaggctggggctggtgatctttgcctcttcgtatattcagacaaattaaaggtgccgaaacttgtcttggaggtgctgttacctgacactgagctccatcagtttcccgcccaaaccatgcaggaactgacttgtttctcccctgtaaattgtacagtcgcagcgtgtgggcgtcaagtgcccggctgagcagcggagcgtggctgggacctgggagtcaggttcgttcgttctggcgcctccttttctgttttccccacagtttgggcagcatgaaaacaaacagaaaaatgggacccaagcaacgtacatactatgagatgagcaatcattccaggaacataatgc

SEQ ID NO: 17405 - DNA, 618 bp, Zea Mays
catcatatagcgtgctccaagtgctaggaaacaacgacagtattcattttataattcttgagttatagaaatcgccgttcaattaagagggatccacaataagttaagtaagagctcagttcaaatttgttcaaatcccctaagagaatacctttctagatcttgaatgcccttggaaaaacctatcttactccccacaaaagttccaccatggttcacttcggttttcttaaaacttgctcttcagtttcgaaaaccggttcaaccggacctaaaaccggttcaatcggtttctgtattgttccttctgccacctctgacctgccagtctgcccgtcaaaagctgtcagaaaagttgtgtgcagagttttttgaaaaccggttcaaccagatttgagcccggctcaaccgattttgggtccggtcgtgtctccggctgagtagcacagtgaaccgagaactccctcatggaaactggttcaaccggtttatgaacaggttgaaccggtttttggtccacttctcccaacggctgccagcttttgggggatcctttaaataccccccacactctctctcttcattcacttctgcccttccacgatttcttggctgacc

SEQ ID NO: 17406 - DNA, 545 bp, Zea Mays
aggcaatgaaagtagtacaccatgtgagtctatctaaagctgggaatgataaagccctagagatgatggacgaattattagggttattgatgcgtgtggagcctgatataggtactggtgagagttgtggcacaagtgctggcgatgacatccaggtacgcacatcgtgttattatgaatacaccattattaaatgtcgataatgatccatgtatgtaatttaaatgatataggtcgaagcgtatgaaatagaagacttagttatagataatttacgcaatttagatgatgggaacgaggtatgcaacagaattttataatgtattatttatgctgctctacaacatttgtgtcttcactggagtttgtgttatttcacaggaaattgtaatagggtctaatacaaatgaatgcaatgctaacgatgatcaatgtaatatgccgatattaacattggaacataacactgatatgcgtctggttgatagtagtgctacgtatgtggaagctagaaaggtaataacattgctatagtatatgatgaa

SEQ ID NO: 17407 - DNA, 609 bp, Zea Mays
ggctgtgcctcaataaccaagaaagtcagggacgctggtgtaataaatcctaagactcaaggcactgttatgaaggacggcgggtttattcataaagaacagaaggtctttttagcaacattcctagccgaaagggtatgggggcattccagcggtccgaccagaggtagaagcttcagattagcactaggcgcatactcacccgcgcactcccctggccgacggatccgagatcgatggccaatatcacgctacatcaagatccaatctctaccggacgatttgtatcctacggtcaagttttaatgaagcgaagagttatcttggcttctaatcgcagccgatcgagaaggatcggacggccctcgagtcctcttcttcccccagcattgacgcacgacggcgcaacccaccgcgcggcggcaagaccaccggagttgcgaatccggtcaccctgcccgccatttcctaattcattcgttcctcgcctaattgatgacgttatgaactcgcttcccccaccaatttctgccctcgacgagcgtagagccctgcccacggcgcgccacggcgacaccattgtaggcgacacggggccccgggtattag

SEQ ID NO: 17408 - DNA, 459 bp, Zea Mays
gctcatgcttacttaactcagggtgaccactatgccctactaacggagcaatcggcttaagtcaataatgacttaatgcggtgtgacatgctcacgcttacttaactcagggtgaccactatgccctactaacggagcaatcgacttaagtcggcaatgacttaaggagatgtgacatgctcacgtttacttaactcagggtgaccactagaccctaccaacggagcagtcggtttaagtcagtagtaacttaaattggcatgacatgctcgcgactactcgattcagcataagcacgtttgcgaattgcttgtcttagggcggtctctatgccccgtgaaataggaagaagtttcaaaaccatcacactgcacttacttctgcaatcataacgactgttgaattcaaacaacagaaaaataataatagcttttagtaccgagaacattttctaacaga

SEQ ID NO: 17409 - DNA, 586 bp, Zea Mays
tcctttgacttatcaggaatgtccataattgttgcccatagtgcctcagcaacatttttttcattgtgcatcacgtcaatgttgtgtggaaggagcaggtcgtcataataggggagccgagtcaagccagacttatgtgtccacatatgctactcaccatatcccacaaaaccaccttttgtattggccatgagcccatctatctgttgacaaatttcggcaccagtcatcattgcaggtgggcggtctatcactacgacacctttcataaagttcttgatgtctaagcggaatggatggtcaggagggagaaattgtcgatgtttatcgaaggacgaatatttgccatcctttttcaaccaaatgaacctgagagcttccttgcaaactgggcatgggaatttaccgtgaacacaccaggcgtagaatagcccatacgccagtaagtcattcatggagtactagtaccaaacatacattctgaagtttgtcttcatacctcggtcatacgtccataccccttcctcccaggcacgtaccaattcatcgatcaaaggctccatgtacatgcccattttattcccca

SEQ ID NO: 17410 - DNA, 828 bp, Zea Mays
tgctactccatcttaagcatgatacaacccttgttttctagtattggctaaaaaatgaccaaccttcgtaaatttatttttacatacttgtatgacatcatattcggaaataagatccatgtttgtacatagcaagatatcagttgtatgtttattgggtgcactgggacatttaacatatggctgaaaactatacaagcataggccctaataactaacaaaagacgatacacaaatgcaaataacgtcattggctgggtcatatagtagagtaatgaatagtttgggaaagtactatagcatgtgtgttaacttgtcagtctataaagcaaatgagaaacatatacatcattagttccaccgcgatagctctacagctggtccatacctttattgttatttttgcctctggtctgtcctccatcctcctagacggagtcatctaatgtagtactggatgggtgtaatgttgaggtccaaaacacctaaaccttgagtgaacctagtttttttatattaggtccagccaaaaagttgaataactgctactgtaagtttcctcaccaactcaataaaaaatggcatgtatcccaaatagccaagttcgatgtacaattgcaatattatccacctgaaccataacatgctgaccaaagcatcaatgggaaattagaaaaatattcaataccttaaagaaagtatcagtgtcataattatgaggtaccttgctctaatcaaaatttctgaccaaagcatcaatgggaaattagaaaaatattcaataccttaaagaaagtatcagtgtcataattatgaggtaccttgctc

SEQ ID NO: 17411 - DNA, 1037 bp, Zea Mays
ctcacagcctatccataacggccttttcgaatcttcaagttgtgtataaaactgttgtgcttcaatattgggtccctgggccgattcttgaccttcagtcataggtgtgccatcatacagatgtccaagggcatcttgaatcagctggtcgacatcaacatgcctttcatcaatatgtgaatttggttccgaactacttgtgtgttgcactgaattatcaccatgaaaattccattcatcataattctcaagtatcccattgcacaccaaatgcccatacatctcatctcttatctgaatagtagtgtgcacacatgtctgacatgggcaataaatcttgatgccttcagctttatctttaaatgcaaattcaaggaacttctctacaccagctatgtatggatcagaacctttaggataatgtaaaagacgcttgaccaatccaatatccattccaacactgggtaaaaaatgttcatcacgatgacaatgaaatcctcaacgttgtcgtagtagctgttacatatgacggaacaaggtgggaagtgagagggaggaacaagcgggtaccttgctagaacgcttcacatggatagagtaggccttaatgaagtcgtaggggatcacgtcttcgttgcgcgcaccatcgatgtcacgatcctattcctcctctcctctcgctgtccactctatccttcgaaaggtggtggcatgcgcgtggacagcggccagcgggggcgtcggcgtgggtggtggcggcaggtgcttgggcgtggacctacctggggacggcggcccacgagggcgtgcaggtgcttcggcggcggccgtgggaagacctaggggctgcggccagcgaggacgttagcgtgggtggaggtagggaggtgctcgggcatggccgtttggcgcgcagactgagggcggacctggggcggcggtggtcacacgtacatcaatctggagaggcttgcttgtagagatttagcgtttgtcaggattctataacaaaatatgagtgtaacaactaaacgtac

SEQ ID NO: 17412 - DNA, 553 bp, Zea Mays
cgcgaccaaagggaaactcgaccgggcgagctcgaacgggctagacgctcagcaagcacgacggcgcggagcgggcatgagctgggttgctcgccggcggcgctgtggctcgacgatggaacggaaggagatgatgcgaatgataaactgagaagaaaagggaagagaagaggctcaccaggatgggtatctcgctgaagaccgggaggggcgagttctggtgcagtgcggtcgtcgacatgagcggggcgacgaaggcgatgtgctacgtgggctgtgggagagaagagtggggctagtttggaggagggtcaagcgggtgcgctggcgtttgaaggggtgtcgaggacaggcggttgccgagatccttgtgacgtgggtaggagatggtttggaagatgaatagtgtccctgacgtgcgggcccgtggtgcaggaacatgtgagacgctcgactgcgcgtgacgggggatggagagccgggccgctgggatagtggaccactcgtggtcgagagtggggttagttttttttgggatttcatttttctttta

SEQ ID NO: 17413 - DNA, 496 bp, Zea Mays
acagaaaaccccgcccaggtcccagcgtcctgcagtccttctcgaccagctaattcccgagcaccggcgtgtagcaagcccgactgtggtagtccttaatctcctccacgaccacacacggttcccggcgacgagcatgcggtggcactcaagcacagcccaaagggtgttgtttgatgcggcctggagtgcgcaaagcccaggatttatatcctacggagagggtagagtccgcacggaaggggagagagcgatcgatccaatcctggcggcgaaatcttaggaagacgctagtggagtttgttgagatcccatgtctgcgtttgcgaaccagcggagaagacgaagctcaaccaatgaggcccacacgtcatggaccgaacagacccgtgtgcagatgagaggagaccgacgttgcgggcccacgcgtcattgacatcacgcaggggtgagagcacacagagactgccatccatggcccacaggtcgacgtcgg

SEQ ID NO: 17414 - DNA, 597 bp, Zea Mays
agcctttttcatccttcgttgctccattgcctgctgcaggagaccgttcgtcagcaaggttcatggaaggagggggcctaaaaaggtctagctccccatcaagtccttcattagttgttcccgatggtccggctcccattgcagcaacgtctcgcggcacgtccgggtgcagccgatcatacaatacatgcacttcttcatgtaaagtattacaatacgcttgcagattttcgagggatgcgctcagttctgcaacgcgagctagagctttcgcttcgcagtcccaagcgaaagagcgagagttgacggcccaatcaatggtcgtatcccattccaaaatttcgtaatgcaggcgactcacttcggctgatagctccgcaatgcggtggctatcccgctcacgtgccctattcctgtggcgtagttctgaccggagttgctccaccctggcttccagatctccaattgggtcattactgccactactacttccttcgtgcctggaggctaactgatgtcgtggcatcccatgaggtccagtcgatttgcactgggtagtcttagtgcgcgccatatctccataagaggggaagattt

SEQ ID NO: 17415 - DNA, 492 bp, Zea Mays
tggcaacgtaggagaaaaagtgagcaatagtggagaacgtgtcggatttgagacaaagaggaaatgtccacaggtggtgcgagcagtcatcgaggattgcaagataatacttaaaaccagacatactgggaaccggagaggtccagagatcacaatgaataagatcaaaagggtaccaagcacgagactgggaagaggaaaagggaagacggacatggcgacctaactgacatgcatggcagaggtcagcattattgatatttttattacaagtaatggaagcagtgctggctaagcgggagagggcttcagaaccaggatgaccaaggcgttggtgccattgctttggagacgcagtggtgaggaagccagtggcagctgttgaggggcgaagcgggtagagggggccagagctattgcacctggtgatcacgtgttgggtcctgaggtccttcacagaaaaaccaaaggggtcaaattcaacagagcaag

SEQ ID NO: 17416 - DNA, 445 bp, Zea Mays
gggcaatggcttgcgcttcccacccgagccgagtcatcctcggcaacaccctcgggggctgggcaagcgtcaacaccatccttgcgggccaagttctctgcagtagctgcctctaaggttgaaggcccctcagttacttccatagggtcaagatgatccaagtcagtctcctgaccctcaagaccgcgctctaaggtcgatgaggcgcgagatgacctcaacccagcatcgagcacatcatcacaaacctccatcacaccatcatccgctggctctgataacagatcctctggaaccatatcttcaagagtctgatcaaaattcgctagggacaattcttgcagaccaatgagagcagaaaagcaggagaaggaattccactactttcaccactagcgacatactgccgactgttcttccgagtcagagggacctcatcttcttc

SEQ ID NO: 17417 - DNA, 485 bp, Zea Mays
gcactgcaggccggattcagagtttgagacatttttagcttcgcgtcaggctgaatgaacagacctttaaaggccggggagcaagtgagcgatttcgctcgccagatggacggtttctctagaaataacttaattgtactgtaggtagcgatacggcactagcaaattctgaagatttccatggcctgccgtctgaagaaagcgtgtgccacaacacgtattgctcatgccgcccacccgcctgtcgagaaagaaacgcgcgaccaccaccagacgcattttgtttctgaacgagttcagttcacttgacaagacgtgacgcctcacaatgggcctctgcaacaactgcaggctcgctgtgaaaacagcattagggcatcagaggatcgtcccatggtacaagccaatagtcaagtcgtcgtgttctctgcttatactaatcctgcacaaatggaaggtcatggtatcaagttgcagcaaagcca

SEQ ID NO: 17418 - DNA, 496 bp, Zea Mays
cttccactagggtcgaccctctcttggtcttgactacgatgtcatcgacgtatacttccaccttgtccctgatcaggtccccaaaagaattactcatcgcccgcacaaatgttggcaaggcgtttttcagaccgtagggcatcacgacataacagtaaagcccatccactgttacaaaagcggtatgcttcctatcttccctagacatctggatttgatggaaaccagagtaagcatctaagaaagacaaaaggtcgcacccggaggtggaatccacgatttgatctattcgcggaagtggatacaggtctttgggacaagccttgttaaggctggtgtagtcgatgcacatctgaagcttcccatttgccttgggggacgatgactgggttggccagccacactgggtgatggacctcttcgataaagtcggtgtctagcagcttctggacctccttctggatgaagtcctgccgcttgatggactgtttgtgag

SEQ ID NO: 17419 - DNA, 372 bp, Zea Mays
tgattgggtgctccgaccattggtatggggcgggaggaccggtagttgccaccagtatctggcgattgttgagcttttgttgtctcttgttctcctgtgatctgtgtccgccgaagatgacattgacctctctgtcgacacgcgggaaggctccacctcctccctcctcctgctgctggggttgtcgcggttctcctggtcctccttgcggcgggggaggaggtagaggttggaaaggtcgaccgtgcccaacggagtgcttgaagtctctgcagttccgaagggtgtggcgcatgtccttgtggtacgggcactgggcatcgaggatgtcgtccagcgtgcgttcgcctccacgaggtcctcctcgggcgc

SEQ ID NO: 17420 - DNA, 605 bp, Zea Mays
acactaataaattaaatgggttgaaggctcatgattaccatattttgatggaaagacttatgccggtaatgttccgtggctatttgaagcctcctctatggaatatgcttgctgaacttagttacatatatagacatatatgtgctaagcagatctcaaagaaattgatgattcaatttgagaaacaaattgcggtacttgtatgcaagatggaaaaagtatttccgcctggatttatgaatgtgatgcaacatttgctagtgcacttaccttatgaagcattggtaggaggaccagtgcagttccgatggatgtttagtcaagaaagagaattgaaaaaacttagagctactgtgcggaacaaagcaagggttggggggtgtattgcagaggcctttgcagctaaagagatcacaatcttctcaagtcagtatttatcacacactaacaacgtgaatgctcagtcaacacagtatcatactaatgaagaaagtccttcgaccgaccttagtgtttttctttggaaagggaaaggggtcggggcttctactgcacattatgttgacataagagagcgtaatttcaccatgctctacttgtacacc

SEQ ID NO: 17421 - DNA, 541 bp, Zea Mays
cgaatcaaggtattaacactgcccttgcattcgctaactcatggggatagagtagaagcagagaatttggttatggggcctcaaatcgggtgcgcgctgtgctccagtgatggtccgccgtgtgccctgggtggtgccgccgtagctcgacaagggtattgggggagacacctgggccgttgatgcggagatggatggctaggatcagaagccgggtaacagttcgacctaggcttgttaggaccgtccgatgcggggcgagcgcgtaggatttaatgcaaggcaaaggagtctggatccatcggatcgcgatctaacggactggaccgtgtaccgattggggatggggtcggtctaatctgtaccgccagtctctaatccaacggctaggaattaaccgtaccccttcgaccagcgctaatgcaaaagagcccctgtattttaagtgattcaacccgcagtccatcggccgcgtgtctgagtctcggtaatcttgcgccagtgcccctgagttctttggatattgacgcccagtcctgag

SEQ ID NO: 17422 - DNA, 549 bp, Zea Mays
cacgcaccccagctcccttttgagcaccgcccacacctgcactctctcccctgcctcactacgcacaagctcacccactctcgcgctctgctttcgcctctcgcgctcgccggagttccgtgcccactgtgccagctatctagcccgttagaagctgcgccaagccaccccgagctccgtcccgaggtgaggaacatgttcccgtgcttggtttcccttattcgcgcctaaccttagccaattcggcctcgccggagtttatctatgccggtttgccgcaccccacacggtgattggccaatttagccccgtcctgtgcccctgtgttagcccatagcactcccctaccctcgctggagctagtccaagccttatcgcacccgatcgcccctccccgtgcccgggattcttcaccagagttaccccaacccgcctggagctctcctctccgccgttcttccacctttggtcccggtctcatggccggaaccccaccagtgagttcgtcgggttcttctcgccgatcctggccaacctcggtgacctcgg

SEQ ID NO: 17423 - DNA, 555 bp, Zea Mays
gtgggagtctgcagatgctgatgcgaggcactttcgtgataacattcgattttttaatagccatttctcgttcacctccctgtactgtttctttgacattatgactacaaacatggattgtggtatctacacgtttcgtgcacatggcatgatgtaccacaacgtaacgtcgttcggtagggaagctggggcggaacataaacaccttgaactctacttctacgatgacgatcccagcctcgagcatagatatcataaatgtcgtcaacaacaacttgagaaagacaagacaattattaaacaattggttgaaatacttaagggaaatccataatctgagcaccttaggagtatggggcacgttgataacgttgaagactaccacatcgccttgaaccttgaccaaacgctgaaccagaagttatataatgcgcccatcacttcggaggtcgctgcaatttggattgagggtagtggacatcgaggtcaattcagtaatagtgttatgctgcatgggaaggataggtcaagccatggcatccattcatatcatgg

SEQ ID NO: 17424 - DNA, 897 bp, Zea Mays
atatgaattaaacaaattctggcatttatttatgcattaaaaatcaatttctatttacttttaatggattttctaatcttctggactgggcgacaattacaggaaagcgcaggggctgacacataagaaatcctaagacacatagcgctactatgtggattgcgggtttaatcaaccgaacccgagggtttcttttgtaaaacgcttctgcgaaggggtaccgaaggatctcaaccgcacgatcacacacccacggttgagattagaccttgaaccagctctcaaccacgcccctccgatctacatcaacggtcaagattttatttgaccgagatcagcacgcacccgtccgatcttgcggccacagttgggatacaatacgtgaagggctatttctatctctaatcacggtcgtttgctgcacgatcgacggccaagggccgttcttcttcctcgctccgctctcctctccccgacggcgcaccccgctgccagagaactactccggcgacggcaaccgagctcgatactacaccataatgcaattacgcggttctacacgtgcacgatgtgaaggcgattcagttggaagctcatttaccaggaattaggcgacaattgtggctgcccacgctacgcgcgacctcccggctggaagcgaacgacgacgacgaattgccaccgagctgatgatcactcgaaccaccggttgctaccacggcatgcgcaaacccgctacgaacacccagagcgcgacaccaacgccaaaatcttgcccaaacccaggatggcggagaggcactccttcctctaacgcaagtgctggtggcgacaaaatttggtttagtggctagggttcggtcgagtgagcacttatacgcgtggacgaggccagcg

SEQ ID NO: 17425 - DNA, 522 bp, Zea Mays
cgcttaccgtcgtcgtgtcagtacgcagggaattgtggggtaagcacccatccatcctattcgttttgcatggtgcgtcgtgtagcatcgatcggatcgaggttttgtgtgtcatgccggtgatccacgcagtccggccatggcgccgccagccgtggttcctggggaagaagatatcactaccgttgatctctctgcgaatggctaggattagatctaggtgagggtgttcttccgccgtcgatttggtagcgaacgggcaagatcgtgctatcggatacctcttttgtatattaaatctggatccttgatccatcaatggacgatcgtgatcgactcggggttgcttttgctccgggccgtagatttgtgtttgggcggtcctgcgctgtccgcggattcataatacaccagatctaatctgaaccatcgggcgctgatccatcagcttagatcctagcataccccttcggtctgtcgatttatcaaaagagcccctctgttatttggtattcaacccgc

SEQ ID NO: 17426 - DNA, 572 bp, Zea Mays
gttggaataggtgatttggtatatcgaacgaatccacccttttttatgtagatgttatgtattagtaatatactactatatagtctatgttaacgctacgatcttagggaggagaggggtcgacggcgggggcaacaacagcgcgagtgaggggagggggatggagtcatggagaggctaggggcgccaagattgtgagagaatgagaaggagagggatggtagaggatccaaagaatgttgttcactagatttgagcgtgtgagactatcttcagcagcttacccatctcatatccatattcaaactccaccctataaatagtgtagtctagagtgtaaaacaatgtaaaacagtgttttggatgaccatatggggtaaactgctggaaacaatctaagggagagagggttatccagcgatctgaaccattggttttgatgatatgtgttaagtctagtgcaatttgtttggtgaatttagtggaggttatgagtgcaagggtgatttggttgggtggggttttcaaagtttaaattggtggtttatatagtgatatagataatgatagag

SEQ ID NO: 17427 - DNA, 1201 bp, Zea Mays
aaacgaatcaactgagaccgtacctgtcacaacatctccctgatatctgtcatccgtagagggtaacacatatgctccagaaacacccggagaagaggaagctcccagagtgaaattaacagaagaaccccatggagtcacaggatgaggcagacatggagctccaaactgagatggtacaggagtggtcggtgcaggagtgggcgcggccaggaactgagggaaacctagcataggcaagaactgaggagtaccgggcatataaaaccgctgctgagggggtcgtacagaaaattgttgctcagcggttgtcatcatgttgacagtgccctgcaaagaggaggaagtcaccggctcccatttaagcttcccattgggattcctcctacacaccacatccttgtgatcctggctgcagatagagaacctgccactccactgacactcggaacggcaatgcgcttcaccacaatagaaacacaccaaccctagcccaggcttaggaacagcccgatacctctgagtactccctcctgaagtacccgacagaggacttgccacgataggggtggcggcgctggtgttgagactttccccccttgtgggctggaccccgagtgttgcccctcctcgcgtcctggccacgaggctgatcaacacctgaagacttctgagattccattatgtactgatgctgcatctccatgcctaatgcctgctctaccgtagtacgaaaatccagcagtggaaatacgcccagagcatgcctgatagagggtttcaggccctgacggaactggctcgccttttccaattcattgtaggccacatgagggacaaagcggaccatcttgttaaaacccacttcatattctgtgaccgacttcttctcctgcttgtaagactgcaaatctatcttcatcttctccaggaaagtgactgggtaaaacctcctttcaaattgcctgataaaaacatcccaggtcaggattcccggtgaagacgagtgagctgtctgcacgcctctccaccaaatttgagccccccttcaatagttgcgtgccaaagcgaacacgatccccaaacactatctcaaaagcatccatcttatcttccacataagtcagccaatttgccgcctcaaccggagtaccactgccatcaaaagtgtccaacttcatgcccatccactgtatcagag

SEQ ID NO: 17428 - DNA, 498 bp, Zea Mays
cgcgagggtgcccttatgcgtctggcgctttggcttggccaattccgcggcggcaacctcatcgaacttgtgaaatcctcacccgtcgtcgccgtgtctgttcgtatttcgtggaggggtaagtatctactcctcgtggtcgtctagtgtagggcatcatttagcacttgccaattcaaagtttagtacattaattccgtgatttgggtggctgttcatggcgccaccgcgctggtgctctgcgccgccgtgcgtctgcggtgaggaggggggaagaagggtacgggccgttagatgagatcggacgacgtaggattgatctgcgggctcggagtaatcagagcccatgattccagatcggacggttgaaaacacacgttagtttataagtgcgagatctaatccacaccgcccgcgcgtgatccaacggccgagatccaagaataccccttcgggtgtgtagttattcaaaagagccctcatagtatttaaaaatag

SEQ ID NO: 17429 - DNA, 661 bp, Zea Mays
ctgattcctatgccgctcggcccagcttagcccctctgccctggcctgttgggctaaatacacatcccgcttggcccacgctatttcccttttctttttcctggtgacacttacgtgcgggtccctctaggcaggtcttggatgcgtcgcccacgcgctcggtctagaccttggtacctggcatgtgggccgtcaagtcggccactcagcagcgcctcaccatgtctgtcatgtggacccaccgtgtcggatttctcttctacgccgaactcagtatgtgactctgtggtcaccgccgtagaccccgttggccgttgaaacaaccctctcccctctcttccggtgtctggggggataattactcaccggctatcctcccctctcatctcattttcttaaccaccgctagcggcaagagcgccgcgtgcttcctcgccggaccgggagaaaggtagagtgagctgccaatggggagctcgcactgagcttcaccggagagggggcgagaaaaatgttgggttgtgtgctcgccaggggtcttggtgacgggtcgccgtggtcgccctgggttgaatcctagccgcgtatggaggccgttgccgagcatctggtgccgagcagaacagacattggtgtagggacagaaatccgccgccagggg

SEQ ID NO: 17430 - DNA, 766 bp, Zea Mays
tctcacacaaaaatccgagatatgagtcctgcaaattaatcagacagaagctctgaataggatttctaatggtaccgtactgaaaatatcccaggatcagataactttgccgccggtgaaccgtgcgctcggattcacgccggtcgccgtgattcgtgccgtagggaagtagattgcgctcggtcgtaaaaagatcacgtcgcggatgagttcgggctactatggcctcattgttcctcgaccacttgcaccggtgacgtggccttgcggtcgtcaccggagtttgcacacttcaccgcgattgtgccacgcctcaggccattaaccacgtcgccgtgatttgtgatcgttacccagtgaccgtcgtggcttcttatcccgcaattgccacgaatcactgcgtcagtaacctctcctcctctccggcgccgcgcgtctccttcaaattcactggccaccgctcaagagacctataaattgagcacgctaggagctccgtagggtaattacccatccaaagcaccaacacttgcctccaattgttcaacagagaccacgaagtgctcatctccccccaaattgggtttccgccaccgtgaaaaggtcctcaccgtggctagctcgattcaggtccaatcttgtcctctgctctcttgtttcagcactcttgcatgccactgatgctccttgacccattcgattaagctagactgccctaaatcgccgtgctcatccgttgtttgcactgcctccgtggatagagtga

SEQ ID NO: 17431 - DNA, 553 bp, Zea Mays
agccgtcccaagtttacaacttcgcgctgaagagtcgcaattctggacgtgtcgaaacgcttgatcaccaccaccgtacctacctgtcgcgttctcgtgaccacgaccgaccagttagggtagcccgtttacctggagcgctcacagtaagtaacagtgcatcatcacagaaacggctactactactactgctcctacagcagaaaagcacgagctgagaaattcctaattttgcgtcggtgcagggatcaggggggatctgaaagcatgcatgtgatggacggatgtagtagcgaagcattaaaggatggatgggtagtaagtaggtgggtcgatccatccatccatgcgccggccccttcgtctcgtggtcctctcacatgttgcgcgatggcgcacagttgagtcgttgttgagttcctctgctatatttgcagaatcctccaccccgcgaacttggggatgcgcagctgcaatggctatttattcgccgaaagcatgcattgcagatgccatcaacccagatctgactgcaatactgcatgggctcgcg

SEQ ID NO: 17432 - DNA, 427 bp, Zea Mays
actcttcctcaatttcttatcagagatgggcagccccaaatacttgcaaggaaaagaagcgggacttcactgcaacacattgcatccagcctgcacaacttgaccatcacaccttattggaatggcacagctcttgtgcagatttgttaccagaccaaaggctgaaccaaagcaattcaatatcattttagcacaattcagatcttcttcaattggttttataaagaggaccacatcatccgcataaagggaaactctactacggacatcagctcctcccaggctttgcaacagtcctctactttcagcagcaccaaacatgctgctaagaacatccataaccaacacgaataccatgggagatagaggatctccctgacaaagatctctccggtgagaaatatggttaccaggcgaaccattcaag

SEQ ID NO: 17433 - DNA, 550 bp, Zea Mays
aatctgcctataatgctttctttgtgggaacaatacattttgcaccttggaagagggtctggaggtcctgggctacccccaaatgcaacctttttatgtggttggtgctgaaaaatagagtttggactgtggatcgtcttgcgaagagagggctgccgcacctagcagcctgcccgctttgtgaccaggaggcagagttgatacaacatcttctagtttcatgtgtttttgccaaacaagtttggtttctaatcctacatggcctgggactgtccgttttgcctcaaccctagggaggaagttttaagggatggtggagtaatgctgtatgcatggcatcaaaggaactaaagaaaggactcaacgctcttttttgtaatggtatgggagatttggatgcaccggaatgcttgtgtgtttgaaagcgtcagtctggaggccctggtggttcttctaaacatcaccaatgaaggatcgctgtggtgtgcggctggagccaaggaccttcggttcttgttaaggggatgttggatagacttggttagccctg

SEQ ID NO: 17434 - DNA, 330 bp, Zea Mays
tagacttggagacaacagacatgtggttgccggcaaatggaagttgggtgttagaatcgattgacgggataattggaacaacaacactctgtctcttcctcttgggagccctcacattctctccagcgaagtgggtggactcaagagctcaggaaacagagaagcggtagaggaaaaaagtgagaattagggttcagaactcaaggcgatacgtcagcagaaatatgggttggctcgataagtcgggcgcaaaagtgccagaccataactcggaaaagtaaagatcacaggcatcactcaggcattacctctaaaatgccaacgagccgt

SEQ ID NO: 17435 - DNA, 468 bp, Zea Mays
caggggaggggcgagacaacgacttgggagccaatgagtcggaggtgggtgacagtggcttggccatggctgcgaccggagagtgcttctagggaaggaggataggaagggactggatggtggggcaactgaagccaacagagccctaggcgtcacgtcgtgcctctcccctcccacatgtggtgcccaggctttgaattttgcctagatccaccactgctcaggatcatctcctgcgatgatcatatcatcaacatagagaagaagagtttgactatgagacgaagtatgcacaaaaggcgcaggatcatgagcacaagcagagaaaccatccatagtgatcatagatgcaaagcactgaaaccaagcacttggagctagcttgaggctataaagggagtgtcgtacacgacaaaccatgcccaccggaatagaatacctaaacagtggttgcatgtagacctcttc

SEQ ID NO: 17436 - DNA, 516 bp, Zea Mays
gactccctattgctgtctcatcaacgccggtgaggttgccacgacgggggacacaaaatcgcgacgatgatgttcttccttatctccggccacccgcgctacctggtcaaattaagtgccaccgtcgaagcctcctataaattgagcccgtgactagcttcgcaacatcatcacccactcagccaccgctaatcgctagcaatcattcgccagagctcgcgaattttgaattcgccccaaatcagtctccgccgccgtgaatcacaccctgtcatggccagccctccccaggtctgctcataccctccttgttcctattctagcatctttacatgatggtgatgctccccgacccctttaattgaaccggaccgcctgagatcgccgggaacacgtacttttgtcttcatcgtccgcggttcacgtggacagggcttgttagcttagcaattgtgaaattaagttaggggaaacatttgggaagggttcaatccggtgtacgtcgctcgggagcac

SEQ ID NO: 17437 - DNA, 759 bp, Zea Mays
ctctggactaggtgccaatttctagaaaacacatggacttgggcgtaaaagaaacggagacacagagtgttgtacagggtggactgcaggtttaatcaccaataacccagggtctctttaagaaaaatgtgccgcgaaggggtatctagggtttctaaccgttggatcggcaatgaagcgctcagactagatctcatccctccccaagtcgtatgccacgacagccgcaggatcccgcatcaatggttctggtttaaaatatatgcgcgcaagtggaatcgtccgatcgcgatcggacgcgtcatcgcgctccagcccaaacgccagctccgatccatcccgaccgcccattttctaatccacggatgtcctgatgttatcaacctcccgctgcccatgcataggcgccgccctccccagtaatctctctctttcccgttggtcaaccggcgtgaacaccgcccggaccagtacccgacacctccgttctccgacggcacacccatttcggtccacacctaaactccgctcaggacaactgctcttccacggatcacataaatgccataggatggagaaaaggaggtaagtccgaggtggctactcacccgaggtcccggcgtcgtgatctgttcggtggcgaagtccctgcctggtggggaatcggccacacgcacgacacccactctctgagtgcgacgatgaacgccacctcactttccttctccagctgagttgctagcgcaacagtacccgcgg

SEQ ID NO: 17438 - DNA, 495 bp, Zea Mays
ccacgatggtacagtgaccggattgggccgccagctcagagacctcgccgccggtgatcttgtgctcagatctatgccggcgttgcgattcacgcccgaccgaactcggataagcgctcctcggtaagaaaaaacacgctggagataaactccggccactgttctcaccgccgtcgtgtcccgccatggttagtcgtgttggcatcaccggcgttcgccattatccggcctagctacgtgcctcaacatttcaccacgtcgtagtgagtcactataagccactggttcgtcgccggtgaggctgccacggtaatagacaccaatcacgcgcgctagtgacctcctatttctccgaccgccgcgcgtcttcatccaattcccccggccaccgctcatgcctgctataaattgagcccgtcgtgagctccgtagggtaatcacccatccatagcaccaacgcttgtcttcaattgtccaccaaagaccgtgaatcgc

SEQ ID NO: 17439 - DNA, 557 bp, Zea Mays
ctcagcttcagtctcagcttggtgctttgaagcttcggcaccaaaggcttcaatttgcacttcgggagtttcaacaattttctttggagtagtgcttgaagacttcattgtctccaaaacatctagtacattaatcatcctttttcttttggggtcattgctggacccttttggctttttggtgcttcaacttttgctgaaggacttaaaatttcatatgtccttgtttctgaagccttcggttcttctattttctccatctccggcattatgactggctcttcaacattcggtaggggagtcggctccttggcttcggtggctgaagaggtttcaccgacaaattcaggcactgtggccggttcaatatagtgtggctggtgcataagaacctttatctttttcctctctggcgctggctcactgggagcggctgaagcaacttccttcgctgaagcagtatctttccttttttgaccccgtgttgggtaacggtagtcagggtacatgaacccaatggcatcaaatactcggttgagtcttttcttattccggcc

SEQ ID NO: 17440 - DNA, 442 bp, Zea Mays
cgggcccgtcagcggaagccgagttgctgataaacaactagtaatgacggaaggaggaaaaggctctgcatttgtttagcttctgttgcgatgcgtgcttcggtcagcgaaggtgggactgaaatcattgcttgcggtggttgtggagccgacccatgaattcaacggcttccgcgggcggcgaaagtgtctatagtcctcctgctgccaccaccagcgcgagcctaatttgacatcagatgatggagtttgcttgcgaccttcagctaactcctcacctgagaccagcgttagacttctagacactgtaaaccgtagaacatggacggccttctcccttaactaatcgcgttgagattaaattagatttcgcgtgggtatatggcaaaagagtgtcgttgcgttaaaacaccaacgtgtacagagtaccagagagaattac

SEQ ID NO: 17441 - DNA, 340 bp, Zea Mays
gggctctgccagcgatgacacgggacggttggggctagcgatatcggcaacgagtgcgcacggacgaagatggcggcaatagtgaaggcaatgcggggacgaatagtctggtactctgccactctggtcggtgctcgcctgctcggtgcgtggaggagaaaaacatgatgggtgtgggcctattcgaagaggtagggatgggcgagggcacgcatcaacacgaaacagaatccgtatgtccgtgaagcacggtcgtgcgagatagaaaaatggagtggattggacaagagacagagggtggcctacacggttgatttgtgttattgtgtgttggtttctc

SEQ ID NO: 17442 - DNA, 626 bp, Zea Mays
tacaagcagagggggaaggtccataccgcgaattacgcagtgtcgcgccctacccacaggagtgcacggatctgcggcggcgttgtcactccggtgagcaattaagccgccactaatgatgctccaagcacaacccggcaaccgcgagattccttgaaccccgaccaagctccatcgcccacgaaaccgcccgaacgtcgatcaatcctggataccatggtggcggcgggtttctcttcctcgtggttcaggacgatgatgtccacgattcaaggtggcgcgccggtgctttcggaggtcggatagacgggagagagccgacaggggtctactatttatggctagcctagcgcaaccacccgcgaatgtggagccgcgctttccgagcgacacatgctgacccgctcgccgacgcgaggaagtggacgagaacgacgctgactttgtgcgtcccacgcggaagtgatagaacaagttgcgtccaccgttattttaattaacccctctcaattataggcatgctcttgttatgatgaacatatggcacacaaaaacaaggagatcaactatatactcattgtatacaattttggggtattacagcatccaccctagatccatgtcca

SEQ ID NO: 17443 - DNA, 772 bp, Zea Mays
ccaacttcagcacagctcagtaatatttctcaatgcactcctacttggctgtaggaggtactccatggatatcagaatgatgagcaagcacaacaactgcaaattgagctggctgtaacaccaacatgtccaactttgtcgttctctctcacacaaggaattatccattataagggcagagtgtggctaggaaacaatagtgttgtgcagtccaaggttatttaaacaatgcacgattcagcgcttgggggcattcgggttttccggtaacatatcgtcgcattaaacaactgttttactagaagggcatgaaacaggacattcatcggtacgtccaatcttgcagcacctgtcaacaggccaaactggacagatctcgctacccaggactgttggcacctcttcccattccgcctcatgcgtggcattctatttctatggactttatagaaggattgcccaagtctgggatcgatggactgcattctcatggtcgtggatcgtttttccaagtatagtcactttctcgctcttcacatccttttttagcaaccaaggtggccaaattatttctggaccatatatacaagttgcatggaatgaccgacaacattgtatccgatcgcgattgggtattcactagtacattttggcagcaattattccatttcacgggtactcagttgtgcatgagttcagcgtatcacccccaatctgatggtcagacggaacgggtgaatcaatgcattgagacgtatttgcgatgttttgt

SEQ ID NO: 17444 - DNA, 1140 bp, Zea Mays
ggaaagggttagacacgcggcggacaatggtgacggcttaacaacggtgagaatccttgtccgaggggtggtgagcaacgggagaggtaccgcggctagccggagtggcgtccagctcaccggcggtgaagattttcctaccccacgatgttatccatctgccacgagcacgaatccagacgccggtgacacgaatcgcggtggaggattggtcgtcggcggtgaggttgccgcgctggcgttctgatccagttctggtactgtaccatggcaagctcccatcagtgcacctgacagccaatgtttgggctcaattttctctcaaatttccatggcaaccttcctaaagtcctgcaacaaagttggagagctacaaaccagctaaaattttgccatagcagccatagccaaatccctactaaatcatgtttgaatttgtgcccaaagttcctgcagtgcactgtcagtctaaaaattcagacttaagttgacctgacagcctgactttgagtgtgattatctccaaattcttcataacaaccttgcttacactcttaagaaaaattgttcacctaagatagatctacatagttgatgtggtgacctagggcaaattctcaatattttgaaagatacaaaggctcaaagttgaatcaatcacactgaaattcagacttcatcaagtgagtcaagtgtggctcttttgcacttaagtccaaatatcaagctttggattgcaaaccctcatgattgggaaccatatgacttaggatacttatttaacatggtttttacactttagtccacaagtgcactatttttgcacataggcccctagggtttggatttagggttttccatggtttcaattatggtttctggtatcttaggggtgtaaatgtaatataggtccattcttagtaatattttatgactatttcacttaatctttggggttttctctatttagtccctgttttgcccttctaatccccatttagggttaagtaccctacattagggtcttatttgcaaaatgccataacaatacaacttgcttgaaatttttacctagtaaatgcattctaggtgtatcaaacatatgaaatgctgatgctcatgaagttatgctcaagtttt

SEQ ID NO: 17445 - DNA, 461 bp, Zea Mays
caataattcatatttcccactccataggttaatgaatctgaataggatgaagagattgggagtgacgatagcacaattgaccctagtggaggtaatggtggagaggatgatgatagccatggggatggtgaaggtgatgctgaaacatatgctcctaggggtagtgatggtccatggagtgatgttggagggagtggtatgcgggattggagtttcaccaaagagagttagttcacccatgccatccaagatttagattatgtagcacctcattcagaacaggagatgagaagcggtcgatgacgattggtttcccttcctgttgatgatggcagtcgcaactcagttagcttctattataactatctaactcgacgcgatcaaaacctaaacccttatgcatggctagcacctcccattcaagtaacgccatcggtcatgtatgagtatggacaaccacc

SEQ ID NO: 17446 - DNA, 657 bp, Zea Mays
catatgcattgtgcctctatccagatgacttatgacttgtttattcagtttaccagctcactgcccatgttttttatgcacatggaataaattgtaagaaaatcttcttgatgcttttttaggcctccactcatggcataaattgtagtatctgaacacacatcttaacacattccatacatcccacatgcacatcaattattgcccttaagacgtacactagattgaccctatgcacacatatacctgctggagaggttcacgaagccctggtttgaaatacgggcccgttgctgtcccatcatggcccaaaggcactggaggttgatctggaaattaatttagcggcatgccatgatgaggcactcatcaaacaatcctgagtatcgaagattcaacccgagttttggcgcaaaaatcctagaggctgatctagaaattgttatgggggcatgccacaatgaaacacctttcaaacaatcctgatggttgaactcaagtgagcagcttacctcacatgccatgttacccagctacgagcccattctcatttagtttgatacttgatatgaccttttaatatactaagggaatggtattctattattagttagctggttatagaaaacacaatttaggcgaaggggtaatctgttt

SEQ ID NO: 17447 - DNA, 656 bp, Zea Mays
tagggttttcggccgtccgatctgggatgatcggcccagattagaagcgcgcgcgctacactccctcaattccctccgaccgccggatccaacattaacggtcatcatatcacctaagtgcgatccaatccgatccgccactctacgatctatcgatccaaatgatcccagagtaacacgtgctcggatcaaatcaaaacagtcggatcgcgatccaacggttcagatctaattaaccccaatcgttttccagctctaatcgcatccgtcacccggggatccaacggaccgagggccatctcctaccctgttgcctgagcacggcggcgcccgtagcccgcgcggcggctcccgccggcgaggtacagaatccgcgcacaagagcaccaatcccctaatctgagacgatctacgcgataagaaattgatggcgagtacgctggggggtcttaccggtcgtctcggcgcggagagcgtctggccacggtgatgcaggttttccacggcggaaacagagcgccagtgagagattgtcggtggttcagccgatttcccacaggatttggtccacggcgagattctctagtgtctggcgatgctccccaacccaccagagggtgccgaccgatgctcaggcgcgaagtcaagggcagcgc

SEQ ID NO: 17448 - DNA, 904 bp, Zea Mays
acagtactaaaaaaatcttcagattcatccccctcgccgccggtgacctccgcacaagaattcacgctgatcgcggtgattcgtgcaggactcgggcaggatagtacaggggggtgaaaagatcagaagggaagtggatttggtcacggggtgaagcttaacaaccgcgcctatagccatgcgacgtggccggaccgccggtgtcgacatggtactccggcaacctcagttacaccacgtcgtagctctttaccacatagtagtaatcgtggcgcgcctggacttgccatttcaagagccgttgcatcggcaagcgccatgactgaaccgccagtgatcttccttctctccggccgctagctttcatttccaaaattcggagccgccacttaacacccctataaattgatggcccggtctgcttcgccatgttgtcacaaagccagagcacccactccctccttcgattagccaccatagccagagaatttcattcttccccaaaccggttgtctgcgccaccgtgagacatcgcgccgtggccagccacctccaggtccgccctcgctttccctgtccgtgtttcagcacccacacgtgcttgtatggctcgtcggctcaacccattgagctagaccgcgctcaatcaaccggaacaccttgatttgtatatggtgtttgtcaccgtcgtgggtgggagaatccagggcaggattggttcgattaaggcatggtttaggttcgcctcaggtcagggatgctagtccgacacttagttgggtcagtcgacgccgttcatggtcagttttagcaaaggggtggtcgacgacgagcgcgccgtggccaaggatcgggttggagaagaaacagaagtcgaaggacctctgtgcaatcgtcagtgaga

SEQ ID NO: 17449 - DNA, 273 bp, Zea Mays
ttgcataatctatcaacccccacctgacatcaaaccaaattttgacctacatcatgtagtctatctcatccataactatcttaaccatattcccccaactctgatgatatacaccgaccccgactcaatgagaccaagaccggaaaagaacaagatcaacctcgtcaaggaaggagagaagtcaaactcaatctttagatgcattagcacccaacacggagttatgtctcaccataaactttcttacaccaggatattcttgccctaaccaac

SEQ ID NO: 17450 - DNA, 949 bp, Zea Mays
cccagatatacatcctaatggtaacttgaagtggaagagaattcaacgacggttcagaattgaaagaaacaagaacggagagagtttaaactctcttcaatggttgttgttccccctcccttcactgctatagaggctacagttagccgctaaatgccataacggttctctctctacaagctcccctacccagtagcattcttctctccttctagatggagaggaacgctatcccgcagcggccggtcacttctgctccacgctcgtgcacgacattatccagacgctgctagtgcagatgcggttgggttggaaatataaataataatagtatggtgggggtataagggtatgatataaagggaatcgttgtagagggtagagatatggggggcatagattgctgacgtggcacgtgagtgtgatatagagggaggaatatagaggagaccgctgaacacagtcttagagctcaagataacaaaatattgagggaatcagagttctctattcatttcattgataatcgattcagttaattacatatcctttgagagaagctgacggaaaggagagccgcttttgacgctggctttgctcactgcatcatcggtgcagcacatatgagacaagtcctcgcaatggcgattgacgattgtttcaagatcgaagccacgagccaaggccggtgatggccggtcccttcccattctgcccggtgtgctcctcgtctccccgacggttactgagttgaggtgatctccttcttcccgctcccctgccccctggtcttctcgcttccttcaggatggatctggcaaagctggattttcggctggggatcgcctttgaggattttcttcggctcagtctggcctctttggtgtgtcctgagcgcccaggcctccccttggctttctggttggtgatttcttttggacgatgcatt

SEQ ID NO: 17451 - DNA, 851 bp, Zea Mays
actcgagtgtgaactcagatcactcggcaaaaaggagtggatagccctagcaccagcatggccgcaggaacaagactgtcggctataccggctgcttcgctcatgggggagatggccggagcacgggacacgccctaagctctttcttcctagatgtcctctttatccagagaagtgtagaagatgctcccatctataacgacaatcccactgttctagggaggagccccctcagcaagaggcatgccaacgccacaacatttagcatcattacaaggccgaagaacggaacctcgcgcaacctgtatcccgggatgaggcatctgcagcaggagagactcctaacgacagggcactcagcgagcgcctcaattcctaacaccacaatcgtcgccacactcaggagcacgagcgtgaatgagtggagcgtgatgccaggcactgagttgataactcgccccttccccataacctactgtctgacttcgcctgagacctgaacacaatgagcgaagttggcgggtctcgggctcaaatcgccaacgacctgccccgtaccccggacacggagggctatcgatagatcctcacccacatagtgaaccatcttcttgctcatccggctccggacatgcgctacgtcatcaacagtcgggtacacgcgtggagcaacatcaatgtttcgtgcgatcaccggcatgaaaattagataaggcgacgggaaagagtatgaccgaaatcatggtgcaccagcacgcagtcacgcaactaggacggagttggcagcagcctctacaaatagctcgacactaggccaattggctcgggagaggctgcacgaccctcagcat

SEQ ID NO: 17452 - DNA, 408 bp, Zea Mays
gggtatcataatcaggggtacctagattgtgccactaaacatacctaacattttattaccaagaaaatcataaaacacgttccccgatgtcaagcagggttgaatcacgattcgcctgagaccatgctcaacgaccattaaaactacgcctcgcccgagcccatccttaggtgaaggcagcacccgtgagaaatcatcgtctcgaccgagggcccctcttcacgaaacaacaatttccacctcgcccatgctcgtctcggactggaggatagccccgagcccaaccttatccaaaggccacatgaatcatggagacgtgcactttaaatgcgatgatttagatatctactccatgtgacaccgcagtcaaacatggatgatgggaccgcagtcccatctacttttgcc

SEQ ID NO: 17453 - DNA, 601 bp, Zea Mays
gtcgtggagatggaagtcgcttacctggactgcgggattaggattcggaagcgctggcagctgtcgctggagccgagggtgggggggcgcaggacatgacgccgagagcccctcacggagcgcgagctagaggaagagacggaggatgaagagagatgaagcaagggcaagcgaggagagcaacctagaagtctccagaggcgataagaaccatgggcacacgagagagaatgcggggaaaatgaaccaacgatccacgatcgaacgactaagaattttttggctgacgtggatgggctcgtaggcgtcgtttccatccgactttaataataaggaaatacaactgaacaagttggttacgatcagggaccgaccattacgaccctaggcatctcctcgtggctatataacccgagcaccccctccttatccatcttgtgcctcgaacgactaagaattttttggctgacgtggatgggctcgtaggcgtcgtttccatccgactttaataataaggaaatacaactgaacaagttggttacgatcagggaccgaccattacgaccctaggcatctcctcgtggctatataacccgagcac

SEQ ID NO: 17454 - DNA, 807 bp, Zea Mays
gttgcaatggacgccgcgaccagctccctagctgcggccgagctacccgtctgcccttttaactgggtcgtccccgccttggccgtcccaaaaccctaccgcaagactgttgcagagagaagctgggaggaggaaaagtgagagatccgccattgcgataactcgctggtgacggcaaggggatgatcttgggatagccagaaggttgagcgtgggcgggtgaaccgatttgcgagatttcagagcacgggatcgacctgggcctattgaatcgcccgccggtgatagaaggccgacgcggctccgcctttgccacgaattgttgttcttgtcgcgcccatctctggtgagtcgctacccatacagttcgcgatgtcattccctttgtgtagcgctactcggggtagggtatgggtcgccgtagcaccgtttggctgaactctggcggtctcactgccgttagatcgggcgccgccgcctaagttcggcggtcacgggcgcggagaacagcggggtcacgtgggccgtggattcgtctgtgaacgactatgattagatgcacccatacccgttcgcgcgattgaattggggtcgttaggttgggatcgtgcggatatgattcgatggtcgctattttagatctggatcgtcggatcgaaatccgatggctgtcgtgccataccgagtcggtcgtgatgcgtctaatcctggcggtcgtttggcgaacgtgcagtctggagcgctcgatacctcttcggttgcacgatttacagttgaacccttataattttagataataaaacctac

SEQ ID NO: 17455 - DNA, 535 bp, Zea Mays
acggtcctggcttcttcatcccgttcctctaatcctcgccatccgataaaagatctacggcccgcgctatctcttctcctcctacccaagcagcggcgtcgccgccatggctacacggtggaggacacgaccgagacccaatcggccattcccgagcacctctgtcaaattaaacggggctacacgaagctagtcgaacggtgagcgttatgatgtagttcctaccggcgattgtaatgtgatgaactcctcccacggagttgtgcggacccacgaccaagctgcgcgatctgtgagaaattcaccacgcacggccggcacccagagcaatacaactatgcgctactcactatggtaaatagagagcaccgatcacaaggcttattaccttcaatggcgtcttgacgtgatccacccctggagtagtgcggcctgcggcggagaagtgcttccgacgaggagttccctgctgtccggttgctccccgtgtcccagagatctccacacggttcctggatgccccaccgaagtccac

SEQ ID NO: 17456 - DNA, 952 bp, Zea Mays
gagatattgacatgaatagggttgagtacgctgctaagattgccaatgctgaggagttcattaagatgttgccagaagggtacaattcaaatgtgggacagagaggttctagtttgagcggtggacagaagcaaaggtaaaatgctcactttccagtttccagactaccttgtatcacaaggtaaacatgttgaccatacactatccagtagcatcttttttgtaccggaacaggtccatttaatttgtacggtgtgtttttatccgcaggttatctattgccagggcaatctatcaaaattcctccatattgataatggatgaagcaacttctgctttggatatcagatctgagctgctactgaaagaagcgcttagtaatctaattgcaaaacactcagtaactgtaagttcttgtatgtgtggtcaggccattcctgcatcggcgtgctttccgatatcaattattgctaagtaacttcttcccttgctgtgactgaatacaggttatcatcattgctcatcgacaggaaatggtcctaatggctgacaggattatttcactagagcgcggtgaattgcgagagatgtcgaaacaggcatttttgtctcaagatggtcacttcagcttaccaaggatcaggagtccaaattagggtgtccaaactagggtgagacttggcatgggtaatggtagtttctctcgtgaagatttgttcatatatttggccatggaagaaaacgattgatagaatcacatttcttgcctgagccctgctcagaactttggcttcttggaaccttgtttcatcccaacagcaacaaatctgtcaacattatcgaaggtcgtctgccggagagaatagcaggctcctcagcggcattggctcctacctgctgcaagattctcctcaagacctcaacaggaaggtcaaagcaaggtatagggttt

SEQ ID NO: 17457 - DNA, 342 bp, Zea Mays
ttcgggggtcggggcaagaaaagattgaacagggtatttgatgcgattggctttgtataccctgattatcactacccgctacgagggcaagggaaaaagaggaagattgccgcttcggtcaccacagctgtgccgaagggcaaaaaggtgaaggttctgacccaccgaccgcgatatattgaaccagccgtagtgcctgaatttggggaaggaacctcttcaactgccgaaacaaaacaagctgctccgattgtgaagagcgccgaagagccgattgtagtgccgaaggcgcctacagtcgggccagccgaagccaaagatggtgcggccgaagagccgata

SEQ ID NO: 17458 - DNA, 580 bp, Zea Mays
tccggatggatctgaagaattgtaaccctaactgggaccgttggggaccgaaagaagcttctcaggggtcccaatcctggtgaaagaaccggagtcttagctggcgcttgaagccggggactggaaagcccgagaacaaggatgacatccctacctcttctttcggcgatggcgggcagacaggtattctaaaaacccctcctccccattctgaagttagagaatgaaatggtgcgtagggttttctgtcaaaaatgcggtatggatgggcatcatgctagggagtgcttcaaatctttgtggtgcgagatctgtcgcaaggaaacacataataccgctcggtgcgttctccccaaacaaaacaagccttgcatgcctattgttgggatggcggcggatggattagggttttactcttcccatttctccaaaccgctgtcgaataaaccgaagcgcagttttataggtttggttaaaattgttgagggtttgatctcggctgaggatcttgagaaggatttcggttttcatttcccctggggccgtacttggaaagccaccaagtgtcactctggtttcc

SEQ ID NO: 17459 - DNA, 486 bp, Zea Mays
acataagagatcccaagataacaacaacatccattaatccacatggatatgccgtttagagataagttgataaaatgacgtcatgatccttagagaaagagtatgagaatgatcagaaatgagagatttaggcaagatcaacatctgatacttgagaacgggttatagcagataaccagataacggggcagattcaatgggggatcccgagattcggatgataagccacaacatgattcacagaggaaaagattaccagatctaggtgaaaagagaggtcatcaacctagatggcttctgggttgagcagaggagaacttaatgaggattttggacaaggttcccaaaaaaagaatttgaggctagatatggtttgcgtgaacagacagtaaaccatttttttggcatacacaagggcacaaggaagctttagtcgatttaggggtcgagctatgagtgtctataagttgtgcaggtttaatttca

SEQ ID NO: 17460 - DNA, 614 bp, Zea Mays
agttcactgttcagtgctcacctatcggtagtcaccagttctgcgcttcacctcaagccctcacgactcatggcaccagcaccaccatcaccataggtataggcacaaagtagggcatcagccagcagagacaacatcactcaccgtcgtagaggtgcccagcagccagcgtcgtagaggcacccaacagtccagggacaggcggcgacacaacacgaataataatagaacaacatgtcaaatatggaagcttatgtgtcaatgggacctatacttataagtgttgagtgaccaaataatatagtacttatttcttgatcgacagacatctttctcaaatgcatgtcaacaacccctcctgcatagaattatattagattaatacgaagtgtagtgttgtactgactcctgtcaccacaatctcttgacgtttcggacagacaaaatggtctagaattagttgtcttgctttccaaaaattaagtactaatagtgactgaagggagtaccatacgttgagcaactgagcaagttgggcaattaaaagttcgagttggaatgctattaaaacatttttaatcaaaatacagtgttgattattattgaacactatg

SEQ ID NO: 17461 - DNA, 446 bp, Zea Mays
acaggaggcaaatcattattggacaggaaatgctacatgtaacaatttctagagaggggcaaatgataaagaaaacaaccaattgtccttctagccaaaaaggttataacatcgtatataaacttggcaaaggagcaaacagctgtggcaatataataggacatcagcaaccccggctgttcgtctcagttgagctaattagcagagccatgtaaagcctacacgtgtacatgcattcttgcgcaccactccataatccacttcctgtttattgcaacgtccctagcaggtaaaggaacaaagctaccccattaaggtctaaagggcaccgcgggctaccagcagatgacattatgtatattttaagagctatagataaagagtctcaattcagatctaagtggccgcaatggtgtagccagagttatactggtgtgaggaaattc

SEQ ID NO: 17462 - DNA, 610 bp, Zea Mays
cactattaacatgcgcctctcatcatcatcatccatctctagacgcaaaggaacagagccaagtatcacataaaagctcaccagcagtaacatgatgcagtactagatcataggcatggcaacaaaataagctcagatctagggaccaaatcataggcatggcaacaataagctcagactaaatgctataaaatcacaggcatggcaacttaagctcagatcattcaagaaatgaagggggaaaggggaggggaaggaatggcgtctgttataccgaacaacaacaggaagaaggacgaagcgccgagaggaagcagctacaaggcgtgaggaagcagcaatccggatgccctgtcaagaaattaaaaggggattagaaaccctaggtcgcgaaatagaacaaaaaacgaagctccaaacctacaaagcacgaatccaccacagatctgaaaagagaagaagaaatagggggaggatgggaggaactcggcaccagtcaccggcggcgacagtagagcagggcgcgcagaggaaggggaaggaggtggcggtatataacagcggtcacggtgggaaggagggaggtaaccacatcgttcgcgccatctcc

SEQ ID NO: 17463 - DNA, 485 bp, Zea Mays
accgaggggaagaagaagaagaaaaagaggaggcttcggcgagtgtcgtgtttgaatcaggatgctggcccttctgttcctgctgctgaagtaccagtggaactttttactagggctgaccccaatggatgtgaccttgatgatgttgatcccaatgggtgtgaccctgctgatgctgaccccaatgggtgtgaccttgatgatgctgatcccaatgggtgtgatccagccagagctgatcccaatgggtgtgttgttcgtattgttgacgaggatgaggaagaagaggaggaaatccccttaattcggaagaacagtcggcgctacctagttagtggggagagtagtgatattccttctccagctttgtctgctctcgttgatctgcaagagttgtccagagcaaactttgatcaggctctcgaggatatggttcctgaagatctgctgtccgagccaacagatggtggtatgatggacgtttg

SEQ ID NO: 17464 - DNA, 512 bp, Zea Mays
gtttctaagacacagatcggctggcaccaggactgtgggttaaatccaaagaaacagaggggctcttatgcaaatggtgtgggccgaaagggtatggtgcattatgggccgttggatcatacatcaagggctacgattagatcggccacaataacgaatcagcatctgattttgaccgtaggattgaagatgtgtggctcatattaggtcttcacccacgcgatcaggtgaccgcaggatcaagatccaatggtcgcggcatccttctactacctccctgcgcacgacacggcggcgcgcacctagagcggcggaagcacaccggcgaacgcgccctacggtgaaccccatccgattcacacacccgacttcgttttcatgaatgcttgaccaccatgaatctcatggctaacccctatccatgaaacaatgtgcccaggcccctgcccacggcgaagctccgattcacggcggcgccattgccgggaaagcgcaatccaaggcagcggcgc

SEQ ID NO: 17465 - DNA, 1044 bp, Zea Mays
atcaacaactagatatggtagcgtcgggatctctaaatagtgtacatatttttcctaataatggtaaactaactagttgtgcttcataacatattgatgttggtttagactaaaattattattttgtaaaacaagtcacttatatattggtatcacgagctaactaaaaacaaaatagtcttcttttcctttgatgtggtgggcctgaccttttctagtgctaatgttttatatagaccttggctccgccgccaccgcctagggactgagccctagggctaagggtgcggacgtgtcatcgaaaaccatcatcgcaagccccaggcctagcaataaggtcgtgccacacggtagggactactacgaggaggaagatgacgatagcggcttcaggtcccaactgctgttggaaaacaaccatacaatgttctcgccaccgacgctactctacaactatcattcgcacaacaaggtgtgatatatacccatcatcgattcgatcgatctcctctatacacgattccatcttggtcttccattattaaccactccatatatgccaagttgcaagcaaatatgtatacaacattaggtttaagactggtcaggcccgtcgcatcaacgaaaaagaagatcggttttgtttcttagcttatggcacaactatataggtgtttattttatagaataaaaatcctagtttaagccatcatgcgtatgttataagcattagaagttagtttattattattagaaaaaatatatacactagttgtagatcatggcactactatatccggttcttgatgaactactgtatactcacatagtcatgttagtttgtatatgcacaccttttaatttttaattctatttattttgtcctttcatcactcacataagctaattttttatgttgttccctgatggctataatctcattttcgatgttcaagcaattgccttttgtttatttgatgctttctattgctaatttatgcttgctacatatctacatatgtatacataataaaaatcatgtac

SEQ ID NO: 17466 - DNA, 344 bp, Zea Mays
cgagcacctggtattctggaggcgtgcgggggcggctcgacaacgaatcgcagcggcgctgcacgggcaaatgctccggttgaccgcgaggggagtgtgtagcggcgtcgattagggttgagataatggtattatggaggcgtgcgggggcggagggacgacgaatcacgatggcgctgcacgatgatatgcttcgggttgaccacgagggaagtgagtagcaacggggggttagggtagagagaacgataggcgatatggacgatgaggtctcaaggaatatgctccgttgacagcgtggaaagtgggtctgatccgatattcctgaaacgtggcttggggtg

SEQ ID NO: 17467 - DNA, 345 bp, Zea Mays
attgcttatatgcagtacagtgatggcatcaataatgcaggcctagttccatatacaaaaatatatacaatcacagaggaagtaaaattccgcttacactaattatgagcatgggcatataaattggagtcagagagactagatatgtagaagggtggcttatattttcttgttgatggctcctactgaactcccctacgctttacctagattagtaatatccatcttctagatttttttagataatggaaacaaagtttgactttggcctcaaacaaggttacgaccaattattacaactgaaggcaacatattgccttgatccatcatacgacctcaccaaag

SEQ ID NO: 17468 - DNA, 556 bp, Zea Mays
gtttgtgttcggtgggggagactagcgtggacccactccgaatggtgaatcaagagattccaacagaggttttatactggttcagttttgcaccctagtccagtgtagtaacagaagttttatactggttcagttttgcatcctagtccagtgtagtgttgatcgtagtattcactgagaacgtgttacaacaggtgcaagtgtgggaatgcgggagtggagaactctagatgaatgcccctaccacccttggttgtatgtccctctccattttatagttcaggggttcttacatgggacttgtcgtccaaaggagtgtgtgacctattatttatgggagtttcgttgtcatagcttttctaacgtcgtctcctggttcgtacgtggtcgtacacctggtatggcggatcgctccatctagtcggtatatgggtcactgtagctactctggtgctaaggctccctatagcgacgcctggtgggacctatggggcagagtcagaggataatgagggtcgtacgtagcgacaccccgttctgttgcctgagacccttc

SEQ ID NO: 17469 - DNA, 1353 bp, Zea Mays
ctttatcacccgaagggttgttcctgggctagtgcttatgagtcccaaagcgacagctagcttctcactgtgaacagcaagaatatcatctttctcttgttcctccacatcatgtaggacaaaatctgtgcttggtacaaagcctagcttcctcatctgaatattaagctggtttattttctcaattatcgcagtcatcatagggtgtgaatcatcaccagccaacaacatatgcaccttgttcttgatctcaatccagctacagcctttttccttcttcaagcctacatccttcatcatctctctaaccctattaacccgatcccacattttcttagaagcataaatgttagagagaaggacataattaccagcattttctggctctagatgaaagagcttttctgctgcaacctcagccagatccacgttgccatgaacccggcaagagcctaataatgaaccccaaatataagcatctggctcaaagggcatgtcacttatgagatcatatgcctcatcaagcttgccagcacgtcctagaagagtaaccatacatgcataatgttccatcctcggagaaacaccatactcattatgcatttctttgaaataatgacgcccttcctctgtgaggccagcttgcgtgcaagcagcaagcaagcaggtgaaggtgaccatgtcaggcttttgtttgcacttcagcattgagtgaaacatccaaactgcattcacagcctctccatacatagcatagccaccgatcatcgcattccatgacaccacattccgagataccattgtatcgaatattattctcgcatccttaaccctgccacactttgcatacatgtccaccaaagcactgctcacataaacatcatggagaaagcccttcctgagagcaaaacagtgcgctgacctcccatgcatcagagctgcaacattggcaaacgctggcagcacacaagggatcgtgacagagtttggttcagtcccttgtgcctgcatctccctgaaaaactcgacagcttccaaatccttaccattctgcacacaacaagcaacaatcgaggtccaggacacgacattcagctcaactccccggtcaacaaactctttgaacaaccttagtgcctcgcagacttgcgcgttccgagatagtcccgcaataagggcattgcaagaagcaacatccatgtggctggactcatcaaacacccgaacaacctctgcagcctggccgcacttcccgtacatgtcgatgagggcggtgaccacgcaggcgtccgccctgcaacctgccttcacagcgtatccgtgcagctgttggcccaccgaaaccaaaccgac

SEQ ID NO: 17470 - DNA, 474 bp, Zea Mays
caaggtgaggtacttggtctgatgtaacctttctcttatagctcatctatctgcttcttgagctccaccaattctagtccagatacccttgtggctcttttagaaataggggcggtgctaggaataagctctatggtaaactcaactttctgctcaggtggcatacctggtagatctttagggaacacgtccgaaaattctgacacaaccttgatagcctcgagtggatcgacctccttgctatcaatagccatttggtgacaacctcctttctttagcttgggtggtactagctcagtcacaacttcttctcctactggggacaccaacttcaccatcctcctatcacaactcataactgcttggtacttatctagccaatttatccctaggataacatttattctctgagtacccatcactatcaggttagcggggaactctatcccccatatttccacacttacattcaag

SEQ ID NO: 17471 - DNA, 568 bp, Zea Mays
gtctagagaagttttgtgagggtatcattcattgttatggggaggagttctgtcgtcgaccaaatgtcgcggatattcagcgtctactagcaaaagcagaatagcgtggctttccaggcatgctaggaagtatcgattgtatgcattggcaatggaggaattgtccggtcgcccatgccggtcaattcacaaggggggatatcaaatatcccaccatcatcttagaagttgttgcatcgtatgatcggtggatctggcatgcttttttttggggtggccgggtccaacaatgacattaacgtactgaatcagtcgccattattcaaagatgtccttcaaggtcaaacacccatagtgaacttcatggttaatggacatgaatacaatatgggatactatcttgccgacggcatctacccttcctggccggtgttcatcaagggtattccgcttccacaaagtgagaaacatcagttattcacaaatgctcaagcagcatggcgcaaagatgttgagtgcgcttttggagtgttgaaatctcggttcaacattatagcagttcctggac

SEQ ID NO: 17472 - DNA, 523 bp, Zea Mays
gcataaaggtgtgagacgttgaagagtataaatttgtgtatccgtttaactataaatttatgccgaattgtttttttgatgaatcaaacaaatgagttactactaaggtgaaaccgatttatgattcagattgtgtaaatatgcaaatgtaatagttagcggttgaggacttaccagagtgtggatgtgcctgtaggccggccgatttcgggatcctctgcaggggagaagcccaaggcgacgcgcggctcagtcaatgcgtaggggacgctgaagttgacggcgggtcggactcggagttggagacggagctcgcgacggcgggtggattgcctagggttcggccgccacggtggagaagaacgagggctcggtctctgcggtggagaagaaagagggggcagcggcaccgcctccgcgattccgggccccttccacggtgaagaaaaacaaagcgacgacgtctctgcggtggagaaggcgattccgggtctctgcggtggagaaggtgaatgcgacggcg

SEQ ID NO: 17473 - DNA, 487 bp, Zea Mays
gagcccactctacatgagcagataatcatggcacagattggtgacaagggtgttcaagtcattaaggaaatgctcgaacagaaggtggataagtacaaatgcttccgtcaggacagttctatggtttgaagaccgattggtggttcctaaaaatccagaactcaggaagaaaatattggatgaagctcatctttccaaattttccatgcaccccgatagtaacaagatgtatcatgatctcagatccttgtactggtggaccaggatgaagaggaaaattgctaagtatatatctgaatgcgacacttgccaaagagtcaaggctagtcatttgaaggtagcaggtaccttacagccccttcccataccatcttggaaatgggaggatgtttgcatggattttattgtgggattgcccaacacctcccgacaccatgattctatttgggtcattgtggatagattaaccaagacagctcatttcttg

SEQ ID NO: 17474 - DNA, 559 bp, Zea Mays
ccgggttctctgcagcagccacctctaaggctgaaggattctcagtcacctccatgagaatggagcaacctagaccagcttcttgactctaaagaccgcactccaaggtcgacgaggcatgagacactgctcgggataactctaactccacatccggaatgtcagtgcaaacgtccatcataccaccatctgttggctcggacagcagatcttcaggaaccatatcctcgagagcccggtcaaaatttgctatggacaactcttgcagaccaacgagagcagacaaagctggagaaggaatatcactactccccccactgactaggtaacgccgactgtttttccgaattaaggggatttcctcctcctcttcttcatcctcgtcaacaatacgaacaacacacccattggggtcagcgtcgcccggattgcacccattgggttcagcatcatcaaggtcacacccattggggtcagcgtcaatagggtcacacccattgggatcggctctagtaaaaagttccactggcatttctttagtagcaggagcagaagggcc

SEQ ID NO: 17475 - DNA, 490 bp, Zea Mays
gtccaccatcatgtgtgcgcgcgtggccacactgacggccgggtcccatctggcagtaactttgccaacaacccacccaaaatccacgccaatgacatgtggggctcaagcgtcggacttctcttctccacagtcaaggatatggccgctgctcgtaacaaccctgcgagcttagcgcaactgcctcctgccgacctcctcgccgtggaactcgcggccccatggactcggtcctcgcggactgcttataaaacccgaccaccgcccctgcccatcaccagaaaacccccgtggcacatcgagcacagggtgagggagagagaaaatagctgttgtcgcggcgggggaaaactcggttagcaccgtcgggcggacccaatgccctcccagaaccttcgccgcggctcatggagggcgtccctagcctcgtcgtacgggaatggtgatcggagaacctttgatttctcatcggcgcccctcttcacctcgg

SEQ ID NO: 17476 - DNA, 4891 bp, Zea Mays
cgtggccaacggcggtgagtaccgcggcgtgagggtgctcggcggtgctcaccctccgaccaacttggaacacaagtttgtggagcaggtatttctatttttcttttctgttcgtctctctccacgaggttcaccttatacaagtcttaacagaaagccctacggcctgacagtggaccaacattattacaaatacgtaaacgacaatgaaacacgtattacacttatgccgtaactccggtgatggttggcgccggtgttacatcaccccctcctggaatggaagcttggccccaagcgcttgaatcagggaaacgagcttgcatcaccgtccagtcttcccatgtagccgaatcagctggaagtccttgccattgcaccagcacttgtacaatagccgcgccacctttcttgaccagtcggcgttggagaatgcattgaggctgcaggtccctttgagtaagatcaggtatcttgggaaagtcagcatatactggagagtagtcagcagtatagggcttcaattgggaaacatgaaaaacagggtgcaccaagctcccagccggtaactccagtttataagctgccacgccaatcttctgaagtattttataaggaccaaagtatttgaaggccaatttaggaaagggtcgactggccacagaggattgggtgtaaggttgcagtttcagaagtaccatctccccttctgcaaactgccgatcaatacgcttcttatcagcttgaagtttgatacgagtttgtgcagccagcaagttgtgtttcaataattccagatgaagatccctttccttgatcagtgagggaagatcagtagtggaaacatcagccagcacaggaaaagaaggtaatttcggttcatatccatacaatgccttgaatggggagcattgcaaggatgagtgatacgaagagttgtaccacagctcggccagaggcagccatgccttccacttggctggagagttgtagatagtgcaacgcaaatacatctccagacattgattaacgcgttcggtttggccatccgtctgtgggtgatatgctgtactgactaacagctttgtgtccaacagtttgaacagccctttccaaaaggcactagtgaaaatccggtcacgatccgagacaatagaagcaggcacaccatggagtttaaccacatgagtgagcacggctgaagcaacttgattggcagtgaaagggtgacgtagaggaataaaatgggcgtacttagtgagacgatccaccaccaccaaaatgcaattgaagccatcagagcgaggaagaccttcaataaaatcgagagagatgtcttgccacacaccttcaggaataggaagcggctgcaataatccagctggatgagacttttcatgtttggcatgttggcaagtaggacactgcttaacaaaagaatcaacatcctgtttgagccctttccagacaaacattcgtttgattcggtggtaagtcgcatcaataccagagtgacccccaagagcactagtgtgacaagcagcaatgagtttggtcttcaaagcagagttatgaccgatccaaatcagtgtaccaagccggatcacaccatcaaccaaggaataaccatcagcatttggactgtgcacagcaagctgctgcaataaatgttgggctgcagaatccgtagcataggagttaataacctcttgaagccacaagggttgtacagaagaaatggcatgcaccgacatgtggtgattgacgcgggatagagcatctgcagcaatattttcagaacccttcttaaacacaatcttgaaatggagacccaacagtttactcatggctttcttttggagctcggaatgtaagtgttgagcatccagataacacaaactctgatggtctgttcgaatgatgaactcttggcgttgtaaatattgcctccagcgatccactgccataatgagggccaagaattctttgtcatagatagacaaatacttatgtctgtcgcccaaagccttgctcataaaggctactggctggcccttttgcataagaacagcaccaataccgacagcacaagcatcagtctctaacacaaaaacctcattgaaatcaggtaatgccaacactggggtacaagacatagcctgtttaagagccataaaagcctgttgtgccgcagtatcccactgaaattgctgttttctcagaagattagtcaatggtttagccaacaatccgtaattcttgacaaatttgcgatagtagccagtaagacccaaaaacccacgtaactcagtcacattagaaggtggcggccaatcctgcatggctgagattttagctgggtcagtagcaaccccattttctgaaatgatgtgacccaaataatgaagctggtgttgagcgaaggtacacttggagggcttgacaaaaaatttgtggtgtcgaagcacatcgaatacctgctgcagatggtgcacatgcaagtcaagagcggggctatataccaaaatatcgtccaagaaaaccataacaaatttgcggagaaagggttccagaatatgattcatcacacactgaaaggtggctggtgcattcgtgagaccgaagggcattacacggaactgatagtgtccgtgatgtgtcttgaatgctgtcttatgttcatctgctggtaacatacgaatctgatggaacccagcccggaaatcaatactagaaaagtaacgagtaccagcaagttcatccaaaatttcatcaatgatgggcataggaaatgtgttcttaaccgtcaggctgttcaatttcctgtagtcgacacaaaagcgccaactaccatctttcttttgcactaagagcaccggggaggcaaacggacttgtactgggtacaattaagccagctgccaacaattccttgacctgtcgttcaatctcgtctttatgtaacggtgaataccgataaggtcttgagttgacaggtcgagaatctggaaacaaggaaatagcatgatcgtactctcgctgaggtggtaactcaagtgattccccaaaaatgtcctgataatcttgaagcaaccgagccactggctgtggaacatccgtaagtggaaagctagacatagtattaagtatggccactgaccaaatatcattgcccttgctccatttcagaaattgttcagcaggcaactcttgaagatgaagctggggttgagaaacacccttaagagtaaccactacccccatatcctggaaggttagagacttagcattccaatcacaaagcatgggactatgagatttcaaccaatcaaaacccaaaatagcatcataagcactgaggtccaaaactctcatatcatgcgtgaatgtgtgacctgctgtccaccactgcatatgtttcaccacagcatcagaaattagtgtatctccattagcaaccttgactgtcagcggagataaagcagtaataggtaaatgaaggcggttcacaaacgaagaattgacaaaactgtgggagctacccgagtcaatcagaataaggaatacttgattgcccaccaatgcacgaacgcgcatggaatcagcagattcagtaccggctagagcgtgtaaagacaactggcaaagatcttggactaagacatcttccatctccaactgattgagagtttcttcagtcagggtctgatccaagtcattcaccgccagtgcatgcacctgagccttaggccgcttcagacaatgatctgcatgagtagcatcatatttctccccacagaaataacaaagtccattagcccggcgataatccctcaactgtctttccctccacaagccagaggatgaggcagtagacgatttgtcagatttaggagtggaagaatgatatctgggtgtaaaaggtctagctgaatgcactgaggacctctgtaaagactgctgctggagtttggccaagaaactagcccgagcaacagttgcgggagcttgggaatgaaccacccttttaatatcctccttgagacctttcacataatgagaagtaaagaacagatcatccaaatgtgggttatgcatggccacctgatactgtaaagaggcaaaactttgagtataatcctcaacagtaccctcctgtcgaaactcaagtaactcatccaaagctgtgtgatagtcataggtaccaaactgatcaagtactgcactcttaagtctaggccaggctacaaacccatgctgtaatttgaaaacctggtaccacttggcagcatttccctccagatgtaaagagacagatgaagttttcagatcatcactcacattatatatgcgaaagtattcctcacacttgtcaatccagatcttaggatgtagaccatcgaaacgtggaaacgacattttgggaatggaggattgctgttggtatacctgatcatcatggtggtgacgaccctcagggcgcagccggtgatgaggatgacgcggacgcccggtaggcgcagaagcgaaccagttctcttcctctgcatcggatctgttggagactggagaagaaactgcatccatcttcatttgccacatggtgaggcgcgccacagcgtcacccgtagccttgagttgctgggacaagagaatttgatcctgggtactctggttcatcgccttcgctgtgagatcaatctgagccgccatctgctgttgcgaggtgtccatggaacggatctgcgcaaacagcagatcgagactctcctgcatcttgttcaaccggacgtcctccttgtgtgtcgcgtccgccatagcgtcgaggagcagctgggtctgcttcgacggcttaacgggaggcggcgccgtggtgctgaagaggggaaaac

SEQ ID NO: 17477 - DNA, 586 bp, Zea Mays
gccctgttctccttggcgatcggaggcccaagcccccctcctatcaagccatgattcatgctccttcggtggcgcatctccttcccacgatgaggccttgaacaccgcgagtcctacgacgccttctgatgtgctagacgaggggactggctccaattggcaagtggttgtgaggcgcaaggatcgttgtcagtgctctcatccttctcggctccgttggtcagtcctggtggatttgcatgggaggtgtttcaactgtttttcaacctcccatagggccgccctctactgtcgttgtccacgttgtttctgctgtctgggtcatcgcgtggggagcgaccgcaaggggtccatgacttgcgatgaaggggagaacaacggtggcgtccatataaaagtggaggagaacacacggcgtagcgcacgagagacagggaggtgagcgccccggaaagctgagcgcgtgcacaggagccggagtggggtgaggaacagggagaagcttgccgagctagaatagcgagggcagtgcaggtccaacacgagagcatgtgcgagatgacgacagcacaggaaggccgcacgg

SEQ ID NO: 17478 - DNA, 679 bp, Zea Mays
ccaaggtgaggtacttggtctgatgtagcctttctccaacaactcatcaattttcttcttgagttccaccaattctggtccggacactcgataggctctcttggaaataggggcggtgcctgtgataagctctatggcaaattcaacctttctctcaggtggcatacctagtaactcttcaaggaacacatcagggaattccgacacaattctgattgcctcaatcggtttggaccctttgtcatctaatgataaatggtgataggctccttcttctagttcagacaagtacaacttagtcactacttcctttccagatggggacaccaactaaactattctcttgtcacaactgactgtggcttgatttctatgtagccaattcatccctaggatgacatctaacccttgagttcccattactactaggctagcggggaagtctatcccccttatttcaatccttagattcggacaaatcatatcggactgaacttttcccccaactgaattaactcttaaaggcgggatcattggttctatgtgtggcaccagtatcaaataatactttcgctggatgggattcgactggaaacatacctactaccacgtcctgagcatcctagattgcttcagcctccaggtggttcacttttccacggttgtaggcctgaccacg

SEQ ID NO: 17479 - DNA, 819 bp, Zea Mays
attgtttactacatataagcaagatgcattgatttaaataaaccataaaagtagtaattgttaattctgtttactgtgcatataaaaaaaccctatgcacatgtactctgtgtaatgatctgaatgtatgaaaaaagtgataattatatgactggcctactgaatcatccgaattccacgattgttgtggctcatctgtctcatttcctaaattatcagactcagcacgtagtacctcgtcgatcagctctataaagttgtctgctatatcatattgcttctcaacaattttgttaaggctgtcttttatggctaagcatgccttgtcaacctccaagtcatatccagcaagtttctctgtgaatttagtacggtgacggggtgggagctggttgatcttacttaacatcatatccttgatcgatggaagttggatgttaatgttgggccgaggagtaggtgcggggcgcggtgcatcaaaaatgttggtcctgcacttcggctggttgttcagaaaaaagtaagaatccatcaccacaatcctaatccattagtttcataaatcttaaaaaaagatgtatataatacagcaaaaacatgcctcggattggcgatcgagctgagatacaactgaataacatgtctcggtcgagcttcgaaactaaaaaaaattgtaagtgaaagttgaactagaccatgagtttgtattgcaaacaatggtactcaaaacaaagcacatatatttcacataaaatttttcataaaatacacttgtttaaatatgaataacttacttcacaatatccgaaaggttcggcc

SEQ ID NO: 17480 - DNA, 439 bp, Zea Mays
ccggcatctgtggatgacccaaacgcctccacgtcacccgtggaaagattccgtaacgtccaagagctggctgtctgatcatgtggctgcaaaagttatctcaaagtcagcaaatccatgcctgcattccatggcctgcgtggccaaccaacgagctggatgataaagcatcagttcgtatagtagcataggggagaacaacaaaaaagtcaaatccctttttccaaggaaattggagatggtgagatccttatatccccccttagttccattggtgtttacacgcttttacctgtcatcacagaatcggtatctcgccaatttgaaacgctttcaccatcaacgcctgcctcacaacacaacataagttgcatacacatttggaaaatcaaattagattgggacaacatgacgtgttttggactaattgcatcatcac

SEQ ID NO: 17481 - DNA, 849 bp, Zea Mays
tgaagatccaccctaacgccaaaccggtgagtcagaagcctcggagatagttcgttgagcggcaggatttcatccgtgaggaggtccgaaagctgctaaacgctggcttcatcgaagaggttcatcaccctgtatggctggccaacccagtcatcgttccaaaggcaaacaggaagcttcggatgtgcatcgactacaccagccttaataaggcttgtcccaaggacctgtattcacttccatgcatagaataaatcgtggactctacctctgggtgcgacctcttgtccttcttagatgcttactctggtttccatcagatccagatgtctagggaagataggaagcatactgcttttgtaacactggatgggctttattgttatgttgtaatgccctacggtctgaagaacgccttaccaacatttgtacgggcgatgagtaagaccttcggggacctgattagggacaggatagagatatacgttgatgacatcgtgggcaagactcagagagggtcgactctagtggaagacttgaccctggtctttgacaagctgtgggcaacgcgcacgaagctgaacccggacaagtgcgtctttggtgtctctgctgggaagttgctgggattcctggtttcgcaccggggcattgaagcaaacccggagaagatcagggcaattgaggcaatgaggcctccagcccggatcaaggatgtccagaagcttacggggtccctggccgcccttagccacttcatctcacggctggctgagagggcgctacccttcttcaagctcttacagaagttcggctcattctcttggaccgaggaggcagagcgagcct

SEQ ID NO: 17482 - DNA, 813 bp, Zea Mays
gtgcactaggataacactgctagagtgcttccttgttttcccaggtagctaaatcgcgaggcagacccgctcattccaccagtacctgttgtacgaggcgagttcccttggtgatgccaggatgttgacaaggtaactgaattctggcagcgatgaaggcaaggaagtagaagcagtgcccttgaacactttagctagcttcagctgagaaacatgcacaacacggtgaatacgattggaagcaggtaagtctaggcgataagctaccttgccaacacgggccaacacacgatagggaccaaaatatttaaaaatgagcttgtgatgggcgcggggcagcacagaagattgcacatatggttggagtttcatgtagacccagtcatcaatagcaaaggagcgttcagacctgtgtttgttcgcttggcgttgcatgcgagcctgagcacgcaagaggtgctgatggatgaggtcctgcatgttggagcgctcctggagccagtccgaaacagacgctgggatggcactgtctgaagaaatgcccaaggatcttggttgaccaccgtacagaacctcaaaaggtgaacaacctaaggaagagtgtaggcttgtgttgtaccaatattcagccactggtagccaatcaatccatttctttgggcaagcattgacaaaacagcaaagaaatgtctctaagcattggtttacccgttcggtttgcccatcagtttgcgggtgatatgaagaactcaatttcagctcagcaccagcagacttgaataggtgttgccaaaatgtgcttgtaaacaccgg

SEQ ID NO: 17483 - DNA, 373 bp, Zea Mays
tccatctacacctctcatatgtgcagtgcactctcaacctgcttggctcactcttgtcaatttcaaagtcatattcacccttaatgcaataagtagcgagtgcattccgacaatcaaccatcaatggaaatatggtgccttctgctagggaaggattgtccttgtcataatcgatcattaatctgtcctcatcaccttcatgcccagacatccccatgtcaatggtctcgtcttcctcttcttggtcagtgccctcaaattgtgcaggtctgtgatctagtgccaacattggatggctttgaaccaaatctggatacaacctctcatcctcattgtcattaacaacatcatagtcaaacattggatgtttttg

SEQ ID NO: 17484 - DNA, 447 bp, Zea Mays
gttggtaatccgggttgagtcggtgacaccactatacaaataagtcgggtatgctctgtcctttagtggctgaatattcttaaaaacaaagtctgcaaccacagcttcaacggtcagacctctctccttcaacaaacaaatttcagcaagcagaaccttggcttctgttatctccaagtctataggagactcaatccaacttggagcacgaacatccggctatctccttgaccgagggggagggacttgccatggttttccacaatgaaccactctaaacgccatcctttaatgctatccttaagtgggatgtcaaggtattctgttttcctcccacggtgcatctccagacttgcaccacccatgagctggtgctgcccccaaccatcccaggacgacaatgatacaagtacttccacaaaccgaagtgaggaagaattccaaggt

SEQ ID NO: 17485 - DNA, 271 bp, Zea Mays
ggatggagtcacgagcctatatgcgctgggggacgccttcgtcttgacgatgaaagagccctcccacttgggctccagtttgccccgggactctgtccgagtggtccggacgagtacgaggtctccttcactgaattccctcgggatgactgcgtggtcacgccatgcttttgtttgggcctggtatttgtttagagcctgtagtgcgaagacccggtctccatcgatcaggtcctttgaagtgggctcgtccacgtcggggatagctgac

SEQ ID NO: 17486 - DNA, 626 bp, Zea Mays
ccttatcccgtaggctgagccaatgtagcgtgtatgctgccctcactcttgtatcgtggtagtgagcgaagacgctgccctcccccggctcgcgattaagagggagggcagcaaaatgtggtaggtatttatttgtgcaatgtggtcggtggccctctgttgtgtgtatgtaaactatgacattgtttgttgtgaaatgagatggggacttcgcttgccgtggcaatgcgtgggcttttgcttcgatgacttgccgtaaagacttcgtatggcacactcgtaatgtatgttcggctgcacccttaggcggctttggcgcggattcgtcttttagtaaagacttcgtattttgcacttgttgtgcttgtccggctgcccccttaggcgacttttgcgcgaatgtcttttagtaaagacttcgtattgcgcacttgttgtgcttgtctggctgcacccttaggcgacttttgcgcagatttgtcttttagtaaaggcttcgtattgtgcacttgttgtgcttgtccggctgcacccttaggcgtcttttgcgtggatttgtcgcacgcgagggtagtgtatgctacctgtcgcggtgactttgtatatgtcgaatgtcgaagaccgtc

SEQ ID NO: 17487 - DNA, 1571 bp, Zea Mays
tgcgtgttgcgagaagaaaagcacgtccagtagctcgcgaaaaacaaggggagattagagagggtatgcagatgtagggaagagagaggcaacgtcctttttcatggccgcgttcgtgatccgttcgtgatccgctagatggatctacagtgcttcgcaaccctctaaaacgcgtatctgcgacgctttacgcgagcagggcgagctgttggactcagccttatctagtcaacgcatccactcacttcctttcgtcctcctgctctctgtgtgtgccacgcaagcgccctatccaccattagagtcgctcgttctacaacgacgtgctagctagccgatggctacgaccacgaaaccactcagatcgtccgctgctctgccgcacgggtaagcccccccccgtctactggtaaatcgctctgttctcccaatcatctggtatccctagctagccattagttgtcacagttggttcccgctaagcccatccgccggtttaagtcggctaatcgtgtgtttgcgtcgattagccactccttgaagccaattaattactcccccagtagctgataagctggccggtgtagtagttaaggtttggggatttcccctttttcacttcaaatcttataaattatcacggttacttactgctatttgcaataatgaccaacagtgcttgcaataatagctcatattactgatattttcagggatgctggatcggatcgatccagtttaggagcattggaataacatatcttgtattcaagtgcaagtattgtaaggaacaatggaaggagggcggtgctactcgttttagacaataccttacatcacgtggacgaaatgtgcaaggttgtcgcaacgttccgtcggacgtttgcaattactttcgacgggagcttgacaagggacaatatagaagggaaagcaagaatactggaggaggtatgaaagttagcattggcgggttcacctcaatgatgacgatgttgagttgcaggtcgcattacatgctttaagagatgaggaggaacttaggaggcatgcttgcgcgagtagtggcacgtatgagagggtgatggctcctcccatgggggtgttcatggcatgtttggaagaacaccttttaggaaggagaaaccacgcatggtccgaccaaggattgataaggcctcgttttcgaaggcagtaaggaatgacgtccatttcattggtaagcctattggacccccgagtctggtagtgatagacaaggttcatcttcaccccttcttccctatatcaattatccaattggtgaagtgactcagtaacccatgaggtgggtgtatcaatgggaggagcctgagtactaaatattaatggactcatggagtacgacttctgcgtggaccagacagacttggacggagtacaaaggaatgttgatgtgtgagcaaggtattatattattctcatcggaagggtataatgtgacatatgatcaatggaatgcttacccgtgggcatgatgttcaccggagggtgtattgtatctttgatgctattcatgaactatgaaattg

SEQ ID NO: 17488 - DNA, 325 bp, Zea Mays
taggaagggttcgctggcaagctctgccgctggggaattgtgtggcgccgccacgtccacgctcgggatggggacaatttcgctcggccgttggatggccagcggacgacagtgatcgtaacgtaggatacccctcgcttgattaaaccatggccgttgatatccgatctggtggtcgcgtggcgtgttgcgcgggttcattaaactgggacccttggatttggatccgatggcatagatcggataccggttcgatgtaatatagagctaatcttcgcccttcaaatctaatcggacggccgcgattgtggcggaactgcccgaa

SEQ ID NO: 17489 - DNA, 742 bp, Zea Mays
ctaattttgtggcggcttcgaccgtggttgctgaagacgattctgatgattctgtgtctaagtgttttgagtctgacgattctgggagttcgattgtgtggacagaggagtcttcagaggaggacttggattattttgcagcgttggatgtggctgcggcggagacttctccgcgtgtgatagatgctgaggatcttccgggtgcgagtgctgggcgtaggcggcgaagggcggtggcgaaacagagagtgggtgagttgtcgcgaagtgataggcgtcatcgtggtgagatggagggtggtcgtcttcgtgtggacgggactggcaaacgggaattgttgtcctcgccggctggggcaagtgtgggtgagggggagctgcgaagtctgtttgcgggtgaggaattgaggataatgttgttcaactatagggagatgggtatcatcctgaaggttgagccaatgtaatgtgtgatgccctcgctgtatgtatgtaaccatgattttgtgtgatgaagctgcacgctttcgttgatcaggctggtcccgtaggcttctgtacggagtgctttggaaaagacttcgattttttgtacttgttattccggctgcacccgtaggcgacttttgcacggagtcttttggaaaagacttcgatttttcgtgcttattattccggctgctccattgggcgacttttgcacggggagtcttttggaaaagacatcgatgttgcatactta

SEQ ID NO: 17490 - DNA, 1109 bp, Zea Mays
gcagcctggctcacggtctgcccaggagcgtttattccccctcccccgcatggcccatctaccgggagaattccactcacacaccacgcagcccacgttcgtttattctttctttattcatttggccggagcttacatcaccctgacctcagcaatgacgccaactctgtctaagtgacatgtgggcccttggccagccacacagcgtacccacgcctggtggactccaaactgcctggccgagttccacgccagctctcgcccatcggcaccgtaacaaccccacgcttctcggcatccggtgcataaatacgggagctgcgacctgatcctgactcataggctcggtggaaaccaatgtcccatgcccccatattgacccggcgtgaacgttgtggcaagcaagaagtagccgccagggacagcgctcgaagcacaaccatcttctgtcgtcgccgcgaaaatctaccaccaagggatcatcggcgcaagccgccttgaggtatgacactgatgcttgcgatagtacctcatatcgaagccttccacgttcagtcacggcctccgccgcatctagagtggtccgtcagaaagggataggatatggtgaagatgagaccaaaccacaaacggaaaatcaacggctaaattagaaaatgaacatatcctttcagatccctgcgcctagccataaatctttcactggggccccggtaatggcgtgccaccgcgggcgggggaaacgacgccgctgctgggtttctgggtagaagatgagccgtggcagttggatcttgattcgacggtcttgattagatctgggggaaatttgtgcgtgccgttgatctgcggatggacgaccccgattagcgcacgcgtaccctttcactaggattctcccgggtcgccggatcgggatcccgtggcccaggatggtgctgggcgttataaaatccgcggcgttgatttctaatcggacgactcagatggcctcgtaccccttcggccgtgtcaaattctaaaagagtccttgtgttctaacagattcaacccgcagtcctgatggtggtgatctgagtctgtagaagttttataattttaccccgaaa

SEQ ID NO: 17491 - DNA, 607 bp, Zea Mays
tgcttcggatgttgcctcctctccgctcgcgatacacgggccgaacgggagggacgacaacgccatcatatcgacccccttccatggagagcggattcctcgatttgccgaggttaccacgacgatttggggtcgcgccagcgtgggtttccttccaaggagatcgtgggtttccttccagcgagagccgagagcgtgggcgagggccgaggttaccacgacgatttggggtcgcgccagcctaggtttccttccgaggagagtgtgggggaggggcgaggtcaccgcacgatttccttccaagttccaaggagagcctgggtttccttccagggagagcgtggggcgagaccgcggagagccgggcagaggcgtggcttgcttcactagatttgaggatcgcggagcgcggcgtgcgggcgagatgcggtacggcagaacagtgcaccgtctgggggtgtggacgcctacattaggtacttaagtagtagtaaagattgaggatcacggagcgcggcgtgcgggtgggatgcggtacggcagaacagtgcaccgtccgaaggtgtggacgcctacattaggtacttaagtagtagtaaagatttcg

SEQ ID NO: 17492 - DNA, 1101 bp, Zea Mays
gatgactagcgttctactttgacagagatcaaatccaagacctaacgagggtttcccctcaaacaatttcatcaatgggacagtaaatcgatcggtccatggaaacaacgcggacactcgaatgggtatcgcgttcctggtaattaagggggactcactgtaattgggttggttgaggagcatcatggaagcacactaatgctgaaacaaggtagcagagagcatgaacaaacctggaagtggctggccacggcgaggtgcgttttacggtggaggaaaccgtgattgggggaagtgagcaattctcggtccctggtggataatccggggcaaggattggtgcaatagatgtgtgattaccctatggagccacgggtgcactcaatttatagtgatcgtgagcggcggccagggaatttgggttggagatcagctcacgacgacttggatatttcaccgtgctctgcgtatcgtggcgagcgaggagaaaacggtgcaggaggggtaactgactatcctccacgatccctacgacgtggagaatgctttgaggcgtggcacggttgagtgaaacggcgagctccggtgaggataaactcggccggccgcgcggcaagtggacaggatggccggaccagctagcaatcgcaatccatcccgcccagatctttttacccatccccggtgttatccattcctccccgagcacgaatcgagacagcggtggcacgaatcgcagcggagaggtcatcgacgatgaatggctacaggcgatcttctttagtactgtaccatggccattcctcatttagtgcacctgacagccaaagtttagggtgaattttctcttaattttatgtaataacatgatcgacactctttagcaaagttatagctctaggatccagctataatcttggtatagcaaccctaggcaaattcttgctcgatcatgccagaatccgtgcccaaagttcttgcagttgtgctgttagtctgaaattcagacatcaaacagcctgacagcctgactttgggtttaattatctccaaattcttcataacaacaatgtttaatcccttaaacaaagttgttcacct

SEQ ID NO: 17493 - DNA, 399 bp, Zea Mays
tccgtgatatttctattgtgagggctagaggtgataacactgcccctgtacccgaagctgacgaagtggttgtgtacaggagcttcataaaggcaggactccggttctcgttgagtaaatttctggttaaagtgttgaagacttttgaaatttttctttatcagattacccccgaagctatcatcaggatgggggtttttatttgggttgtgaaaagccaaggactggagccaagtgcaaagtgcttctgcaatatgcatgagctgtcttatgaaacgaaggctactgggaaggaacagtatcacaatattttttgttgttatggcttcgtgcctcgctctgacgcgagctatctagttctgaccttttgaaagaggtggccaggtgcctggatggagg

SEQ ID NO: 17494 - DNA, 606 bp, Zea Mays
cactgacgcatgcatgattatgtttgtactacatttgctatatctcgaacataaaccatgcatgccctttactaattactgttatactctattaggaaagagaggacgtagatttgcgcaagagaaagggacggcgagggaagagaagggtgtgcgaggctgatgatggattcaacatggaataaagcagaaagcgcgggacaccgactcgctccgcgccatgagagcgggaagagggagaaacggtttgctttgccctttaatacgtcatggacgacatgatcaatggacagcccaatggtgatcatgtctgctgatcgacggtgcttgaaaaaagagcagattagagaggattcacggccaatctactagactactgtatatagagacacgagaaaggagggctagctagcatccgaaaaatttatgtgtcgataagaggacagaaagaattaaaggggcccaacgtcatgatgtatcaacatgcactacgtacacagcacgtggtatatcacgatcatcatgatgaaatcacgatctagctagctagctacgtacttcagtagtatagctagctgctggtaatcagttgagcatgcataccgg

SEQ ID NO: 17495 - DNA, 856 bp, Zea Mays
ccgtccaacaccttacgctggactgaccgaatatgcatacatagaacagagtgcaatgcgtcaggcacaactttcctactccaccccacctacaacacaccatagtcatagcatgtcatcacctatgcatgaggtcaaatattttcagtccctagaaagctagaaaggtttacctcataccccacgacaatggaatgtggaacctgtatgactcaggggtctataccagatgccatctttaatcgtcctagtacaaaagggtagtatgaggataaccgaccacctgacacccatgtcccaaggatcgatgggttaccatcgaccactactgaagaagttcgagaagaaatagccgaactattccaagataaattaggtgcagtatatctggcctaggacaatcttattagaagacatacgaccctcgatgggatgttgttccataccctccgaggactagtgtgtcgtatttctctaaattctcaagcgaaagcggtagaagcactcacgaacatgtgggcccattattaacacaattgagagaattggccgacaacgaagcctttcatgtttgcttgttttcattatctcttactggcaccacattcgcttggtatgctgccttgccccttaattcgattaattctaggaatgacttagaacataagtttcatgagcacttcttctttggggattacgagtcaaatttagctgatctagcatcactctggtaggggacggggaatcagttaatgattatctatagaggttccagtatactaagagtcgatgcttttaagcccacctcacagataggcaactagcggggttttccctcaatgaattgtgctcatac

SEQ ID NO: 17496 - DNA, 962 bp, Zea Mays
ggaatttgcgacaaaccggtggcaaaagtcggcctagtcgttgatgcagtggcgaggaagatgtcagagccactgcagtgcatcctgtccaagaacaatgggtaggtatgctatcgagaccttgaagttaggcggccattaaattgcctggagccagggggaaaggattgagactccgcacgtcccgcgatcctcccggcgatcttctcgatcgtggtcgtggtggtggtccctcggaggcgattgacaatgtgtgtcgtgacgcctctcctgagccaattgggctagtgttgggctgttcgtagaggatgttgtgactctgtcctggttgcacgaatgtgtgctggtgcgccatgatctcaatcgtactcttcccgtcgcctcatctcactttcgtgctagctatcgcatgaagcattgatgtgctccgcgcatctcgtcgagtgttgatgacgtagcgcacgtccggtgtcggacgggcggggggaagaagatggttcaccgcctggatgaggatctatcggtagcctttcgcgtttggggtacgtggtaggccattggcgatttgagccagaactccatcgacttcacttagcgtgttcagggcacgagcgaagtcggcagcagattccgaggaaggagtgggttttcacgtcggagcctgacatcatgctccgctcgttcccgctcgcgctcctgagtgtggcgacgatcgcggtgttgggaattgcggcattcgcggagtgccctatcgtcaggagtctcttctacttcagatgcctcatcctaggatacgggctgagcgggatcctgctccccggcctcatggtgacatcgaatgttacgacgcctattccgatattgacgttcctcgcgctgcggaggctcctcctccagtacagtgggctcgtcttcatagatgggcgcatcctctactcttccctggataaagaggacatccg

SEQ ID NO: 17497 - DNA, 884 bp, Zea Mays
gcctgttgtccgcataaattttctaccgactctgagcttccagtaatcttttgcagatcagggcaactttctcttcagcctctttaacaaaggcaggtccttccaatgtcttttcccctatgttggaccacatgagaggggtctggcactttcgtccatacaatgcttcgaacggtgacatcttgatactggtctgatggctgttgttatacgagaactctgcataaggcaaactggactaccagtttctgtcgaacgttaacacacaggctcttgataaatcttcgaggaccttgttgaccctttcggtctgaccatctaactgggggtgataggcggtgctgaagtctagcttggtgcccatagcttgttgaaggctcatccaaaatttggaggtgaattgggttcccctgtctgacactatcttccttggaatgccatggagtctgactatctctttaagataaatccgggcaagggtggctcctccaaaggtagttttcactgggatgaagtgggctaccttggtaagacggtctattattacccagatagagtcgttcactttttgggtccagggtagtccacttacaaaatccatgcctatttcctcccacttccattcaggcatgaaaggggttgcaataggcctgcaggtttctggtgctcggcttttgttcgttggcatgtgtcacaccgggccacatactgtgctgtctctttcttcatccctctccactagtatctggttttgaggtctaggtacatcttggtggttcctgggtggatggagtaggctgagttgtgagcttcatcgagcaggacttctcgtgcctctccttttggtacacacagacggttcttgaaccaaaggactccttgtt

SEQ ID NO: 17498 - DNA, 494 bp, Zea Mays
ttgcgatgtcatggtaatattcatataccaagaaagaagcaaaattagatcaaccaagcatgttattaagttatcaatcctctagcaataatcaggtccatcaaataggtcagcgattagttgtatagttgtccgacatcaactaatcacactgcattccaccaggcattcccatgaggcctcaagcacatccgcctggaggttgtgcccgtctgctactctgttgtgtgctgccgccgtccgaagatgagctcctcctctgaaggttagtgttttgccgcatcctcttactatcttgtctttcaatcctccatcttattgctgtgtttctagttcattactagaatctttatggcctgctattgctgctctattttttgtttccttctactcttgctggttgctgctgccttttgttcttgctgctctaggcctttacctcaagtcctatatgctgctggtgcttacataagcctgtatcctatagatgtgga

SEQ ID NO: 17499 - DNA, 667 bp, Zea Mays
tgccttcctccatagatcgagggccaccttcgggactatggacttcatcaccgtggaggatgatagcctatgtttcatcatcccccccttaggataaggcaaggccaagcccctcgatgggcgtctctcggccaatcgatcaaggatcatgcggtatagcaacccatgcaaggatcattaggggaataggggaggtgaagataacccaattataagtgtctgaataagcccgagtttaggtaggtcaactagtgggtagcagacaaagcccaactcctcattcaaccaccccaacctagcatggggagtggtcttcgacattgttccacctagggcatgtcaagcatgtaggtcagagcttgttattgtgaagagtcatgacccttgtcactctacaacctcctcgacatgtcttctagcgatggctcctcaataaatccataggacactgccaacgggtcacccctccatgattgcttcatgaccgagaggaagaacacatcaacgctaataggagtactcccaattgaggatcagcactatcccgaacaagaagttgagtacttttagtgctaggccaaacaacacctaagatgacagaaggcatcataggagaagccgacactgtcgatgcagcaagtctcgactacccgcaacaagatgtaga

SEQ ID NO: 17500 - DNA, 450 bp, Zea Mays
tctaatcttaagttgagctaacctaaggtcagtcacttaaccaattaatagtgggaaaaaatagattagaccctgcccctataaacaagtttgagatcttagataaactcggccatacacaacaacatgacccatataatatgttacataacctatccaaccaatctatgggcaaacaacccaaccaatagagtcatgatggattgcataatctgcctatccccacctaacatcaaacaaacttttgacctacatcatgtagtctatctcattcatatctatcttaaccatattccctaaccgatgatatacactaaccacgaatcaatgagaccaggactggagaagaaaagatcaacctcgtcaaagaaggagagaagtcaaactcgatcttcaagatgcattaccacccaacacagaattcttcctcaccataaaccctcttacccc

SEQ ID NO: 17501 - DNA, 721 bp, Zea Mays
gcatgaattcaagcttgattcaataggaatttggctactgctgctatggcaaaattatagctggtttgtagctctacaactttggtgcagagggatgataaagttgtcatgcgaaatctagagagaattttccctgaagttgctctgtcaggttaactgaagtggaatgccatgctacagtaactgaagaagaatctcaggttcatcccctcgccgtcgacgaccctcgcgccacgattcccaccggtgaggtgattcgtgctcatcagtgcttggataacgctcgaggtcacgtaaatatcgccgctgttgataagtccggccagtaaacaacttcggccaccgtacaggttgccacggtcgctttggataagctcgccggtgactgccgccttccggccttgtgccacgtgccctggcacctccatcgcgtcgccctgacccgctgtaaccttctgtccatcgccggggagatggccacggtaaccgtacaccaatccactgcgccagtagctccttgtttccccggccgccgcgcgtcatcgctcgaattcccgaccaccactcactaggcctataaattgagcacccccttggctctgccatgtattcaagcagctaacgcacccactcgcacctcaaatcctccaccagagagctctaattttggattctccccaaatcacgtccgaactccgctcggtttagcctcaccgcggcc

SEQ ID NO: 17502 - DNA, 318 bp, Zea Mays
gtggtgactccattgcactttgcacatctttataaccttattccttgtgactcgagtcagtgtatcaagaatcttgatggggtactcagcataagtcaaatcttcctgaacactaaggtcttccattggtaattgttcctcaggtaccctgagacatttcttcagctgagatacatgaaagacatcatgaacccccgcgagatgatccggtaattccaattgatatgcgacccctcccacttgctttaagattaagaagggtccaataaagcgaggggacagctttcctttgactttaaaccttctcataccacgaag

SEQ ID NO: 17503 - DNA, 1026 bp, Zea Mays
cgagaggacaccccaggcgcgatgattcttgaacacacttccacggtctatcggtgattctctaagcgccttccccaagattgagccgtcagcaaagcggagatggcgagtggcagccggttgttctcttcggtctctctggtttcatcgcagatagttagggaggctggcatttatatccctaggagcttgcatggtggcgcagctgatggatgaagtggtctctctggtttccttctccttctttatttctctttcccttttcaaattctatttttcaaacttaaacttgtcataattttgagtacagaggcaaaaggcaagaactttgtcatgaggtgcaaatatatatatttatttatttatttcataattattattaatattattttcttttaccaattttgggctttacactaagcctccggcggtaactcgggcagatgagtgaagagggttccagagatgtaggaagacgattcgctacaaactgggacatatgcgaatggattacatttatcacttgtgcggggatagccatcctcgatcgtgtatataaggtcgggaggcacctgtaccattttcatctcacctcagcccaccgtacccatagttcatagcttgtaatctcatcccaataccaagatcgtcacaggacgtagagtgttacgccattctcgcggtctaaacctgtattagcctacatgtctccctgtcgtgtcaccacacaaaccatcgagtcgcgatcaacaacgccatcctgcccaaaagcatcacgtaggtaacctcgtggtacgcagtcgggtaataaacaccaacacttaccatggagctcatgccttcactgttccacaagcacaacccaaagggtgccacgaccacgacaccacgatgaatcaggcgactacgtgtctttcactgagaacacggcgaacttcggcgatgacagactgaccatgtgggcaagtgggcacgacagatgagcctgcccagacccctggttcaccctcccccatgatcttttca

SEQ ID NO: 17504 - DNA, 327 bp, Zea Mays
aacaagctctcccctcgctccacccattgtctttttcttggttactcctctgaccacaaggggtaccgctgccttgatctcctcacccactgcatcctcatctctcgtcatgtcgtttttgatgaagatgactttcccccatgtcgtttttaatgaagatgactttccccttgttggatctgccccacctactgatctcgactccctccttgaccccgatcctgttcttcctccaccccagtcagccctacccgcgccccacacggcctagatgcctccgcttgcgcctctatcggtgccatgcacaacccatatgcctctgtccgc

SEQ ID NO: 17505 - DNA, 399 bp, Zea Mays
tagtggcagcaatgacccaattggagacttggaagccaaggtggaacaacttcggttagagctacgtcaccggaatagggcatgggcgaggacaaccaacgtatagctaaattgtcaactgacgtcagctgcttgcaatatgagatttcagaacaggattgggccattgattgggccatcaactcgcgttcgatcgattgggaccgcgaagcaaaagctcgagctcgtgcggcagagcttagccctcgacaacctgcaagtgtactgtaatactttacatgaagaagtacatgtactgtatgctcgactgcacccggacgtgccttctgacgttgctgcaatgggagccagaccatcaggaacaacaaatgaaggacctgatggggagttggacctttt

SEQ ID NO: 17506 - DNA, 557 bp, Zea Mays
cgggaggcatcaccctccattgggtcatcattgttggatcttctatccccctctctctcctctaggaatctcgagagagctatgacatctttcgtgtggcacaggaggccgctaaggccgagctgctttgggctcaacttgccgaatccgatggtcacgtagttggtaaggtgcttgctcctcattccttactggttgccttaaccccccctcttaccctactcgtttctcctgacagctttggaagccgagctagagaaattatgctgccgcttgggtcagatctcgaattacgtcgaggatcatggttcctctttggtggagcctctgtacaacgtcttgtcttgtatcccagatattattgactttgtcattcatcgaggagctgccgtggtactgctcattggggagtttcggtccggctgtggccttcgggatgtcgttggccctctttcgtccctttcggacaaagggctggaggacgtgctagagggctacgacgaggcagttggtcgtgttgtgcataggttgtctacggatgacatcacacacatcgc

SEQ ID NO: 17507 - DNA, 393 bp, Zea Mays
cggcccctctgccatgtccgcgtctaactccctccctgtgtgcagaccaaaaattgtagtcgccatgttccctcatcgtctagccgaccgaagcctctcgacgccgcgccgagcttccccgagcaccgcccctgagtaaggaaccccacctcgcccttcttttgccttaattccatgtcaccgcggtggattttggatcgccagagccgcttctcatcaggacaccgcgtctccatggtgcccggccagaacaacctttccatgtgcctaaatcctggcctagaatgaccctacccctcaccgaagctcacatcggcctcggtgcacctaattgtcccccactacggtggggattgctcaccggagcaccctccgacctgcccaggacccctc

SEQ ID NO: 17508 - DNA, 669 bp, Zea Mays
attgttggcaatgagcatatcacatggcttcttgatgatgcgttgcgccatctgaccaaagaggatgaagtctgtatcacccgtctcatcccctacagtgagaagcagtttgtacctaaaacacatggcgataccgagtcagtagcacagtgaaaatgggtaggccgtgtgtataggaaatggaaacggtcactcagggtgatgcatagaaaagtagccgctgcatattagatgtgattgggagtcaaaacagcgagagatgttgggaggcaaaggtagaatggaggcaattgaagtgaaaagatgccgcctaacctttggttgggcgtgctaatggtagcacaaacttgatcgctgcacttgtaggaatccccatgagccatagttgtgcgggtgcattttttgcatgcactgtaccaccacctatctccaatcttttttatagtgactgtcaccaagaattccctatcctgcacgaacatgtaaatatacgctcatgctatattcccagttccaaccaactatggcatgactgcaggaaaacaataacagaagaccatggcagttggtaaggcaacagtgactaagtgaatgaaacatggaacataccttattctcaaatgggtgcagatctctgatataagcgattttctgttcctcaggaacatg

SEQ ID NO: 17509 - DNA, 465 bp, Zea Mays
gaagttcacgacaaaccggcggctgaaatctccccaatcgtcgatgcagtgtcgagttaaatgtcgaagccattgtagcacgtcctgcctaggacaatgggcaggtacgctgtcaagacatcttctgttgccccagcagcccgggtggcggtcgtgtagaaattcaagcagccccccgggtcttgcttgggttcgtatttgtcgacattggagactttgaagttgggaggccattggatgccccgaagccggggggcgagcgtggagaccctgcacgtttcctcttgtcgatgatcatgccaccagtcctagggaggggagcgagtctcatgtcacctcgaccgtccccagactagagtagttgtggaggctgccacagactcgatcctggttgcacggctacgtgtcggtgccccatgatctcggtcgtattcctcctagcatcttatttcattttcatgtcga

SEQ ID NO: 17510 - DNA, 388 bp, Zea Mays
gcatgagatgatccaacttatggaaagttttctaacaagtttgttcttttgagaaaacaccaactaaacctcaagtaaagttcgagttttctaatatgacattgaattttaaactcgtttgagctcaaattttttggacaccttagaaacacctttcaaagatgtgtgccaaattttggctcaatcggagtctgcttggattgattttgtattctagaagactagaactttgattcgagatgctaaaagcagcatgagtaaggggcacattgtcgggtcgttctagacttttcgatggccattctgcgactcgcttgttttgtttgactagtgtatgtcacatgaacttttcatatctcttggctgttatttggatttttggagtttg

SEQ ID NO: 17511 - DNA, 491 bp, Zea Mays
cttggtgacgcggctgaccgaattgggggaaattggtgattctccggctagggtggctaatcgagggtgggagcgggtgctacggcttcgcaatttagagacgaaggacggagctcggttgatttgaacggagggggtggggacgcggtgaatttatagatgcaccaagccgctaccatggctatggtgataaccatcgccggtctttgctggcgatctacgacgggttcaagcgatatccattcatacgagcctgccacgtcctcgccgcgatagtaacgcggtcacatcggtgcggcgtggatgaacggaggggagcggtaccgatgaccggatatggctagaatgagagtggccgcgtggcagccggaattattgctctccaccgcggcgatcttacccagatcaaaaagatcttcgcgcggagatgctcgccgatcgaccatcccgaccccggcgcaaatcagggtgcggattggtcgtcggcggcg

SEQ ID NO: 17512 - DNA, 1231 bp, Zea Mays
cagatttataccttgcctgtgaatcccatgttaattggcaattgatcagtggactgcaacattaatttcaattgagatggtgctggagtgcaagttgtggcacaagttccatgtgctggtccggttccaccacccaccaatgtcgtgatgcctacacaaatatagatataacttaaagttttcatgtatatcactgactaacctgggtcacatggcacataagacacacatcatatttgaaacttaactaagaaatatattttcaaacataaaaaatttacaagcaaccaaagctctgccagaatgatttaccccagtgttgatttgataccctttgtttgtaaaatggtgaaatttccatgataatcaaatgaagtgtatttggttgcacctaatatatggtagaagtcaagaagcctaaccgcttgcaattgcctcttctgccaactgaggacatataaagtggacatggcaatctatgccaccagcagtgacaatcatgccttcagatgcaataacttcagtattgacctgcaatttcatgaaattttatctcttttctttagcaaattaatatggaacgttcagtaaatagttagttaccccaacaatcatgttgttatggacaccatccatgacatcagggtttccagcctttccaatagcaactataagtccaccttttataccgatatcagccttgtatattccggtataatcaatcacaacagcatttgttataactgtatctaggcagaaagattctgggtaccctgaagcttgtcccatgccatcacgcagaacttttccaccgccaaatatgcactcatcaccataaaaggcgaagtccttttcaatctcagcataaagattggtatcaccaagcctaatcttatcaccggtggtaggtccataaatgctcgcatacttctcatgatcaacagtacagtcaaatgaaccatcaccaataataccttccctgcatataaacttaaaagataaatttaggccaaaaaataaataaaacgattttgtcattggccgtcaataaaataggaaggatcaaccttgcatctggataatcttcatgtccaaaactatttgcattaaccttctgcatcaccacattaagacttgaactgtcaataggaccatcagcaatgccatttccacctttgattaccttatgacctccgatgcttacaagtataacactttttgcatcccctgg

SEQ ID NO: 17513 - DNA, 376 bp, Zea Mays
aatttaacgagggctacttagtcttaatcaaaacagccaggatgaaaggaaaagacaaactcaagcccaaatggaaggaaccctttgtcatcatcaaaaaagactctaccaagttccctttttacatttgtttgtcttcaagcccatactatttccctcacaagggatatgaggttttaatgagacaaagccatgtaacactaaaccttaacaatgtttccccactaaagtgtcacaagatcaaaagcctaaaacacaagcctagcattcaataaaattgcacaaatcatagcacccaccaagacgcaaagtctattgggttacggtcatcgaagacatctaaatgtgtaaacgataaaaatgatttgaagacgtc

SEQ ID NO: 17514 - DNA, 743 bp, Zea Mays
aggaaagtggatcagagaattgccctatgtggtttggagcttgataactcaacctagtcgagccctgcatggaaataccccgttcttcatggtctatggttcagaagcggtgctacccgccgacctcaagttcggggcgccaaggctggtcttcgaaagcatagctgaagcagaagctaccaggctagaggatattgatgtgctggagaaaaagcgattgaacacagtaatttagtcagccagataccagcagaccttgaggcgctatcatgataaagctatacgacatcaatcctttgtagtgggagatttggtccttcgccgaattctaacgggggaaggacgacacaagttgtcaccactataggaatggccattcattgtatcggaggtcactcggccaggatcataccggcttactcaaatggatggtacggaagtggggaattcatggaacatagaacatcttagaaagttttacccttagcatgacctcgaaagctatcggagcaacattgtgctctataatgggagaatacatcatcaataaagttttcattttcaagggcattcaaactgttaactattacttgacttcgattcaattggacttggattcaacacgcttactcgactcagggtgaccactataccctactaacgaagcaaatggcttaagtcggcgacgacttaagacagtgcaacatgctcgtgcttacttgacttatggtgaccactatacc

SEQ ID NO: 17515 - DNA, 1630 bp, Zea Mays
gagccatgcagtatggtctttttgcgattggtgcggtgcctgggattagatcaatgtagaattctacctccctttctggtggcattcctggcaattcttctaggaacacatccatgaattcttctactacagatatgctttcggctgctagattaaacaccattggatcttgggtgggtggttgagccttacatgaaactgactttccttggtggtcagtgagaagaatggtcttatctgcgcaacttatgacgccattatgcttgattaaccaatccatcccttagaccacatcaattccgtgggatggcaggacggctaagtctgccaagaacactaccccacttaaaagaatcctgacttgggagcatttgaggtggcatagaaggtctgaccttggggttcgggtgaccaaaggaatttctagagatgtagtgggaatgccatgcttttccacaaaaccagtagctatgaatgaatgggatgctcctgaatcgaaaagtacaacagcgggggtaaattcaactaggaactcaccaagcactactcccggggcttgctgagcttcttgagtgtcggcgtggttcactcgtgccttgccatgaaactaggtcttgctcagctggctgttggaggagggtgccttgggggcgggtgctggagcattcttggggccatttaccgagttggagtaggtaggcaaggatgtcttcaactgaggacaattattcttgtagtgactagggtttccgcagtgccaacaagcattagttggaggttagttgcttgcaatagatggggcatggagggaactttgacccggctggctgaaacgtgacggagcggaccctgctggcttgttgaagctcgaccctttgggaggaaacccgaaagatcaaactctctggtgcctgtcctgttgctgagctcgaaggacttgaaacttcctcttgaggtgaccttttcttcttctctagccctttccacttgtatggccttgtttgagaggtgcgagaagctgagaaaatcttggctggcaaggatagtcttgagttctggtcttagccccttcaagaaacgggccatcttcttggcttctgtgctgacatcatcaggcgtatagcgagccaattctgtgaacttgtggacgtattcactaacatatctccctccttgggttaattcccgaaattcttcttctttgagttggtcgatccctaggggcacatgatgctctcggaaggcggcttcaaattctgcccaggtagcatctctgacggtagcgctgcaagtatcccaccaggatagggccatcccggagagttgatgagcagcaagatgaacacgctggttctcagggcatccaatggcctctaacttcctttttattgtgcgcagccagtcatcagcgtcgagcaggttgctagatccgacaaatgtgggaggcttgagccttagaaaccctcccatcctgtcctgaggccttcctccattcgggcgctgcttctcaaggcttctagtgaggacctcaatgagtcgggtttggttggcccagaacttgggctaaatctaatggcagctccggaggtgtagggaggtgggtttcactcccttctccaccaacttctcc

SEQ ID NO: 17516 - DNA, 840 bp, Zea Mays
gaaagctaagacactactttgaagcttacaaaataaggttattaacaaagcgaagtctatctaacatatacaacaaccttgaggcctccacccgtataagaaaatgggtcgtggagttgtcagagtatcacttgtcttttgagtccagaagtgccatcaagtcgcaagtcctagcaaactccgtcgttgactggaccgggcctatcatcccttcgccaccaaccaatgaaacaacttgagtcattcacagtgatggatcctagggccattctggggccggagtcgatgcaagtacagatacactactcgtctcagcttcacaaatgactccgacaaatgtacaaataacattgtggagtacgaggcaatcattctaggactttgcaagctgagagccctcagagttcgaacctgtatcatcaagacagactcgagaacagttgtaggccaaattgagaaagattgtgcagcacgggagccagtcctgctatagtattcgtcaggcatgcgaagtcttgaaaggcaatttcgaggatacacagtccaccatattgaccgctctaaaaatgaagaagcagatgcgctagcgaaggccgctgccaaaggagactccctatcttccgatgtgttctaccaggtcatccaaacaccctttgtaaggcatctagacctacaagtaatactagtaagcatgatttgttaagaggactagagtgcccagataatatcttacctgcggggcactacacctagtggaccctttggaaaaaatataggctttcatacagatgctgccagtacacatttgtcgatgacaacttatacaaacaaggaattgtc

SEQ ID NO: 17517 - DNA, 328 bp, Zea Mays
ttgctggtgggtaacttgtgtttatggccctcagagtaacagtgataagatgttgtttcttcaagaattgagagacattagggctgcttgctttggaccttggttgattgccggtgatttcaacctcatctacagagcttcagacaaaaacaactcaaatcttgacagagctatgatggggagatttaggaagttgattgaggacttgagtctcaaggagattccactatacagacgtaaatatatggggtcaaatcagcaagacagtcatgtccttgttaagcttgacagggttctctgttcagtggagtgggaagagatatttcac

SEQ ID NO: 17518 - DNA, 755 bp, Zea Mays
cgttagctttgcctccactccctttagttactccacaaaccactgaggccaccttccaaatgcaggttgccatcttctccaacatgatgtttgtatcatcttcttccttccatgtgccctctttgacggttcttttcttgaagacttttgccttctcccttttcaatttccaccactttgttctcgcaatcttggcttgtttatccctaggggcacacacttgaaaacgaaagaccgcctccataagcttacgttgagagacaacacactccctaggtatcaacttacaatccatgcatgctcgtttatcctctctttttatgaggacaaagtcaaactagctagaatgttggccactattataggccactaaatgagagtttctctttctataagtttaatattggatcgccaagcaatcctctttatcagtgcttgggacctgctatgttgaggcaacataggcagagtttcgattgtcctcacaatgatgagaacaaataggatgagaaagaaagcgagaagacaacgaaggcaataagatggtattcaaaaagaaagaaagcctacattcatgatttttccatatggcattgctcaagaagtatggagaggctcctaaggtaatcagtcctttacacgagatattacatgggtgtgtcatccctgccactgaaaaagtgattaaagctcaactggatcatggagtatcggatgttttggtgcattgggtaggtaggtcagctatagattcc

SEQ ID NO: 17519 - DNA, 464 bp, Zea Mays
gaaaattagcattgagaaagaaaagatgtgtcaggtgtttcaaacctagctccgacaagtgaatttgtttgtgcgcggtccaggtgatggatggtgtgcttagagggcgtaaagtttatactggttcgggcagaacgtccctatatttagtctttggtggctcacgctaccggcaccgttgttgctcaatgctcatagtagggattacaagtgggtgagagagggaagaagagctcacaagtctcttatgcgtggctagacctaaggactatgtgactagagctctctgctaagccttggacgtcgtggtggttcgttctggcctccgtagtcctccgggtcttctggtccgtctgtgtttcttatgtgtattcgtgtgcgttgtgttctcctttgtgtccatctatgaccctcccctttaatagaccaaggcggggatcggttatcggctccttatcttagaa

SEQ ID NO: 17520 - DNA, 448 bp, Zea Mays
gattaattgagattaatcgtccaagtagttccgccataacgattagcaagtcgtccgacttgaaaacattgcttttggtcgtggtttgtcgttactgcgggtggaaggattatttgagggattggattgcatctacagtgtaagctgcccctttattattgatattactactgctatttgatttctctgatccctgttgagaggaattcttgctcctcttttgttgcttctgctggttagttgatcccgtcttgtggttgctgttgaactctaaattatctacattggagtttgagttactggttatagcaccggagggaaatatcgactatttagtttctggttgtagctgttatgtacggcaaggcttatgttaggcgccgcaagcccattagtggctgatagcggataagcaagggtagggccaaggcccatagttagatgtgag

SEQ ID NO: 17521 - DNA, 782 bp, Zea Mays
gcgaaaaccagggacgacgggttattttccggaaacccgagggtccatgggttagcagtatgttgaggacatggggcgcgctggcaactcgatcgcagatcgacggctctgtttccacgaaccgttaaccacgaatccgagtcgtgagatcagaactagacgtttaggatgggcgccagggggcttagccttctccggccggccaggggtggcaccatacacggacttgatggcgcaatcatcgacgacgaggcagaacgaggctccaagggcgctactgtttggtctaggtagctagagaggttggggaggactcggcgaaccctatggcaaggtcggggttgcaggaatggggctgaggcgaccaagtggaggaggggagtcctcggcggaccagggtttactctggctagcaattacggggcggggttagatcagttaccttgagagaaggctcgaggactcacgaacggcgtccgaggcacgacgagcacacgggtcgacaacgacggagctacaatggggaagagagtggaccgatgagcatggaacgagagaaatagagggagagggagtgaaccaaggggtgtcctaggtcacgggtgatgaggcgaagctcactgtggcaacagaccaggcgagggctcgacggcaaccgcagaacgggcacgagaccacggcgaacgacggtggagcttcctaggtgcgcgcgtagagcgagagagagggcaagggtgctcagctgggggcgcaactgagcggggtgtggcggaactgcccga

SEQ ID NO: 17522 - DNA, 587 bp, Zea Mays
attgcacctgacgatcacgttccgagatagtagatccttcacagagcaacaagagggatcaaattcaatggaacagttattatcggtagtaaactggcgaacggaaattaggttcttaatgagtttgggtgacacaagaacattgttgagatgtagagaaccatgtaaagtagtggagccagtggaaatgacatgaagaagtgagccgtcaccgaaaataatggaggaaggtgcagtaagagagggagttgaagtattggatagggtaccggcgttggaggtcatgtgggaggtagcaccggtgtcgaagtaccagtcagtctgctgaggcagagtcaaggacacagtactgaaagcggatgcaagggactgagcgtcccaagagggagtggccgactgtgccagcatgccgtagggagactggggggcgcttccctgcagagggtcggtctgtagagtgtgctgcaatggggcgtctccctgtccttgaagagcaccatgaacgtattgctgggtctgatgggccagcagcgcctggtgaggagcgatggagactggagcagcgtagaaagcctgctgttgctggg

SEQ ID NO: 17523 - DNA, 1362 bp, Zea Mays
aaaaaaaactgacacataagaaaagagcagcgagcaagctgaaggtgaaagccacagcagctcgtccccttccccccacttcttcctcagataaggagaggccccaggccagagaaaaaagcatcgaatttccccccgttaattggcctgagccctcagccgtctaccagcagcagctagaggtacgattctcgcattgcttgctccctgcgcctgccctcgatttttgctgttttttcgagctcctcttccagttcttttgccgtgttggaaccgcatctatgcagcctagcgcggggtactagcgtgattcggtcagtggatcccgtcgggctgctgcttcctcgcggctgatttgcgagaggaagcaggtccccgggaagcgatctcatttttcgttatttttttagctccctacaccaaagaccagagtcagatccgaggctacccgccgccccggcaaggattttacccggccggagctctgcaacatcggtgggatcgatggctgcgacctccacgagctccggtgcccacgaatcgaagtcagcagcgccgtgtggactgagtcacgtgcctggttcgccgtcctgtccgacgcttctcacctcgagagcccgtcgctgttgcctcggactcgagggagctggcggcgcaaacgccgtgcggccaaaatcgagatccccaccatccgaatcgaggtcctctctaccagaatcagttcccgccgccgcgtcgaggtagctgtcacccaaattgagctttccgtcgctgctggatgtgttggaatcggaagcttcgggcgcatagcttgagctcgctcaagtgtatcgagcaagcaaaccaagcgttgggggtcttgctttgcgcctttgccgcgctagcttagcctatctatccgtgctaggaatccccctccctttcggtgtgatgtttttgacttgccactgcctggtgttgctggggctgcttttctcttctcctttggggctctgaatgaagactgaagaaatcgaaagagaggaaagctacgcctgagtcggggaacgcctacgaagtaagttttggcttaaaggtggaagcttttgaggtttctccttgcgaaataaatgcttttttcgatgttatttgatggatttggttggtactcggtcaaaaggtgttcttggtttgccctttctatgctctggctgctgttgcaactgcaacttccctttcccttagagtttggcgctctaaaagttggttcactttgcacgaaggatttctgtttcttgttgctgattgggttgtttggatctatctgcaggcagacaagctaggttttactgcttcattgagcacaaagatccgctgacctct

SEQ ID NO: 17524 - DNA, 409 bp, Zea Mays
cccacggtgacctctcccagacgagagccgcgctggtgctcgccggcgtcctgagcacggaatcagagggccacgtgtggacaggcggacgcacggtaaatctcctcctgcctgcccaccgaaaataccagagggacactgcatttctcatgagagctgaggctttgcacgcaccttttttgtatactctgcctccccaccgaatatatgatatgcccctgcctttcttgatagatacttgttcaagttggtgacatccttgatcgtggtgaagatgaaattgccatactctcactgttgagctcactcaacatgcaagccaaatctcaaggcggtgctgtattccaggttcgtcttgtcaaccattctgctactgctcgtacgccaccattgtgcagccaaaactccc

SEQ ID NO: 17525 - DNA, 331 bp, Zea Mays
ccgggttcactcctttccgccttctatacggatcggaggccatgaccccacaagaaataaaacatgggtccccacgaatggctccgtcagccgtccccgacgtggacgagccaacttcaaaggatctcatcgacggagaccgagtcttcgccttacaggccctaaacaaataccaagcccagacaaaagcatggcgcgaccactcagtcatcccgagggaattcagtgaaggagacctcgtactcgcccgaacagctcggacagagtccaggggcaagctagagcccaagtgggagggccccttcattgtcaagacgaaagcttcccccag

SEQ ID NO: 17526 - DNA, 618 bp, Zea Mays
gagtaattgagggcacaagcggttggattagatgttggattacctaacggagccgagggagtgctcaatttatagcgtgcttgagcggtggctagtgaatttgatggggacacgcggcggccggagagaaggaggggcactagcgcaaacgattagtggctttcaacgtggcggactcactggcgacgagccagggctatagagcggcttatggcgatgtggtgaaggttcaaggcacgtggcatccgatcgacgggcggccaatcccggtgaacttatctgagccggccgcaaagcaaagggatacggcggtcagccgtcggtgttatccccatgcgaagatcttttacccagaagcgttatccggtcaccggtgagcacgaatcacaacggcgacgtgaatcctggcgcacggtcgtcggcggtgagcttctctgcgctggcgtcctaatccggttactataccatcacaaggcttcatcagttggtctgatagaggatttttagtagcatttttcttgaatttttgcatgacaacttgctaatcggtttgtagcaaacttgtagccccatatacaaactacaattctgctgcagagattatacttagttgcttat

SEQ ID NO: 17527 - DNA, 656 bp, Zea Mays
cggtcttctgctgatatcctcgtggtagtgcgtggagggtcccacaggtcagtcgcatggagcactcacgcgtcatgcggtcttgactgtcgtcacgagcctgcgccacttattggtgtgcgtaggcacacacccggtatggtgtatcactcacgcactacttcgtatttgggtcattgtagaagctctaatgctgagatactttatgaatagggttgtaaggtcctttgaggcttgtgggagtgtgtctgggaccgtactcaaggatgtgcggtcattgtcgttagtagccactcggcgtgtctgcggcctgtcgttcggatgaccaaccagggctcgggatgtcatgtatagtcctagttagtttggactttgcgatgtttgacttgggttttcatcttgcttctcttacttggtaggtacctggtcggtcgctccacctcgtgatcctgctcggcaaggacctgatcggtcgctccactccgtgcacttccttggcaaggacctggtcggccgctctgcctcacggtcttgctcgaccaagacttgattgctcattccgtctcgtggacttgctcagcggggacctggtcggtcgctccgcctcacgttggtgtgtggcgttgtgttttgccaattcccgtctcgtgatcctg

SEQ ID NO: 17528 - DNA, 428 bp, Zea Mays
atcacttgaccatgaggaggagggctacaacgacactcacgaacgacgagataatgttctcatcaacataccgcgtcagagtttgatcggttgggtttacaagcaattagggatcatagggatactaaaacatgagtcagagagggttgagctcacctaagaagctctggccacatcgaagcacctcacgacgacgatggtgactggtttcaggaaaatctgatgaactcgagttatggtgggcgataggggataactgagggtgggttgggtgcataacagagaggcagagtgaggggagtgctcaagttaaaggaactgatcgtgtgcttcacaaatttggaatcagattgagctccacggcgatcgggatttttcactaggacttgtgtttcgtggcgcacaatagtgtaatagctcaagggtgg

SEQ ID NO: 17529 - DNA, 877 bp, Zea Mays
tgctgatgaactagccatcagagtgaaaaagtcactttggcacgctcgcggtcccgtacccggcgcgccaactgtcgtggtttcagaaaccgggggacaataatatttgtgttcagtggggatgcaagcacaaactcactttgaatggtggatcatggagattctagcaaagaattgaggcactgagttatactggttcaggctggagccctagtctagtgtagtgttgatcgtagtattgtagtagagcgtgttacggctggtgtgcttgtgtgttcatgtgcctctctccccgaaggaggagggggcctacccttttatatctcaagggtaggaccttacagtgggacttgtattctactggatagagagagggagggagggagggagagagatctgctccccaggttgtcatggtgggtccttcgtagggtcatgtgtaatcgtactctcggtatggcgtcgtttgttactctgcctcctgtagtgagtccatcgctgatgtctttgtagtggtgcacgacggcttccacggatcagtctcatggtgcgatcgtacgtggcgtggcttctcatgtcgtcatgagccctttgtcatcggttagtgtgcgcaggcgtacattcggtatggcgtgtcgtcccgtccttcagatgtacgtatgggtcactgtagagaccccggtgcccatttaccatgttgtgtgtatgttcggatgtggattgatggtgacgcatcccatcgtagctgacgtggatcagtagcactggactcagatctttgcccattttgctcgatagtgagttggttgtacggagttgattggtggagagttggttgtctagtctgcctcgcagacttggtaagcggagttgggaa

SEQ ID NO: 17530 - DNA, 769 bp, Zea Mays
ctttcgtcaggacagcaagggtactttatggttcgaagaccgactggttgttcccaaggatctagaactcaggaagaaagttttggatgagtcccatctctcaaaattttccatgcaccccggaagtaacaaaatgtatcatgacctcagatccttatattggtggaccaggatgaagagagagattgctaagtacatatctaagtgcgacacttgtcaaagaatcaaagctagtcatttaaaggtagtgggtaccttacaacctctccccataccatcttgtaaatgggaggacatttgcatggactttattgtgggattgcccaacacctcccggcaccacgattctatttgggtcattgtggataggctaaccaagacaactcatttcttgcccgtgcataccacccacaggacagaaaaatacgcgagaatctatattgaccaaatagtgcacttgcatggaatcctaataactatcgtgtcagatagaggagcaccgttcgtagcatgtttctgggaacagctacaaaagtcacttgggacaacagtgattagaaactcagcatatcatcctcaaactgatggtcagacagaaagagtaaatcagattctcaaggacatgttgagagcatgtgtaatacattatggcaaggagtgggacaaatgtctttctctggcagaattctcttacaataacagttaccaatccagcctgaagatggcacctttcgaggccttgtatgggagaaggtgtagaacaccgcta

SEQ ID NO: 17531 - DNA, 801 bp, Zea Mays
ctatcaggcactgaagactgctttgtccacggcaccggttctcgctctcccagatttttccaaacagtttgctatcgagactgatgcttctggcaagggcataggtgcagttcttacacaggaaggacatcctcttgcgttcgtcagtaaggcactcagcaccaagactcaaggcctctcaacttacgaaaaggaataccttgcagttctattggcagtgaaccagtggagaccttatcttcaacactcggaattcattattttctcggaccaacgcagtctatcgcacctgtccgaacaacggctccataccccttggcagcagcgcgtcttcaccaagctgctcggtcttcagtacagaattgtgtacaaaaaaggggtagataacggtgcagcagacgcattgtctcgccgcccccaagaaggtctcgaagtattccatgtgtcggctgctagtccacaatggctgtccaaggtggttcagggttacagtcaggacaacaaggcccagtctttgctaactgaattgtcactccacccaacgactgagggaccctactcgctgcatcaaggattgatccactacaagggtcgtgtctggctgggcaacaatttgtctctccagcagcaggtcctgtctgccctccacgatagtgctctaggcggtcattcaggttttccggtcacatatcgccgcgtcaagcagttgttttcctggcctggtctcaagaaaacagtaaaggactatgtggcctcatgctccgtttgccagcaggccaagtcagatagagccaagtatcc

SEQ ID NO: 17532 - DNA, 587 bp, Zea Mays
aggaaatacacagcgaagcagctcctatgttccattgaagaaaggaggcaattcaattctgaatgataagaaaaataccaaggtatgtcgtgtaacccatccttgaatttcagattgcctttatttgtcatgaatattattttccttgttttcatgtttgagccagatttagcaatgtcgtagcataggtaggtgtgactcttttgttgaggtggaactttgatcgagatgtggcatggtctcgctcttatcttgtctgcatagtttatgaattgacagacatggatacgtttgtttgccatgccatgtcgttcctcttccacttccacattctacatgtttctttagctaattaggtcagcttaggagatgttcattaccgaacctccttcaacccacattgcttggctcacgctttctgtgggtaccatatggtagtagggtagtgcagtttctattttgccaccttgtttatgcatctgtctattcaagctttggtaaaagttgtgttcatttcctttttgccttttcttcggggatttaccgggagatatgcctgtatgattgtccacatgattagaccgtgg

SEQ ID NO: 17533 - DNA, 551 bp, Zea Mays
caaggccatgggcgggagatgtagtcacgactcgtccgaggccaccctcgggcgggagacacaatcacgactcgcctgaggccaaccccaggtaagagacgaagtcacgactcgcccgaggccaacccccgacgagagacgaagtcacgaatctcctagtgggagatgtagtcttgactcgctcgaggctaaccctaggtgggagacgtagtcacgactcgctcaaggccagccccaggcgagagacgcagtcacgactcgctcgaggccaacctcgggcgggagacgtagtcacggctcgcccgaggccaactccggacaagcaatgcatttccaactcacccgagggcatctcgagagatgctctagaaggtgcccaactccgtcgaccaactttgcaaggccccgagtggcagatgcagtcacgactcgtccaaggccccctgagcaaaagacgtagtcacgactcgcccgagggcaaccctgagcgggagacgtagtcatgacttgctctaggccaacctcgggcgagagaggtagtcacgactcgc

SEQ ID NO: 17534 - DNA, 381 bp, Zea Mays
tcatgagtgcgaagcgtaccagcgctcgcgctatggctcgctgctaggcatggttaaatacaatcgactatttatggcagaccaatctagggctgaacgtgggatccactcgagtggttccccttcgatacgctcgaccccccatcaggttctgccacacctgaccctggactcagtgccgtggggttcggccgggggcatgctcctacacggttgacgtatccacctctcccaactaactaacgggccccagcgatcaggggctctttcctcagcgcactctctgaatggtgggtcctagataccagggatcatttccacgacagtagccccagagccctcgaggggagagtatctcccttcagaggttgatgatgggtc

SEQ ID NO: 17535 - DNA, 440 bp, Zea Mays
cagggatgagtggtgcgctgggtttgtaacgagatagcggagcaaggagaacgctcaatttatagaagtcgactttggttgctccaaattttggacgaaggggagcttacggtggcgttgagatgagtcaccggagttcgccaaatgtggcgctcgatgagggtaaagtctggggggtaattggctgtctaacatgacctacggtgatgtgatacatggtctatggcgtggcgcaaccaagctcaccgggagtcacgacggcgtcgttcgcttggccacgtcgcggagccagtgaatcacgatggatgaactagtgccagagaccatgttcacagcccttccctgatcttttcaccccagcgcttatccacgccgagctcaccgcgatcttttccgacgagcgtgaatcgcggcgtgggattggctgtgaagtgcccggc

SEQ ID NO: 17536 - DNA, 964 bp, Zea Mays
tgagcatcaggggcacgtaagggtgctgaaacaagagagcagaggacaagatcggacctggagcgcactggccacggtgagagcttgttcacggcggcggaaaaccgatttgggggaagtgagcaattcaggggctctgatgagtaattggaggcacgcgtgggtgtgttgagtgcacaattacatagcggagccgagggtgtgctcaatttatagggcccttgagaggtggcgcgtgaatttgagatagcgcggtggcggccggagagaagagggtgcactggcgcaagcaattagtggctttcaccgtggtgagctcaccggcgatgaacgggggggctaaggtgacacactgcaacgtgattaaagcaccaaagcacgtggagcaaggtcgtgaggtgcctaactccggtgagtctatccgaagcggtcatgactcaggcgggtacggcgaccagagtggaatagtggccagagttcatccacggtgtgatatttcttaaccttcttcgttatccatctgcgctaggcacgaatcaccgcgactggcacgaatctgggtgcacggctcgtcgacggtaaggttcagtggattgggatatttgcggtgcactgtaccattgaatcctcattcagtcagcctgacagtgcaacttgtagggagatttgctcccaatttcatgtattgactcgacctgttctctgtgacagttgtagccctatgatccagctacaaccttgctatagcaactatagccaaacaatgattggatcatagtcaaatcccaactcaaaggttgcccaacttcactgtcatgcgatattcagtttgtgcattatctgacagccagacttcagacccatttaactcctaattttgtacaataccaaggcttaagcacttaatcaaatttgtactcctatagtagctatacaagtttgatgtgttgaccctaggcaaatt

SEQ ID NO: 17537 - DNA, 657 bp, Zea Mays
tagatagatggataaatatgttaatacttaaatatcacaatttatgcgttcttatttatacaaagttccttgtactatgactgttttggattaatgagctaaggtattgtagaaagctatatctttcagcacataaggtatgtattgagattagatgcatgattaaaatattggaaacgattaatttctgcaatgttgtaaactcacctgcgtcttatttggggcatccattgagatattgcacttcttttttggtggctcaaagtcatcgtcatcatccacattaggcataggaatgtttttaacatcagctgcaacacccctctttctatgctgcggaggatcaccatcagaccgcgtatttgtagggtctgccatgtcagtcgagcgcggaatgtcaacactgaaacattcttgacttgactcaatgattaaacgcttcggattggttgggggtcgatcaaccttccgcattattgaagcagcatcctgcaaaagaacaatgtaaaacatatgcgctttattgagttacatcaacatatacaccaatgattatacgaactaattgaaaaaatgtcattaattgtgttatatgaccctaacgaaataaatgtcaacacagtcaaacatcaaaaaaattgtatcattgcattaaag

SEQ ID NO: 17538 - DNA, 795 bp, Zea Mays
tgggggtgtcggtggggttgcatgttgctcggctgctcgctgctccgggccgaggcaaggcaacgactcgtcgtcaaaggatccgatttgccactacccgtgggccgtggctgcattagtcggggacagggatgccaatggatatggtatggtaaattccgtcagtattggattttcgtattcgcgggtatagatatacggctgtttggttccctgtatttgagcatgtaaggctcatgaggtgcagcatctcgacggcctgttttgtttggatacctggatacaggttcaaaccaggctctgtacatacaaatcacccgtcttagccaggctcggtggatacggacgaaatccgcgttcgtcgggagcctggttgtgctcattcaccgcacttgctcacagccgtcactcgccgcatccgctcgagcgggcgaacccccctactagggtttgttgtcaacgccctcggtcaccgccttcactcgccgctctccccctccctctccgatctccactttccctcgagctctccctctctccctcgagctctccctcgagctctccctccgctgttgaggcttctccttccaggtttcgtcaaaaggtaaggaggtttgagtaccatctcttgctctctccctccgttgttgagctgctcatctagatctgataatcttgaataccatctcttgccctcttcccctgtcacgatttcttcgtctagatctaagaatcttgagtagtaattttagggttgagtaccatatcttgtggttgtgtacatcctggttttcc

SEQ ID NO: 17539 - DNA, 705 bp, Zea Mays
ccaagggtgcagccggactagcacaacaagtgtgaaaaatcgaagtcttttccaaaagactctccgtgcaaaagtcgcctaagggtgcacccggactagcacaataagtgcacaaaaccactctccgtgcaaaagtcgcccaagggtgtagccagaataataagcacgaaaaattgaagtcttttccacaagactccgcgcaaaagtcgcctacgggtgcagccggaatactagtatgaaaaatcaaagtctttttctaaagaactccgcacagaagcctacaggaacagcttgatcaacgaaagcgcgcagcttcatcacacataattatggtaacacacatacaacgagggcatcacacattacatcggctcaaccttcgggatggtacccatctccctatagttgaacaacattatcctcaattcctcacccgcaaacagacttcacagctccctctcacccacactcgccccagccggcaaggacaacaattcccgtttgacagtcccatccacacgaagacgaccaccctccatctcaccacgatgacgcctttcacctcgtgacaactcaaccactctccgtttcgccaccgctcttcgccgcctacgcccagcactcgcacccagatgatcctcagcacccatcacacgcggaggagtctccgccgcagccacatccaatgctgcaaaataatccaag

SEQ ID NO: 17540 - DNA, 560 bp, Zea Mays
ctggtggggaagaacctggggtgctgttgatcggtcaggggacggtcacgattagacaaccgtattctcccttcgcgtgatgggttctggaccgtagatgtgtgatcgggcgaacaacactagagtacggttatgctgaatatggaccgtagatcttcaatccggtggctgtcgtctcgtaccctttcgtattataattataacaggtagatctgatttgaaccatcagatcgggatctaacgaccgatctcgccccatgcttcgtccgtggaattttgctaaagagtccttaacctttatacaaataaacccgcgtaccgaatggaatttttctattgaactattacatggaactgcaccaatttcaaaaagagcttaccgaatggatgtcaaagatttaattgaactgaagaaacaaatagaagaattactagaaaaaggttttattcgccccagttcatcaccatggggagccccagttctatttgtgaacaagaaagatggttcaaggagaatgtgtgtggactatagaagtttgaacgaagtaacgattaagaac

SEQ ID NO: 17541 - DNA, 452 bp, Zea Mays
ttttcactgggcatcgtgtagagagattcagattaagtttttagtatctgcggtgcatatttgtgggcagtccggtcgtgcgccgccatgcttcgggcagcgccaccatgggtgttccacgcgcaggaatgcgtgccacgtaccgtgcgatgtggcacgggcggataggattagatgctacgttccgtttcgcgcggtgtgttctacggcgttgattcgggattgggcggtggtgatttgatcgcgtgcacatgaaactgtgaccatcgatcgcgggtccgagggccacggcttcgtactgcttcatggcatgtggcgatctaatctgtaccattagtgcgtcatctaacagccatgatcacaagatacctcttcggccgagccccttttacattagaaaccctgagattattaggaatgaacctgttgtccagtgcatagtgcgctgagtc

SEQ ID NO: 17542 - DNA, 510 bp, Zea Mays
gtccagatcctgcgcgaagtccacaatggaacttgcggctctcacgcggggcctagggccctagctgccaaggtggtccatcaaggcttctactggcctgctatgatctgcaccacgaatcgggtcacaaggtcgtgcgaagcctgccaaaagttttctccacgctcgggaagcccttcgcagttcacaaagctaatcgcccacatgtggctccttcagcgctggggcctagacattgtcgggccactacccacggcctaaggaaacctcaagttcaccttcgccgccgtcaaatatttcaccaagtggatcgaggcaagagcagtatcaatgataacatcgaagactgccaagaaattcttctagcaaaacattgtttgccgattcggagtcccgtccaagctcacagttgataatggcaagcaatttgatagccaagatttcagggacttctgcttctccattggcaccaagcttgccttcgcctcagtatatcacccacaatccaac

SEQ ID NO: 17543 - DNA, 848 bp, Zea Mays
gccttgtgcgcctgccccttatttggttaattggtctcaataggcaaggatcttcctgataggattgtgtaggattgtttccttttctgtagacatccttgcttatatgtacttgagcctttgctcccattaatcaatcatcatattttctgccaattcattgtctttcatggtatcaagagtccgggttctaccacggatttcctcgcttccgctcaattagcacgccggcctccctgtcttgcagcgcccatgcgccggcctccctgccgtgctgcgacatgtctaccagctggtgtacactgatgttgattgggctggatgcctggatacgagcaggtccacctcgggctatgctacactccttggtgacaacctcatctcttggtcttccaagcctcagaacactgtcttcaggtctagtgttgaagtcgaatatcgccctgtggctaatggagttgccgaagccacatggctgtgccagctcctcctggaactccaccctcattttcgccgtgcaacactagtgtattgtgacagtatcagtgccgtctacatgacctccaaccccatccaacatcaacgcgccaagcacattgaaattgatctacacttagtcagagaacgggttgccgccgatgctcttcgtgtcctacatgtgtcggcgacatcacagtatgccgacatcttcaccgagggcctcccatcctctgtcttcaacgaattcaggaccagtctgaacgcgtgcagtggctgacgatctgactacagggggtgttagtgtgtgctatattttaggcagtttaggtggcaaggctgcataggcttgttgccttgtgcgcctgccc

SEQ ID NO: 17544 - DNA, 442 bp, Zea Mays
aaaaagggctcgtaccattatgtgggtgggttcattccatgatactgagggtctgtgggtgctagagagatgttagttgggggctgatagaggtgttgatggtaaaaatatgtatttttctctgttattcctagtgtgggcctcagtagctcgttgcggtgaacagagccgacctccactgggccggaccgtctgaccttaggcctggattgtctagtcgtgcacaagggcacagggtgttcccatataggtggtagaggatgtggttatccagtcttagagttcatcggcatcccataaagttgctgggattgggcatgcccgtttgcaaccgatggatcttatgggttttgtttagtttcaacatcatgcgatggaaaatgggtaatgactgatttatcaaatgcccgtgctagcctcctataatcctcttgcacacccc

SEQ ID NO: 17545 - DNA, 478 bp, Zea Mays
aaggctttgggaggaggcaggttccaggccgagtatgccactggggccccaacatttgacaccttgcctctaaggatcatctcaagtcggttcaccaagtctacagagggaattcttctgttggtaacccgagttgagtcggctaggcctcggtacagataagctgggtacgccctgtctttcaacggctgaatattcttgaagacaaaatcagcaacaacagcttcagcagtcagacccctctccttcagcaatccaacttcagccagcaaagcacctgcctcagctacctcctgatctgtgggggactcggtccagcttggggtgcgaacatccggctgtcttcccgaccgaggggggagagagtttccatgattctcaactatgaaccactccaagcgccatcccttgatactgtctttgagagggatttcgagatactcagtcttcttcccgcggcgcatctccaagctggcac

SEQ ID NO: 17546 - DNA, 702 bp, Zea Mays
gtttaccatgcatttttctgcgtttatttctcttaccttgcttggattctactgttccattgagacccaatcccacggcatcggcatctgctctagctagattctactgttccattgggcaacttgatgagagtgctgagacctctctttctctctctacgtcttgtcaaatgtctaggctcctctgtcgtcgtgcaagcggctgcagcaggaggcaaagccactgatgggagagagaggcacacaacacatgtagtactagaggtgtggtgtatcgattggcccgtcaggagttatccccagtcgaccatggccatggacaggcggcatcatcagtgtagtagtactgcatgcatgcctttcactcctttcaggcatgccctttcacccttttaggcatgcaggcgagaggctgcaaggttcatatgtatccggaccatgtatgagcatcgtgtcatatcctatgcaaaacaatagaaaatgcatgctagccccgttcttgttttatgtgcgtgcgtgcgtgttggcgtggagtggagctagctgctagctgatgcagacaaatccagtgcaggctgacgatgcacgtcatgtgtcgtttcttccaaaaagcatgaatgcgtcggagggagctgtaaataaatttactcattccagttgtccagaccgtattcggtcaagaaaatccaattttgtgtcggg

SEQ ID NO: 17547 - DNA, 541 bp, Zea Mays
cttgttcttgtccaacttataggtatttgcatcctctgctaccttgtttttaccaataggtgtttgctttgctgacttctgcatccacagagtgtcctggacttggtggctactcaacttgaagcacgtggtgctccaatgcctgagcagatttcttcattgtcgcgatggaaccctcttttctcttcagaaataaatagatgacctaaaatatgctaacactagtgagtttgttgatgatacttcatgccaattcttatttctattcatgttaccaatggtttctagtcatttcttcagttttgactcggcggtgctctgatgctaaggagaggtgtgcccgaagttaggcagagcttgatcaaatgattgtgtttcctgatggtgcctgtgccatggactcttccctgaggtcaaagcttgatttggaaaagaaaacccatgaggtaacccacagggagcttcaagttgcttattccatgctttcgacctattaccaaaggttctcccatccacagaaagagatacaaaaacttcttgc

SEQ ID NO: 17548 - DNA, 1421 bp, Zea Mays
gacgagaagcaggggagaggaacaaccatacgccctgttgtgttgggcttgagttaatgacccactagtaggcaagaagcgggagagaggagaacagatgtgcgcttagcgtgtgacgcaagatgaccatcaaaactactgctttaaaaagtattaaaaagtagagatgtgtggacaagcatgatttatatgtttgagggtgcaactcccaacgggctatctttttagggagtgttggtccaacaaaactaaaactcgttgttgtatgttcaggcacgtatgttgcggccccacgacctagggtgtgtgtgcaggtgtgttgtgtgtgcaggaaacccggcgagcacgttgtgtgtcggtagttcggttccaacaattggtaccgaaactcaggtcgacaaatctcggctcaatgtgtgagggggagattgtggaaatagtaccacattgtgagttgcgtgtgggcaagcatggcttatatggatgtcactaccactggagcactcgaggacgctgtctcatcaacgagggcactcaccaccacacaacaacaaaatcgagaggttgtaatcaatcgtactatcgagcgagttactgtgcccagaccaacaacctatccatgggaaggccatcaacacggtgaggttgatgatcataatgatcgtatggcactcgacttgatttgcagcgctacgttgctagacatgttctctatactggcagtcaagctgatggcaaaggcagtgtaggaggcgttgaagacgatgcaggtgggaaatgaccacatccgcaagacagtcgtgcagaggctgcgacgcgagtacgagataggtgggtgatgaccgcattcgcaacaccgatgcacagaggctattgcgtgagtacaataacctcgtgttcaaggatggcaaatccatggagaacttcgcccttgtgctcgttggcatcatcgcactactcagcacactaggcgacctgagacagaggacaaggtcgtggctaggtatcttcgaatcacccgaccacgatataaatagctcgtgatctccatcaaaacccagctagacatgtcaacacacactgacgaggatgtaactagacaaatcaaggccgtcaaggaggaggacgatgtgatgctgcccagtgctagcggcaaactgtaccacattaaggaacaatgggaggcccaactcaagtagaagaaggatatgttggctggctcgttaaagtaggcgaaccaatgatgccatccacgccacagctcgtcgaacggatgtggcggcaccgagaaagcaggtggaggctagggatgtgggtcgagatcaatgccagagatgtagaaaaaccatcctttggctagggagtgcatagttcaagcccaagaaaggagaggcccatgccgtgtaggcagaagaggaggc

SEQ ID NO: 17549 - DNA, 348 bp, Zea Mays
ctctgttttttatttgtccgctctaattacacgtacctacatgcttatgaaacagttatttcctcatacaagtcagcaaataataattaagttgtgaaacggttatttgcaaaaccctgagcaagtgatgccccctgttcatttctcgttcaattactaattgttaatttgcgaggatataattgtcttgaatcaacttattctattaaaaataaacaaaagtaaataatgatcaactacattccaccaaccaaacgtccaataataggatgcaacttgaaaacaaattcaagcttgaaaattgaattcctagggcaaagatctagaagactcaaaatggttagggac

SEQ ID NO: 17550 - DNA, 334 bp, Zea Mays
gattgctttacgtagatgtcggtgtttggaccatgggtccttaaccaactagtaaatgtgtcgtgtggccggactctagatggtgtgcgagaagacacaagtagttatcctggttcaggcaacacaaggccctacttccagcagagggggatggggcttatattactcgcaccgtggtgcctgtagtaggggtttacaagcacggtgggagaggggaagtccccatgttcctagagatgattgaggcaagtgcctatatctaagacaaagtggagcagtgagtgtttgtctgcccgtccttcttgtggttgtcatccatcctcatctcttggag

SEQ ID NO: 17551 - DNA, 1031 bp, Zea Mays
gtgagctctcaaggcaatctgggtccgagtaaaaggactcctgtgttcgagtgtttaagagaggagcgactgttggatcacgctgaacaggtaaccatgactccactagcacgtgatggaaatgttgaaccctggcagctatgactctctgaagatcgaacaatcaagggtccgcaacaagaggttgcacctcagtctcgtcacgctctcggaaacgaggtggaggaataggtggagtggaagagtgagcgagagtagtggaagcaggtgtggtggaggctaggggcgcaataggtgtggtggaaggctcaagagtggcggaagctgtcgtagtggaggaaggtggagtggtagtggtgactggggctgatgggtcaaagcgagcaggagtggagcgagtccgagacgagaggcgacagaccctgaaggcaatctgatcagaagcaatccttagctcacctccctgctctacctaatttgttgttgttgctattgttgcatgagtggctctgtccaatttcctcttcttcttgcctcccttctgctcaaggtacacatccttgcccttgtcttgtctaaagggggtggagggtcctggtcgtcttctccccgtaacagtgtaatattcttcgtcctcaccatcctacactgactgctgatacgctgcacgagaatgagaaaagataagcaagataagaaagcagtacataagtatagaaattggaaagatttgctacttaggcacgtttctcgagagaagaaccaggcatgaggggagtctcgcaaacgggcaagtaggcacactgaaatgatgaaagaggtgagcacgtattagccacatagtcataagcatatgaaatgtgagtaaatacatacacagagagaatgcacgaaatctgagagagtggcctgagatttggaaagatggaagtcaaacaatgtgaaaacgacgtttgaatgaagaattgtcacatcgagattttggaattggaaaggggcatgatatgacaagaaaatgagccaatacttca

SEQ ID NO: 17552 - DNA, 421 bp, Zea Mays
ttcctggtggcctccaccgcctgtgccacgttgaactggcggatccgctcctctagcttcctctccctctcttctgcttcgagctcgtgctcggccagcatctcgcctcaccgggtgatcatttcttccccgaaggtgagatccgtctctcgcctggcgaggtccatctcccgcttgtccaaggactgctccttcaccttaaggttctcctcggcgagggcgatgtcgctggccttgccctcgagctcttgctcccattttctcatcctctccacggccttgacctgctgggcccgctgggcttccagattctggtctagagcgttcagcttggcctggtattctgttgtgagggcctccctctgggtcaaggcctcctccctcctggtcaccttcttctccctccaggacgcctccagct

SEQ ID NO: 17553 - DNA, 647 bp, Zea Mays
gttaacccgagcctgccacgctactgccttgttaccacatcaccgttggtcgcgataggtagcctgcctgtcctctgagccgacgcgccaatgaatgccacggtaactcgcgtcagtgaacttcccctctctccggccgccagcacatcttctcaaaattgggcgccattgctgatggactctagaaattgatgccccagtaagctccgctaggttattacgcatccaaagcaccagctctcgcctctgatcgttcaccagagcctcccaatttcgtatttcccccaaatcggtcggaacgccgccttgagacatctcgtcatggccagtcgtctacgggttagttcatgcccttttgtgtgatgttctagcctccctcaagtctcctgttgctcacagacccatttgattgaactagaccgcattaaattgcctagaacaccacgatttgtctttggtattcgtcgccgtcgtgaacagacgaactccgggccggattagtgcaattagttgagggattagtgccgccaagggtggaattaggtgttggccaagctagggcgctggtcattgagtgtctcagccagtacaggttcgccggaaggtgtgctcactagcgataaccatcggggacctatcgttccgaa

SEQ ID NO: 17554 - DNA, 496 bp, Zea Mays
gctgagaagagctggctcgatatccaaccctacgcgaggatactttcttccttgcctatgttctgttattttttggggccctatcccgttaactccgtggaaagaagtcttccccatactcgttccgaatccgaatgggtcggaatcccgtgggccttcgcctctacaaagaattttgtcattcctaagggctagtttggcagccaagagtaattaatccagggataaaacgcccacaccgtaggattccatggacaactagagttgccattagtggctaagtcggttaatcccaaggggtagaacagctggccataatccctactactctataagatatgaacgtgggcgtccacatctcccttcgtgaagcatgcccccgcctctggcctatgcgtgcacgcgcgctcgcaccctcacctgcgcctccccaccataatcccagccgacaacctcgcgcaatgtcaatctccacgcgatcggcgatcctatccca

SEQ ID NO: 17555 - DNA, 621 bp, Zea Mays
cgagactgaggtagcaactgattgaagtttggaggacgttccatctcggcgggatgtggcgctgccgatttccgcattttgggcgtgtaccctcgcaagtgcgaaatttctaggactgtcataggtttcatgtgagatatttatgattatagacttcgcaatgttggactttgttagaatagaaccaaagatggtggcttcaccatttggaaaacaaaagcacccacgatgtcgctcatttggcactcatcgataggagattgtctaccctgttcaaaaaagataggagaccgtcattaatccagtcaccagagaactaagccatcttttgcaaacgacgtcaacactatcgttctagagctcatatgtcctcactctcctcccacctcgtctccaagaagagatcttcatcgtcgttgccgacggcgtgctctacgacccttcctcccttgtcgtttcaagggtctaccccgccatctccaccgttcttgcagaggtggatcccactgtattacaagttgcccctcgggcctcgccatctccacctccattgatatgcttactcctatctcctcccccacaacagagctcgcccccctccatttacttgtcgtttcatgg

SEQ ID NO: 17556 - DNA, 722 bp, Zea Mays
ctgaagctattggtagaaggggtgagagacagagggccgttcggtggggtaacctaggctatagtccatttgacttatcagatttggatttcttgttcaatgaggatgagattaaaaatgtggttatggggatgcactctgaaaaggcgccgggtccagatggttttatcgggatcttctataagagttgttttgagctgattaaagatgatctatcaagtgcaattcatgatttctatcaccatagatgcaaaaacctaaacctcgttaacgaggcaaatatcgcgcttttacaaaaaagggagggtgctgacaggattgacatgtttaggccgatcagtctcatcaatagcttcatgaaaatattgaccaagattttagcaaacagacttgcaccaagaatgaatgagattgtctccactgcccaaaatgcgttcattcagaaacgttcaattcatgataattttctctacgtccaaaaagttattcagaaacttcataggaacaatcagccagccctttttgtcaaacttgacatatcaaaagcttttgattccatcaactgggcatatctgttagaggttctgagagctctaggtttttcccagaaatggaggaactggatcgcaacaatattagggtcttcctcttcaaaaatcatcatcaacggtcaacaaacaaatgcaattaagcacatgcgtggcgttcgtcagggtgacccg

SEQ ID NO: 17557 - DNA, 1020 bp, Zea Mays
cctgaaatggagacatgcctatagctgagtgtggagaagaattataccagaactgcgcaacagacaaccaccgactccactggtgcggacaggcgtggacaaaacaacgaagaaaagtttctaagcactgattgacacgctctgactgcccatcggactgaggatgatacgcagtgctcatctgaagctgcacatcagccaggtgaaacaactctttccacaagtggctgagaaacacacggtctctgtcagatacaatcgattggggtagtccatggtgcttgtacacttgatcatgaaagagcctagcgactgacaatgccgtatatggatgtttaagaggtaagaaatttgcatacttagtgaagagatcaactatcaccaggatgcatgtatacgattgtgaacatggaagagcctcgataaaatccatactgatcacttgccataatgatgagggtacaggcagaggttgtaacaggccgggcaaacgagctcggtcagctttggattgttgacagatgaggcaatgagaaacgaactgatttactgcttttttcatacctttccaagcaaacagttgtttcaagcgagcatatgtgacgggaaacccggaatgaccaccaactgctgacgcatgcaatgctgtaattaggcgatcctgaagaggagctgactgtcccacccatattcttcctttataacgaaggagaccatcttgtaaggaataatgaggcacagccgatgcatcaactgctagtttgacaaggagatctttagcaattgggtcatgtgtatatgaatctgtaacttctgacacccactgaggagtgcacgaagaaatggccaaacaatcacttgacaactgtggattgcgagacaacgcatcagcagcaccattatctattccttttttatacacaatgcgatattgtagtcccaataaccttgtaaacatcttcttttgccatggagtgtgcaacctttgctcatccaactgtgctaaacttcgatggtctg

SEQ ID NO: 17558 - DNA, 443 bp, Zea Mays
agatgtgccgcgggaggaagactgagtatctcgagatccctctcaaagacaatatcaagggatggcgcctggagtggttcatagttgagaatcatggaaattctctcccccccggtcgggaagacagccggatgttcgcaccccaagctagaccgagtctcccacagatcaggaggtagctgaggtaggtgcattgctagctgaagttggactgctgaaagagaggggtctgactgctgaagctgtggttgctgactttgtcttcaagaatattcagccgttgaaggacatggcatacccagcttatctgtatcgaggcctagccgactcaactcgggttaccaatagaagaattccctctgcagacttggtgagccgacttgagatgatccttagaggcagagtgtcaaatgttggtgctctagtggcatattcggcctgga

SEQ ID NO: 17559 - DNA, 1243 bp, Zea Mays
cagcaatggtggccgccctggcggcacggagatggccaaatggtgatttggagatgtaggatggcagtgaggccacggcctcagtatggatgggggcgagatggcgagcgcgcaagtcataggggcacatatgggggttgcatatacactgctaggtagagtccgtgaggcagaacgatggtcggttccgtcccaggattcccggcgtccgcttcggtaatccagttcatgcgcacggcaggtttggagaggaagacgggaacaccgctgaccatgcaaggatacgagcgcgtgaggagggtgagtttgcagccgcgagagactcgggggttgttacggtgcctgaccatgcgcctggtatgcacggcggggaagaggaacaggacgataaactcgaaatgcccatacctagtgctaaaagctgtcttctcaatatcctcctcgcaaatcctcaactgatgctacccagagttcaagtcaattttagagaacacctgggcacccctcaactgttcaaagagaacatcaatacgaggtagcggatatttattcttgattgtcacttgatttaaagcacgataatccacacataacctcttgcttttatccttcttgtcaacaaacaataccgggaaagcccatggtgacctgctaggcctagtgaaacccttagccagcagatcatccaattgtcgcttcaattcaacctgctcctttggagccatccgacacggggccttatgaataggctgcgtacccgtaatcagctcgatttcaaaagccacatcgtgctccggtggaatgcctggtagctccgctggaaacacgttggcataatcacacaccacacggatgtcctgcacctgcaaggcagcctcactctccaccaccatggagaaaaagattctcgacttccttgaccgacgatccggaagtaattgggacaacaaggagagagtgaactttggagagcttcccaagaataccacctccctacccgacggcgtctgcaataaaactgtcttccaaaaacaggatataactgcgcgatactaagttaaccaatccatacccaagctaacatcaaatgaccccatggaaatcaccacgagattagctgaaaagacctcatcagcaagaatgatggaacaacccgggcagactcaacatctactaatggagccattaccagaactaaccacaattgggtgacccatcttctgcaccgaaagaccagcacgcg

SEQ ID NO: 17560 - DNA, 314 bp, Zea Mays
taagtatgttatcttccctttaatgaagtaatgatgttggtttctccgtgatgattgtcctgctcatttgtgaagctgattcctttgaaacagtaagtgaataactcgggcatcaaactgatgctcttagaaatagctaccgagtaacttgaagacgacgtcggcgccttagaggtaactgccgagcgactgaacacgatgtcagagttttagagttaactgccgagcgacttgagggcgacgttagcgttttagaggtaacgccgagcgacttgaagacgatgtcagcgttttagaggtaacgccgagcgact

SEQ ID NO: 17561 - DNA, 576 bp, Zea Mays
gagaattggagatgggttgcgccctaggcgcatgtgggtgatgggaggccgtgatctcctcacggcaaggaggaagacaggcgagagttagggtgggatggcggctgatcaactctatgttgatctctgccctccttcttttattgattaccaggtaggtataaataccctcctattacagactaatctgataaggtcttagtccttatccaaggctagaacgggccaagctaccagcccatctaacgtacatatccccaattaggatcagttaagccgggttagcccccttattagtattcccagacttaataccgaccataacatctctcgactcctccagaaatagctcatcctcaagctggaagtttagggtttatggtttagggttcccaggatgcttctgccactgaagtcctgaaacattgcaccagtacatgccattcttggtgacatatacgttcacacagaatgcgctctagtgtgggcagcagccgccctttgtccatatctgacagtgatggagtagctgttgatgtatcgcctttgaagggcttgagtagccctacatggaag

SEQ ID NO: 17562 - DNA, 509 bp, Zea Mays
ggaactctaccgtgatcagcacccctcaggttagtaattcccccaattgctccctgttatagcgcgtttatagtctcttatggctctcagaaccgaccaattgaagttcggccaaagtctttcaccggaacaggcacttgctctatagaacaccgtcgtgacaccctcttcgtagccccgcgtttctattcgtgcccagtccaaactttagtatgtgctcacctctggtaggcctgtgaagctttcccaagcttcaatttggtcgttcacgccgtcggttggtcggaacacttccatccatatgaccatccgccctgtcaccgtggaccggttgattcatagtcccaatggcgaaattgattgaggggaagtgttcggtaggggttcaattgtgtccctgtcgcccgggagctctagctgtggcgtcatctggccggaataggctcgccggagtgcggcgagggttgttcctcgtcgtgggctttggtttgtgaaagaatagaacgtgg

SEQ ID NO: 17563 - DNA, 906 bp, Zea Mays
ccacccaattcgttgtgaggacatagaccttgatcaagtgatctcacctttcttgggagccagaggcacttttccctgccgctaccttgggctacaatacataccaggcctctccaaaaagtgcatgtgcaacctctcatggaatgtggcagagacttccaggttggaaagtgttagtcagttttggtaagctaaaatcagggctagacatatgattaccttcccaatgtattctaaccagaataggtagggtatatgagctgattaggcaaggatcaatctgtgattgggtatttctataaaccctgtgatccttgcctatatatgtgtaacctctctaccctgttatgcaatgaatcaatgcagttctagcctcctcatatgttcctacagaaaggaaagctattaaacaaagtcaggtgtttgacattagtcacctcggttctgttgtccatgtctatatatcacctcaccatcttcccctcaaaatctgaagatcctttggaagggggaagagaacgccaacgaaggatactgcttagtaaagtggccaatagtgtccaagccaaaggagcttggaggacttggggtgtctgacctggacaaattccgaagagcatatgcctactttgatgccgatatagttagaccataggcccaaccaagagaaatcgctgcttggtgtgaagaggcagccaccaatataccaaggcaacggcggcgacatttcaacggggtggtgatatacacagtttgcaacatttagaaagcaagaaataggaggatctttgaaagcagcttgctagatgcacggcaggtggcctgtagagccaaggaggacattgacctacacacgagggtgttgagtaatttgccttagttgggtgtgtgcttaatgctcgtgcg

SEQ ID NO: 17564 - DNA, 570 bp, Zea Mays
ttgttacaataaagttacattgaccatttcaaaatgtttttacaaaaagtcctagtcttcctttaggatcttctccgcaacttcattcagcaatttattgacaacttcgtcaacaatagattcagccatgccaataatctccagagcttccttcgtttctggatcggccaggggatcgaacggttccggtggcggagataattcagctgaagaaggaaaatgttaattagtccaaagctataaaaacaaacgccgaatctaaaggccacaaaataatacctatgtgtctctcgcgctctgcagcttcttcagcttgttttgcttgtactcaggtgtcatggatgtctttctcacttttcttcataatttcgtgagccatctctcggccaccatttacctagatgtcattataaaatttcccgcccattaaacttgcttcagctgagggatcctttgtatcattcatggagaaggcagcttcggcctgggccagggtcttgacatggtcgcatccctccttctccaggatggctgaaatttcccttgcaccggagaacgcgcacacatccc

SEQ ID NO: 17565 - DNA, 513 bp, Zea Mays
cttctcccggtcagtgcattgtgcaatattcagcatcttctcaattgacttcaaccaatcgtctgcatcaagtggatctggcgaactggcgaaggtcggtggcttatgactcataaactcttggtgcttatcacgaggtggaactggtggtggtggtggaggcaatggcacttgttgctgttgctgctgctgttgaagttgttgttgcatctgctgttgttgcgccctcctttcttggcgtatctcatctctctcctggcgcaactcctggcgtatatcttctctttcctgacgcatttcctggcgttcctgctgcatctgggcacgcatatcaaccatagtgtccgccatttgctgcatcaccgccatctgagcagcaaccagtggatcaactccccttggtggaggattaggaggattcatccctgctggctgtggctgaggttgtctataaattcttcgagtgtgttgattaggaggcaaatcaattccaccaccccgcctggtattgac

SEQ ID NO: 17566 - DNA, 551 bp, Zea Mays
cgcgggagaacgggacctcaggtatcaggcccccaagcaagttctcaaggaaatcctcactggagactccgactctggtgatgataacgaccaccgcaagaagctatacgttatgtatggcggaagctgggagctcacctcccataggaatgtaaagtccctacaccgtgatgtcctttcggcgactctaggggtcccgaaggcagccccacatcagcggtggcggtgcaccactatctccttcagggcatccgactgccccgaaaacatggcaggggctggtatactaccactcatcaccgcccctgtcatcgccaacatgaagctgcatcatgtgctgattgatggtggggctgggctcaacgtcatcagccacactgtgttcaagcagctgcagatcccagggtcccgactggggccctcacgcccattctccggagtgggccctcaatcggtgtatccccttgggagcatcgcactcccggttacattcgagactgaagaaaacttctgcacggagaacgtccaattcgacgttgcggaggttaacc

SEQ ID NO: 17567 - DNA, 334 bp, Zea Mays
catactcggcctggaacctgcctcctcctaaagccttcaccctttttgtgtcgaatccacctgtcactgatggcggtttgggccttagagtgcgaccctctgctgaagaagttagtgccttggttgcctcgcttggggagattcctgatgatgaacgacaagtccactttgaggtgcccctgaatcctagcgatgcggagataagtgctatgcttgatttgctggctgaggactcttctgatgctgctcctgctgggacatcggtggtggcacccctcccggaggctgatacaactttggatactcagaaacctgccagtactcgcccgaggcg

SEQ ID NO: 17568 - DNA, 1225 bp, Zea Mays
agtttgtaagccacactacccactcgagccaggatgagataagggccaaagtagtggaacgacagtttctgcgaagagcggggtgccactttggtctgaacatgaggctaaagcttcaagaaaaccgtgtctccgacctggaagacacgctttgagcggcgtttatcagcctgcgatttcattcgctgcttggcctgagctaaatgttgctggagcagattgttcatcacagccttgtcttgaagaaaggcggtgagatcagttgaggttgaatccaggcattggacaactaggtgcctgggtggatacccatacagtgcttcaaatggagtacgaccaattaaggagaggtggctggtgttgtaccagaactcagctgcacttaaccagagtgcccaattcgatggacaagcgtggacaaaacaacgcaagtaagtttccaagcactaattcaccctttcaatctggtcgtctgattgagggtgataagaactgctcatatgaaggttgaaacctgcctgcttaaatagttccttccagaagttgctggttaaaattttgtcgcggtcggaaactatggcagcaggaagcccatgaagcttatagatatgttggaagaatacttctgcaattgtgacaactgtgaagggatgtgtcaacggcacaaaatgagcatacttagtgaagaggtccactattactagaatgcaatcaaagcgcttggatttgggcagtccatcgatgaaatacatagagattgtattccaagcaacagttagtatggccagtggctggagaagacctagagcacgggttcggtccggcttggcttgttggcacacttgacaagaatgaatccagttttgaacaaaagatttcataccgcgccaggcgaagacctgcttcagtttctagtaagtaactggaatacccgaatggcctcccaatggactttggtgaaaaacctcaaccaactgacatttgatagtattgttgtcaccaatccatatgcgctgcttatacctcaaaagtccattctggagctgaaaatgtggcatagaggaaccatccagagacaacttggccaacaactccttggcgtgtgagtcagttgagtaggactgagctacagacgatatccagagaggagtggtaacgaatagagctgaacaggtggactcgtgtgtgagtacactatggagtactgtagaccgagaagtttggt

SEQ ID NO: 17569 - DNA, 374 bp, Zea Mays
cttctgtgaaactggctcagcgaaggggtaccaagcatccagagccgcccgatcataaatcagtggctatgattaaatctacattaatcgaacggatacgcgacgtggaccgcccgatccaacatcaacgtcatggattttattaggcgcgatctgatctactccctccgatccgattacaacggtccagatcccatcaagtgaagaggtatcgcgatttaatcgtgaccacccattcacgatccgatggcccacactgcctggtatcgtcttctccctcataaccctcagacggcggcgcggaccaggtgaccaagcaggccacggcggcggcattgacggaaagcgcccatcgaagtccgagctccccatcg

SEQ ID NO: 17570 - DNA, 730 bp, Zea Mays
taccctaacgctgtagtccgccgttgagaacacagagagaggagtggaggtcttgggcaccgccgacgttgtctacggctgtcaccgccgttcagtactcgtgtaaggattctggggaagcttcgtgccgtgtgggacctgggcagtcccctctcgcttgggaatttggccgggagcgggggggaatttctctccgtcgctcacagttcgccgccgaccgcatcacaacgtggctgggaacctccgcaccgtaatcaccggtaagggtcttctagatcttctcacatactttggtagaccgtgtaggatcgatcggagttaggatcggggctcttgggtgtctgctcggccaactccggtgatggcgcggccgtggggaggctctgcgccgtcgtggcttggtcgtggggttgaaggcgctcgcgggccgtcggatcggtgcggacggctgagattaggttagagaatccccttcgtgggattcggtcttgtccatcggatcgcgatcgggcggtcgaggatgggtctggggcactttaaatcggcaccgtttatttctaatccagcgcatagcattgcttaccggttcttataatgcgtgggctaatcctggcggccggtttctaatcggacggctccgggcggaagataccctttcgctttggcatatttgctaaagagccccctggtaaactgaaaatcaacccgcagtccctcgggcactataccc

SEQ ID NO: 17571 - DNA, 633 bp, Zea Mays
acaatggaaccagcggctcacactcaggaccaagggccctcgcagccaaagtgatccgtcaaggattttactggcccgcgataatctgcacagccaaccgagtcactaggtcatgcgaagcatgccagaagttctctcctcgctcaggcaacccttcgcaattcaccaagctcatcacacacacatggccacttcaacactgggtgctggacatcgttggaccactgcctacagcccaagggaacctcaagttcaccttcgtcgccattgaatatttcacaaagtggattgaggccagggcagtctccacgataacatcaaagaccgcccaaaaattcttctggcaaaacattgtctaccgctttggagtcccgtccgaactcactgtcgacaacagcaaacagttcgacatccaagacttcagggaattatgtagttccatcggcaccaagtctgtcttcgcctctgtataccacccacaatccaacgacatcgttgaacacaccaatggcaagatcttcagttccatcaagaaaaggctccttgacgacaaaaagggcaaatgggccgaccaattacctgaagttgtatgggccctgaatacgacagagtgccgagcaaccgggttcacac

SEQ ID NO: 17572 - DNA, 491 bp, Zea Mays
tgtcaaggtcacgatcattgccagtatatggcacacatactcatcaagaagacaaatgtcaccatcgttgtttgcttccttagttccaccaccgacatgcaacaaatattctacaaaccatgggttgctctgtgccctcatgtttcgaacaagctttaggtggcacatggattcccataggtaagaactccgtagagagacaacaactatttgagcccttgacccgtagcgtacaacagggagtacttgtctaaaatctccccaaacacaatagtcttcccaccaaagggcagcccaagctgtcccattatatcacgcatgttgttgtctagcgcctcaattacttgtctcttagtcatcgatgcctcgtcccagataatgagtgatactttttgtagcaactttgttgtcccgctttgtttcgtgaagctacatacaacaccgtcatcaatagtaagtggtatcttgaagcacgaatgggcagtcctccc

SEQ ID NO: 17573 - DNA, 484 bp, Zea Mays
cacccccttctccgccagcttctcctccagctcttaggggaaaacctgctccaatcccggaggcggtaggcgtggttttatccgaagccatctgccaggggaaaagagttactactatgcacatgccaatttttttcaaccagttactttattcattacatcagttcattacagcatacaactaccataagatcattacacgcgagtgctatcgagggtactcccgaactccttctctaaagtgtccccaaattccttgagaaggtcatcaaggctggctagggacatttcctcagtgtcggacgagtttcttatcctggtaggaggtagggctggaggggcttcttccttctgctcagtctgacatccttgacttttggtcttcttgcagatttttcttgtaggggagagcttcttcaacttcttgccgtaatccatcttcagtgtgcggtaggcctcacgggtgttggtttcctcgccttct

SEQ ID NO: 17574 - DNA, 528 bp, Zea Mays
gcagtgaatcgtgtcatacatgcccggtgatcgctggagagccgccacggtgaaagccactaatctcgagcgccagtaacccctttcatctccgaccgccaccgcgccaacccaaattcatgcgccgccgccccgggagcctataaattgagtgcacccgcgactccgctaggtaattacgcatccaacgcaccgatccttgcctcggattatccaccagagcctcccaatttctcttttcccccaattctgtttccgccgccgtggtagagccctcaccgtggttagcctactccaggtctgttcatactccctactctcttgtttcagcatccttaggttctcctgatactccccgaccctgccaattgaactaggaccccttagatcgcgggaacgcgtttgattgcccgtggtgcccgttgtcaccgtggacagagcgagttagaggtccgatagtgaaattagttgaggggaaactcttgttagggcttgaattaggtctaagccgaagtagagcattggtcg

SEQ ID NO: 17575 - DNA, 347 bp, Zea Mays
gctgcacatagcccttggcgacgaggcgggccttgtacttgacggtgttaccgttctcgtcgtgcttgaccttgtacacccacttgaggccaatggcgcggtgaccacgcggaagctcgaccagcgaccatgttttgttgtcgcggatcgaggaaagctcctcctccatcgtggcgacccaacttggatcaccgttggcctccttcaaggtcctgggctcctccacgctcacgacatgcagctcagcctcctcgtcgccatgatgcactggcccgcccgctgcacccacgctacgaatattgtccagcgtccggtaccgacgctcccccacatcatcgtcgtcgaag

SEQ ID NO: 17576 - DNA, 396 bp, Zea Mays
gtcgaaggtgacatgtcgagagattatgatgcggttggtggcaaggtcaaggcaacggtaacctttgtggttgttggagtatccaagaaacacacagagagaagaccggggagcaagtttatgaggcgtggtggcagagagattgggataacatcgacagccaaagacacggaggtgggtgtgtcgggaggagtaccgtgcaaggcctggtaaggggtggaaaaggagagggttttagtggggtgatggttgaaaagataggtggaggtatgaagagcctcaaccaagaagacaggggggagatgtgcatgaaaaaggagggaacgaataatggtgtttacagtccggaggacacgctcagccttgccattctgctgggacgtgtatggacaggac

SEQ ID NO: 17577 - DNA, 402 bp, Zea Mays
gtccatcatattttagtgtcaatcatattttgacaagtgagcaggaagcagatcaaaaactttctggtagcccttccatttaggtcctatagatagtttttgttgaatcagacagagatagttttgttgggcatgtactcgtataccagcaggttgcagtccacgctggagtagcagcagtagatctagagcttcacgatgttcttgtgccggatgctgaccagcgtatccacctccatgtggacctcacgatcgtcgagccaccgccaccgatgtcactgtctctgctgctgctactgttggtggtggtggtcaccgcggcagccgccatctagtcaatctgcctgttgctcgtcccacacagcagccacttcgatgatgacacgcacaacttcttcaccg

SEQ ID NO: 17578 - DNA, 691 bp, Zea Mays
ttgagatctctgattctctgatgcatgtgttttggagctgaattattttctggtgtttgtcaccttggaacacagaatcatattgatctttgctttcctttgcactgctcaacatcatactcatttactgtaccatttttttcagcttgcagtcatactgatcagaattgttattgttctttttcagattcagattgtagagcagctctgtctgtgtttgtcaccttggaacacagaatccatactactctccccccataaggtgtgtggactccctaacaacaatatgttgtgaaattacactgatttttgcccgtgcgttaggaccaaatgattgccccatctgttaggaccaaatgattgacccatgtttttgttattgtagtatattacaacctctcgctaaataacttgttttctactagacacattggatgtgtacatacttatgtttggaaaaattggcagcctactaaaaaatacaatggatgtgtacataaggaataaagtataaacttcttgctttctcttttaatttgatcatatgaggtagtctgggaggggaattacttgatgttccttgtctcgacgcttttacacttacccacagaccatcattctgctccactttatcgcagtcgtcttatctgaaatgtcaacatcttgaattcctgataggaattgttaggag

SEQ ID NO: 17579 - DNA, 371 bp, Zea Mays
caggaatgctaaaacgagagcgaggaggacatgatcggacctgtggagagctggccacagcgagctcacacgcgcggtgttcttgacagatttgggggaaatcccaaattatagctctttggttgacaatccgagacacgagtgggtgcgctggatgcatgactacctagaggagctaatggcacactcaatttatacggcccaagggcggtggctcgtgaatttggaatggtgcgctggcggccggagagaggggagagcactggcgcaagagatgcgtggctttcaccgcggcaaggtcaccgacgacgaacgaacacgccaaggcaagttactgctacgtggtagagcacctaggcacgtggcaaccg

SEQ ID NO: 17580 - DNA, 595 bp, Zea Mays
cgcagagttgttgcaggatcttggattgtgcggcgatattcttcgattgggagtcgatttgtttggattgcgccgccaaagccgctgcgatgcccggatctgctacgcccgccatttttgcccgccgtgtgaagtacccggactccgccagacccaagatcggtagtctgataccaattgtcagcaccacatctatgctgattggaagagttggtagagaagaagggatatgcgaaggagatatggaggaaagctgtgtgttcttagttgctgcaatgtttttccccctgtcttagatacatcgaccagccatatggcgacacagcgtcacagcttacaccggcccactgccgtcacacaacccactttgagcccgtgtacaaggagttaggcctccgaactctacgacttgtcttcggttccgcgcccttgcgtacttggtccgacccatgagcatctgtagacactgccctgattctagagcttctgatcactgaggctctgatccgcataatagacatcgccatcattactaggacaatggttgttgtagaacgtggtgggggttattaggtatgaaaagggataattattc

SEQ ID NO: 17581 - DNA, 740 bp, Zea Mays
cagatgccctaagcaggaaggctcagtgcaattgtatgaacatggatgcaagagtcaccaccatatgtgatgaattatgcaagttgaaattagaagtcgtttcctccggtgccttgagttatatttcagtggagcccaccttacaagaacaaatagtcatggcacagattggtgacaagggtgttcaggttatcaaggaaatgatcgaacagaaagcagaaaaatacaaatgcttccgtcaggacagcaaaggaattctatggtttggagaccgactggctgtccccaagaaccctgagctccgaaagaagatattggatgaagctcacctttcaaaattttccatgcaccccggcagtaacaagatgtatcatgatctcagatctttatactggtggactagaatgaaaaggaaaattgctaagtatatatctgaatgtgacacctgccagagagtcaaggccagccatctgaaggtagcaggcactttgcaaccccttcccataccatcttggaaatgggaggatatttgcatggattttatcgtgggattgcccaatacctcccggcaccatgattctatttgggtcattgtggataggttgaccaagaccgctcatttcttgccagtgcataccacccacaagacagagaaatatgcagaaatctatgttgatcaaatagtgtgtttgcatggcattccgaagaccattgtatctgacagaggagcactgtttgtg

SEQ ID NO: 17582 - DNA, 621 bp, Zea Mays
cttgccctccgacatattctaccatgtcattggcacgccagccgtccgcagcccagagggcctccaaataaccaacgacaccgagggccaccgcatagtcaacctcatcatgaccgaggactggcgggcaccaataaccctattcctgcagggatattaccatccaagcgatatcaacgaggccaagcgcctcaaacaccgaagctgggacttcgcactcattaagggatagctctacaagaagggggtcagtcaacccatgcttaaatgcgtcaccgagaccgaaggcgtctagatcatgcgcgaagtccacagcgaaacttgcggctctcacacggggcctagggccctagctgccaaggtgatccgtcaaggcttctactggcctgctatgatctgcgccgcgaataatgtgacaaggtcgtgcgaagcctgccagaagttttctccacgctcgggaaacccttcgcaattcacaaagctaatcgcccacacgtggccccttcagcgctggggcctggacattgtcgggccactacccacggcccaagggaaccttaagttcacctttgtcaccgtcgagtattttaccaagtgtatcgaggcaagggcggtatccac

SEQ ID NO: 17583 - DNA, 804 bp, Zea Mays
tactcctagtcttaatgcatttcttcgcagccagcctaacacttgatcttctagtggtgggttggttctgaaattttaatggatgtgatgtggtcgtgctacttttcggcggggatggaatcaatggtggctctggtggatttgttattgccgcgatgaagtcgagcaactgagtattgtcggccgagctattccctgtcctcagagcaggagaagctcttaaggtttcatgattatcactatcagctggttgaaaatctggttgattgtcactatcgactggttgaaaaactgggccgggtaagtcatggataaatgaggcacccattaggccgacccgatcagcagcaggcatgttgtaatctatagcttgattatcattcacaagttgagagcctaaaaactcaatcggttggacagctagggccttggctagagtagaagtgtttaggttcacgctagtggaacacgccagcacactgtctaaactgttgtgaattgtggcaaaaacattagtgagatcaatagtattggttaccttgcacttggaggtagcagggtcgtgcgaggtttcctggttgtcaccgccaatagagcttgacttgcttccaacaccatcagttagccccagactgtcctcctgcggtcaaacaacagaaacaatggtgtctgcaaatgaaacaattttgaccttcgccttgggcacccagcgagatgacggtgtcatccccagaccatgacgacgaaaaggagttgaatgcctatgcttgtcgttggagctatatcagtcatccatcccccccg

SEQ ID NO: 17584 - DNA, 690 bp, Zea Mays
gttctacagagcagaggggtgttccggtgatgagactcaggtaaactccaattggccggctccgagagcaacagggggctaaaaacaagcaagaactcgaatcaattaggtatgcactaacccaaggagtgctggccacggaagagttcttcacggcggtggaagaaaccagttcaggggaactccgttgatcacagaggatgggggacagaacgtgatggctagtggctggtaggattcgcaactgaggaatgaagagctgggcttggttgatttgagacaaacaaagtgggagcagggtggatttataggctccgtgagcatcacgacggtcacggtgataaccttctccggaccctgctggcgatcaacgacgacaccgagcgcggtgcttctattagagcttgccacgttcaaccgcgaccgtaaagcagtcaaatcggtgatggcgtggacgaacagaggagagcggcgccggtgaccaagcatggccggaaagatcagtgaccgcgtggcggccgaaataatcaccccccccccccaccgtggcgatcttatcctgcttcaagaacatcatcgcgaggaaatgcccgtcgatagctcagcccgaccccgacgcaaatcatggcgcagatcggtcgtcggcggtgaacggccgggcagtcgatctgatcttattcagatcacttt

SEQ ID NO: 17585 - DNA, 686 bp, Zea Mays
ccacattaccacctctatgtacggtgttagtatttttttaacaaaatccgagcctaaacgagtattttagctcgtgagcttattgggccgtatgtctgagcagtccaagtcccagatctagggttcctagttccttccacaatactggcactcgactcccagtcccagaggctacggcggctaccttctcacttctaggttcgctctgaatccagcggcgcgaagagcaccgcgctcctttccggctcgcaccgaagccctaataccgtcttcttccgtccggcgcggactgctgggttcccgttcccgcatcgcggactgctgggttcgccgtttctgcacggtgcggacgccatgtcgggtgtcggcccacccccgtgaagcggttttgccgcccatgatcccggaaaaaacccaatcgaggcgtcaagtcgatccctgtccccaggcgatcggcggcggcggatcgtttccgttgcagacagcaggtcctagagcgtcaacggctggcctctggatgcgatgtcccaagaatgacgtactcccctcacctacgttttacgggggccaccctgctgcgttgatttcctccggtgagtttcccgtgtttgcgtgtttgacattcagtgtagataatgatggtgcatttgcgttgaaaatggcttcaatgcagtttggaatgtttt

SEQ ID NO: 17586 - DNA, 471 bp, Zea Mays
cggtggctcgagggtttgggaggacttcgcaggagcaggccagtggctgaccagtggacttggcgtggtcgtcggtgcgcgctcggaaccgcgcatgtccatggcgaggacgtttcttctcgctttgtcacagccaccagaccgcatgaattcgtgggcaatctggtctaccgcctctgcgtcaggtatgacaccatgaattgattcgcctaacacgtagcagcatgtagcacctatctgcatttcctaagtcactatggcaccgtggggtactctcaccggcgaagtcgccaccatggtgggtctaggcgccaccgtggtgtgggtttcaggaagaagataacgtgatggtcgtctgttccatggatgtgcggtcacaattaaatccctgagtcactacgccacaaccgttgatgctagattggacgcttgtgattggaacctgcataccccttcgggttttaaatctag

SEQ ID NO: 17587 - DNA, 457 bp, Zea Mays
ctgctggatagcgatatagccgcacagccaccggtgccgaacctggcagaaggttgatgcaatgatcgcgatggcgcggtggtggcatacctgaaggctcagcgaacaccggcgtgaattcctccaataaggctggaaaaaggtcatcagagctgcacacccgaactgatggtgcccgcgatccggctacgccggtccagcaaacacgatggtcgtgatgccagaacgacatggtgagtgcactgaaatcccagaggatgggtccaagagaggccaaccattctgtcccgaggaccacatcatacccggcgagaggcagcgcgaagaaatttgtggtgaaggattcaccgtcaatggtgaaagggacatttcggtagacgcctggacagaggaccttctcaccatttgccatcgtgacattcatgttgccgcgcggattcaatttgagcgaggtacg

SEQ ID NO: 17588 - DNA, 772 bp, Zea Mays
agtccattattatcgcaatccgagacacaacatacactacagcaattttataaacaccatattcacaagtattttcgcacatcgaccaatctatacgaatcgtaagccactagtctataattcgcaaacaccatgcatttacttcccgaattacgaacgcatacatatttatcatacgaaccgagtatttcaatatttatcctaagacaactaactccattacacacttgtatctacttgacttacttgaagcgtctactcgaaatcgtgaacacaatcatacactatatgtgaagcctaatttattaaacgcacaatacgcatcgtcttgactagacttataaatatagagaaaacggcaactacttgggcatgtcaccacctgtctatataaaccaaaacaatttttactatcgactaagagttctaagtattaaacccattattactttccatgcgtaattaaacctcaacttaacaccagtgacaccgatggatttttaccaaaactcatcgtgtgcataaccctgcctcgcatacaaccaaattgtggcgtgcactcgagacacttcgacaatcgtagcgtaaccactaatatatgaactccgacactcatgtctaaataattcatcctccatgcactagcattttctaaactactcgtcacattaacaaatatatcccctatataatcacgaaccccatcacattgcataaaacaaatacacttttcacataaaaacatatcgatgcatttgtaacttagttttcg

SEQ ID NO: 17589 - DNA, 578 bp, Zea Mays
ccctctctccccgtcgcaactcaatcgtcctcgtcgtgggtagaatttagaagggggggaagcgagagagaacaagccaccaccgccatcccatccgcgcgccgccactagaagctttagaagggatcgagggccatcgccaaagtgccccgatcgcgcatgtgagatctgcgggcaacggaggggggagtattgctgggaatggctcgtcggagtccaacaaccacgccatgccgctgttcaccgcggacagatctcctatacgcgccaccctcggtgattgttgacttccccatttcaatttgcttagcgctacatgttgcaaccgattgaatggaggataggacgttagagcaggtgatcatggtgcccggcgatggcactgccatgtggtgcgtatgcgccgttgttctgggaagccgagaggaggctgatgggttcgctaccgttgatccatggggatgcggctaggattgaatcgggtcgaaacgagatatgggctgtctatctcgtttggtcggtcaggattataacgtaggtacccctttgatccattaaaatacgaccgtcaccttttg

SEQ ID NO: 17590 - DNA, 451 bp, Zea Mays
cgatagtgaatagtgaaaacctcaattgggtgaagggttctaccactcttggtggccacaggttacgtgtttatatagcgcaattagctggacgaacagtaggtacaagagatgaggattagatggagagaagatcagatctatagttatctagttagcagagtattagcatcccgaacaatagcgtaacaacctgctacaattccgtctaacaccccccctcaatcacacccgatcaaggttgagattgtttctaaatttagagagtcattgctgagagatcagtttggtgaagccattctccacctgatcatttgtagagataaaacgtatatctagcaattgacgtataacttcatcacgaacaaagtgataatccacctcaatatgtttcatgcggccatggaaaaccgggttggaagcaaggtactttgcacccatgttatcacac

SEQ ID NO: 17591 - DNA, 544 bp, Zea Mays
tgcaggggtcacgtgccccaggttgggcaaggcgtggctagtagcaacggctgttagcgccatggccaggttcgctggggatggatggaggtgggctgcaactcggcaccgtgccagcacatagggagagggcaaatgcacttctctttcctacaacaactacacatcacacacgggatcagggaaggtggcgcgagcaaggacaacacgctggcacagggtcgtcgatgatgcgatgctcgacacgaacaaggaacggacacgagcacgatgagcttctcacctcgggatggagcgcacgcgtaggaggatggggacagcagactcaatgggctccggcagtgatagtggttctggatccatgacggcggtcggtggcgcaatgcagatggacgaaaagtgttaggtgttgctgcgatctgagatggtggtggttgtgctgcgcgatttatgggccaagctgagggggaaaagtccaatcagagttgtgctccaacgatcttagcagatctggttgcaacaaccacatacagatgagaaggcc

SEQ ID NO: 17592 - DNA, 633 bp, Zea Mays
cgggaattcttcgccagagttggcgggccaccgctcaccatgtccggggttctctgcggcgcactgtggggtacgtatatgtccatcgcatttcccttgcttagggcatcgtgtggggctcctcagattagagcatggaacacgggttgggcttgggaaatcttccggccatggcgccaccgttgctgactgcatctctccctggggcgcgtcggcatgtgaccagttggagacgaagatgtgttggccatcgatctcgggttggtcggccacgattagttgagagcggggaatgttagtaaccgttggatggccatccaacgcctagggttagatcgagaggaaaggagggggtaaccatagatctatgaatgggcggttctgatgcgttcgcgcatgatccagacatctagttgatccaagccatcgatcatggatcctctggtcccgggcgcttggtgattattaacgctccagattaaatctgagccatcgggctctaatccaacgaacctgatgcagccataccccttcggctgggcgttttactaaagaacccctatagttttttggaattaacccgccatccacgccagggactctctgagtcttagaaatatttgcaccgtagcc

SEQ ID NO: 17593 - DNA, 744 bp, Zea Mays
ctgacgctgaccccaatgggtgtgacctcgatgatgctgaacccactggatgcaatccagtcagagctgaccccaatggttgtgttgttcgtattgttgacgaggatgaagaagaggaggaggaaatccccttaatttggaaaaacagtcggtgctatctagtcagtggggagagtagtgatgttccttctccagctttgtctgctctcgttggtctgcaagagttgtccatagcgaactttgatcaggctctcgaggatatggttcctaaagatctgctgtccgagccaatagatggtggtatgatggacgtttgcactgacattccggatgtggggttagagttatcctaagcagcgtctcgcgcctcgtcgaccttggagtgcggtcttcaaagtcaagaagctggtctaggttgctccattcccttggaggtggctgagaatccttcagccttagaggtggctgctacagagaaaccggctcccaaggatggcaccagcggttacccagcccctgaggatgttgccggtaatgatccggctcgggtggccagcgcgagctatgacccagcccccgagggtgctaccggtggtgatccggctccgatgggcaatgcgggctgcgacccagcccccgagtgtgtccaagtaggttccccttctcatacctccatggatgtccacgtcaggtcttctcctccacattctgattgtatggcagcagcacgtgcttcaaatcagg

SEQ ID NO: 17594 - DNA, 587 bp, Zea Mays
tgcaaatgttctagtttcttccctgtcacttctgcaaatttaacttcaacattcttccaacccactttattgagatgccctaatggcctatgcccagcattaacctcttttgtgcataggtcacaaaaaagcttcacattggctgcatcccaaatggccttctcacccatattaggcaacaaatctatcaattgatccgtttttaacaggaaaaaacaacaagattagggcgctggataggatgacataccttgcagccgacgcttgattgcaaccctgggcgcttgattggagccgcaccttcactgcaaccctagcccgccatggagacaggagcggcgtcgggaggagacccaagggcggcggcgggagaggaccaggggcggcggcgggagcggatccaggggcggcggcggcgggaggggatccagggggcggatccaggggcggcggcaggaggctcctccgacggatccacgcgctagctggaaggaaacgacgctcggggcaaatagaaacgaagcgttacgtttgtaaagagtggcagtgcgggtaatttcggaggggaatcggttgaaatctggggt

SEQ ID NO: 17595 - DNA, 635 bp, Zea Mays
tggcgggtgctacaaccgaagtacacagaccacacagtggctcacgttttaccgaggtgggacctttgactctttccattgcgtgggctactgccatcatgacctccattgtagtgcgcgaggtaccaaggcgaagggtggcaggtggagaagacaggacgacgttgccagagcatccctacacacggtagcgctttggcctatgccacaacctactcctgcgctctgcccgattagatgaggcaagggtacaatgggcagcagtacttcagcctacgccacaacctattcctgcgctttgcatcgattagacgaggcaagggcacgacgagccaggaaatcttcatgaagaccaaaagaagatctattcccccgcgcgtctggccgatgcgatcacgcacgcctgagagactgatggacttgcgctcggtgcgtgacgaaccatcgtaggaaaggatccaccccttatactgcttaaccccccaagcaatccatgaggatcactcgagagctaaaggactacgtctagcagatgcacccacgcgcgcccaagagaccgatcgagtcatgcccggtgcgtggcgaaccatcataggatagggttcgctccttacactgcataaacccccaatcaa

SEQ ID NO: 17596 - DNA, 580 bp, Zea Mays
agcagttcaggaaaaccccggcatgacagtaggtatgtttccagtcgactcccatattgcagaagtgttatttgatactggagcaacgcattcattcattactgcatcatgggtagaagcacataatcttccaataactaccatgtcaacccctattcaaattgactcagtcggtggtagaattcgaaccgatagcatttgcttgaatgtaggtgtggaaataaggggatagcgtttcccgctaacctcatagtaatgggtactcagggaatagatgtcatcctagggatgaattggctagataagtatcaggcagttatcagttgtgataagaggacaatcaagttggtgtccccacgaggagaggaagtggtgaccgagttagtctcgcctgagccaaagaaaggaagttgttatcagatggctgtcgatagcggtgaagcagacccacttgagattatcaaggttgtgtccgagtttctagatgtgtttccaaaggacttaccaggtatgccaccagagcggaaagttgagtttgccatagagcttcttcctggaaccgcccccatctttaagagag

SEQ ID NO: 17597 - DNA, 1248 bp, Zea Mays
ggcctataccgaattacttaacatggaaagggatggcgggttgataagtcaaaagggcgagggttcttttagaaaaagatcatgactgttataatgtgcgggcaaccagagccgttcagatcgaatccaatggtcacaatacaacgcgcgaaggggtacgtaaggatctaatctcatccactggtggttgatccgatgactcacgtgcatcatcactcccacggccgaactcgtatgccaggagcgatcccagtcgtctgctatggatccagcggccgcgacttcatcttcctcccgacggcgcaacaaccactggagcagagcggggcgcggcggcgcgccattgcagaggctaatctacccgcacaaccgagcgccaaactcacgtccgaagtgctctacacgaattagggattaagacaatcaccatggggaacttctcactgaagctgtagatgcagcagcacccggccgcggtggtgagcagtagtggtgcgtcggcgaagaattccggcagtcctggagcgcgggttggagagtcggccgcagtgggtcttcagatcttccacgacgccaatgatggttcctccccacacgacgcaggactcaggtgacctaacccgagcaagctcgtggtggcccgctttcttctttttctattaggttcgctggcttgtgtggggggaagaaaggtctggttatatgctcaggtggcgcccaaagtccgagctagagcgagtcgcgagttccgcggcggtttggtgaagcacccgcgccgagttagtgtaaccagcggagttctgtttcgttcgcccgcgatttcaggccagcagctatcacggcgtgcggttgattccacctatcaacgaaaccaggcacgaataggttcactgaggcactggccagggggcccgttttgcagcgacacggctgagtgcacaaatgctagtcggatccataccagcgattcgtgggagagctagctagatgacatcattgcttatgtcaggatgacttatgttgcggcaagatgaataaataattgaggcaaaactagtgtggctatgcggttgggtttatgtcacgtgggccatgcgggagagtaatttagcccagccattggcacccaagtgcttatgggtaggcaagctgtgtgcgcgcgcgtctgggccaagcagtggagaagccagcccaggcggggtttagctcttttcttttattttcaaatttcgaatttcaaatcgaatt

SEQ ID NO: 17598 - DNA, 344 bp, Zea Mays
ggtggtgtctacgttgataatttggtgttcattggcaccaaggaagaagaggtgaaggtgttcaaggctgagatgaaggtcgctttctagatgtgtgacctagggtcactgtcctacctagggatcgaggtccaccaggacagctctgccatctcgctctaccaggccgcctatacctagcatatcgtcgagctaggcgggctcatcaactacaagagtctacaacctcatcctacactctgatggaggatcacactgacgatatttacacgagcaggaccccattcttcctcagcaagtgcttgattagctgacagtcgatcaagcaacatgtgatggctctg

SEQ ID NO: 17599 - DNA, 412 bp, Zea Mays
ctcgaactccggtgtcaacggcggcttggccctccattgcttcttgtcgagcctcgacccgtcacttggtagtacgaggcggtcgctggcctcgatactggcgatcacccattcggcccgccagttttcccacctcgcgccactgagggaggagatataggtgccagccgaatccacccttatctggaagtagtacgcaccgagatggtccttggccttcccggacttcaccagcacgaaaaaatggcggaagagagaggtgcacgacgccacccccacgaacatctcacacagatgagcgaagatggccgcctgaaggatggagtggggtgtgaggtgctggagctggagaccaagatcctccaacagtaacatgaagaagggtgagatcggcaatgccaacccacacgaa

SEQ ID NO: 17600 - DNA, 806 bp, Zea Mays
gtgcgccctacataaactccagccgtgccgccgcgttactccctcttgttcgtctagttgcatccagcagaagaaaaactctcgtccccattagagctcaacggtgcagaggagagagaggaatgggggagggaagtgcgcagtggcccagtgcggacagcattgtggaggttcgcgtgggcagggccacgcggcggagctcatgcctatttgccgctgtgatacttgccggtggagttgcccttaccgggggtgttccttgtgcgtacgacgttgggcggacacagctctagcaccacgcgaagaagaccgtgtagggctgccatagtgtgaagttgttcgtccctgtgccgaaccacggtatgcctccattatttcctcgccgttaccccctctgatgttttagctttcatggcgggaaggcaggccaggtccgccgtcgcggtgcttggctagctgtgggtgtgcgtcgcgaggaggaagacgctagataagccctggatcataggatggacggctagcttaggtatggggcatctgttcggcggggatccgatccagacggttgaacttagatcctagggccaggtatgcgtaccggttcactctatacgacatctaatcagggccctcggaatgagatccgatggccagaatccatccatactctcagccgcgatagatttacatatgagaccctcatgattccctaaatagaacctgcaatccacccaggtgttgtcaaagtcttgggaaactttgcaagttaacccttgtgctatttggtatttgatgcacagtccagc

SEQ ID NO: 17601 - DNA, 1127 bp, Zea Mays
gccaagtattgtccttcttcttgaccagcaagactggggaagaaaaggcactagaactttgttgaataagaccactggcaagcatttgttgaatttgggcttcaatctcgtccttcattgctggtgaaaaccgatatggccgtatagagatcggtcgagccccttcaatcagcggtattgtgtgatcacaaaatctgctaggaggaagggaagtgggctcctcaaatagagattggaatgaacatagcagacgtcggacgggttcaggcacaggcaattctgatagtgaatgcagctgggctgactccagtggtgatgaatctgaatgtctgatttccaatagagtaccatgtggaacagattgctgaacaccatggaggagcactgttgaatcctgatagttgaacttcagccacttatgtttccaatccacaaacattgggctgtattgttccagccaagacatgcccaggacaacatcataacatggtaagggcagcagcttgaaatcggtttgaaaccgaggagtttgtatagaccattcagcctggcacaactcggacacactctggactatattcccattagcaacccggacggacagaggttggtccaaaggtgtgacaccaaccagagaagacccaatcgctgagttgaggaaacaatgagaactgcctgaatctagtaaaatcaataggtccactccttgaatagtgccgtgtaacttgaaggtagacagagttggctttgtggaggaagcttcatgagataacaggaccataaactgttcagcagtgtcttcaaaagtgtcctcaggttcaggagattcaggaagcaacaactcccacagttcttggatagcatgtaactggacggagttggcacatttatgtcccttttcccacttttcagcacaatactgacagaggccacgagcgcgacgataagcgcgtagcgatgccaccttgctatctgaagaagacatcggatgtgtgactcccaatttgtgaggagccgattcagtggtctggtggcgatcccatcgagccggagtagttgaagactgcttcacataatgcttcgttgggcttggaccgtcagaaacacggtattcacggcgtcgtgaa

SEQ ID NO: 17602 - DNA, 404 bp, Zea Mays
gcgactttaaccatggagtcgtcgtagaccaatgttgcacccctacctagcgcgcctgccgttggtgtttgtgacccgaccgcgcaccacggggttacccacatgatgcttttgggtaggacgatgtcgctgactgcgactcgatggtacgtgcaggagcatgtcggacctgcacgaggatttatacaggttcgggccgctagaatgcgtaacaccctacttcctattgaggccgtatgctggaatttctctagagtatgaggattacaagtgagctgtgatggtgttcaggtgttgttgatgaggtctggtgtgtgatgggacgagatgagatatctttttgtaggggtccctcccttagccttatatacacgaccagagagttatccctttacaagtcgtca

SEQ ID NO: 17603 - DNA, 417 bp, Zea Mays
gttgaagcttggtcctttgggaggaaacccaaaagatcaaactctctggtgtctgtcctgctgctgagctcggaggacttgaaactttctcttgaggtgacctttttcttgttctctagccctttccacttgtatggccttgtttgagagatgtgagaagctgagaaaatcttggctggcgaggatagtcttgagttctggtcttagccctttcaagaaacgggccatcttcttggcttctgtgctgacatcgtcaggcgcatagcgagccaattccatgaacttgtggacgtattcactgacagttctccctccttgggttaattcccaaaattcttcttctttgagctagacgatccctaggggcacatgatgctctcggaaggctgcttcaaattttgcccaggtagcatctct

SEQ ID NO: 17604 - DNA, 513 bp, Zea Mays
cgagattgcgtgagtggctacatgactgcatctgggcgagaggcggaatgggaagccgttagcgctgttgagcctgagcactgccgccgtcgcctgcatgtcgatcccgagtaagggagggagtggaagatgagcgacgacgctgcgagaaagatgaaagtagggagtagaagatgagcggtgatgaggcaaggaagaagaggcgctgcgagcaagggagggagcagaagatgagcgatggtgctgtgaagatgatgaagaggtgttgcgagtaaaatgatagatgaagatgggagcagaaacgggaggtgactgtgtgccttcgctcgacgtgatgctccacgcgctgactgtaccggtggcgaaagagtctttgctacaccgttcaagttgaatcgaacggttgttgcctttttcgctgatgtggatagatcgagagtccatctttgcttccggcactattatataagaatgacataaatatactctctcaattataaaagctaatatgtg

SEQ ID NO: 17605 - DNA, 346 bp, Zea Mays
aaagtatcaaggatcttgatagggtactccatataagtcagatcatcttgaacactcagctcttccataggcagttgctcttctggtacactgtggtacttcttcaattgggatacatggaagacatcatgtacatccgtaagatggtcgggtagttccagttggtaggcgagttcccccacgcgctttaggatcttgaagggtccaataaagcgaggggacaacttcccttttactttaaacctcctcataccccgaatcggtgacaccttcagatacacgtgaccaccctccttaaactctaactgccttctgcctaaacccgacttcttcttctgcctcttga

SEQ ID NO: 17606 - DNA, 377 bp, Zea Mays
ctttttattgaacatgaattatagaatacagatgctagctggtcactctgaagtcgtgacactactagggatagaatttgcgtaagtgttcgatattcgatgagttaccgaatagagttccatccttctgagacagcttgtaggatcctggccaggtgacctccatggctatgtagggtccctcccaaggggtagataacttgtgtcgccctcctcccaatagcacccgacgaagcaccaggtctccgactaaaaatgctcagaaatgaaccgccctatcgtggtagcgtctcggagtctgttgatatcgagccgtctgaattactatgttcagtcgctcttctttgattccttcaagccaggctgctatatccttg

SEQ ID NO: 17607 - DNA, 939 bp, Zea Mays
aaagtacatggcccaaagtctggagaactgggcagctcttttcctctcctcaaacatctgaaacacagggtcaggttgccatccctgattgaccatgaaattcatctctaaattctggaaatggttattatttggatccccaacttgggcctaatgcggcaaatcagcaataccagggacagggtccacttgaagcgccgggccatcaacctcctgaggcccattgaatgcagcaatattgacagcaagcccatcccctggcaaaataggaccattctcaacaacatggccattctgtagaggtgcaacttgaccagcgccaaaggaactatccgacgacaagcctgagtgctgattactgagttgaagctcatccggttgaatgggttgcaaatcaggctgaaagggctgcagaatctgttgattgggttgaacattttcgatccactagtcccaatccccatgggcattgtcatcctgaagagccggcaaatcaccacccgcattccccgacgggaaatttaggtcaagcccaaccgggggcattggctgacccagaccgaagaaaaccaagggaagttgctgaccatcttccggggcaggaggaatagggtcctcatcctgagcctgcccgccaagcatgttttgctgaataatctcacactgaacagtccaagaatcaccaacgaagccctcagcctccaaaaaaacaatgaattgaggaacttcttcaaaggaagtgacacggacacgaagcaaggttctagaaacattactccgatcctcctcccaaagaatcaacctgcaaacgacccaatggctgcttgcaagtactccgaggaacagtaatccaggggaaaccccagtagcataagccaacaatcatggttgaacaaaagagcccgatgattccaggcgtcattgtggcgaacatcagtg

SEQ ID NO: 17608 - DNA, 488 bp, Zea Mays
cgcgaatgacacacgataacacgcaaacagcatgcgaacgacgcacacgacatgcgaaaacgacgcgctcgacatgcacggacagctcgcgacacgtgagaaacactaacagatatcacatttatactaaacaagtataatacaaaaatatctaagttgacattaattagattaacaaaatgtcgatgcacaacagcggctgtcgcgataaaggagaagggaaacggcagggcatgggattaccttggcgtcgaagggcgtagagaccacgaatgcggacaaggatcgacggtgtcgacggctcgctggagcagtgtgcggttgttgcacacggagcagccatggcgaggaggaatgagggtctagcggtgatgttggggagtggggtagggacgtgtgcatttatataggggctcgagcgagtgcgattgtcatcttcatcgcgggagggcggttgcgggagaaaggagatgacgtgtggaccgaga

SEQ ID NO: 17609 - DNA, 885 bp, Zea Mays
ccgcgcccgcgtattgaagtaatcgctgtccggggggcccgtttgccagactcgctacacgtgcaatcacaaacatcactcgacgtcacagccctgtgggctccatcggtcagccggatgaatccctccctcaacaacctcgccgacaatgacggggcgtcgccgtgagctccggggaatccgttgaagaccaaccacctgcacataaaatgagtcgcgccgcgcccctcctatcccttaaccgggcacgcgtccaccagaagggttgtgtgagaggcagtcctctccgccgttctgcgttcatcgatgacgacgggggtaagaagaacgtcgccaccaatactcgcggccagtgctcgcgtgtggggagctgggtgtttcgcctgagctcgcgcttgcggtggatgcactcataggcaagaccgagggaggaacgacgtctaatttctcgccgtcgaccgctctgtgtcacgattccgccgtgctcgacgatcatgccttgactgctatcggttggtggccgagaaacgtcgcctagcatccctgaccgcactggtggtgtcgcgtccggaagatttggtgatcggagcgaggagaggatttctcaccgttctattcttcaccaccgcgccgcccgcacgcgggcacgaggattcgtgcgccaaccctccggtacgacctctggtatatgtccacccgcaccttcgtttcacataggttcagacagggatagttttgggtagtgggaaaatggggctccggggccgggcgcgctgctcgccggcggaagcaccaccgcggtactcgcacatctccactgcgggtgaacagaaggaagaagaccgtgtcctggccattggatcttttgccaacatgcatgattag

SEQ ID NO: 17610 - DNA, 435 bp, Zea Mays
tggcgagcaatccccacgtacatggtgattgggtccgagttcgggttgatgatacacgctcatgggacgagggcgaactagaatgaaggagtccttatcgatatgttgacgaaatagtagtcgaccacacacgggcagcccaagcgaatggtgaagctccaacgacaaattccacgcacctcgaacactctcacatctctcggacgccatgtatagcttcctccgtcttcgatgaatcctcccggtcactcaccaagttccgaactatggcgtgggcggtccatcgatatagcggcttccatctctcttctctctgctcgaccatggcgagactctcggcatggatggtggctggactcgtggttatgtggttttgtttgttcattttcacgagcgaggcctcgcttttcccccttcacacttttgtcgcaattc

SEQ ID NO: 17611 - DNA, 732 bp, Zea Mays
gcacggcacaactagattccacatacacagcgctgacgggtggggccatcactccagtctccgtttctatcttttttgtccgtgctagcacgttggcgcggtgtcctgcaggtgggccctcttgtcagtagcgctcctattcttcttcaatcgtgcgcgagcacttgcagccgaatcctccaagctcgcctgggaatccggagtcccagttccgaatcccgcccgatgcgtaactaccccgacaccagtgcaggcggctactcctgcgcgtcaagctcctgggtctccactcgcatgcccttaagagccgccaggctcaactgcagactggcgcggggagatcgggggttcgtggctcaatcccggatcttcctgctcctacatgtagcgccctagccctgtgacaacccatcttcaaccttcgcccctccttcctaacgcgtgaatctcacgccgttcattcttagatgctaggaccaaccatgagtctcaccggtgagagagagagagagcgaggcgggatgtgccgccatggggcatgtgcgcgtgtcgatctctggaccatggcatggggccagggagattcgccatgcagctctggactcggccgtgaccttgtgagcggtggtgatcggtctgtgttggctgaatcgctcatcggagcatggtcaccgtcgtgtgcccgcctatcaccgtggacagggatctgcattgtgtgagctccggtaagtc

SEQ ID NO: 17612 - DNA, 417 bp, Zea Mays
tatttacaaatttcaggtggcgcaaatgtgatgggacttggttcaagaaatggctgcctaatgagaccaaagttcacacgtttggggtggcacgtggcagtaatttgctgggttgtatatgcttatatgtaaatcgtgaactaaagttacttggatggaaaatccattaaaactgctgattatatgttatgcctgcactcttatgcaacattgggttgtttgcgaaagggcctctaactgagttcgttaggcgactacccatgggagcaaatttttaggctgagactaaaaaatccaatcacctgtcccacaccaaaacatagccaaagcataggtctaaggctcagtccctatgcggtcattctcacgtgggctatgatgcagttgtgtattgatggagcaggggtttagaggttt

SEQ ID NO: 17613 - DNA, 422 bp, Zea Mays
cggctggccgcggtgaggtgaactttgcggtggcggaaaccagttttggggagaactaggaattctcgagctccggtgagggactgctagcaattggcggtggctgagtgcgtgaggatgtggtgaagctcactgcggggtcaatttatagatcctcggggcggtggcgctcaattcgagcggatagcggaggcggccggagaggaggaagaaccctggcgcgcgtgggtacgtgtcctatggcgtggcggtaactccagtgatcgacaggcagttagagagggtcacggtgatgcggtggcgcggttaagacacgcggcgcacggtcggacggcggctatcaccggcgttcttatctgcccagccgtagggtaaaggggaaggcacgaggggtcgccggagtggaacccagctcaccggcg

SEQ ID NO: 17614 - DNA, 350 bp, Zea Mays
gctgaattcgcttggggggcagagcagcaggaagcatttgatctcattaaaaaaatacttgtcttcggctcccgtattaaaagcaccacaagctggagtaccattcagattatacattgcagctgaagataaggtcattgggggctgttctgacacaagagactgaaggaaaggagcatgtgatgacatatttaagtcggaggttggtggatgcgaaaataaggtacacttgtattgagaagttatgcttatgcttgttttatgcatgcaccaagtgtagatattatttactgtcttgtcattgcactatttctggtcaagccgatgtgatcaaatacatgttgcataac

SEQ ID NO: 17615 - DNA, 587 bp, Zea Mays
agtgtacatggagaccccattgcaaagattcaaaaccaaacgcaatgtctccatactggaaagcaatcagagtttgggacccttctattgagcaacgaacagggtaaaggaaagtgaagcctgaaaaggatctatttacctccaagaaacgacggcggcgggggctttcaagtgtacatggagaccccattgcaaagattcaaaaccaaacgcaatgtctccatactggaaagcaatcagagtttgggacccttctactgagcaacaaacagggtaaaggaaagtgaagcctgaaaaggatctatttacctccaagaaacgacgacggcgggggctggacgcacgttgaggcagcggcggcgtcgctgtcggcgctagcagcgtggtcgttgtggtaagaaggagcaagcagaccgagagccttctaggcggtgccggcgtgttttccttttttttattgaccagaggaagctagaacggtagtggtagagcaaggcacgtgcgcaggtaaagcaaaagaagctaccggcagccacgcgtacggcgacgatgctaaacggcgtgtagacgtgcggctcaggtttttc

SEQ ID NO: 17616 - DNA, 573 bp, Zea Mays
gaccaagtcagtgtcatcaacagaagtcaaaactctgtcatcaggagcgctggcctctaaggcgacttcctgacccgaagcttgagctgctgccatgcaaccagaatgcagaggagaagaccctatgtgaacatccatggaagtgtgagagggagaaccaactcggacaccctcgggggctgggtcatagctcgcgctacccatccgagccggatcatccccggcaacacccttgggggctgggtaagcgctagcgccatccttgagggccgatctctctgtaacagccacctctaaggctgaaggaccttcacccacttccatgggagcagaacaatccagaccagcctcctgacccttaagaccgcgctctaaggtcgatgaggcacgggacgctgctcgagataactccaacccggcatcagccacatcagcgcaaacttccatcattccaccatctgccggctctgacaacagatcttctgggaccatgttttcaagagtctgatcaaaatttgctagagacaattcttgcagaccaatgagggcagacaatgctggagaaggaacacc

SEQ ID NO: 17617 - DNA, 663 bp, Zea Mays
gcgaggcggcgagcgcagaggcgagcatagcaagtccggcaagcagcaaccgagtctgggagcacaaggtcgtgggctgtgggttttataggccggcgagggggaagctagagtgcctggcagggagtaatgggggaaggggagaaaacagccggtttgaagaagattgaaggccattaatggttaattagacgctgttaatagagggaggccgctcctcttgattcctcatagaaacggacgagcaagaaacttcagacattaatggtgtcgaagaaaggaagagtaacggctggacaggggagaggaaggggaagagctaggggatggtggctggcgctccaatcaaacagggaaacgagcgaacgggtctcagtggcacgagctggagaacaacggctcggaagcacaagcggcacacacaagccagacagaacagaggagctgtacaaaggttgaagacgagctgacctagggccccacaggtaagagagtgaaggaggagagtggagtggagcacggttaggctaattgggctggcgcacagcatatattttttttatttccattttttttaattgaatacgtagagaatatatatacatacatatatatagttgtactaggtatgtgcccgtacgatgccacggaacacaaattgac

SEQ ID NO: 17618 - DNA, 324 bp, Zea Mays
gattggagtgttgagtttgaaaccatcactgcttcactcccattccttcgattctggtcaccacacctctgtcaacccttcaccactgtcagccacttcaagggtataactccttcaccacggtcaaccacacctacaagggtgttgaggcaatcttctcctgcttcacctagaacaacacttgtctggctttctccacgaggacgtaggggaaggtgcatgtacgtcgtgtcgtgcagcagctgctgataggtatggctgagggaccacaaagctctccaagcagcattgatgaccgaagcagcgtaggcggatagcagcgtc

SEQ ID NO: 17619 - DNA, 618 bp, Zea Mays
ggggctagagcgcaaaagtgcccaagacacagaggcaccccagtcgaggatggcaggtttattcagtagtaactcaggggctcatatgtaaaaaggactagtgaaggggtatgggaggctcttgtccacccgattgacaaccgacggcgctgattaaaccgaactcgccccctatcggtgtcgcgccgattccgcccgatctagaatctacggccatgatttaaaacatctatgacctattcttctccgttcgattcccccacaacgacccaaatccactcacgcgaaatggtatcccactgtctaatcttagttgttcaacaaagatcgaatagcccaggttcgtcttctacctcccccgccctcactaacagcaacgatgagaccaacagcgacggcgcatcaccgttgcgctcaattaccgtcgtacagcacccaaaactcaaatccactggtgctacgccatcctatggcacgagtatgtatggtgcagggtctactcatcgggaaaccacgacgaacgaagctacccgcggcgcaaggtggaaatccggcgaagacacaactacggcgaagaattccctctgcaccatggtctgcacactcgattccttcctg

SEQ ID NO: 17620 - DNA, 995 bp, Zea Mays
ggggaagtgacgaattgttaggtccacgtgcaagccgctgcgatggcccacagcaacagtggaacacgacgagggtacgtgtccaggataataaaaatcaggcacacacatcgatgacgagaaaacaaaaggaagataggacaagctagattagcccaaattgaccaagatgcaagtttttttcgcatcgagaatatctatcctcactattggtctcattttcactacttcgttaggcactatggaatctgtttatggagtaaattattaggttccacgaatggatcttccaagattgtgcaagggatttatctagctgaacatctaactctgagtcttccaatacgacactagtagtagattctaaaggtaactgtggttttcccactaggagaaatgtcaacttccgacgccccaagattagctgttagttcgcgcaaaagtttcaagctcctcacataacacaaccatcgactactttggtaacttcggccaatccgatccaatgacgatgactcgaactcggtctccatcgtggtatcaactcggactggacctcgttatccaaaaacgaatttcgactattactccaactcgggcccggatacacactcacgccctaaagatgacccgcacatgtcaatgcgccgacactagcgatcatgtggtcaaatcacctctaagccgagtcctcagacgacgcaactaaagagcctttgacaactcagctaaacgagatctacaccaacctgtcaggtttaactgcaccttccaacgacatccttcgagatctagaaccgtgcagacaggaaggaaaatcgaactccatgattttgatggccccacctgtagaaacggcttagacaaacaattaaggtcagtttgggttgcatgttcagctcactacgcacatacgaaacagctttggtttgctatcttatcacaatttaacatgcttaaattagataagtttgactaaattagacatacatttg

SEQ ID NO: 17621 - DNA, 584 bp, Zea Mays
cgactacgacgaagtgtttgctccagtggctcggctggattcagtacgcctgctcatcgccctcgcggcgcacgaggggtgggaggtgcaccatatggatgtaaaatcagcgttcttaaatggcgacctccaggaggaggtgtatgttgaacagccggttggtttcatcgctgcagggaaggaacatcaggtgctcaagttgaagaaagcgctttatggcctacaccaggcgccgcgcgcttggaacgcgaaactggacgacaccctggtgtcgctcggttttcagaggagtccgtcggagcatgcaatctatgtcagacagagaggcaatgcccagttgacaatcggtgtctacgtcgacgaccttgtgatcactggctcaaatactgacgacatcaaagaattcaaaaaagaaatggcagcagcattcaagatgagcgaccttggcttgcttcactactacctcggcattgaagtgaagcagagcgcagagggtatttccctgagtcagggtgcctatgccaggaagattctagagaagaatggcatggcgacctgtaatccctgccaagtgcccatggagg

SEQ ID NO: 17622 - DNA, 453 bp, Zea Mays
gggagagtccggtcacggcgaccccaaccacccgacgagctcggcggagtagttcataggtacgcgcaaatctcggggtggaagggaagtccgaccctccgggcccatccagcggtgagacaaacaggcagcgcgggattggggttgtttgttgcggacttgcggtgaactcggtggaggagcgcgaggtgggcgcgacctgcggaatccgcgcagccggtctggtgtccggaggttgaagggagcaccaacgcgacggacccacacgtccgcgcaacagggactgagttggaggagtggcgcgactgagcccatggtgtcatgtgaccaaggatcacggagtgcggtgcgcccagaggagaagtcacaacgggaggaagaagacactcctaacagatggggcccacatgtaagtgtgtcgcgtgtgagaggctgggctgagcggcgtgggga

SEQ ID NO: 17623 - DNA, 460 bp, Zea Mays
ctaggtcaatcttggggaatgcctgcgcacggtatggctccttttgacaggtcgtgtgctttcttattcctcacatggcattctatcccatctacctatcgtaccaaaacctgtagcttgctctatgcccataccgtcgtaccagatgggtctcgcagaatgtgctctcggtaaggttgaggtccgtgttcagtacagtttcatcttctgtcaactcccttgtgtcaacctccagcatgtgctaggtgtgttgtcctatccttcctagtatgtgggtggagactttgatgccgtgacccccttggtgttgtacacatgacatggacacattttggtagcgacatgtcctgttatggctgtcgtggacccataatgtcggtctgggtttcctccttgctgatccatttggtcatttgctctgcatcgctgactcgctcgacagggccttggtcggtttccc

SEQ ID NO: 17624 - DNA, 424 bp, Zea Mays
gttcgtccgaaagagggatgcgaacaatgaggtggtgagatacaaagcgagacttgtagcacaagggttcacgcagatacctacaatcgattacgatgaaacttactccccggtaatgagtggcacaacgttccgatatttgatatcgctggcagtaggtttaaacttaaaaatgtagatgatggacgtagtgaccgcatacttgtatgggtcactggattcggaaatttatatgaaggtcccggatgggctgagagttccgaatgtcaagtcaaatcgcaacatgtacatcgttaagttgctgagggcgttgtatgggcttaaacaatctaggcggatgtggtacaatcggctcagcaaattcctcctgaagaagggatacgtaaataatccagattctccttgcgtattcattagaaaatcc

SEQ ID NO: 17625 - DNA, 851 bp, Zea Mays
tttctcctagccttgatatgaacctgcttaaagctgccatgcacccagtaagcctttgcactttcttctgtgatcgtggtgcttccattctcctgatagcctcgattttttccgggttggcttcaattcctcggtggttgataatgaatccgagcaacttccctgctggtactccaaagacacatttttctggattgagcttccaccggtaccacctcaggctgttgaagaccagctgcagatcctcaatgaagttttctgtcttaatcaccacatcatcaacataagcttctacccgcttgccccagtgaccggctaagcatgtttgaatagctctttggtaagtcgctccagtgttcttaaggccaaacgacatggaggtatagcagaaagctccaaacgacgtaataaatgcagttttttcctcgtcttcttttgccaggctgatttgatggtatctagagtagcaatccaggaaggacaacatagaacatctggcagtcgaatctaccacttgatctattctaggaagttcgaagggatccttcagacagtgtttgtagagatctgtatagtcgacgcacatgcgccaatccactttattattttttagtacaagaacaggatttgctaaccactcaggatgcagtacttctctaatgaaccttgttgtgactaagcgagatagctcggcgcgaatagcttctctcttgtcaggcgtgaaacgacgcaacttttgtcggatcggccttgcctggggatagaccttcagtttgtgctcggccagttctctcgggactcccggcatatccgcaggctgccatgcgaatacgtctcggttatcttgcagg

SEQ ID NO: 17626 - DNA, 707 bp, Zea Mays
ggtgcagcaggagtcctcatgaaatttattcactcggctaccgggaagcaattgttagatgaaatctatgtcgggcagtgtggagtacatgcagcgtcaaggactctagtcgagaaggctttcagatacggtttctattggccaacaacgaagagcaatgctgccgagttagtccagaagtctgaggcatgccaattcttatcaaagcaacatcacttacccgcatagcagctgcagaccattcctgtaacatggtcgttcacatgctgggtgctggacatgatcggacctttcaagaaagctcagggaggctatactcatgtactagttgccattgacaaattcacaaaatggatagagtacaagccaatcgcttccttaacctcaaccaaagcggtggattttatacaagacataatattcaggtttgggataccaaacaacatcatcactgacctgggatccaacttcaccagttctgaattctttgatttctgcgagcaacggagcatccagatcaagtgtgcgtcagtggcacacccaagagccaatagccacgtagaaagagccaacggaatgatactggaagcactcagaaagaaagtatttgacaagagtgaaaagcttgcaggaaaatggatcagagagctgccatacgtggtttggagcctgagaactcaacccagtcgggttgtgcatggaaatac

SEQ ID NO: 17627 - DNA, 376 bp, Zea Mays
ctccacatgcatgatcctcgggagtcccatctgacggtgatgaagtgcgttctacgctatcttcagggcactccagatcatgggcttcttcacttctccgcctcggagctcgtcatctataatggtgttgactaggctggttgtctggatacacatttgtctactatgctatgcttctcggcgacaaccttgtctcctagtcctccaagcgtcagaacatcatctccctctcgactctcgagcacagaggcgatgtatcgtgtcgttgctaatggtgttgccgaagtttcttggttgcattagcatcttcaggaactccactgtgtgccatcttggaacaccatcgtctaccgtgacaatatctgctccatctacc

SEQ ID NO: 17628 - DNA, 372 bp, Zea Mays
ggagaccgcgccaagcctccccgagctccgcctcgaggtgagacacccatccccgtgcccaatttcccttattgcgtcttgtgttcatccaatttcgccttcgccggtgctcgaccacggcggtccgccattctcgcgcggtggctggccgatttagcccggtctatttcaccagagtagttttctgtgtcacccctgcctctgttgaacccaacccaggccttagcgcgccttaagtcccctccccgtggccggaatcgctcaccggagttgctctggcccgcctgagaccttctcaccgccgttctcccctctctgcccgtggattcgtggcctcttccccgccattgagttcgccgtggcgccctcttc

SEQ ID NO: 17629 - DNA, 601 bp, Zea Mays
tttgtaacatgtttcttagtttatggatgtggagacattggctcaaatgtgaacattgttgagcgtgagacattcgacgataataaaaaaggtcaagcaacgcatatgtatatgataaatccaaagagataaaagggcagacttgaaggcttggatcgaggaatcaagggacagaggataggtcatggatggttagcgcttggtacatctagggatagcaatttgatccgcggattcagatatgcgtcgaatatccgatccgacagagccggatatagatacattttttacccgtgggttaaattcgtatccgatccaaagtcaggtggacacggattaggatattatcacccaaccacagattattcgttggatatctgaaatcgacccatagtttattttttgtcgtagtctatatcacatagcaaagagcaaatcgtaactccatgaacctcatgcctaacgttctcaattcccaaccttagattgtcccttctagctttattggcttcttgcccccctgctcccgtgcccccttcctagtcccataggccgcagtgcagctgtggctggccgatggctaccccttccaagctctagt

SEQ ID NO: 17630 - DNA, 641 bp, Zea Mays
catcgaggatcccacgaccacgtgttaagcacccccaacgaccgcgaacccggcggcgccgcccgagacccacggcagaggccatggccggggattcacaagcctcgattcctatgcccgaactctgattcgaaggcagtaatatgtagaaggtaacagtatggcgttgttgagggattactcaccacgcttcaagcaatgccgagccccacacccggcacgcggcggaaccatggcacccacggtgtgacggcgagcaattcaccctcccccgatggacttctccgcacaatacggcaactctcaccacgtgcgcgcaccgaagaagcttccacactacctgccaagaccagaatgacgacgtagaaacgagtcatccacggcggcggattctcctcttctccgcacacagcgacgagctatatctcggcacttcgatttgagaggacgaggaggggggatgagcacggctcgatttatactctagcggtgaagtccgagctaaaacgaggggggttgaggtggaagcgagattccctgtggtggttcggtgttctgttgggggagatgaacctgacgacccggaccccatgcacagcgaccgaacccatcgcgcgtgcgagggcgccactacacctggg

SEQ ID NO: 17631 - DNA, 421 bp, Zea Mays
ggggctcaaccgcggcctgttgcgccgccgcgctcaggctggtggaggaaggtgaagacgcatggcccctgatttgataaccgacggccaggatcgtagcgcagcagtgttttagcctggggccatctcggccgtccgatttggggtgaaggattaggatttgggcgatcttcataatatctgggccgtcgatcttgaatcagacggatcaagtctcgtaccggttcggttgattatagatctgatctacgtcgttgatggacaattctacggcccagatcaagtaaaaccttgtgccgagcctgttttgcaaatgggaccccgcagaactaaagaatcaacccgccgtccatatgtgggaagcctgagtctggggaaaacttctggttctgcccctttgtttctctgtatttggtgctcg

SEQ ID NO: 17632 - DNA, 861 bp, Zea Mays
ctggccacataacccaagcatccgccacgaaacacgccagctcagctgtgtcacgctcatgtttcgccaacgtcgccgaagcaaagcgcctcctcgtcctccagacctccacgactgcatgcaggtggggccactgggtccagcatgtcagtaactcaacccacgaaaaaaatctgtacgaaacgcggtagctagaggaggaaatgcttcgaggtgaatgaggggcccacgcataaaagtccaattctttgttcactttttttcttggcgtcttatctcttcccttctctgcctcgcttcgcttcctacccacgccacgcgtgtgttcttggcagccacccaatccccgcctcgcgaaatcagacgccaaatccccttatcttatcatcaaatcgatcgccaacgggcatgatctgatggctccctcatcatagcctctgctgctgcaccgcagcaaaatggccctggtttagtttagtcctcaagatcccgcctttctggtgctctgtttggctagtgtcgtgccgccgcgcgaggacccggagattcgattccggtccggtgtatctctaggctgcttggtttgggttaggatttagtgggcagggttgtgcagctggtgtctcgtggaggaagaatttcgtgggaggattttgaccgggtttgggcaaagagcgcgccgttcgggaggaggtgattctcgcgtggttgcgtgctttgctgggagtctgctgcggccaccgccggtatggcgacgcacttcacgccgtcgcaggcgcacgcggcgtcgcaccacgcggcgcaccaccactcggcggccgccgcggcggcggtcacggccacggccaccgcgcgactgca

SEQ ID NO: 17633 - DNA, 532 bp, Zea Mays
ggcagacgccggtgctccttcccattccccggccatctctatccccagcgtcgaccctccatcttcctctcctccccactcccctcttctccaggccggtaacggtcgtagtaatggccaacgccattaatggcgtttgatggttgtcagccgccattcatcccttcccagcgtcttctctcctccccactctataaaaccccggtcgcgcccttggagccttgccctaaccacagccacctcgcgctctcctctctcgctgtgtagctcgccgacagagccccgccgtgcccttcaccgccgaccggagccagagtgtcgttcaccaccgcatcgttgaagccgcgaccccggtgaccaccactgcccatgccccttgttcggccgtcccgctcccactcgccgagctccttgcgcacaaaagctagccagaggtagaagatgaacattttgtgttttagtccctggctttgtgtagatcttgttcaggtatttttcagttcagaaaccattaaaaagagatccatgtttc

SEQ ID NO: 17634 - DNA, 679 bp, Zea Mays
gccaaatcgaggggctgaccagtaaattgtgcttgacgatagtgcgactgacccagatgaggtctagagaagaccatgcaaagacatctttgtttctgtctaggcaggcgagcaacttgttttcttctttaccggtcaggtcttcgcttatcagtattgtttgattgggtacaactgagtataggggggctcttttagctccttcgttgctctgtatggggtcaattaggttgccttactatgacaggtggtgtcaaggttggtcctcaccctccttagctaggcaatggacgttgcactggctagggatgaagtctctttctatattgtgggccacttgttggtccccatagatagttattgcatcgtgagggcctggtatcttcatgcacagataaaggtcatgtatggtcacctcaaacacattgatggaacccctgcccaagatggtgttgtaggggtataccatgtccattacattgaaggtaatttgctctatacttgcattgggggtagtgccgaaggagaatggtaggattttttttctgatgaggagggtggttttgccaccaaatccgtatagggtgttgttggctttttgtagcagattgtggttgatgcccattctattgaaggcatgcaggaaatgatatcttcatggctatcatcatcgacaaga

SEQ ID NO: 17635 - DNA, 359 bp, Zea Mays
tcgggaacccgaagacacttcttcaattgagacacgtggaacacattatgtactgcagacaaggtttcgggtaactgaagtcgatatgccactagtccatatctttcaaggataggaaaaggaccaatataccggggtgcaagcttcccttttaccccgaaacgtgatatacccttcattggtgaaactttcaggtagacataatctccaactggaaagtacaagggtatccggtgtgtgtctgcgtaactcttctgacgagcttgagctttcgtcaaattatgaattattggttgaaccttctcttctgtctcctttaccatatcaggcctgaagaaatatctttcaccaggttcaga

SEQ ID NO: 17636 - DNA, 499 bp, Zea Mays
tctcaatctcgttggcgagcggagcggaagcaatattgcaagggagcagagaaggcttggatgcagaaaagcaaaactagggcatagaatgcagaggcatgcgacagtgcagtacatatggggttttcccgggccagacgccatttctaaaaagcgccaagtcatcacccagctcttatttctaaaacgttggcgtgccatgtcatcactcgaccgttatttccaaaactgccgacgtggcccaatttaactcagcggttatttctaaaaacgctgacgttaccagacttcactcggccattgtttccaaagcggccgacgtggcccgttatcactcggatgttacttctaaaacgccgacgtcgccagcagtcactcggctgttattcctaaagcagtgacgtggctacaaaggattcggttgttacctctaaaacgacgacatcaccagtaaccactcggtcgttatttctaaaacaccgatgtggcctgctatcac

SEQ ID NO: 17637 - DNA, 350 bp, Zea Mays
gttgatgatgaactcgaagtagtgctggaggttgcctatgtggctggagacgaggagtagatgagccttgtctagcatccaactgcgtcgtgttttgttgaaggttaggtggataggatgttgtagcaggtcgatgtagacgtgtggtttgctgttgtctgatgttggggcaaactcattttggtagattgccaatttttccttggcatcgctggcggagcaaggggtgccatctcccggtggtaacgtctgcatagatcgtgggggtatatcgttgcgatgtggactcctgatgttaatggccttgtgtgccatggatgctattgttgacctaatgtagacgatggtgt

SEQ ID NO: 17638 - DNA, 613 bp, Zea Mays
agcgggtgtagcagcccctgtctcttcttcctaggcgccatccggacctcacgagcaagtaggcttgagcacaaccgcaaggacgagcgggagtttcagagactagattgtggcaaaggaaaagcagagttagggttcatgcaccgggaaacagttggcatgggcatatatacacactaagtcgggcgcattgtgacaggcaagtaactcggaccaattttcaaccgaatagaataagtcgggcagagttgtcagtcgaacctatcaacacggcttgtcatttggaatcgtcagttgggttcacttgaattgatttatcagacgaagcgtaagttgaatagaaacataaattcaggatcagatacgacaagcatgtttcattcatcagaagaagatcattacaaaggaaaagggtcaactcattatgaaccgaccctaatatcctcacttctccactatcattcccactactactactaccacaaccgctacctactaactaccactacactagactactatttatgccggtggaacatcgtcaccggcgtcgccgccgccgccgctcttgtcatcgctgccaccaccgccacctctgccgccatacgcaccg

SEQ ID NO: 17639 - DNA, 898 bp, Zea Mays
tatggatctccatcaccttcgtgtggagaacgaagttgttttgcaggacaaaacagaggagtttctgccgacgtccacctcgttgacagaatcactagcctttgcggctggagcatcatcttcagcaccgccagcaccagcagttcaagcccctgcccctgaaggcgacgatccagatgattctggtgatgatgatgaagatgacgaggatgaagaagaggaagataacaacaatgaggaagccaatgaagagtaggaagacaacttcgtgtggatatggcctgtcactgaacattatacttcaatgtttgagacgaggcacttccctaacctgctgcaggatgatctgcatgtgttaggaacatacgtctgacccttgcatgagacaaagcgagtgtctgagaccccttgggcttgctactgcatcactcgcgttcatgtcagggtgatggatgcaggagataggggtttcacgactttatgagctcatgagtctctgacaccgctatccacctacattgtttcagtcagcaatgctgctaggcgagctctatggtctctcagccacacttaccggcagcagctgcatgatacgaagtacaggcatcttcctctatatcttcatggagaaagctagaccaacattattccaggtgagactggagaaggtcgcctcaacacccttgttggtgtggtggcaggtcttaacaccgaccttaacagtgctaccctggacctcttcagggtacatttggagctggaggatgcacatgcaaggattgcatccctggaagctcaactagaaggaagggatcccctgaagcccacgtcccagccatggctttgtcccctccccgcaagaggatccactatggagaaccaggatccatcaccaggc

SEQ ID NO: 17640 - DNA, 392 bp, Zea Mays
aagacacaggacgccagccactggaccgcgggttgattcatccaattttcagggtctgttatgctattctgccatggcgaaggggtactggaggatctgagccatccgatcgacaaccgatggcggtgattagatttaggttttgtcgaaacggtacgcaccgagagctattgggtctagatccaacgaccaacatcctacgatcccgagatccgaccctaaccgttcgatcagagatctacgcacctgacttggttatcccgacgcggccccaatattcaatctaggccggacagcacaagatcaacggcccacggtgaatctctccccggatctaatcctagccacacatcaaccttcctatggcaccggtcactttctcccacccaaac

SEQ ID NO: 17641 - DNA, 563 bp, Zea Mays
cggagctagattttaatgtttagattagaagcattgaaaagtaacgagtttttctgctggacagagaggtagtattcactcaccacaaccatatcacacctccggcttcttgaattcgatgagtagagtattatatttatactagtgtatgtgtatcatgtcatgtgtgatccgcgggtagacgggagcggggcagcggagccatgcggcggggagacatcgcaggtgcggggtgtcagagcggggagcatctaatgctgctgacagctcatccccaacagcgccaaccaggtctcttcactcacctccctccacacactccctgccctgccctgctcccacactcactctcacactacactactgctagcccctgctgctgctgcttctgagctgctgctgcctgttgcctctccccctctctctctctcacacacaacacacacaaaagtcgttcaaacagatagatagatagatagatagagatgtgaggcaaggcatgctactcctgccgtctccatttccaaggaccatcatgggttaatcacaagacgatgctccac

SEQ ID NO: 17642 - DNA, 371 bp, Zea Mays
gatgttttgttgttgcgggtgtggaggtggcagtgggggaggtacgatttgtacctcctggtggtgttggtatgcgtggttaggtggatgctgagcggtgtcgtggttgtatggttgagggagttgttgatatgtgtgcgcgacaactctggggttgttgactggttgtgcccgagacatcctgtctctggtggccttcgtctctgggcagtcccttgtagggtgcgcgaagtcttcatcgtggaacaagcagtaaaatatgcgcgactgctgcgcacgtccccggccccgaccgcgagttccgtttccgtggccctaggggggatactcttgtcggcgaggggcctcaccagcggggtgctggttggcga

SEQ ID NO: 17643 - DNA, 470 bp, Zea Mays
gccttgcttcaatgacagaaattccttctttttaatcttcatcagtccagcaggaatgtggtagtttctgaactgtgtggtgaattccacccaagtaatagtgtcagcagcgtcatgggaagcaacataagaatcccaccaatcagcagcaggactagtcagacgactagaagcatagagaaccttctcccggtcggagcaatgtttagcattttctccactaacttcaaccagtcgtcagcgtgcagaggatctggaaagctggcgaaggcaggcggcttgtgactcgtaaattcccggtgcttgtcctagggtggaagtggtggtagcggtggtggcaatgggacttgctcatgtcgccccatccactcctgatgcatctcctctctcttggtgcatctcttggcgttcctaccgcatctgcgcgtgcatatccgccatagtatcagccatctgatgcatcatctgca

SEQ ID NO: 17644 - DNA, 412 bp, Zea Mays
ctctggagtgggcctacaaccggtgtatccccttaggagtatcgcactcccagttacattcgggaccgaggaaaacttctgcacagagaacgtccagttcgatgtcgcggaggttaacctccccttcaatgccatcattggcaggccagccctgtaccggttcatggccattgcccattacgggtatttggtcctcaagatgtcgtcccctgctggggtcctcaccgtgcggggcgaccgcgccgctgcgcttgcggttgtcgagaagctgcacgtcctggcagcagaaactgctcacccggacgatggagggagggacccctcaacttccggtaccaaggcgcctggcaaggtgccaaaggtgcagccatctggagtagacggcggtcccgtcaagaccatccggctcagc

SEQ ID NO: 17645 - DNA, 381 bp, Zea Mays
ggctcggcccttgccttagtggttccgttgatccctatatatatatgttcaggaggggatccctctcaatgcttaccttgcatttagccctagccgcctccacttcctgcggtcacaaccaagaacttttgtgcactaagacgagggagaggaaaagatcttgtgcacctttctctatcgcctccctccgctgccatggcagagaagattaatgtccttgctccccacgatccatggcccatctcctccatgatcgacaaggacctacagggcctggtggatgggggttgctttgccctcgctccctcggggcgcaccccgagtggctcgcacctggggacgagcaggagctgaccccacctgcgggctacgtggtcagct

SEQ ID NO: 17646 - DNA, 400 bp, Zea Mays
aacacgtgtgggtttgcttctgccatggttcaacggccgatttgagcgccttagcgtgcagatcttggcaaaacccccgtgtacggtctcttccctgcaccaaatcctaccttttttatgtgagttccaagcaagggtacggtcgggctagagatatatagaggcgagaagtcggctctgtcagagctgtccacaccgagacaaaagctatgccaagtcgtgtcaaatgacttagggttgggttcaaacttttccagggtgttctaggggtctttaggcgccactttgtcaattgtgccaagtggttttgaagtttgaaagagggtgaacatgtttgatctttggaaaagggttggttttggacttagaagaattctgatttttctcttaggtctctccc

SEQ ID NO: 17647 - DNA, 384 bp, Zea Mays
cgcaatggtgtggtggcgtcgcaccgtctttcgcccaccgaggagtctctcacagaccggcgactagacctcccttttttcgcttcaataaccccacgggtcgcgaggcaccgatacttatactcccggaccgtctccctacgcaccgagctagttcgcaacctcctacccactttccccggcgatctcgcagagacctggtcttggttgttgaggacgatggcctgaccgacgcggcccactcgtcagtgaagctagaacactgtgccgcgtgacacccgggcccactgaacagcgagtatcccccatctctcacagattcgtggaacaccgacctatcgggcccaccaatccagtgactcatccaggcacggtgcactcgct

SEQ ID NO: 17648 - DNA, 565 bp, Zea Mays
tggatggcgcaatccgcggtaccacgcaagggggcggggatgatggaatccgacgagaaattgtggcccgccgaacgccacacgctcctaagccgacagatgagcacccccgctacagcttaaggaagctcccgtacataggccacggtccctccaatggtgctttggcggcaatcaacgatggcgaggtgtcgagggtaaggcggcgcgagcgcggaaaagaggaagcagggaagaggtagttgcgagagggctaaatactctcgggatggtgctgcccaggcgtgatacgcgcggtaggttaccgagtctgccggcacgaagcctctcgcgagatctttggtgaacagtaatggcggcgagcaccacgttcgccgtacgtgagactgtgaagtggaccccggttaccagggaagggaagccacgcggagaggagaaccggtcagcggccccgccagtcattgtctcagggtgtagtggatgtgtcccccgggtccacatgtcggcgcctaatcgtgttgagtcgcccgagcgcagccatcgaccggtggggccacacgtcagg

SEQ ID NO: 17649 - DNA, 381 bp, Zea Mays
ggttttttcagttcggttttttcggtatcgcaaaactttggtttctagaatatggcaaccggtcggttgcgaaaatgtgtaaaacccgagtaattcggttttcataaatttcggttcggttatcggttttcagaaatctgagcagcacactactacctctcgccaggcgcccagcgaacacagcatacaaaaaactggtaatcttcgcacagcaaaccgaacggtatacatgcataccgccagcagtacaacatatgacgcatccaaaaatgagtttgaaaactgattatagcaatacactcactgatacaggcataaagccagtcagctagccacaattgccaacttggtacaaacactcaacacacctttttatagcaa

SEQ ID NO: 17650 - DNA, 803 bp, Zea Mays
ttcctcctgaatctcgtcggagtcgctgctaaactcaaccacagaggggttgcgacgacgcaccatgattgaaaaggtggtgaaactgtgaaccggttgaagtgtgtgaaggagaggctctaaagtttgtgaagcgactaaggcgagagtgaatgaagtggaagaagagaaggggagagtcaagtatatataggcaattgagctggtcctcaggaccagttcaaccgcccccatgggccagttcagctggttctgaccagtgtggtcagagaaccagaaacaacagagaaaaaaaattcaaatttgcgtgcagatgctggaagtgactggacaggaaaaaatgggcgccaacgacacgcatgcatggctagtgcgcgggcatagcagaaatgtccaagaaaaatctgcgcgcgctgagcagaggagaagtgaccggactctgtatgcacaccaaaaaaaattctgcatgcacacccctgctgaccggacagaaaaagtaaaagaaatccctgcatgcgcacccctgctgttgaccggacagcacaaataaaagaaatctctgcatgcgcacccctgctgttgaccggacagcacaaaaatctgtgcgcgcagacaagaagcgaccgaaaaaaaattactctgcgcgcgcgcagcgagtggaagtgaccggacaggggcgctgacagacgctgctcagaggaaatgaccggtcatgcaggatgcgacctaataaaaaaaaaggtggcgcgctgagcggcagcaaaaaagaaaaaaaactttatctgcgcgccaggggaagtgac

SEQ ID NO: 17651 - DNA, 565 bp, Zea Mays
tgtgtcaatctggtgatcaaacatcaaaatatttcagaaagcttggtcttcactttataagttcctttattacctctaattttctttagtgctgttaggattagatggggtatggatcctggagataaggctgaaaaatatcctcccatcattctgccatgtctccatgggcttccttatgggagctctgatgtaatgcttgaggatccaatatcaaaatgtcatctcagaaagctaggcccattcttcattggctctcagctcgctatggtgacaatagtcctaaaaccgtgttattttgcaattaaaaaatgatgaagtgaacttgctataatcctgtaaggattatatgggttatggatcttttggagataagggtggaaatatcctcccttcattctgccatgtcataaagggcttcctaatgggagcttccagaagatgctttaggatccaatatcaaaatgtcgtctcagaaagctgtggccattctgcattggttctcagctcgctatggtgacaatagtcctgtatcgtctcattatgcaagaacagatgtactgaa

SEQ ID NO: 17652 - DNA, 779 bp, Zea Mays
catccatgaccaatatgaataacatcggggaaaggggatccccatgtctaagccctcttctatgctgaatttgttctccaggaaacccatttagcataccttgtgtagtggaggaagcaaggagaccacaaaccatgtctctccagatctgtccaaacccaagttgttgcatgacttcaattaaaaagggccaggagactgagtcaaaggccttggtgatatcaagtttgaggagcagccgagacattctttgttggtgaaacagtcttgatgtctgttgcactaacatgaagttgtcttggatgaacctccccttaatgaatgcactttgattcggggaaaccaattcattcaaccttggtgccaatcggttcgcgaggatttttgtaatcagttttgcaaagctgtagacgaggctaattggcctgaagtccttaatttgctcagccccttctttttttcggcaccataataatgtaggcagtgttaagcttccagaaattgatgaatctcctgctccaaacagctgaaacagctgccataacatcaccctttataatgttccaacacactttataaaaaaggccagtgaagccatccgacccaggggccttatccgagggtaaacctctgatggtttccaggacctcctgttctgcaaagggggagtccaagaccgccaggttgtgtctaggaaggccaagagcttccaggtcaattgttgcatccctctgtccatcctgcccaataagatttttgtagaagaggtccactgctgc

SEQ ID NO: 17653 - DNA, 724 bp, Zea Mays
ctccgggaggggcgccactgccaacgtaccatcaggagcagcatcggatgaatcctcagctaacagatcaagcatgtcatttatgtcggcatcactagggttcagaggcacttcaaaataaacctgccgttcatcatctggaatctccccgagcgaagcaaccaaagtactgacttcttcatcagagggtcgcactctaagacccaaattgctatcagtcacgggtggattggacacaaaaagggtgaaagctttgggagaaggaaggttccaagccgagtaagccactggagcaccaacgtttgagactttacccctgaggatcatctcaagtcggcttaccaagtcaacagaaggaattctcctattggtaactcgggttgagttggccagccctcgataaagatatgccggataagccctgtctttcagcggctgaatgttcttgaaaacaaaatccgtgaccacagcttcagcgatcagacctctctctttcagtaatctgacttcagaaagcaacacgcctgcctcggccacctcttgatccgtgggaaactcagtccaactcggagtacgaacgtctggctgtcttcctgaccgggaggggagagaatttccatagttatcaactataaaccactccagacgccaacccttaatactgtcttggaggggtatttcgagatactcggttttcctcccacgacgcatctccaaactggca

SEQ ID NO: 17654 - DNA, 492 bp, Zea Mays
cgctcgagggaaaaaggaggctgaacagagttttcgatgttattgggtttatttacccttattattgttttcctgcccgaaggcaaggggaaagaggaaagttgttgcttcaacctcttccagtgcgccgaaggcgaagagggccaaggtcttaacacgtaggctgaagcctattgggacggccgaggtgccgaagcttattgaaagtgcagagggtgcccccttagccacagaaaaacctcatgtaatgtcgatcgaagctagtacagacctgataaaagaaccggaatcagaaaaggaagcagaacaactaaaggagctgagccctccagctgtaacaaggttgtcaaagccgtcgagtactacaacagcaactccaaggaagagaagaatgatagtgtcttagatgctgttttagaatctgtgaaggtgccagttcctgcttctgccgaagtaactagtgaaaaatctgaagatgcaagagaagcgatt

SEQ ID NO: 17655 - DNA, 402 bp, Zea Mays
gtttgcctcggccctgtagcgtgcggagggtgggagatgatgtgtaagccgtagatcttaggatgtgtggcttggattggctcgcgtggactgttttggccaaactgatctggttcgtccgatccaaatcatgcgcgtgtgaatcaacgtgagcaacttaaaatctgggacgtcgatcgttgatccaaggacttgcaagacgtgccgatctgttaaaagaccagtttaatcttcgccgtgagttttagatccgacggccaagatctctcgataccccttcgcgatggtcatttttctaaagagtcctcgggaaataagaaaatagaacccgccgtcccatattgatgttcactgtgtctaggataagttaccagtgagtccctgcagttttcagtatttgat

SEQ ID NO: 17656 - DNA, 425 bp, Zea Mays
gatgggtttatggtttgaagtaggacgtgggatggcgttcagggatatggaggggaaaagccgaacaactggatgttagagaaggcccgatctagcctggctagggtggggttagaacaacaattggaccaagtaaaggagcaaccgatgagggggagctccatcacacatatgtcgttgatggtggagttaaaggctgagcaaagcctgttgttgacacgaccagagcttttctcgttggggatcagacaaggtggaagtcgccaagtaagagctaggagccttggaccgagatgaagaggtcagagagctcagctaaggagggggagtctggatggtagccaggggcatagagattgtaatggtaattgagccgtcaaagagtgacgaggagagggtggtggttgaggaggaggttttctgag

SEQ ID NO: 17657 - DNA, 537 bp, Zea Mays
ctcggagggagagaggcgacaccgactgcgccgcaccgacgggtctttcgtcatggatccacccattgattacggacctccttagaagcgtcagaggatagctggcggggccgaggaggccgactcccaggcctagggcgagcagaggagcgtcagtcctccaccaccaccaccattatacccgccacaaccgccaccaccatcaggctcgccaccgccaccccaggggcagcagcagcatcaacagcagcaacatgggcagcgaacgtcctgcttccagggtcgctggaaggtccagggccccaagtaagtgtagcccttttttatttcttcactggtctagttatcatgtcaatgggtattaacccatcctttgctcatcagggcctcttctccctctacgtccaaagtcgtgcctccctcacctacggctgctaccgccgagacagtgccaccgagccccaaggctccagctgtggatccggctgcagcggcgccaacaccaagaggtgccgcagcggcagagggggtccccac

SEQ ID NO: 17658 - DNA, 1181 bp, Zea Mays
cgacaatgtacatctatagtgtcggagagtgaaatcccaaccctaatccagggttgggtgtatattatatagaggagttaggtgggctaagctcattacaatatgggtaattaggtaaatacaagagaaccctattgttctgaggggaagtgtaggggcacgagactcgcaactgaacaccacgggagagaaaggagcgagaggcggagttgtcaaactcgcgacgttatcgctttggagggcacaaactagaggaactgggtagagacccaagcgaagaagtgggtgagggtgtgaaaggtgtcgggcttgagctacagaggaaaaatctagagaaaacgagagaaatcatgaaaacgagagaaatcatccaggatgaccagatagtattggtaaccggagatgcttggaacaaggggtgtccaaaggtcacagtggatgaggtcgaaggggagcttgggacatagaagagaagggtaagcgagtatgacgcccgagctgatagagatgacaaagcgaggtggagttaccgtatgggcaaggaatggccgatagtcgagagaggacgtcgtggtcgaggtggccaagacaacggtgccaagtggaggtaggggtagtggaggcaagggcgtagggttggacaaaatgggcagaggaaggtggggtagggaagcgaatagggtataggggactggaactgtcgtagcgagcaaccacaacacgagtggtatgatcccgtatggtgagtccccaaggatcgaactccatagagcaacagttgttagtggtgaagtgacagatcgagaggaggttctggatgatgttgggggcaacaaggatgttgttgaggtacaacggaccaagaaggaccatgtcacctactgaggtgacaggcagagtcgacctattgtcgatagtgatggaggaaggggaggtggggttatggggatggggtaaatcgacagctccagtgtcgagagtggtgtggaatgaggccctggagttggcaacccaatcggtgggaggagggggcgacgaagataggggtgcgagaagagaggcaagggaggcaccctatagagcgaccgggaggggagttgaggctaggagcgagagtggcgccggctgcagggaggaacgcaccaggaatgggcgacgcggtatccgaggcgagagcgccg

SEQ ID NO: 17659 - DNA, 492 bp, Zea Mays
gacaaaaacaatcacactcagggacaacaaagtcactctcaatccacaggaacctagcaaagcaccttcagaccaccggccccaagaggtggaagaggaggtagtagtttcggaggaagattcaataatcaaccaaggaaactattcaaccttttctgtggatagtacaaggagcatacaacaagaacctgtcaagtcacgatatagaaacagaaggaaatcaccgaagctaaagcacaacagaatcagtcgaggcaggtcctccacaccgcctcatactattctacatacattcaagagtatgttcgcgaccaatagccaagtccacaaccatcagcttcagttgcttcagcaagtcactcttcaccttgatggatcctgccttagccgttcacacaagcacccctcatcatatgagcaacaacatccaggtccagccgcagttttctgcacaagaagaccacagcgagacacaagggaacaatccgaagc

SEQ ID NO: 17660 - DNA, 380 bp, Zea Mays
ctccgacttgtgtcctctatcgagatgtcctagaatcaggttgcatttgtttcgcattgaacttttagacctatgattttttaatacatatagtgaaaaattatttttatttatgacccatgatttatcaatgtatggaagttagattcggcaaagcttcctttttaattccctctaataagtatttccctccattttacctctgtctccaaaagtatttccctccatttttttactgctaaagcaaatctcatgacgcctccgtaatcatcgtgcagcttccatcttcaactagataacctcatccgggctcctctcctcgtcatcttcctcacccgggctcctctccgcttcatcttccatcgtcgcgcttgggccat

SEQ ID NO: 17661 - DNA, 391 bp, Zea Mays
gtaactgaatcaacgaattcaccgcgaggttgtagatccaattccttgatccgtgctcggactctatccgttcttggggtataaaaacacttccgtcggccctaccttgcccccatcatccatggagtgcagaggacatcagagcgagagagagaagaaaatttgtcgctgcggggtgggagctgtgaaggaccgccgcgcacgctggccatctgcgacctcactgcggctgtattggcttgccggtgaatcaccaaagctcgtgtacctgggctctgcgtgggtggtcacgattgggtatccaggcagggtggctaccttgtcagactccatctttgccgacgtggttcgacctccaccgcgattagggcatagcgccaccggattcacg

SEQ ID NO: 17662 - DNA, 616 bp, Zea Mays
gcgtgtttcatcgtcgtcgccagcggcgaattgggtaggatcatcttgaatcgttggattcagatggggcggccagcattagatcttcgaatacccttttggcttaatcgaaccggggcgttgatctggtgatagacgaccctaatcgcttacatggtcgcggttgatgtggaccgctgatctgcgatacgatgacccatagagtgtaccattttgtcgcccttgggatttgatctaaaccactcacgtaggatcggacgaccgacatcttaacataccccttcgccacgacagaattgcttaagagcccctgtgttttaactaaaccaacccactgtccacggcagatgggttctgagtcttaggactttttacgtagaaggccctgagctatctattattagtgcgcgcagtccagacctttaagtaaaatatagaaatttattcagaaaaggaatttagtgcaaaattaattccaagaatttgtttaattcatagaaaatttattttaacttcttttgaacccatttagtttcattaatttggtattaatattgtttatcacatagtgtctctatttaagcatgaaacctgtattaaaattgatcacttaatt

SEQ ID NO: 17663 - DNA, 675 bp, Zea Mays
cttttctggatgaaggcactttgggacttggagattagagtgttgaggagggggccagccggttagcaagcagtttggagaagatttttgcgatgttgtgtatcaaactgatgaggcggtagtcacccactgtcaaagcatccgacttcttaggtataagcacgatgttggcagagttgagtaaatgaaaatccgccccattcatgctatgaagttggtgaaaagcctcaagaacgtcctccttgatgatatcctagcatactttgaagaataaacctataaagccatccgagcctggtgctttgtcgctcgccattgagaagattgtttcctttatttcttcgagggagaacgatgcttctagcgatgagaggtcatgctgcagtaaagctagagccggccagttgagggtggtccctctctccggggttgtccctaggtgagatttgaagtgttcctgaatgattttttctttttcctcatgggctaccgctaagtttccaattgggggctgcaggcaatggatgaagttcttacgtgctctggagctagcagataggtggaagaacttagtgttcacgtcgtccaacctaatgcgagtgaggcgagcccgttgacggatcctcgatttttcaattacagcaagtcctagtgccctggctttaagtgcattca

SEQ ID NO: 17664 - DNA, 272 bp, Zea Mays
gtacaccacaagatatatcacgaggtgcattttgtggttggcgagatcgactgtagctcgatggttcgtgtggaacacgacgtggctcaaggattatataggttcaggccatcggaaggcataaaaccttatgtcttgtgtgttgtggatattgtgttgctttcatcttgaggttacaaaaatttgttgctagctcgaggtgatggtatgggataactaagagatggatattagggatgactgactcattcgtaggggcccctaacccgttg

SEQ ID NO: 17665 - DNA, 318 bp, Zea Mays
atgtttaagaaatctaatttcactatctaattgacagtgtgataaaattccaaatttagacgaggacttgcttcagatgtcttacgcaatcgtaaaagtcagaagttacggtcgttacgacattaaggggttttgttttcgttcggccaaatttgagtctactcgtccatttgcggcgacaagaaatactggagttgtatgcagggcagtcgatgatcatggaagagagatgaattattatggagttattaatgacatactcgagtatgactttgctggtagcaaaaatcttaaggtggtgtttttcaaatgtgattg

SEQ ID NO: 17666 - DNA, 594 bp, Zea Mays
ctacctcggatgtgccatcggttggtcacatggcgagctctaaagacctgaaggcgttggtaggacccattgtgcggggctcgctctgtggtcgctcactttttaagtttcctaaagaaggaaaagcaaaggaataatttttttgtgaagtattgtaaaaacaatagtaagttttaataaacgtcatcaaagtccttggcatcgcgctttttcgttcgtctttcctagtgaccgttgcgctagggtgggtgttcgcaaatttttgggtccctcgagttccgctagtgaccatacttgtagccttcgaggcgtaggtattcacagtctcgaccagcttccccgtcaggtcctttcgttcacgttgcgaagatggggatgaattcgtcccatcgatgctttccccaaggtatagccatgggggtctctggttacgttgtcctgaggccccattcccgtagagggtgcctcagggaagtacaagcggtgtgatgttgtgttttgcttaggactcttcgatagaaagttgcagactcaaagcatgttgtagaaaagggaaaaacatagttggtttcgcgatcagagcttccattcatt

SEQ ID NO: 17667 - DNA, 714 bp, Zea Mays
gtcgacccgcacatacggcggaggttcgccggagcaaaccaattctctgcctgaaggcccccaaatcgattctcgatcggtgctattgcgaaagagcattaaggtagacagaaatgagggttttcttaccggaatcaggggtagttgacaccctaaacgcggcgcagcgcggatccaaagtcgttggcatcaaccagcgaggaattgcctcggacaccgatgtccccacgccagtagattccccgcacaagcaccacgatcctcggtggcttccctgggctaatcgcagagggcactatgacggcgacggtggatctcccacggtggccacccctcctacaatctacggccttcgccggagctggcacaatggcagtgcacacgtggtttcagggtagctaggtttgggaaggggaagggcgtcacggctgctcggcctttatggtcacgaggtagtgccaggttttgagcaacagagcttgagcccgcggggtgatttcgccattgtcgtgcgaagtggttggacgactgacagcccgggcccatcaagcagcgagacgctagaattccgcacacggtgagtcggctaacgaacgggcccgcggagcagtgaggggagaatgagttcgttgtggtgagtggctgacacatcgggcttgcctgtcggcagtagagcgatagatgcgtgggcgcgttggtgcggctgaccagtgg

SEQ ID NO: 17668 - DNA, 626 bp, Zea Mays
ggccacgcacgccgtcgccgatggacacatgtatggcatgcagcgcttgagctacgacctgcttaattatcagtagcgaagaatctcatcccacatgcgtgtttcttcaacacgtacgcatggacactctttagtgtcaaagctaaagctgagaattcaaattaaccttgctattttgatcgcggtgggctcttaaaatgattggacagatgcagcaccgtacccacgccttacaactctcctagctagctagccgccccgcaaccacactagaattgttctagcctagtagcctgtgtctgtgtctgtgtgtgcgtgtagcgtgtcctatggaagacggaaatttcagctgcccagaaaaacacacacatgcacgacgacgacgccaccagtttgccggtcgacacatgctagcagtgatgggcaggcctttgtcgatcgccatttattctgtgcagcaaactctgctggctttaatttgcggaggagcgagcaaattctactctccccggctttaatttgcggatttattacaagtcgtcatcccaacttcattggaccaacttttatagaatatttttatttaaaaaaaactgtagtaatttacgatatcaaacgagtaatac

SEQ ID NO: 17669 - DNA, 607 bp, Zea Mays
ctcagactcaggtgcaaggcgaaactgatggcaataaaaaaggggaagggatggagaaggagaaagtagagaggaaggagatggcttcaaggtctgagatgtggcaacattttatcaaggtcaaggatgacaaagggtttctgagggctggaaggtgcaaatattgtcaccgtgaaattaaggctgacacaaggggacatggaacatctgcattgaagaaacactttggtacatgcaaacgcaatcctcatgttttcaacaaggactcgaagcaaggcaccttgcaagcatgtcatggggaagctcctgccacttggaggtttgatcaagaagcacttagagatgcctttgctgagatggtaattgaagatgagcagcccttttgttttggtgagaagcctggctttagaaaatttatgtccaaagcatgtcctcgtttccaagttccatctagaagaacttgcacaagggacattgtacgccattactttgaagagaaagccaagctcaagaagttcttcaaagattcttgtcagagagtgtgcctgacaacagatgcttggacttctcaggttcaagatggatatatgactgttacaacaacttt

SEQ ID NO: 17670 - DNA, 728 bp, Zea Mays
gaggcaagggctgtttccacaataacatcaaagactgcccaaaaattcttctggcaaaacattgtttgccgcttcggagtaccgtccgaactatcagttgacaacatcaagcagtttgacagccaagacttcaaggatttttgtttctccattggcaccaagcttgccttcgcttcagtttatcacccgcagtccaacggagttgtggaacgcgccaatggaaaaatcttcacagccgtcaaaaagatgctcctcgacgaaaagaagggcagatggaccgaattattacccgaggcggtctgggcactaaacacgactgagtgcagggcgaccgggttcactcctttccgccttctatacggatcggaggccatgaccccacaagaaataaaacatgggtccccacgaacggccccgtcagccgtccccgacgtggacgagccaacttcaaaggatctcatcgacggagaccgagtcttcgtcttacaggcactaaacaaataccaagcccagacaaaagcatggcgcgaccactcagtcatcccgagggagttcagtgaaggagacctcgtactcgtccgaacagctcggacagagtcttggggcaagctagagcccaagtgggagggccccttcattgtcaagacgaaagcttcccccagcacttacaggcttgcgacgccaaacggcgaagacctggagcactcctggaacattgacaacctccg

SEQ ID NO: 17671 - DNA, 903 bp, Zea Mays
tagtattaggagccctgggcttccatcaatgcagggagcccctgccaggctaggtgtgccgggcgcgggtcgacgtggcaggtggtcggagtaccgcgcacatgcaccgagtgaaggtgggtcgtacgtgcgcaccctctattaccatttatgcatccgtttcactcgaattccgtatgcataaacgcgtaactgccacggtgagtccgctcgttccgcgcgggttctccgaagtcgtggtcacgtcccgcgttgaaattgaccgcgtttatacttgcatattatgactccaacggttacataaattgacacgtcgatgcggcctggtcggtgtggtgtagtatttgggatttatgattgtataattcgatgttaacaactacgtatcaatttggatttattatattacgtactttggtgtgggtcttgattaattcttttttgtaaactgtttacgatactttgcacagctatttatgtttattatgaacacgcagtaaccaaaccttcacactgactatgcgctgactagtggacccacagtccctcgccgctccctcgcgggccgaccgagctaatatggtcaacgagccagacacatcagacccctttcaattaattcagctcgggtccacccaaaccctaaaataatcagttcctccccgtcgccgtcattcgctcctgcgatcgccatcgacgaccgcccccacctcttccaccgccgtaatctccgcgcttcatcgattcaccgccgtcgttctccttccctggttcgtttcccctctcattctttcgagttccccccattcttttacatagttcagtcgctaatgtccatcaggttcgccccgccccttctacatcccttcaattgattcgaaattaattgaatcgcctcattat

SEQ ID NO: 17672 - DNA, 376 bp, Zea Mays
attaattctggactagaaagagcgaaagagtcggatgcactaaatctaggcctgaaacagtttctggcttgggactgttcctatgctgccgaacggggccgagctgtttccaaatatatattatgtgttgctactttcttcacatatcattactttatgtgttcttcctggttacatttggcaccattgttggtaagacggtaccacccacagttttattgagaaaggcttttaagatggttgtagttgcacaaattggaaaataaaactacactgacttaattttccttttcttcttgtgcttcacgaagctttacgttgatggagtttgtccccaccaatgtcactgtaccgcataatgggcgtgtttggttcg

SEQ ID NO: 17673 - DNA, 619 bp, Zea Mays
tgttgtgttttgtgggaacatgctgctaatgttgttgttctatgtgccatacattattccaacggttctgttttttcttcagacatacacagggcgcatcttgatcgctgtaaatccttttgcaaagctccctcatatgtatgatatgcatatgatggaacagtacagaggtgtgcagtttggtgaattgagtccacatgtttttgccattgctgatgcatcttacaggtacggaacatggaaaccagcttgcagtgtgttagcgagaaattagaatatggagttttacatggtatatttctctttcttgaagagcaatggttagcgagaactgcagccagtccatattagtcagtggagaaagtggtgctggaaaaacagagaccaccaaactcattatgcgatatcttacttttgttggcgggcgtgcaattggtgatatccgctctgtggagcaacaagttctagaggtaacattcagttttctcatcaattcttttggtgcatgattaacatgccctgtagaaggctttatgttttctcaactctgcatctatccttctcacatttcaatgcagtcaaatccactgttggaagcttttggtaatgcacggacagt

SEQ ID NO: 17674 - DNA, 326 bp, Zea Mays
acgtcgctgttggcgcccatcaggttcataaaatagtgccagagtccgcgaagaacccaagggccgcggatgctctcccgttttgtccacatcttctctttccttcctgcccctgctgccgcgcccgccaattgtttctagtctaataattacagaattgctaggacggagaagaaaggctgtttggaattggatgccaattctcgctgctgatttttgtgtgtgtggtggtggatagacatctaataacgcggcccaagttgcgctagcacaatcttcattctatccgcatgtgtccttttttcaatgggttgcacagttggtcg

SEQ ID NO: 17675 - DNA, 566 bp, Zea Mays
tctgactacgcagaaaaccccctagggtgactctaaattaaacccacggtccttcccctaataaaacagtaatcgcggtggaggaaagggcggaggggcttaccgacggcgagatcgctctagcgaagaggccgagggtgtaggtgaggtcgtgacggtcacgccgatgtgcggattgtctccggggatggtcggagtaggtaggtccacgtgcacaggcgggggtgctcgtcggcagcaagggctctagcctaaccagggcggtagagttcaattgaattggtcagtgagctccactaggtgctagggaaggcatgggcgcgaggaattgaagaatggctcaccggataactcggtctacgcgcggaatcgctcatcggataagtccggtgacgatgatcttgctgttccagtgagatagggcttcgattctcgcttggagaagcttcacagctcttcagggaagctgtccaagggctcggttgaggctgagggtctctggaaatcgctagccacggtggtaggcgctcaggtggctcgggcgggtggcgcagagctcaccggag

SEQ ID NO: 17676 - DNA, 434 bp, Zea Mays
gagttatgggtggtggtggtggaagcggggcccatgcagcttgttagtggcttgccgaagcaactgatgttgtgggttgttggttgcccacatactcggggatgtatggggaatagcacgaagcggtatgcaggacatgctttggttgattctaccgtgcttcagcttcagctatttccttctacttcagaatagtgacttggcatgtccttgttgtatgccccttatcttccccacagaatagacaaaacaaccttcttggttgggagctgaatcttccaccgaagcttctacctcctctgcctcttggagctggtggcctgtaggaattttgttgtgtccctgatgattgggagctatgctgatggccttaattgtgatttcccctatcgtcgcttgagttgggattatggatcatcctgacgtgcctaggg

SEQ ID NO: 17677 - DNA, 345 bp, Zea Mays
agggtagctgacagccttgacctgaagtactaccctcgtcgtttgaccgacagtgctggaggtgtgattgtctcgcccgttggtgagggcaatcccaggctgaacagcatggccgacctggccgccgtgctcaacacagagttggaccacacccttgacgagttgggcaaggttcgggcggaggttgcggaattgcgtgctgaatgcgcggcatgccactatcttgatggtggttctctcgcccctatcgggattcagcacccttaccattcaccgccccgtggtcgcttcgactatggtaccccagactgcaggacccgcatagatttagatccatagatcgat

SEQ ID NO: 17678 - DNA, 394 bp, Zea Mays
accaaacttacttgtcactgaaaattcttgtccttggcgtatttattctgtgcttttgccgcaccctgttctcttttcaaactcataaaatctgacgtagtttcttcaaaatggcactggctttgcatcgtttcttctctttgatctgcctctacttggtccagtcgtcccagatcttggactttcgttgttctcttgctcatcttcattgttgtctgaaagattaaatgttttaccatgatcttgttgcagttcagtccctagaccctgcctgccactttttaccaacctttgatgtgaggatcttttcttctgccgatcacgttgtacatgctaacgagaagaatgtttctccattccttgagtttgtatatatagtttcggttgtcccatc

SEQ ID NO: 17679 - DNA, 722 bp, Zea Mays
atgggcgcagtgccagggattagatctatgtagaactccacttctctttctggcggcattcctggcaattcttctgggaatacatccatgaattcttctaccacagatatgctttctgctgctagattaaacaccattgggtctttggcgggtggttgagcctgacatgaaactgactttccttggtagtcagtgagaagaacggtcttatttgcgcaacttatgatgcccttgtgtttggttaaccaatccattcctaagatcacatcaatcccttgggatggcaagacgattaagtctgccaagaacactaccccacttaaaagaattctgacttgggagcatttgagctggcatagaaggtctgaccctggggttcgggtgaccaagggaatttctaggtgtgtagagggaatgccatgcttttccacaaaactagtggttataaacgaatgagatgctcctgaatcaaaaagtacagtagcgggagtaaattcaactaggaactcaccgagcactactcccggagcttgctgagcctcttgagcatcgacgtggtttactcgtgccctgccatgatactgggtcttgctctgttggctgtaggaggagggtgccttggaggcgggtgctggggcattcttggggccattcaccgagttggagtaagtaggtcctgatgccttcaactgggggcagttattcttgaagtgactggggtc

SEQ ID NO: 17680 - DNA, 1020 bp, Zea Mays
aacttgtgttaccatatgaaattaagagaaaaattgccttcaatagggactgacaggctgtctaaatgagttagtcgccatggtacagtgtccgaaatggatcagattgccagcgccgcgtactcgccaccgacgacctccctgcgccacgattcgtgtcgccgccagtccaagttgtgttcggggtgagtggatagcgctcggggtcccggaaatatcaccgtcgtggataagtccggccggtaaaacaaatccgaccaccgtactagcttgtcgcggtggaacccgataggctccccggtgaccgccgcctcccggccgtgcgccgcgtggctcaacctttccaccgcgtcgccgtaactccccactgctgtctaatcaacgccggtgaggttgccacggcatgggacaccaattcacgtgcgccagtattcttctccacctccgaccgccgcgcgtctcatccaaattcgcggccaccgcccgttctccctataaattgagcccgtgactagctccgcaaggtcatcagctacccagccaccaagaattgctagcaatcgatcaccagtgtacccgaattccttgtttcccccaaatcttttcgccaccaccgtaaagcaccactccaccgtggccagtccgttctggtaaggcaccatccaattcgcgcgttgttctcatgtccctgtatgctggtgatgctctccaaaccgtccaattaaactagaagcccaccaatcactgggaacacgaactaatgtccatagctttcgctgtccccatggacagagtacgatagagctccaattcagaaattgagtgaggggaaatactccttaggggtagaatcaggtgtgaaccaaagtttagcgtcggtcttcgccctctccggccggtatagctcgccggatttcggcttcccgtgtggagcttcgtcgaggacctgacgcggtgaagaaatagaaacctgagggcatttctgcaatgtgtcagcgactgtgttaaacagtggaagga

SEQ ID NO: 17681 - DNA, 293 bp, Zea Mays
atttattctaaatcaatttgtaggtctctaactctgtctgctaatcattaaccctgtctgctaattatatgttcaattgtggctatcagtcttttccagcaaggggtcttatttattctaaatcaatttgtaggtctctaactctgtctgctaatcattaaccctgtctgctaattatatgttcaattgtggctgtcagtcttttccagcaaggggtaaaaagtaggctcctctcctgaaaggcacacatgagtatgcctatagcatgctgttgggtttagattcttgatcag

SEQ ID NO: 17682 - DNA, 429 bp, Zea Mays
aaccacgacatcagtcgctccggctcctgctgcaaccccttcaccaccagcagcatctgtcgctgctacacctccgactgctgctcctcctccaccgccggcagcacctgtatgtgcctctccaccggtacctgcaggggcagcaccccaacttccacctggtgatgtccatgttctccggttgtcaattatcattgcatgactactcgagctaagctggggttcagacagcttgcgctctttcatgtggcgcagctctcccctgtgccacagacatatcgagctgcccttgctgaccctcattggcgccagactatggaagaggagttctgagctcttttggggaacaatacttgcgatctagttcctcgcccatcgtctgccaatgttgtctcaggcaagtgggttttcaaacataagtttcatgtt

SEQ ID NO: 17683 - DNA, 1344 bp, Zea Mays
aaaactctaaacagtactgggctcaaacaagcctgcgtcggcccagttagggcagaagtgcgctcatgcgcgcgtccgcgctgctctggcggttttgcgaaaaggcccctgctacttctaataattcagaaaacgctcccgggatcatttgccgagtcactgacattatacaatcatgcccttctaattctatttcttctccgaagaggtccaaatcgacggcgcgctcataagcgatgatcctgctgcgcggaccggccaagatcggtagtggatgcctgatttaactactgggtgagtgttacgggcgtgagacaaccctagaacgggtttcaattacgtagttacagccttggtttagactgaccacgatggcggaagaataccgacgcaaattcctgtgttccggttgattgattgtgactaagcaaaaagggtcgggccgataagcatcactagcgtatctagatactggaacatgaattaaacgagcaggagcagacctgggacgaactgtccacggggcgcggaggatcctggctcgcgggtaacagaaaaggggaaaatcaaagccgcagcggtctcggttggaattgggaggcaagtttaaggctacacgtccgtaaagaagtatagcctcaccatgcactgtcaattttgggaacggtggagggaatttcacgaatttgggacttctactgagctttactggtgtagacgaaaacaccctgccgtggaccaccatgctatttatagccacggcgacccacagtcgacctccggccacggataacatcgcaagcgcatgcataacacgttggtaggaggcacagtgaggaaatcacggcatgcgtgacagcgcggcgaactgcgctgagtcacggcggccgccggtgagtaactccggctgggcccgggagagggtgccacgtatgagtcatccttttcccggcgttatccatccctcaccgtgcatgaattcgggcggcgatcaacgacggcgagcttagctagcgatctgatccatctgaccccatccaaatctacagtgccactgatcttcaccgttccactgaaccgacctcctttctttccccctttctcttgattcttgttaagaacaggttaatctctattaacaagagttatttaccagataagggtcttcaactttactataggatttatggatcaaaactgcctggattctaagatacggtgctcgcaatctggccatatttcactgtgaccatttcgttttggaattcagtttgtagtgacattataaacagcataactgagttcagatagagcaacttcgcatcactggttcttcaatttctg

SEQ ID NO: 17684 - DNA, 800 bp, Zea Mays
agggcaagcatggacaaaacatcgtaaataagtttccagacactggtttacccgctctgtttgtccatcggtctgcggatggtaagagctgctcataagaagattaactccagccagcttgaacaattccttccagaagtgactagtgaacactttgtcgcgatctgaaacgatagcagtgggaaggccgtgtaaacggtatatgtgctggaaaaattccctggccacagacgctgccgagaaagggtgagatagtggtatgaaatgtgcatacttggtaaacatgtccaccaccacaagaatagaatcgaatcgttgagattttggtaacccttcgatgaagtccattgaaatagtatgccatgctgtgggtggcacaggaagtggttgtaggaggcccggagaacgtgaccggtcaggtttagcctgttgacaagtgacacaggaagcaacccaggaatgaacgaatgacttcatgccgcgccaagcaaatgactgtttgatttttttgtaggttactgggacaccggaatgacctcccacagggctgtggtggaaagcagtgaccagggtatgtttgagggaatcatctgtaccaatccagattctgttcttatagcgtaacagtccgtcacaaaaggagaagtgaggaatagaagagccatccactgccaatttggccaacaattcttgacagtaatcatcatgcatataagaagcagccacagattcagcccattgaggaacaacagcggtgaccgcagcacaactggcatcgtgggaagctcgacgggaaagag

SEQ ID NO: 17685 - DNA, 406 bp, Zea Mays
gtcctgattgcgtgaatcaaaggataagaaataccagctagccgaccctatgggtgcgctactaaaacattctagcctagactgtgtgtaggtcaggtcccagttgagattgccccttgggggccatgacaccggttcctccgtaagaatcctggcatccagcctcgacacatcgaggccacatcccaggggggccaagtaccagagaggaagttggtaacaatgcacacagcaaagaaaaagtggcgtgtagataagttgtaatatcgcctgataagtactacctaaagagtatcttgcaaaatcaaagacatattacaacccgatccccagcggaaccctcgttttctccacgcaggcctggctactcatcgtcagtaggatcccgctggaagcgcccgaccac

SEQ ID NO: 17686 - DNA, 442 bp, Zea Mays
accccagacgtacctgacccatacgataaggtgtatagtaacatacctgaagaaacacattcgttggacattgttgctgaccgcgtttactgcaaagcaaagaagtttcagtatgaaccacctagattttgttgtcgtaatggacagattgatctagccccattcgagacaccaccccaacttaggaggctgtgggagtgctcagatgctgatgcgagacacttccgtgataacattcgattttttaacggccatttctctttcacttctctgtactgttgccttgatagtatgactacaaacatgaattgtggtatttacacgttccgtgcacatggcatgatgtaccacaatgtaaggtcgttcggtagggaagctggggcagaacataaacaccttgaactttacttctacgatgatgatcctagcctcgagcatagat

SEQ ID NO: 17687 - DNA, 283 bp, Zea Mays
tgcagcaggagttggctcttctgaggcaagccattcctgccgcccctgcgggtgctgcttagggtgcgggaggtggagaagtgtccgggggcactgtccctgcgggtgctgttccaggtggcggggccgaggtgcctctttcagtcagtggtctttctctgatgcagtagatgggcatgaagttggattcttttgatggcagtggtactccgatcgaggcggcagattggttgacttatgtggaggataagatgaatgtcttcgagattgcatatggagatcg

SEQ ID NO: 17688 - DNA, 422 bp, Zea Mays
cttctaatgtttttgtcccttcggttctcggttcttcaattttgccagcctttggcattgcagccgtctcttcaatcctctgcgtaagagcaggtcctttgacttcagtagccgaagaggtctcaccgccaaattcaggcactatggccgattcaatgtagcgcggtcggtgagtaagaaccttcacctttttcctcttcggcgcgggctcgcttgaagcggctgaagcagcagccttcccagaagttgcaccctttcttttttgccgccgcggcgggtagcgataatcagggtatacaaatccaatagcatcaaaaactctatttagccttttcttttttcggctcccaaaggccatagataatgcattatcttcagacttggagtatgctccaagtagttcgtcactagtattttcaaca

SEQ ID NO: 17689 - DNA, 626 bp, Zea Mays
cgccgggatgcgttggggtcagcgtggtggatgctcgtgtgggtggtctaggcgtccgagaatttccccaccggagcacttcaaccactgtggagccgcgagatgccatgggcgatggtctgcagactgcggcgcaggaactggtaagaacactacggctcccctcgctacctccgcttgcatcgtgtggaaccatccggttgctaggatttgagggccgagttgacctcatgactcatgcgatagatcccaccgcgggggaaggccctgctgcgtcatgtgttggcctaagggaagaagaatgtgctgccaccgtcgatctattcgcggacggctagatctgggcgtcggacaccgcttcggggggatgggatccgtgccgtggattgggatccatcggtccattgttaattctgaccacataaaatccatgttgtagaacgcagatccgacgacggtggtcacataccagttcactgatatgtgaatctattcttgaccattggaccggcatccaacgggtggtatacaccgataccctttcggcggggtatttttctaaaagagtccctgaagtatttatatatcaacccgcgatctagtgactggcgtcctgtgtcttcggg

SEQ ID NO: 17690 - DNA, 669 bp, Zea Mays
ctaggctctccatagtgtacatcctcccaccactaagggccccgctcttgccttggccgtcgacgccacctccgtaacgatcaagaccttgttgtctcccccacctcctagtggctctataggggcacctcccctggctctcttctcgcaccacgtgccttcgccaccccctccctcttccactgattggattgtcgactccggagcctcctttcacaccactcctactaccaactcattatctcaatcctatcttccccacccctcccatccttcctctatcattgtgggtaacagttccatcctcccgccctcccggtcacctcaacagttgattcggttcttccaggaccattctatgtaaacgacgtccttgttgcccctcatatgatttggtcccatctattgattcgtcgtttcactattgacaatcattgttctatggaattcgatccctggggttcgtcgtttcactactgacaaccattgttctatggaattcgatccctaggggctcaccatacgacaccttacgactcgtgttgtgctcgctcagtgcgacaactctgggcctctgtactctattcactttcctgtcccaccttcctctggtgttgccccaccctatgccctagccgtccctccttcatcgaatgtattcaatgagtt

SEQ ID NO: 17691 - DNA, 806 bp, Zea Mays
gatagctcgatgcttgcatgtgctaggagtagagcctccgcctccgcctgtgcgacgttggcctggccacgtcgtggctgtcgacagtccttggccaagtggccaagcttgccacagttgtgacagccgtcgtctcgtggctgcttcttgttgccgacggcgccgccttgggcacctccacgggcaccaccctcagtatgtcctcgcgccccggcctgggcgcctccacgcgccttgcgcggcttgccgcgtttgcggcctcgtgtcgaggactcctccttcttatcaccctggcaggcctcccactgctcccgagtgagatgtagcttcccgccgatggtgataggcccagagagggcctgtgcttcgtcgccgtcgacgaccttgagacgaccaatcgcttcttcgatcgtcatcgtggagaggtctattagagacttgattgagcgagcgatctgcttgtacttctcggggatgcaacgaaagagcttctcgacggctctctcctcatcgtaggtgtcgtcgccgaactgcaccatcttctgcaacagggtgttgaggcgaagagcaaagtcatcaacatcctcacctggcttgaaggccaagttctcccactccttgcgaagtgtctgcagcgtggtctttcgggcacggtcgctaccgatgcgggtcgcagcgatggcgtcccaggcttccttggcagtccgcttctgggaaagcgaaaactgcagcaatgagggcatctagcgcccgtcgatcctcgtagtagtcgacatcgccgtaccgaactgcttcccacatgtggc

SEQ ID NO: 17692 - DNA, 1745 bp, Zea Mays
tttgccctctattaagatgttatgccaacactgatgtagttaaaggaagtaagaatcaagaaatagcttgaaagaagatggcatccaggtgaaagaatttggacttacaggaccagggccctccgtagatggaccaccaacaaatgccattatcctagcacctgatccaggaacacaaaccccaaggagattggctgcaacacttaaggcagctccagtgcacctagatgcacgctgatcagctggaacaggccaagggtccttttgtatttcttctataacctacatacaatgaaattatatgatagattattaatattcaacacaaggctatgctatatgaaatagacagtgatatctcctattttaattgtaattaatgtaattggcccttaactgagttcaatacaaactcgcattcagaagcaggcagcagaaatctagagatgctctcagatgaaaggccatctctggtaccagcaatcacgcctgtggtaggcattttcttccccgcaaaaaagcacatttgttccaatatttgctccttggtgacctcctttgttcctttgaatacatatgattttggcaataagccaaaacccaattcatgaacctgaacatgcagatggtacatgctactaaactaaccaatttcatatcaaaaagaacaattatatggagcattagaaagcaaacaatgggcttttacctgcacatacgtcccgaacgtaatgaatccaacaagagaattatctggcaatagctcaacagcttgtgccagtgcagacttcaaataaccaatttcttcttcaatcatgcaagtatctacaacaaaaatgaaaaccggtggaactataggaccagtttcagttgaagatatgtactcgacggtggtgtactgaggaaagagttccgcagggagattattttctgagatcgaagagtagtgttgagggaactggttgcgttgaaagcagaatgaacagacccaaatcttagcaacatagtcaacaatggagaaagggttgaggatggaacgacacatgcgacagcgaagaggtgaatatggaagaacagggatatcagaaattggtttcaaaggtgtgtagatagcggaaacaggaatcacacagttcacagtctcctgttttgtgcctggaataacattccagggcatccttatcccatcttgtagctctaggtcaaggaactcagacatcttcaatacagcagccttgtacaatagttgtaagaggcttccacaagtcagacaaagaaatctggcctgcaaataaactggtcaccatgaataagagaaaaacagtcaaaacagaggcaacacagaaaaccctcggccaattacagttcaatcagctcaagtgcaaggaagaccagcaactctgctctagaggttcaaatccttctacttcaaatgccatcttataacctcaacgcttatagtccacccaggacacaagcaacataataaatttgtggaccacaagccaggagccccggatgcatggggggttttccagctatgacctaagaacagtgggcagtagattttcgtaaaattccttaagcgcaattgtagcgttgcggtctcttggccgtaaaatcagagtttgacgctgtttttatttttttatttttttatttttggctatcccaattctcatatcaccaatttaagttgtagatgtggacattgtaaagattcatttaaaatgttaggcactgcg

SEQ ID NO: 17693 - DNA, 358 bp, Zea Mays
ttcgaggttatgtccctgagcttgtctggctagcgcttcaagagttgagctatttcttcaaccacctttgtgcgaaagagttatctcggaccgtgattgtagacttggaaagattgacactcgtgttactgtgtaagcttgagaagatatttccacctggcttctttaatccgatgcagcatttgattcttcatctcccttatgaggcatgaatgggggcgtgtagggacattggtgctatccaatcgagagatgtctaaagattattcgaaagaaatgtagaaataaatgcaaaatcgaggctacaattgcagaggcatacattcaagaggaggtgtcaaacttcacaacaacttac

SEQ ID NO: 17694 - DNA, 463 bp, Zea Mays
caacttcgtccatggatactccaacctttgggatatttgcatgccatccaagttcgcctctagggaagaacaatggatatgatagtgcatcgtagcatccatggtatgagcggatgcagtggtttgaactgtccttcccatggagcataacactcttgctgaactggcctcgcccttcgctcccttcgatccagacagcggccacctcggaagtgagaggtgtgttatatgtcttctggttcaacgtctggtctaggttcaatgcgatacgatagtcatcaaggttatcaacgtggcccatggtcctaaggtgctccgagtacgggtttccacgtagtatgtcgactatctgtcgaataacctctttgtctttctgttgatgctcttcgcgacacttacggtaccgatgctcgagagtgggatcatcatcataaaagtaaagctcaaggtgtttatgctctgc

SEQ ID NO: 17695 - DNA, 1349 bp, Zea Mays
gcaggctgccggcgagggcaagtgtgcgcgactaccgcgaggacgagtgtgagcgggctgctggcgaggagtgtgtgtcgatagctggcggggacagattcttggatcacatccattggtaagtggtaatctccatccttaacttttccatattctattgattagaactatattcactaggaaatctacttaattcggtttttatctttgatacttgtaatgatccccccattttccaccattttttcacctatattatgaagctgggaagggtacaatccatcttattatttattaaggtacaacatggataaaaggtggatgaatgaacctaggtatatttctgacaatccactataaaccattattttttggtaatcaccttgtaccaacatatcgtatttgtacctaatcttcataggcacacgaaggtctacatagatggggtggctggatttattgagtttgcgtttagcaattctataggtggaaacaaaattctatgtccttgtagaaaatgtgttaattctctatggaaagatgaaaatgaagttcgtgcacacttgatatgtgatggctttcaagagggatacaaaaggtggacttatcatggagaaatagactctatgcctattaatagtcatgactacactgatgcagaggctgtaaacaattcagatgaagatgacatagccaatttggttcaagacttagctggtggtctagatgataaaggagattttgaagtatctgatggtttagatgaaacagatgtagatttagaagccatcaatcagttagcgatagataatacccaagagctatacccagggtgtaagaagttctccaagttgcatttcttaataagaattcttcacttgaaattgcttggagggtggacagataaaagttttgatatgctactagatctactaatggaggctttccctgatggcttggcattgccaaaaaatttcaatgaagcaaagaaagtaattaagtgtctaggactcggatatataaaaattgatgcatgtgaaaatgattgtattttgtttaggaaggagtatgctaagtatgatgcatgtcccacatgtgaaaggtcacgctggaaatcaaaaaggataagtttaaatggaaaacgtgtacacaaggttccatgcaaagttcttcgttattttccaataaaaagaaggtttcagaggttatttctgtcatctaagatagcaagtgacatgaggtggcatgatgaggagcgtatacaagatggattactaaggcatcctgcagattcacctctctggaaggattttgaccaaaagcacccagtgtttgcttctgatagtcgc

SEQ ID NO: 17696 - DNA, 596 bp, Zea Mays
gccgccgttctttgaagccttatcttccacgcatgcccagcccttgttcctgcttccttatctccttcaccgtgcgtcttcttccctggtacacgcgcacatgcttcttatccccggtcatcttgcacctgccctaatcctaagatgaggagggggcctaagcgctcgcctgattggtgaattttggatgatcacaagaacactcgagggtttatagtggtttaggccgctggagcgtaataccctacatccactttccgtaagttgtattcaccgtctcccttgtaacgctgtgtcccctcccttttatagtttaagggaggtacatacaaggatgctgagctccaacatgcgggcccaggagcataatggaaggaatacattatgtgaataattaatgctgacagcacacaaagatctttgctggacactgtgttgcttctctgactggctattgccacgtcttgccgtgtccgcaggtgggtgatggcttgttgtagtagaatacagagtagcctggtacgcctgttgtgcgtagaggcgtataggcggagccgttcagattccctctgccttagtaatgcatgagtaatcaa

SEQ ID NO: 17697 - DNA, 328 bp, Zea Mays
ggcaccttcggcactacagtcgattcttcagcactccaagcggcagaagcagccggttccgccttggcagcggaagatgtctcctcaccaaatttcggcactatggccatttcaatatatctcggcttgtgggtcaaaactttgattttcttgcctttcggcacagcagaaaatggccgaagcggtagctttcctctttcttccctgcttttgcaggggatagtaacaatcaggatacataaaaccaatcgcgtcgaaaactttgtttaatcttttcttgctccgaccctcgaaggctgaggacaaagcatcatcttcggccctggta

SEQ ID NO: 17698 - DNA, 538 bp, Zea Mays
cacgcataaaccgtcggtagaaccctgcaagcccaagggaactctgaatctgcgtaactatcgtcgacgtgggccaggattggatggcctcaatcttgctactgtccaaataaatgccctgcggagtaacaacatagccaagaaacgacacacgtattgtgcagaagttgcatttttccaaattaccaaataagcgggcaacgcacaaagcatcgcaagctgcacgcaaatgttccaaatgttcttccatagacttgctgtaaattagaatatcatcaaaataaacaaccacaaacagtcctatgaaaggccgcaaaagttcattaatcaaatgcataaatgtgctaggggcattagccaatccaaatggcataactaaccattcatacaagccaaattttgttttaaatgtcgttttccattcatctccaagtttcattctaatctggtggtacctgctatgcaaaccaaccttggagaaaataacagcaccactaagctcatcaagcatatcatcaaggcgaggtataggatagcc

SEQ ID NO: 17699 - DNA, 416 bp, Zea Mays
gtcaccgttcgaggctctatatggcaggaagtgcgggactcctctatattaggaccagactagaggaagacagttctttggacctaaacttattcaagaggcagaagaacaagtctgtataatcagggagaacttgagggtagcttagaccaggcaaaagagctacgctgataatagaagaagaccagtcgagtttgaggaaggtgatcatgtgtacctcaaggtgtcaccacttcgtggaatcaggagatttaaagttaagggcaaattgtcccctcgctacattggaccattcttgatctttaggcgagttggggagatggcataacaactcgagttacctgctagtctatcggatgtgcataatgtgttccacgtatctcaactgaagaagtgtctctgtgtccctgaggaac

SEQ ID NO: 17700 - DNA, 849 bp, Zea Mays
tcatgtgtgctggggtccgccgccggggaaaatcccgtctactctcaaattggggggggcgtagcttgtcttggagcttcgtgtgattaccatgaacctgcttgggacctcggcgggtggagattggagcggtggggttgtgaattgctcgccggtaattagctcggcgccaccgtccgcatcgctgcgtggctagcgtcatgcgatcaccgataggaggtaaggagaccttcattgagttctcctaagtcacctctgcgagtaggatgagtcgagggcgtgatatgttcccggggggtcgtgatgggctggtcgccggcatggctatgccatgccctgcagcggcgctgcctcgggatggcaaggggtgatggagagagtgtccactgttggatcgtaatcaacgattgcgatgaatgctagagatgacgtttcaagccattaagtctggggcgttcggtggagatcggatggtgaggattagagagggatataagatgatatggaccgttcgacctaaatggatggacgatattagaagtggcgttcggattcgggcaagtgaatctgagccattgagatctcaaatctgactgcgggatctgaaggctttaggggtattttaaatcactaccgtagatcttagatctaacagctgtggatgcgtaccagatctgaccgatacctcttcggcgtacacttttacataagagaccctaacaaaaattagaataaccctccgtccctctcctattaaaaccagtcgtgggttggtccctgttgttttacaaaaccgaccctaaagtctttagtatctaagcccacaacccatagagtgactaaactgaa

SEQ ID NO: 17701 - DNA, 425 bp, Zea Mays
tcagggcacatctgttcgctcgtttgcatttcaggatgcttgcaggttcttccttcttgaaagtggtgtagcgatgttcgtggcacttctcatcaacatatgcatcatctctatctctggaactgtctgtaactccagcaacgtctcaccagatgactctgcaaaatgcagtgacatcaccttggactcctcgtccttcctcctgagggtattactgattttactgcctggtcactactcactacctctggggctctgttgactaccagagagttttaattaattgccagctcatttttcatttcagaatgtgctaggcaacatcagtgcggttgtgtatggtgtggctctcttggcttgtggaataagctcttccatcactggtacttacgctgggcaatacatcatgcaggtagcgctttttg

SEQ ID NO: 17702 - DNA, 616 bp, Zea Mays
cttgataagcttgaccagaagcggacaattcatcgaaggctatgtggatgacccaagggactctgcctaccgagaacaaagccctttaaatattgtcaacatctatggttgctacctctccgacatggaccacaagggtcctgatgaagacctcatcatgggtgaagtctgtcattcaccagtcgagtgggcgaggcctaggtgagaatcaaaggggcagtagcggagaccatacggaagcattccatacttagagctaaggagagtgcctgagcagtgtgcccaaggtggggccccttatcatctacattaggcccacctgtcggctctaggcacattgttgtcctagcaagggtacataattgggtgcatgtaaaacttggtttatgatattcccaatttatactgttgcgcagaatattcctagaatatagcaggtaaccaagagtaagcatgtacttaaggggtctgccccttggttaccctataaataccccatccagacggggcgaggggatggttgacaatacatttgagagccattgttcctcatatgtcttgttactatcttgttcaattcccacctgtcagaacccaacaaagggttagttgagga

SEQ ID NO: 17703 - DNA, 955 bp, Zea Mays
cgacggcgaaaactgagaagaaactatagtgtttagggcaatccagcgtggtctagttcaatcaatcaagcctacaagcaacatgagacctaagggatgctagaacatccaacagagaggcatgaaccaacctgaggagggctggccacggtgagagactcttgtcggcgcgaaaaacatatttgggggaaaagaaaaattgagaggctatggtgaacgattggaggcaaggactggttcactgggttcgtaacaagtagtcagaacaagccaaggcatcaatttatataggacggccacgaggagggcgaatttggatggggaagtgcgcgcggtgaaaagggggaggagtcaccagagtttgctagcgtggcgttcactggtttacggtctacggcggtcactgccgagtcttcacggcttgcgacgagtggtgagatgacttaaagcgtgtcacaaccgagctagacggcggcacaacggtgacggtcgcgtagccacgtcgccggtgcaagtgggtacagcgatagggcgaaatagtgccccaagttcatctcttgtgcgatatttttcaccctgtgtagttatctgcactccaccgggcatgaatcgcaacggcggcgaggatcacggtgcgggatcaccgacggcggtgcactgaacctggcgatcttcgttaggttactctaccatcgcgaactctcatcagggcgcatgatagagcaagtttgagagcattttactccaaaaaccgttcagcgccaggtcaagcttggtataacaaagttgtttactaaagttagagcttcaactttgccacaatgaccctgaccttatctccactgaattaaccatgaactggttccaaagttaaccaaatgtcactgaactaaggttttcagagctaagtttatctgacaggccagtttcaagtctcctttttttcccattttca

SEQ ID NO: 17704 - DNA, 540 bp, Zea Mays
gcgggagatcgtggagagcacctctacttaagtgaggtgggaatagtgccaagtggtctggctaaatcaaagtgatagagctcttgtgtgagcactatatatggtagagagagacatcttgtgtgatcaccactatccaaaggatcaccgacaatcttaggcttatctatcaatgaaaattaagtggttggcaaaccatccaacctcatgataaaatcgccatgtcaaactatcaccatcttcttgttggcttgtaatttcgctcactagcttgtattttatggcttcagagaaagctttatgatgggtgttatgctccccgcgggagatcatggagagcacctctacttaagtgaggtgggaatagtgctaagtggtctggctaaatcaaagtgatagagctcttgtgtgagcactatatatggtagagagagacatcttgtgtgatcaccactagccaaaggatcaccgacaatcttaggcttatctatcaatgaaaattaagtggttggcaaaccatcaaacctcatgataaaatcg

SEQ ID NO: 17705 - DNA, 540 bp, Zea Mays
tgcgttagatgtggccgcagcggagtcttcgccgcgtgtggagggtgccggggatcttcctagtgcgagtactgagtataggcggcgaagggtggtgttgaaacacagtgtgggtgagttttcgcgaagtggtaggcgccgtcgtatggggatggagcgtggccgtctccgagtagaccgggttagtaaacgagaattgttgtcctcgccgattggggcgagcataggtgagggggatctgcgaaatctttttgagggtgaggaattgaggataatgttgttcaattacagggagatgagtatcatcccgaaggctgagccaatgtaatgtatgatgccctcgccgtgtgtatgtaactgtaatttgtattgtaatgtggcatgttggtcgtatttgcacgcctgtgctgatccggctgcacccgtgggcgacttttgtgcggagtatagattgacgtacttgtgctgttccggcggcacccttagacgacttttgcacggtgtgtctttttaataaaagacttcgattaacgcactttg

SEQ ID NO: 17706 - DNA, 338 bp, Zea Mays
ctcttatcgcttagtgtcgtgcgaaatgtttcgcatttcttcggttgcctcgtcgatcttcttctgtagttcggaaagctgaaacatcttctcttttcgtttttcaacctgctgatggatggcttcgagattgctaatctcatggtccaatcgttgtcttagggggttgggctgacaactttccttttctggcttcgtgcttctctcaaaagagttccatcttggttaggatccaagggcgcaaggacgggaccaggcactgtcgtctttttgggtggcatgacgaagtaggttgtggtcgtaaatgagttcgccagaggtggatgccaatgttggtc

SEQ ID NO: 17707 - DNA, 1192 bp, Zea Mays
gtcagatctcaagctaatgactcatattaaatctgagactacacgctgaaccgacaagctcatcaggccgcaagatatgcgatcaacagcccgcgatcagcctagatccctttaagttagcttcaatccccctccacacgatcttgatcgaacgggtccggccaaccctcccaaccggtatgagcttgatgtaaacctagccactagcgcacgatcggatggtgcacctacgtcttcaccacccgactggccaggacggcggcgctgccattctcacccgacggagcatcaccggcgaggcccccttatgcgtcccgatgcccgattcccaataccgataggtcccaaacgaggcttaagctatcgcaaattgatttaatgtgttgcttaccagttatagtggttggagcagagcagcccacgtgaaccgacggcttcgcagcggatccgtggctccgacgagtaattgagccctccccggccaccgaaccctcccgagctctcgacccgcgctaagctattcttccggttctgcccttactgtaccggtgaggttgcagatcgctaagcacaggcgcgatggtgatatgttttctcacgacggttaccaacctcaccccagcactctcctctaccttgcctaagacctaatgaagtggtagcatggcacggtgatacttataccccggaggtcgagcacgaaccacccgcgagatcctcgggtgcgcggcaatggcagccatggttttttttgtcgccggattccattgcgaggaagaagctgactgtgggggtcccacacgtcatcgactcaggttgaaagagggacacatagattggctgacacccccgacccacatgtcagtgctaggtttgagcggcttgggacgggtcccactggtcggtcacaaccggatcgcgggtgtgccatgtatcggctgacatgcgaggcccgcgtgtcggcgcttccatccctgtggggatgctggatcggtgggcgaagaggtggaggtgggccgggtagcagcccacacgagtgagcgacggaaaacagaattgggctatggaggaaggttttggcccaggtacagggaagtccttctgtctttattattattaggtccttttcgatttccaatttaaaatacttgttttgaatttcgaattcccaatctcaattttataatccaaa

SEQ ID NO: 17708 - DNA, 1242 bp, Zea Mays
agacgaccgaacagaaagacaaacgcagggtgtagagtggtccctgccctattgcatctggtgatcacgttctgcgtagatacatccttcacagaaacaccccacgggtcaaactccatagagcaccagttgtcagtagtaaaacgacgaacaaacaaaaggtttcgaataatatcaggtgtaacaagaatatgattgaggtgaaacaggctatgaagcaccgtatcatcgattgaggtgaccagaaggacaaccctgttaccaataatgatggatgaaggtgaagttaattagaaggacgagaatcagtcaagttactagcattcagagtagtatggttggaggcccccgagtctgctacccagtcagtgaccataggaggggtcaaggtcgtagtgcttaagaagttggccaaggactgttgatcccagcccaagttccccaccatggcgtccaagaacggggcatcgcttgatgctattgttgtggcgggtattgtggcgctgggtgggtcgggataggcgacccaccaagaggaccgaagaaccccgaggcagccatcagggcatgttgagggcgcacctgctgctgtagaggtggtcgcggcccgggccacatggtgatcgtgccaatccacaggttgtagaacgatggctatggggtgttgctgttgaaggtggagtgggtgttgccacctctgcccttgcccttccctttccctttgttattgccgcttgtagggggtaggatgacgggggcatgggcctagagggaggtgcagaaagtgcagcatgctgttactgcagcagttgctgttgtgggtggcctatggtggagtagaaggtcattgccgagtctggatcggacgtagcctccatgtcaagttcctcaagttcgaggtcgttgcgaacgacgtggaacgatgggaacggtgattgacgcttgatcagtgccttcatgtgatcaaaccgcttgttccgcccacgtagcatggtgagaacaaggtgacggtctggctggcagttcctcgccaaaggaacgaagttcgtttgccatagccttcatcttacgacaatgctcgttgatactgagggcaccctgtttgaaagcacgaaagcgttcatcaagtttgaggacgcaagaccatcgattaccgaggaactcgacttcgatcgactgccacgcatggtaggctgtctctaagggcttgtggactcgctcctggagttcgatggagagggt

SEQ ID NO: 17709 - DNA, 721 bp, Zea Mays
caacatcatcaagacaaccctagaggcactcctagctaatgaccaacagccctttgatgacctcgtgagacgcaaggaggaagaggtgctgcgacaactcacagaatggcgcgagaaggcgaaggaaaaatacctatcatacttcacagtggaacgccaccagaagatcatccatcaagggaagatcaatatggaatctctcctacctttgtctcatgctcctattgtaagtattccagatccatcttttaaggctttcatagaaaaacatgaggatcagttaaaacaatagatagatgaatctattaaaggatggacacgttcgtatgaaaaatctactacacctagttttccctcacctaaacctaatgtggagccaaccgcacctaacatattggttgcaaatgggtcatcttatacccagccattttatggtatgccgataaatatgtttatagcaccaccacaaccatcgttgcctagcacgtgaccggatattgacacagtcagaccgtccgagcgtcaactcagactgtctgactacatcatggaacgtccagcatattttgtcggatcgtccgaccctacataggcctgcacacagatcacttaggtaacaccatatacagatgaactgtccaggtataacctcggaccatccgacctcttacgccagaccatgcaggtacgtgtacgcagaacaccagatgcacaatatgca

SEQ ID NO: 17710 - DNA, 947 bp, Zea Mays
atcgcggtgctagctttcctttcacttggaaccttctgacaccacgcatcggggagaccttgaggtagacgaagtctccttcctcaaatctgagttctcttcgcctgttgtccgtataactcttctaccgactctgagcttcaagtaatcttctgcggatcagggcaactttctcctcagcctctttaacaaaggcaggtccttctagtgccttttcccctacgttggaccacatgagaggggtctagcattttcgtccatacaatgcttcgaacggtgacatcttgatgctggcctgatggctgttgttatacgagaactccgcgtaaggcaaactggattcccaacttctatcgaatgttaacacacaggctcttaatagatcttcgaggaccttgttgaccctttctgtctgcccatctgtctgagggtgataggcgatgctgaagtctagcttggtgcccatagctttctgaaggcttgtccagaatttggaggtgaactgggttcctctgtctgacactatctttcttggaatgccatggagcctgactatctctttgagataaattcgggcaagggtggctcctccaaaggtagttttcatgggaatgaaatgggctaccttggtaaggcggtctattattacccagatagagtcattccctttttgtgtccggggtagtccggttacaaaatccatgcctatttcttcccacttccattcaggcactgggaggggttgcaataggtctgcaggcttttggtgctcggccttcgttcgttggcaggtgtcgcaacgggtcacatactgtgctatctctttcttcatccctctccaccagtatctggttttgaggtctaggtacatcttggtagtccttgggtggatggagtaggctgagttgtgagcttcctcgagcaggacttctcgtgtctcccctttt

SEQ ID NO: 17711 - DNA, 409 bp, Zea Mays
caatctctcgactccgaagaccgctctccaaggtcgacaaggcacgagacgctactcaggataactctaatcccacctctgggatgtcagaacaaacgtccatcatatcaccatcagctggctcggacagcatatcttcaggaacgacatcttcgagagcctgatcaaaatttgctatggatagttcttgcagaccaacgagagcagacaaagctggagaaggaatatcgctactccccccactgactctgtaacgccggctgttctttcgaactaaggtgacttcctcttcttcttcctcgtcctcatcaacaacacggacaatatacggcaccgggccacacccattgggatcaactctgacaggatcacacccattgggttcagcactggcagggtcatactcatt

SEQ ID NO: 17712 - DNA, 443 bp, Zea Mays
attttttgtcgggacctcaaatgtgtgagtatagcgttccacaagaaagttttacccgtcccaccttgtccacatacgaaaaatatgcccggtgagcaggagagcgcagattcagtcagcttttcgaaaatgaactgttggtcagcattcaactgcgagacaacagcgacagtatggtcacacaatagcaatggttcaggcctcagttcatcgtttatcagtcggttgccaaacacttcatcaccacaggccgataagattggcaggtcataatcagctatgttggcaccactgttagcaaacgtgtctgctagtttcctcgaaagcaacgtaaggagttgttcatgtggagttgtgtagtgtgggttgccaagggcttctctaagtccacggtgtatgtcatcggtgaagtagatccaatatttgtcaaacaaagcacgaac

SEQ ID NO: 17713 - DNA, 514 bp, Zea Mays
aggagcttctcgagatcgcatcaagtcacgcgtcggaagaagatgcggtgggagtgattttggaccactacaaacagaaggccaaacatgacatggagcccgaggggtgcttcggcggctagctcgacaaaagaaggaagaaagaccggtggtggcttgctgaagtactagtgcctgcggtgagccagaatgaaaggaggccccaaccgatcatgccaccgaccatttagaaaagctctttaaggccccatgcccgaaccatcgctacccggtctgacatgcctacaaggattctgggttgttgaggaaattcctaaggaaggaggcaccgctaggtaaaaagaaccaagccccagaaggacaaaaagcagaagaagaggggcctcgtgtttcccggcgaaactgacagcctactgatctttgggggtatgactactacgcttcaaagagacaccggaaacttgaacgacgtgaggtatttaatgtctagaaagtggtcccagccttccttgac

SEQ ID NO: 17714 - DNA, 602 bp, Zea Mays
gacgacagacatatcggggcgagctgtatccacaaaacctgagggctgggagcagtaaactgtctcggagagggtaccgtgcaagaaggcgttcttgacgtcgagctagttaactgaccagtggcgagagagggcgatgttgaggaccgtgcggatggtgacaggcttcacgatcggactgaaagtctcatcaaaatcaacctcgggctattgggtgaagccgcgaaggacccaacaagctttgtagcgatcaagagtaccatcagaatgtagcttgtggcggaaaatccacttcccagtgacgacgttggtattcggagggcgcgggatgagtgaccaggtatgattgtcgatgagggcctggtactcgtcctccatcgcgtgcctccaatgtggatcatcaagggcacgtcgataagaggtgggtatgggggagacaacaaccgcttgaaggtttaggcgaggttgccgaaacccactcttagcccgagtgcgcatgccatgaaggttgttgactggcgcagcaggtagagcgccaacagggagacgagtatcgacgtcgagtgcccgaggcacacgggcagagcgctggccagccccgg

SEQ ID NO: 17715 - DNA, 821 bp, Zea Mays
ggagaagtcaagaagggtcgtgagcgcatgtggaagcttctgcaaccctcaattcgacgataagagagctggggcaccgcgaattgctcaccggagtaatttgcaccgccgcataccacacctcgccgtggccaacatcaaccagatggcaatccacggtaagaagtactccaccctgctcgcctctctcccctctgtctattgcactagggaatcggggtctgtggcgagtaaaacgcggggtcctgccatgggcgttgtcgcggaggactctgcaccgccgcgtcgccgctccatgccgcgggccgacctcaccatagcgcctcagccggtaaaacttggctcattaattcaccttcgcctccgcattgttttgcgtgtatccaatcgggggttaactcactgatcgacgatcggggcgtcggcgggggaggggatctccaccgtgggccgcggctcggtgttcacggagtcggggggaggaagagaactccatggccgttgatctttgcgtggacgggcaagatcaaaacccgcgtaccgttttggtgtgggggtgcatctggccgttgatccgtgatccggtggtcgtggtcggttatgtgttatgatgtgatctagagcgttggcgctagatcggacggtccgagttgcatacccgttcggattaatatggatctaatcctggccacagaacttagatcgtgtggctcggattatcccataccccttcgccaaggcaaactttctaaagagcccctcggttttcacataattaacccgccgtccagtctgactgtgcgctgtgtcttagaaaattt

SEQ ID NO: 17716 - DNA, 1313 bp, Zea Mays
gagagatatgttctgagttgtcacctgtaatcaacatatcatccacatataatagaagtaaagtgcgcccttttggagagacatgaacaaacaatgcaggatcatgttcactagaagagaaaccagcagctgtgatgatagagatgaatcgctcaaaccaagcacgaggagcttgtttcagcccatacaatgcgcgacggagacgacaaacgtgccctgagggagtatcaacccccggaggaggatgcatataaacttcttcacgtagatcaccattgagaaaagcattcttgacatccatctaggagatagtccaagaagatgaggctgcaactgcaatcaaggttcgaacagtagtcatatgtgcaacaggtgcaaaagtctcatcataatcaagtccttgagtctgttgaaaaccacgagccacaagacgagctttatacctctcaatggaaccatctgattttgtcttaattttgaagacccatttgcatgtgataggaacaacatgcgagggtaaaggaacgatatcccatgtaccagtgcgttcaagagcagccaattcatcaatcatagctagctgccactcaagaatcccagaagcttcctggtaagtagtgggttcaacaattgccacaccagctcgtgggaaaccatagcgatctggaggttcaatggtatcatgatcacgaagacgatatccctgattaaaaacatcgttagactcataattgttagtacaagaatcaggtacaggatcactatcaggaccagccgcaggaatagaccgggaacgacgaatgtaggtttggaacagtaagtagaggatgacgtggaggtggaaggtggtgttatggaaatgagaacatcagatgtggatgtagaagatgatggttcaacgataggaatggaaggaagacacatgaagtagattatgtgggataatatgaggagtgagtagattggttgtgaaagaagggacaattttcattgaaactctcatctctagaaattcgaatatgacgagtagatggatcataacaactatatcctgtgttcaggactgtatccaaggaatagacactctacagattgagcaatcaatttagtccgctcacgaggtggtaacaagacataacatatacatccaaacacacgaagatgatcatatcatagagaagtcccaaaaagaacttcacccgatgatttgtcagaaagtttagatgatggttgtctattaatgagatacacggcaatggaaacaacttcactccaaaagtgtgaaggaacaaaagaagataacaaaagagtac

SEQ ID NO: 17717 - DNA, 566 bp, Zea Mays
ttcgtcaggaatcgctcaccgaagttatagcgtgccacgaagctctcactcgccgcggccgggtacttggacagcagactgcatcgcgcaggggcggatatgaagcaggtgtgcgggagcataggtttagggcttatatgccctcggggggagccttggggccgtgttgggagccgctggccatggcctccgccacggtcgtgctcacgcgccaccggtcagccatggagagagagagaaaaggaaataggagggcgtaggggggaagaagggtacggaccgtctgatgggtcttgggcggcctagattggatttggtcgcgcgacgtctgtagccgtaggatcgctggcttacggtcccgatctgatccagtgtaccccttcacccagcggaattagaaccgtagatctcggatccagtggctacgattagatcttggtacttaaaatttacatcgttagatccaaatccgagggccagggctgcgtgccggttcagagttgtaaaaatctaatctggaccgtatccttttaatccaacggctctggttgttccttacctcttcg

SEQ ID NO: 17718 - DNA, 410 bp, Zea Mays
gttacactaaaaaacatattagtcacgttttttaggacctccggaagaggaaggcccccaacacctgcgttgtgcaagcataggcagatccctttataatcttcccctctgcaacaggcgctgaggcaggagttgacaccttcactgattctataacagcgtccaatacactgaccatcctccttctctttggagttactacaacaatcttttgtaggtttggcagttcagcttcttgtaatgaactcacgactttcgattattccgctgctatattcacttttggctctttggccgattccaccctagctttggcagtagcggggtgagactcaacagcagaggatccttcagcaggcctcggctcttccgctgtttcagtgcgcttaggacgatgcgtcaaaacttta

SEQ ID NO: 17719 - DNA, 663 bp, Zea Mays
tttagagatgcgtcgtgggaggaagactgaatatcttgaaatccctctcaaagacagtatcaagggatggcacttggagtggtttattgttgagaatcattgaaattctctccccctaggtcgggaagacagccggatgttcgcactccaagttggaccgaatcccccactgatcaggaggtgactgaggcaggggttctgctagctgaagttggactactgaaggagaggggtctgactgcagaggctgtggttgctgattttgtttttaagaacattcagccgttgaaggacagggctcacccggcttatctgtaccgaggcctagctgactcaactcgggttaccaacagaagaattccctcccgtagactcggcctggaacctgcctccttccaaagctttcactcattttgtttcaaatccacctgctgctgatggcaatttgggccttagagtgcgaccctctgctgaagaagttaacgccttggttgcctcgctcggggaaattcctgatgatgagtggcaagtccactttgaggtacctttggatcctagtgacgcagaaataagtgctatgcttgatttgctggctgaggactcttctgatgctgctcctgctggggcgttggtggtggcacctcccccagaaactgatataac

SEQ ID NO: 17720 - DNA, 574 bp, Zea Mays
tagtaaaatcacatagccttgtgaaagaatcccaggaaatggaatagcacattgacactgtacatcccagttctagtcattgctaggcagatcactaagggtcaaagagatatataggatgctaaataaattaacgttgctaactcaaaacaatagaagcctacagcggggattgcagccccaccctggtgcggattagctcaaagaaaaaacactaaacccagatggctaggtgtggcttaccagacttcaactgagcatacttatatacatgaagaaattaatcctagaagcatcaggatgaacggaatctcacatcaggctttagcactccaccacattgatggcagctaggaatttcaaaatcttgctcccagaacttctcatcaatctcaacatcaccatcaggtcgttgctgcattccaaagcttttgcctgaacctggttgtcctacttccaaactatcgatagcttgagcccactgcagaaacagtaatcgtccgttgtcaggggctacagaatgatcggtttaaatcaaaaaaagaataagcattacaccactttaaaatttgag

SEQ ID NO: 17721 - DNA, 466 bp, Zea Mays
aaactgggtcttgcttagctggctattggtggagggtgccttggaggcgggtgctaaaacattcctagggccattcagcgagttggagtaggtaggtactgatgtcttcaactgaggacaattattcttgtagtgactgtggtctccacagtgccaacaagcattggttggaggttggctgcttgcaacagatggggtgtggagagaactttgaccaggctggttgaaacgtgatggagcagaccctgttggcttactgaagtttgcccctttgggagggaacccaaaagattgaactctctggtgcctgtcctgctgctgagctcgaagaacttgaaacttcctcttgaggtggcctttttcttcttctcgtgccctttccacctggatggctttattcgagaggtgcgagaagctgaggaagtcttggctggcgaggatggtcttgagttcatgtctcaatccc

SEQ ID NO: 17722 - DNA, 624 bp, Zea Mays
ttcatatttcatatacttatgactatgtgattaatacgtgctcacctcttctgtcatttcagtgatcttgcctgctcgcttgcacgtctcatgtcctacctggatcttttctctctcgagaagtttccaggtagctatcactctatttgaggccttatctactgctctctactctcgcttatcttttcactctatcttgcagcagtcagttcaggatggtgaggacgaagaacagcacaccatcagggggagaagatgacgaggatcctcctcgtcccttcaaacatgtcaagggcaagattgtctatcttgagcagcaagagggcagaaagaagaggcacttggatagagccgcacatgcagcacttgcagcggcaacaacaacaaattagcctgagaaaggaggctagctccagatttcttctgatcaaattacctatcgagttcgtcgcctcgcgtctcggcctcactccactactcccccactccttccgccatagtctccactccacctcccactttgccagctcccgtcgctcatgagccgtccaccacacccgctttgtccaccacctccaccactccagcttccactgcccccgctcctgcttctgctccgcctat

SEQ ID NO: 17723 - DNA, 401 bp, Zea Mays
gtttatttcaaaaagaatcgtttgatcagagatggatggtagagatcagatggctgaccccagccgattttcctgaccaccagaggcggcgatgcccgtgttcgtgacatggagttcactagagtcgagggtcatgggcgctctaggggtcctagggcgacatggatggctcgacaaagttagggggagtgtggagaacacgaaggcggggattaaatcagggcaggggcaccggagggtggtggctcgacgatggcgccacctatatccggtgaggaatcacgcgcaacagagagcaaggcagggaaaaggagagggtgggggaggtttgttacctcaagggggacctcaaggacctcttgactgcagcaggggcacgacggtggctcggatcgatgatg

SEQ ID NO: 17724 - DNA, 449 bp, Zea Mays
ggaaactccgcagtctagcagaacatgggtcataccttcacaaccagattcagctcagcaaaatcacgcccagtcacaagtacataatatcgcaaatcagcagcagacaggagaaaacaccccacgtcatcacgactaccctccacagcaagggcacaacagcaatgcaaccaaaggcagaggtagaggtcggggtcagcagcagcgaagattctattgtcttttccatggtgaatactttgcacacacgaccagggactaccccgagactaaagcaagaaagggccgaatggctagaaccccatcgactgacaaccaaagagtcgtcgcccatacctaccatccacatcaatacaaccaacatcaattccaaaatgaacatttttatcctcaacagcaaaaccacaacatatttccgcaaacaacaacgccttcaacaccaagaaatc

SEQ ID NO: 17725 - DNA, 925 bp, Zea Mays
acacccatgttgttgtgtaagcttgagaagatatttccacccggcttcttcaatccaatgcagcatttgattcttcatctcccatatgaggcacgaatggggggccgtgcagggacgttggtgatatccaatcgagagatgtctaaatactattcgaaagaaatgtagaaataaatgcaaaatcgaggcttccattgcagaagcatacattctaaaggaggtgtcaaactttgcaacaacttactatggtgacaaactgccgagcgtgcataatccaccgcctcattacaataatggcggcaatgaatcgaacctcatattttgaggccaactcggaagcgcaagtggttcgaccaccaagaccctgagacatgaagagtggtgccatatcatactatatatattgaccaaccttgaagaggtgacgccatacatggaacaatttcttcatgaattctggcatcgatcaagggacccaactccacaggaatatgatacccttcttataaagggagcgggaaatggattgcccgatttcatttcctggttcaaacataaggtacatgcttagtttgtcaaagagatccgtctatgaactcaatttagcgtcttttaacttgtgaatgcttgcagggccacagagatctgtctatgtgtcccgagttgagacaagtagccaatggctttgcttatagggtcaagaaatattctgggtatgacatcaatggacaccgttttcgcacaacaagctacgacaaaagtcagcccaatcgaaaacaacgtgttctggagtctttacgcccgaccttgatgaggttgattattttggacgaatcgaagaaatatatgaactcaattttcatggttccaaacctcttactccagtgatattcaaatgtcattggtttgaccctcaagtgacgag

SEQ ID NO: 17726 - DNA, 408 bp, Zea Mays
ccaccacttcatctttttcgggcttcggggtaacttcctctcccccgaagcgaattagctccttcttgtcttcgctgaaatagcctagcttcaataacttagccatatcacctttggtaatagtagacttcccaaactctaagtggctgggtttagatggcattgcaccatactcatcttcaatttcatcttcttcaacgtcagcttgtgttgcttcggcagcaggtgtgtcctctgatgaaaccagccctaaacgcctcattgcttcggaaattggaacagtttcagtggcttcggtctcatctccatcacactcaaccctggcagtggagcgcactctagccatttgattatgaatttctagaagttttttgaaattaacgaccttttttccgaagctcttcttgt

SEQ ID NO: 17727 - DNA, 412 bp, Zea Mays
cttgtcactactgcctccccttcgcgacatttgtaacattcctacatcgtccttcatcttccctctgtcaatgtccctatttgacaatgagcattgcgttgaggaggaagcgtgccgtgccgacgtagagacacatcatcttgtcgaggaggcaacacaccgcatcgccatgagaaggtggcttgagcctcgcccttgcacagaccatgaccatcctttatcaacaatccatcgacatctagaacatcaaggtcctcatgctaaccacttttgactttggttatacaaactacactcgttggcggggcctcttcctcatcgtactttccaagtgcccttgacgaccatgtcctctctgatatggtctatgctgacgatgtcaagtggtatcacatggacaccatagtcaagc

SEQ ID NO: 17728 - DNA, 296 bp, Zea Mays
ctcctctcctgtaattctggatctcaaagggccactgttgtcggatgagactggacttctgaagcactagttgctggcatttacatgcccttcctgagcacctccacctcccattcctgcaacaagctcaagcttcctcatcaacaaagaactctacagagttgtctgcgtctccccctgagtctacgctccagttccactccgcggcttcctcaagtcaaagactgaatcatgacgaactattactgtcaggatcatacagtcgatgtgcttgtcccccttctttatgaaaccag

SEQ ID NO: 17729 - DNA, 506 bp, Zea Mays
tgtgcatcgactacaccagccttaataaagcttgtcccaaggacccgtatccacttccacgtatagatcaaatcgtggattctacctccgggtgcgacctcttgtccttcttagatgcttactctggtttccatcaaatctagatgtctagggaagataggaagcataccgcttttgtaacagtggatgggctttactgctatgtcgtaatgccttacggtctgaaaaacgccttgccgacatttgtgcgggcgatgagtaagactttcgaggacctgattagggatagagtagaggtatacgtcgatgacattgtggtcaagactaagagagggtcgaccctagtggaagacttaaccctggtcttcgacaagctgcgggcaacacgcacgaagctgaacccgaataagtgcgtctttggtgtctccgcaggaaagttgctggggttcctggtttcgcaccgaggcattgaagcaaacccggagaagatcaaagtgtcggtgttt

SEQ ID NO: 17730 - DNA, 558 bp, Zea Mays
gttggtgcagctctacgtccaaccgacgcgatgacagttctatgcggtgcgctgatgaacctcggcccctaagcctgggcacgagctggtgcgacttgcatcatagtcacctgaggtttgggcatgatcatcaccggagttgccttgtgcctcgatagaggcttcttcctaggcaaggtggtggcacgggacccctaggcctcgttccttgcatctgctatgcagtgcaatgcaccattacagtctatgatgcaggagagggatccgaagtggaagacctctctggtggtgaagtggatggtggtgttgaaggtgatggccatggatttgtcttgaatcgacatcgcagcccttacctggcacgacagctgtcggtgtttggtaccgatgacacactatggggtatcacgcgtagtgtttttgggaggacagcgaggtcaactgtagctcgacggttcatgctaagcatgacgggaggcagaggattatacaggttcagaccgcttgagtgtgtaacaccccacttcgtatgaacttgtggaggtgtactgctttgat

SEQ ID NO: 17731 - DNA, 705 bp, Zea Mays
caagctctggttgaattgctgctatagccttttcaacaaaagcagcagagtctagagtagcagaagctgctgaaccagcaccaggagcaccacctgatgcggccgatgattctacattattcataataacttccacttgtgcacggccagcaacaaactctgtatagggcagcaggccagcaacacagcattggttgaattgggggagcaggagggacaacaggaagtcagcaaccatccactacatgcagtacaaagaagggagagaagtggagggagcaggagagaccttcagatgatgtgctcatctcgccactggtttgcagccacagccgctgcaggactccaggagaatgggcagggacgcagggtgctgtgccgctgcccgccggtgtagccgccgcccgccggtgtccaggactgcaggggcagtggcgcagtgcaagagaaggagaggcaggggcggtgcaagagaggagaggagaggacagaggagatgtgcagagagccagtgttggcggctagggtagaataggagaggagaggagacttgcagtcactatagatgggctaaaaaaggcccaataacttaaccctagccaggacgaccagatcacacaagtcgggcgactagtcgccctagtcgaagattagtcggacgaccaggacgactaggttgtctagtcgagtcgtccaccaaaatcg

SEQ ID NO: 17732 - DNA, 403 bp, Zea Mays
agaaggtcgcggtagatagcccctctatcgccggggacttagctcagtgaatgccacattgagcggtctacggtgactcctcccctttcttaccgccagctcttctccgcccaaattcatcgtactcgcgatcgctctctataaattgatgccctagtgagctccactaggttataacgcgctcagtacaccagtcctcacctccgatcatccaccaccgtgccccaatttgggatttcccccaaatcggttctccaccctaccgtgagccaccgtgccgtggaccaccgtctccaggtccgctcttgccctccttaccctcgtttcagcacccttgtacgctagggatgcttgtcggcccaaccaattgaactagaccacgctagattgccgggaacacctc

SEQ ID NO: 17733 - DNA, 765 bp, Zea Mays
tcgcccaagggtgcagccggaatagcacaacaagtgtgttaatcaaagtcttttattaaaaagacactccgcgcaaaagtcacctaagggtgcagccagagcagcacaacaagtgtgtcaatcaaagtcttttattaaagacgatccgtgcaaaagacgcccaagggtgcagccggaataccacaacaagtgcgttaatcgaagtcttttattgaaaagacactccgcgcaaaagacacccaagggtgcagccggacagacacaataaaatacaccatcaaagtctttctctgaaaaaacactacgtgccaaaatcacctaagggtgccgccggacaagtgcagcaagtacgtcaatctacactccgcgcaaaagtcgcccacgggtgcagcggaatcagcacaggcgtgcgaaaacggccaacaggccacattacaatacaagttacaattacatacacacgacgagggcaccatatactacattggctcaaccttcgggatgatacccatctccctataattgaacaacattatcctcaattcctcaccctcaaaaagatttcgcaggccccctcacctatgctcgccccaatcggcgaggacaacaattctcatttaccaatccggtctactcgaagacggccacgctccatccccatacgacggtgcctaccacttcacgaaacctcacccacactgtgtttcgacaccacccttcgccgcctatacttagtactcccactaggaagatcagccgcctcgc

SEQ ID NO: 17734 - DNA, 371 bp, Zea Mays
gtggctaatcggaggcgagggctggtgcactgggcgcgtaacatcctaatggagcaggctggggcatcaatttatagtgatcatcagcggtggcgtccaatttggggaagatgcgctggcgaccggaaagagggggaggtcaccggcgagcgctaacgtggctttcactgaggcactgtcacaggcgatggataggctacttataacaatctactgcaacgtggtaacatcgttgattgcgtggcgttcgggcggccaagcggcaaactccagtgaggatcattttagccggccgcagagcaagtgggtacggtggccagtacacgatctcatccacggtgaagatattttcaccctgagtcattatccgc

SEQ ID NO: 17735 - DNA, 602 bp, Zea Mays
cggcctcgtcgtcaggtgtgggagtccatacgtcaaccagcctcatggaaggagggggttcaaaaaggtctaactccccacccagcgcgtgtcccgcaacgtgggagggtccggcttccgcctcagcagggtgcgcaggtgcactagggtgtaattgcgaatacaatacatggacttcctcatgtaacgtattgcaatagacctacaggtcgtcgacagttgagctaagttccttaattcgggcctgagcccttgcttccttagcacaagccaacaaacgggattgtactgcccagtcgagtgctaagtcccgatcagcaagctgatcccgcaggtgacggatgtcccttcttagttcatttattctatctccatccgcaacccaagcgttggtcctgtgttgcaactccgcttgaagtcggcttactcgggcttcaagatctcctattgggtcattactcccgctgctactgttctcatgtcgaggggccagttgatgccggggcacaccgattggtctagttgacttgcgcgtcgttagccttgtgcgtggcggcatctttctaagggggaaaactttattagtataattcttagcatga

SEQ ID NO: 17736 - DNA, 552 bp, Zea Mays
gtcgggcaaggcgagcagcatcccagccctcaagtcgacgtaggagtccgcaaggcaaggaaggcagcaccctagccccccaaatcagtgaaggagtcggcgaggcgagaagcaaccaagccctcgagtcgatgaagaagcgagtcagcaaggcgggtagcaacccagctccccgagtcggcaaaggagttggcgaggcaaaaagcagctcaaccccaccccgagtcggcgaaggagtcagcgagactcagcgatggcgtagcctctatgcagtcaacgagtcagcaaggcgacgcagcttcggagctgcctctaagttggtggagaagtaggtgaggttgacagcagcccaatgccttgagtcgatggagttagcgaggtgaacaggagatcaacccccgagtcgatgaagaagcaagtcggcaaggcatgtagcagcccaacccccgagtcggcgaaggagtcggtgaggtgagcaatgactcaaccccctgagtcaacgagactcatcggtgacgcagcccttgagtagtcgacgagttggcaaggcgg

SEQ ID NO: 17737 - DNA, 557 bp, Zea Mays
gttgaacccaatggatgcgaccgtgctgaagttgatctcaatgggtgtgactgtgctgaagttgatcctaatgggtgtgaccatgcaccgacttttgtctgtatatttgatggagatgaagaagaagaagaagaagtcccgctgattcgtaagaatagccggtattacagaggtagtgaggggggagtgatatttcttctccagctctgtcagctctagtcagccttcaggaactgtcaatatcagattttgatcaggcccttgaggaggtcgtccctgaggatatgccattagggccaactgctgatgatgtgatggttgtttgttccgaaattccagacgtgggattggaggtatcccgggcagtgtcttgcgcatcatcgactttggagggcagtcttccaagccgagacattggtccgagttgcctgactcccatggaggtgacaggggagcctttagccttagaggcggctgctatggaaaacccagcccccagggtggtgttggcagttacccagcccccgagggtgtctccggtagtgattcggctctgg

SEQ ID NO: 17738 - DNA, 615 bp, Zea Mays
gcagccatatgtctgtctgtcgcccatgacggagtcacgatggctgcaatccacagccaccaaacgccgcctagctccacctgaagaagttcgccgccgcctagagagctggcgcgacaaactggattgaagaaaaccagaggcaccttgtgtcgaacagctgagatgcaacaagtctaccgccgccacacgccaccggaattccaatcactgtcgccaacaccaccaagtcgaacgcccgccggagatcgacgaacgttgatgacacgatgccgacgccgagagtcgttggaggagagagagaaaaatcatgcccaaaaccctagtcgtcgaagcaggaacaccgttaaggaagaacgcgacccgctccgtgcgacaccaaggatcaaaaggctttgataccaactgtcacgcctcgtggccgccggtggtgaagaccgggacgtgaggagatcgagaatcacctggaccattcctccatgagaaagacgacgagaacgagtctttggtttctgattttctccctctttccacccgcccgctggtgcccttgttgttcacgggtttggtttgttcttggcccaatgggttgtcttctgatgggcccaataaaat

SEQ ID NO: 17739 - DNA, 580 bp, Zea Mays
gccaggtcatatatcggaattctcaagtccactatctacctcacaataagcaaatacgacgacggtgaggtctatatgtcctttggcgtacccggtggctcctcatcgtcaactgccatgaagatcaaaatggactactcaggaaagatagaaatcctaatctggaacaccaacattttggaatggtacgtcctggaggcacagcctatgaatgaatgcagtacatatggatattgtggtccgtttgggtactgtgataacacagagcttaatgcgacatgcaagtgtctcgacagtttcgagccaataagcaacgaaggcaggagcaatggaagttttacagaaggatgccgccgcaaggagacactaagatgcggcgaagaagatactagtttcttaactttggcggacatgaagattcccgacgagttcgtgcatgtcaagaatagaagcttcgacggatgcacggcggaatgcgctagcaactgctcctgcacaggttacgcttatgccaatttcagcaccacggctttcaccggggatgacacaaggtgcctattatggatgggagatttgattg

SEQ ID NO: 17740 - DNA, 487 bp, Zea Mays
tcacgttcgctggtcacagtctgatgaagctttggccacttgggaagatgaagactccttgcgtgctcggtttccagcagctgccgcttggggtcaagcggcctatcaagggagggggactgtcagcgaccctgttcgtcgttcgactgaagatgaggcagcgcttcaggaatcaaggcagccattgggccgacgggtgcgtaggcccaatgtccgtgtgacagggaaagagtgggccgcctgatgaggcacgcgtgtaataaatactagctgacttgatatttcgcacaggaaggaaatgaacagagttttcccatcttctccagtttcatagtttctatccgttcttcttcctcgcttctatcctttcacggctgcatcagcgacgcgaggctgacatcattcaacgtagaccagaattcatgctagttcgaccattaatcaactctaaaatgatctaatgaaacatatcatggatcagtatcat

SEQ ID NO: 17741 - DNA, 449 bp, Zea Mays
agcaacacatgcaacatagatatacaacaagcacaatgacctggtaaataaataaacaaacaaaaatcaaaatggaatatcaatacaagcccacatagtagaggagtatccaataacttatcccattttttagtaaaagcaaggcactggtactaaagtgctactccagtttatactgaaaatgagtgggtgagaggaggaagagctggtggatcgaagcaacaaatcaggacaagaaccggaagccacgaccctaggtgcttcgggatagatcctgctcttgatgctgtggagaggaggcgttggcggaccctcctcctccgagcttgtggttgatgaaggcctcgagcatgtgtcgcctgtcggtggccttggcacactggggctcaatgttggtgtaggagagcctggcggaggcgatgatgagggtggcactggtgaggaagagg

SEQ ID NO: 17742 - DNA, 638 bp, Zea Mays
cgaggctgagttaacaatgctgcttgatacttgcagtggggagctgaataagcagttaataaatcatatgtgctattacatctgcagttacccatagggatatgtttagagtagccctcagctaatgatatgctgttaagctgtttctttctgctataacggtataaccataggttactgttgtttcttaatttttgaggttcaaagaagtccaatggctgagattatgagggagggagttcgttaacaggaactcgaggtagtgtctttcacttgatgccatttctctccagtgtcttagattttgaactcctacactacaagtatgctatggtaactgaatgtaccttattcgctactccattagagcacaggacaatcatgaaatgtaatgtctccctatcatgtagccagagaaacaaaaatattttagtaattttagttctatataaacacacaacacttaggtgatgattacccacattgaaatgacttaaaaagatcacgaataacttaaatttgttaagtcattcaaaggtgggtgatcatcacctagcgcacgcgcacacagagatatctggatatctgaggatattgcataagaaataattgatgtgtttagtgtagtttacctgcca

SEQ ID NO: 17743 - DNA, 420 bp, Zea Mays
cgacagtggatggcgcgagaggaagaaaggtataaataaaatggcctaagaaattacatctacgtaaatttcacgactcctaggccaagcactgacgcctgtcaaatgttcatcgcgcatggggtgatacgatggcaacgtagactggttgttcttcaacatttctctcggtttttttaagcagcaagtgacgggccggcctgcgggtgcgggatataggaggggggagccgaagtgggctggacgggacggagatcactcacgtgaaagtgggttgggcggggatcaatccatccactacagataatgtgggtggtggatttcgtacgcaggactcactactgcgtgtctgcatcgtgcactttttccttcccgtgctaaacgccaacgttatccgcaagcgttacccctaaattttcc

SEQ ID NO: 17744 - DNA, 599 bp, Zea Mays
taatgtccaaactatctctatcagacgtgtgcaatgcagaccagattcagttgctgtaactatggttcagtgtttttctctagattttggagctcttttgtgtttgcttggtgaggttttggaccacattatctataccaaagcgatagagctataattagagaataattttggttaagaaaggctggtctgttaccatatgaagttgtgagatgtgaggggttaaacatagaggtgtgcaaaggttagtgagtgttgattcagctgattcaagtaatcagtgttggtttgagttgggaagctgaagaaggatcttctctccctgtggttgcacttgtggatatagttgaagatatggatgggatgcacagctaaggttctagaggtctcattctccactaaaaatatcaagtttggttaggagtgtggggtgcctgtcctgtaagttagttgaaacagtgagtcaagtccatctttggagcactataactcctgatccatgggcatttggtcttgggctgctgcaatgaacttgtagagctaggttgggtgagcaaattttgtgagccagggtcagcctgctatcaccaggaattggg

SEQ ID NO: 17745 - DNA, 420 bp, Zea Mays
ccttactccactgtgtgatgtattgagctgagagcttgtatgaacttgtgagtgtctaagtgtgcttgagtctgctttagcctcagttagcttgagttgtaacgttgcgtacctccccttttatagctgaagggggcacgtacaagggtgctgagccccgacacgcgtagtatcagcgtgcagtggaagcttcactggcaacgtacgagtgatgatgagcacagtgtatgccgcagcatgggcatactgtccaccaccaaagtgggcgggcacgccgcctgcaggatggcctggacgccacccatcagtagagaggacagggctcatttaatgctgaggcggcacatcgcttgtcagtggagtagacggggcgtatttaatgctgaggtggcacatcatctgctagtttgacaggcggcg

SEQ ID NO: 17746 - DNA, 599 bp, Zea Mays
gccatatacaactctgctagcttggcccccatgtaattggtcctcataggtatgaagtgagccacttttgtaagtttgtccacaatcacccaaatagagtcataccctgcaggagtgcggggtagaccaacaatgaagtccatgccaatttcttctcatttccactcaggtaccttcagtgggtgaagtaatccagtaggtctctaatgttcagcttttacacccgcactggattgcgggttaattgtaaatactcccacggactctttagtaagactggcgccgcgaaggggtatcactggatctggaccgtctgacctaaaatatgagatccagattagatcagcctaaccctaaggtcacagccgcaggacctctagttgacgccttggatctaacacgtcggaaccgattctcgtgcgccagattctgatcggacgaccccgattccatcgccccgaaccggtattcggattcgattaccaccgcccgatcaagcaccagtgacccagattgttatgcgtgaataggtacgatgaatctaatcgtgaccgctcaagacgaatcggacggtccgcaacccgtcttctcccttcacc

SEQ ID NO: 17747 - DNA, 845 bp, Zea Mays
aagatctaggccgcggtactccttgtacccgagaaaaagacaacgagtggatcagtgtgcaagtttgtgagaagcattggacagagttgttgggatgcaatagcaagcatacccgaagacatgaaggtgatcataggagggacggtgccgaagagggtgaacaacggagtaggatgggggaccgcctttgagggaagacggttggtgaggtaggtggctatgttcagcatcttagcctagtaacagacgggaagagaagcctgaaaaaggaggcaacacaacatgttgttggtggtgaatcatgcgctcgtctggaccattctaaggggaggtgtgaggttacgacatccgcagttgcacaccatgggagagaaagaaggtacgagatgttgagttatcaaactcccgactattatcgcactgaacagcctagatggtgcaaccgaactgagtcaatacacacacaaagaagtgacaaagactggtgatggtgtcagacttacggcgaagggaaagatccaaaatagtgagagaagtcatccagaatgcccagataatacctatgaccggagatgcttagaataggggatgtccaaagatcacagtggatgaggtcggagggacgagtagtgtaggacatggaagaagaaaagggtaagcgagtgtgatacccaaggtgacaagcatagcaaagtgaggcaacattgccatggggacaagggatgacagtgccaagtggagggtagaggcagcagaggcgagggtgtaagttgtggcaacatgggcggaggaaggtggggtggtgaagtgaatggcatatgatgagcagagctgttgcatcaagc

SEQ ID NO: 17748 - DNA, 398 bp, Zea Mays
caaaataaaacaatgaccatggaaaatttagccaaatcgagtgagagaacaatccaaacataggttaaggttgtaaggcacattgggctagtcgatgaagacgtcattgggcaaaattttccatggtctttattttattttgagaaaagatgtagcaaattgatgtgtggtgttttacttgagtggacataaacacaacctagttacgccttgaatagaagggattataggaaacctggtatcacaaaaagttatttgctagcccaataacgtcttcatcctctagttgtactctaataccctctcgtgcgaatacagtgccctcaatatcataaaaacgtcatttgtggtttaaaaggtgatctattgttttgaattctttatattccaacttttta

SEQ ID NO: 17749 - DNA, 521 bp, Zea Mays
gcctggagtcttctcctccacgtagggttatttttgttgctgggtggaaagtagcggaggggtgtctcggagacttctttgttgtagttttggcatagttggcggagggatttttgggtagcattttggcaggtgtctgggaagcggtggccagtagcggtgatctaaaaaggagggtgattttgttagcttcgactttctcctaggttgactgccatagagcacttctcgactccattctcacggtattccttccagacatactctggcttcttgttgatccccatgcgaagcgcacaactccgaagaaaggtgaggaaatccttccacctctgagcaataggatgtcttaaggacaaaggtgccctccatctggtagcaagagaagaagggtcattaatattgggcaaagaagagaagattccttaagaagttaagaggtttttcttttaaagaaatctttttaggttagggctgtggtctacggccagtcctatggctctgataccacctgaagcgtg

SEQ ID NO: 17750 - DNA, 332 bp, Zea Mays
tgctggaaataatagctgaagcgcatacttgagttgttcacctccaggagcaatgaagagaatccctgcacctgctccctgcaacttcaacgagccatcaaagtacattctccatacttcggtagtctccgggttgtctgggacctgatgctcagtccactctgatacgaagtcaaccagtgcttgagtctttattgtcgtgcgaggtcggaactctatgtcgtgagctcccagctcacatgcccacttgactatccttccgatagcttctttgttgtggagaatgtcccctattggaaatcctgtgactactatgactttgtggtcatcaa

SEQ ID NO: 17751 - DNA, 381 bp, Zea Mays
aacgatttgaattgaaaggtcggttaccaaccttgtcctctttttaggtccttgagttgatctttcacccgcatatccttttgactttccttgtcccgcatttttggcttcaactaacagtgttgtgctgatagccctgctatatgtgaggtccagacacgtagccattttgcgttggagtatttcatttagtcccctcatgaagcaatttttctttttcaagtctgtgtccacttgatcgatggtgtattgggagaggtgattaaatttgttgagatactgcatcacagaatctcccgctgcttcagacgtatgaattctcctagcttcatctgtagcacgccttccggaacataatgttccctaaatgccagtttgaac

SEQ ID NO: 17752 - DNA, 1129 bp, Zea Mays
gctaaatcccagaatgtgcaggggctaactcagaagattcaccagactctggtaacagtagaacaaggactgcgggttatttcttttattttccaggggctctttagcaaattggcacggcgaaggggtatctgcgcttcagagccatcggatccaagtcctgcggccatgattagatcctaccgttgaggaatctgtatgtgccagggatcgttggatccaagatctacgggtaaggttctatcagacaaaggggtatccttgattcaatctcagccgcacactgtccatcccacggccgaacggcttcttcatcctccatacgtctttgcctggggccagccgtgcgctgcacagccctgatgtcgaccttccagcaggagcgccaagcatcgcgcgggtgcccgcgatggggagcaagccggccggtgatgccgccgagggggaggagtggaagtccatcagcggcgagagacaccggtatgcgggccaaggcggacgaggagagtagcgaaacggcggtcggatctcactgtcactcagctgcctcgtcttcctccctcaagctctcgattcactgatgctactcgatgagcagggcagggcggttgacaaggaggttattttgccggccatcagaccccacaaatcaccgaccactaccgcagtaaacaaggcacagaatacgcgagtataaaactcccagggagatacgcaccggagatccaagtgatgactggaatgatggccgccggagacgccagatgcggacgacccttcccccggcaagcgctactccaccggcgagcctcacagcggcaatcggcacgagctctctctcacgggtaacagcgcgtttcactctccctccctgatttctctctgcaggcaacgcggtgcatcccgactcgtgggcaactgcggcggcgatgtcatgcgcatggcgatccggggtcttatcccacgacgcggcggactcggtcagtcgttcctcaaatcatgcgtggcggcggagatttcggtcatggccgttgcggaggcgcgggatgacacgcgggtcccagcagcagcggcgtgagtgagatgaatgcgacagacagacgaggtcccatattccagtgaagcagat

SEQ ID NO: 17753 - DNA, 484 bp, Zea Mays
cggcgcgctactctgcctggagatccacgagtgtcttcctcatcgcctccaccgcctgagggcccggggctgtctgtgctgcccgcgtcgcctcgaactggcggacccgctcccctagcttccgctccttctcctctagtgtatgctccttctcctctgcctcgagctcatgatcggccagcagcttatttcgcctctcaaacatttcctccctgaaggcgaggtccttctcctgccaggcgagatccgccgcccgcttatccagggaggcatccttctccttgaggttctcttcggccagagcaaggctgctggccctgtcatcaagcccctgctgcaccctccgcaagttctccacagctgcggcctgctgatcccgctgctcatccagcatcttgttgtaggcattcagcttcgcctggagctctgagatgacctcctccctctggtccaagtgcacccccttcttggccagcctcttctc

SEQ ID NO: 17754 - DNA, 352 bp, Zea Mays
cagctttgtgcaaaagagttatctcgaaccatgattgcagacttggaaagattgacacctgtgttattgtgtaagcttgagaagatatttccacccggcttcttcaatctaatgtaacatttgattcttcatctcccctatgaggcatgaatgggggggcccgtgcagggacgttggtgctatccaatcaagagatgtctaaagactattcaaaagaaatgtagaaataaatgcaaaatcgaggcttccattgcagaggcatacatcatagaggaggtgtcaaacttcacaacaacttactatggtgacaaactgccggcgtgcaaaatccaccccctcgttacaatgatgg

SEQ ID NO: 17755 - DNA, 707 bp, Zea Mays
catttcatttgttcaatcagagaaaccagaatttcccttgatatgttgctgctcaattcaccatataaggcacaaccgcaaacacaaagaaaggatgattaaataagcttgcagacacgcatgtgcctttgttctcaatggtatggaatttccaaatacgatgtagcatcatcgccctggtatagcactacattacacattggggctcaactgcagcttggtagcatcggagttggccatgaccacatgtttctgaaattaaaaaaatatcaataggttggatgatacaagtgtggacattcgttgagaaaataataaagtgacatcacatactgccactgctagtccactacttgtcccgccttagttgaatggtaaatggatttcattagatcagggttactacaattaatcggggatcagttgaacaacaatgaaaatacaaacttgtgatgcttgcgctcggttttttgcacgcaattaggcataaggtctaaaatctctaccacaggaaaattgttcagtaaatttcagcttcaatatttgcacagcatgacgtgtcgacaatgtcagagttaaagaggaagaggaaggccaccttctcatctcgcgcaaagggatgaaggctacgacatgcctgcactctggaactgaaagcaaatgctagtctagcacgcagtgacgtgcagcaacttagttgaactgag

SEQ ID NO: 17756 - DNA, 1287 bp, Zea Mays
taaaaatgaatttagaatgaatttctatgattttatttattatctggactacgcgtaataatacaaagaactgcagggtgctatctaaaaattccagggcctcggtgcaaggttctttcaactgcttgggactgtgggttaattcgtggagatcctaggggttcttttataactcggacacgacgaaggggtatggttcactaagagtcgcccgattcccatccaacgggtaggattagatccacagtctgttgaaccgatatgcaattctggccatcagatccgagatcgacgatcccgattttatgattgccagatttgcccaaaccatcggatagaagatctacgacatcggtacgatggaatgaatggctaaataggatctaatctcgaccacccgttgtgagatcgaccgctacctatgcctctcctacctccggacaccatcttcagtggcaagaaataccaccgcgacgactgccattagaggtgcacgatccccgccttgctacgcagagaagaaaacgaaacaggaaccacacggagaaggaacagggatagctcaccggagttcgtagcacaaagggtcccacccgcggcagacaccagatccgtggtggagccataaatcctgatgagaaaacctgtcccccacaccggagcgatggcagccctcaccgcaccccgacaaagccgcccaggtggttcacgcagacgacacgacgcacatccctatcgcttgacgcaagccaacagcggcgctaaatgattctcagtgcaatggtgcacttcttctgtgctcggtaatggtgagaggctcccggctaatgcaccacgcgcaggcttagctggtagtgattccaccgtatatatactccggagctcgggagagtccgatcgggggctcccaggatcaagaccccggcagttaggcatatccgtgaatctctcctatttctctccctctcttgttcgcggcagaacggctggctttgtagcccacagtgagcggcgatcacggaggagcataaccaccagatggttgatgctgcaccagtgaggagagcgggtcacgcgcaagatttccgggcggagctggttaacagaaacatgcagctttctggtggccccacatgtcattgaacacataggtggtaacgtcacatccgaccaagaaacaataaacaaataggtgaataccgtataaacatgaacttataagggtggacggcatctggcccaaatgaggtacgtgagtaatctcctttctcttttcatttatttttt

SEQ ID NO: 17757 - DNA, 755 bp, Zea Mays
gcggagtgcgccgtgaaccccggagcacgttgcgtggaccctttcatctcccccggttgttataaggtggccctagtcgcggtcctcctctatcttttcgccttgcgcgcaccagtagccacaccgccgtcgccgccacgccataccttgatttgggggtgttccgataccagggtgggtgtctggagcttcctcgcgtgggcacaagcatggtagcgtcaacctgggagatcggcagccaccgtcgcgcccgtaattgctcgccgtcgcacttctggacggcggatctgcacggtgcgagggcagctgtctccgtcgcctggtttctggtgagtcacctcatatccattttgcctcatctcagtgatcaagtagcataaatcagggcgtgtgctggtgcggggtgacgtcggggcgggttgccggagtttcgccgccctagcctacgcacagtcgtgctcagtcgttgtcgggatcgtgtgaggagggagcgcgtgcgccgtcagatcttgatggacggcgtggattaagaatagaataccggttcggcttggacttgtcccggccgttggattgttgacgtatgggcgagatcggatcgtgcgtataatagatcgcaacccttgatcgcggatgcgatgaaccagatcgtgtaccgattcattaaagaccagatctagtctggagcgctggattctaatcgtacggctatcacgggcgcatacccctttgccatacacgctttacagaaaatc

SEQ ID NO: 17758 - DNA, 438 bp, Zea Mays
gatttaccgcgaaccctttatggcggttcaatacatgagtccccaaccagctgcgtggacggtcggagcgtccggtggcttgctacgacggcggcggatgatttacggtgaggacacgtggtgtccgtggctagagtggtaattcgagcatcgaatccgagccggagatctttttaccacgcattgatcgacgtctcgacggcactaatcgtggcgcgagcttgaatcacggcggcgggacggcggtggcgagcacacggcacttaggatcttcttcagtgtactgtaccatagcgatgtccattccgagcctgacagagcaatttgaggatcatttctcttcgattttcatttaacaacctatcaagccgactatagcaaagttgttgtccatcatatcagctttaactttgttatagagttcttgttcatacctcc

SEQ ID NO: 17759 - DNA, 294 bp, Zea Mays
taccgtctagattaatgcagcagacttctgggcttaagctctggtgctgttgacggtgtatggagggaagggatctgtgttttgttatgttatgccgaaattagtgttgagcatggacgcgaatcctaataatgcataacgtggacggctatttatacgctctatttgggagtgagactcccagatgctggaatatttcaaaaaaaggctggattttcagttgctttcggttccttcagttgtcccaatttggtggggacaatactctttatccggtagacacctggatttaag

SEQ ID NO: 17760 - DNA, 498 bp, Zea Mays
cgtcgtgactgggcggcgatgggcgcaaggtcttcgggcgtggaaggccgggtcgcgccctggcgcgtgggctcctggcggcgttggggcgggttgttccctggctgcgcaagagagagaaggggaggggaagaagaggagagcgaggacgccggagagaaagaacggttgcgccagccaccaataattacgcatgaagcagtaaatgcaatgtgggagacggacagccaacacgacagttgagcagaggaggcaagcggcactagcgagcatcaatggtgtatggcagttactagcagcgcatgagtgcgggagagcagaggacaggacgaagcacactggcgtgctccacagaagcgaggagacgcgcacggagacgaggagacggctaacaggcgagctagcgtggtgtcgaggcagcagaacaggtggcggcgacgttcgaatgcaagaacgaacagccaagtgaacggatgaaggtgatgtgctccgtacccg

SEQ ID NO: 17761 - DNA, 492 bp, Zea Mays
gatgaagcgcagccgctcgaccacggctggaggtgaacccgcggcgcctcccaacatcggcgagaaattcggttgacgccggtggtgctcacacctaattgctcactcccacacgatccacacgtgccagtgaactccaatttcgccatccccgaagcaagaatggcaacgctcggaggaatcgtcgcgacagtaatctccggctctgccctgctctcaatttctccctccacggcggaacgaagtcggtagcatggatttcggcgagggttagaagattgtgcacggcctaggagtaccccgtcatttatagacgtgaggaccagtcaactagctaatccgcgcatgccgcggttggtttccacctgctcgatcattgtggaagcgtggggaagaaggtctctggcgttccagggccgcaatgttagtgtctatgcgcctgagcgcgtgcctgggaagccgatagagtgggcccgccggtcagtaatagag

SEQ ID NO: 17762 - DNA, 634 bp, Zea Mays
ctaagcatttcatcaactgtctggtttgttgttgtgcccgattggtaggtaagcactggaggaggatccctgccataaactactcgaaatagggtagtgtgcaatgctgagtgataagctgtgttatagcaatattctgcccatggtagccactcaacccatgcttgtggacggtctcttgtgatggaacagaggtacattgcaatgattttattaacaacttttgattggccatctgtttgtggatggaaggttgtactcatccgaagtttgacacctgatagtttgaacagttctcgccaaacgttcccagtgaagacggggtcgcggtcactgacaatagactggggaaaactgtgaaggcgaatcaccccttcaaagaaagctcgggctacacttgttgttgtataggggtggcttaaggcaatgaagtgtgagtatttggaaaatcgatctactattgtcaagataactgacttgccatgcacctttggaagcccttctatgaagtccatggatatgtctgaccaaatctgggagggtacctcaagaggttgcagcagcccagctaggtggagagcttcagttttgttttgttggcagactgaacatgccctaacccaatcccttacca

SEQ ID NO: 17763 - DNA, 523 bp, Zea Mays
gtcctgctgctgctgccggtgccttgcgtccctcccctggtcgtggatctcccacgccacgtggtcgtggtcgaggtcgtggccgagggatgggtgcccgcttggcccacgggtttgcggcatttttctccatgtgccggaacaatgctgcggatgtccatgaggtggcaagacgacagcgggagactgacgacaaccttcgtcgtcaagcttcctctttgggtactcccttcgccccccggtcgcctgacgtgcctctccatcctcctcccccggagatcaacgagtggtaccagcaggcatacggggtgccttttatgacagcagacgacgtcgacgaagaagaagcttattttgatgatcgtgagcagtttgtctcgcctccgtatcacggggatccgggccaatcatcctctcaccctccgccccaggatccttctggcagtgctcctcccccagatcagtctggggaagaacactttgcctctcacctggcgcaccacctctttgctcctcatcagcc

SEQ ID NO: 17764 - DNA, 748 bp, Zea Mays
ccttgatccaactgcggtctccgaaggcgagacctctccattcacatttgacgttgtattcgagagactccaataccttgcgaagactctcctaccattctaacactttgttttgacacccccattttctccgaccctgcggttcaccgagggctaccccggtcgaagtccccaccgccctagggtggcgaccctcgacggagactccgctacagataaatctagagccacaaaataatctaaatcatctttcgaagacttgtcatctatcccaacaaacgggttccccaacccgtcaccttccgaagaccaagactcaacatcagattcatcagatgcgtcactactaagaatcactacacttccacataccaacgattcatcattctcgttatcatcaaggtttgcttgcgcaggcccagacgccggaacctgcataacaaccgatcttaagtatcatgtacaaagcgaacactgtcaaaccactcctattacattctttcaacccgcacagaagcactcgtcgctgcaggaccctcagcgtcgccttccttaaacaaggtttgctcctccgctcccgcttccactgcatcatccttctgggccaccgagctctcaaggccagcgaggtcttccacctcttcatccctcattgcctgcgaagacagcacaacaacgtttcagacaacgaacacacacaccaccatcgccaaaaccaaaacatacttgtgtcagcgctcggtcggcc

SEQ ID NO: 17765 - DNA, 658 bp, Zea Mays
ttggggtactgtgcctcgcatgagcatgagtccatgcatggagtggtgtcttgagccacctagtgccacctagtcgtgctccctttggggtggtggtaatggtggacctcagtttgaatctggctaggggaacatctttctccttgtcgactcttatgtgtcgttgctggagatgtgtacgacgagtgttctagcagacccttggtggagaacgagcttctgactcgcactcccctcttatctgagtgatttgagtctagatcctagttagggaattagagaatgtagtgtgccatgtcagaggtgtcgtggtactcgttcgaggtggagatgttgatgtaggtccatgtccgggcatcatggtggtgatctggcacggtatgcctgttgattgggacatctgaatccagaggtgagtcattgtggcttgtgctggctcagtcacagttgtcgctagagctattgcgaacttagatgaggggcccatttgggtcaggacagcagccatctgccccctgtagtttccttgcatctgcaatgcggtgcaaggttccgctctgatcagcattgcaagacatagattcgaaatggaacatctcactaggggtgaacttgatggcgttagtgaagatgatggccatagagctatctattgtcg

SEQ ID NO: 17766 - DNA, 914 bp, Zea Mays
aaaggggctttgaccctactgactgaaacgtgatagagtgggtccagctagcttattgaagcttggtcccttgggtggaaacccaaaggatcaaattctctggtgcctgtcttgctgctaagcttggaggacttggaattttctcttgaggtgacctttttcttcttcccttgccttttccacttgtatggccttgtttgagaagtgcgagaagctgaggaaatcttggctggcaaggatagtcttgagttctggtcttagccctttcaagaagcgggccatcttcttggcttctgtgctgacgtcgttaggtgcatagcgagccaattctgtgaatttgtgcacgtactcactgacagatcttccaccttaagttagttctcgaaattcatcttccttgagctgaacgatcccctggggcacatgatattctcggaaagcagcttcaaattctgcccaggtagcatatctgacggcagcgctgaaggtatcccaccaggatagggccatcccggaaaattgatgagcagccaggtaaatacgctggttctcagggcatccgatggcttctaacttcctttttattgtgcgcagccagtcatcagcgtcgagcgggttgctggatctagcgaatgtgggaggcttgagtcttagaaaatctcccatcctgtcctgaggccttccaccattcgggcgctggttctcaaggcttctggtgaggacttcaatgagtcgggtttggttggccagaacttgcgcttaaatctaatggcagctctggaggtgcggggaggtgggtctcactcccttctccaccggcttctccttcagctcctaggggaaaccttgctccaatcccagaggcggtaggcgtggttttatctgaagccatctaccagggggagagaattact

SEQ ID NO: 17767 - DNA, 424 bp, Zea Mays
aactttgtattttaaaccaaaactctttatattttgttaaatgatgtttatcatatatcatatatgtctgatttttatggttacgagtgaacatgtgacctatacatatattagatatgggtatgatgttaaatccatacctacaagtgaatgtgaatctatactatctattaagtcaatagtgtagaccacgacactaccatgacttcaccttccccagaccccatcggtagatatgcggcccgtcgcagcctctattggtcatttcggtctcgaggcccaagcatgaaggccttgcatcggaggcccaagcccaacacaattagcttcagttcggtacacctagtggctcgacagtccgacaacaattagcaacaacgacatgcacgtagaagcagcagttgagtttaagcgcagaaacaac

SEQ ID NO: 17768 - DNA, 824 bp, Zea Mays
gtgtttctcacttctctcagatcactcttgctcacaaagagacactcagtgtggtgtggctgtttaggattggcatgaggctttacatggctagatgggttagaactctctcccttacttcggttgggggtctcactcaattttcttttgtctgattcctctcttttcttatgagtcatatctgaagtatgtatctcctctggagataatggaacaagaaccaccttcttgtcattgtgaatgaaagtgtatttgttagaccgtccaaaatgcactgagtccacatcaaattgccagggccgaccaagcagcaaatggcatgcttgcatgggggcaatatcacaatccacctctccatgataatcaccaatggaaaatgacaaatgaatcatggctgaaaccttaactgtcccataattattcagccattgcatatggtacggatgtggatggcgacgtggctgcaaaccaagcttctcaacaagcaaagcactaactatattattgcagctcccaccatgtatgatgaaacggcacacacttggccttgcactttgcatcgggactgaaataaattatggcgttgtccttgttcagctgcaacaaactgagtggaaagaactctcctaaccaccaaagaaggagatggtgtattcattgtagaaggctcgaaattaggaaaatcagcaagcaactcatcaaaatcagcactagtaatctcgttacaagatggagaaataacatcttgtaacatgtcattgtgagcaaaagctggaataggctaaatcactaaacaattcagacctagctcaaatgtaccatcc

SEQ ID NO: 17769 - DNA, 436 bp, Zea Mays
ctctaatcctatccctccatttcagatccgacgaccagtagatttcctccctattctaatcccaaccgtctgcttcagaatcaacggccaggaacctgtcgtttacctcccgatggtggctctcctacaactatggtggcgagatcgccgacccatcgtactactgcagtctagatcgtgatttcacacacagcgttgccgaaacagcgaagcagataccgtggacgagaaagactactaggtggcatatgacagcatgtggccagagaaccgaaactgctactccggcgtcattatcgaacctgggaccttgattagatcaaataatgctagcatttaaacccatacctcgaggtagcctacgacaaatcgtcggagcgaaagatacggtgtcgtcgtcacaccatggcggtgccccggtcgatagatccggcca

SEQ ID NO: 17770 - DNA, 354 bp, Zea Mays
tgcccagatatatcttaaagaggtagtcagactccatggtattccacggaagatagtgtcagacagggggacatagttcacctcaaaattttggatgagccttcagcaagccatgggcaccaagctagacttcaacaccgcctatcacccccagtcagatggtcagacagaaagggtcaacaaggtcctcgaggatttgttaagagcctgtgtgttgacatttgacagaaattgggagtctaatttgccatacgcggagttctcgtataacaacagctaccaggccagtatcaagatgtcaccgttcgaagcattgtatggacgaaagtgccagacccctctaatgtggtccaa

SEQ ID NO: 17771 - DNA, 1015 bp, Zea Mays
gaattgggggggaatccaaaattcgagctctcaggtgaacgattgaggacgatatctggtggctgggtgcgtgatgaccctgcggagctcacggtggcttcaatttatagggggcgatagcggtggccgagaatttgggttgagcgcggtggcggtcagaggaagtgagtcaccggcatggtgattcgtggcctccctaccgtgacggtcctcccggcggtcatcagaccagtatggccccgggggttgcgacgtggtaactacgaaggcacgtggcgttcggtcgtcggacagccaactccagcgaggataacttcgaccgaccgcacggcaagtggacaagacggccggaatagtttactggccggagttatccacggcggcgatatttctaagaacccgagcgctatccagttgctttggtcacaatcacggcggtgacggcacgaatcttcgcgcagggaggtcgtcggcggcgaacacgcggtgctggcaatctgatccatttcgggactgtaccatggcgagacctcattagagcacctgacagatcatgtttaggtcacgttttctctcaaatttccatggcaaccaatccgaggctctgcagcaaatttgtagagcaatacaccatctgcaactttgtaatatgatgatgccacaaaaaacccattggatcaagatggaatttaagcttgaagttgagggcatgaatctgttagtctgatgttcagacagaaccagcctgacagtccaacttgggttgagattttctccacatttctcataagaacatggcttgaatccttaaacaaagttgttctcctataattgggctacaaacttgttgtggtcactttgggcaaaaaccctatgctttgaaagttacaaagccccaaagttgagccttcaacactaaatttcagacttagtatagaacttaattgaggtccattttacatttaagtccaaaacttagggtttggcttacaagtccacacatttgggaaccaaa

SEQ ID NO: 17772 - DNA, 606 bp, Zea Mays
cgcggcccgattgggcacgccgcgccaatggttgtcctggcacgcaaacgcgagaaaaatcaaaccccacctctcatcatcccgctcgctgccatgtggacccatctgacctaccccactcgccaggataggggcgaggcggcgacgtgtcctacctgctgtcccacccgtagagtgcaagggagcctatacttcgaagacacgtacgtaaaggttcactcttactgacgtgtgggactaggcattctcgttggcccaaatgtcggttcctgggggttagctatgcaggagaagttgggcgagaccacgaggaggagaaggagaagtggacaaatgagagctcgcggagtgtgcagcgctttatggtggggactggaagatggaacacgtagggaggtctgtgggcccgccaccactgctttatctccctggaaaagacccggccaccaatattcatcactagccccacacaggcacttgctatgtacggatgacattcctcaccgatcagtgggccctggtgaagtcgctagatttctactctccgcatctcttgaaaaagtatagttccggttattggatgagccgatcaatatttaaccaaat

SEQ ID NO: 17773 - DNA, 669 bp, Zea Mays
atcattgatttatcggacagaagcgagcatcacagcagtagttgccctcgttccgttaccgtcgtaattcctccgcacccgacccgtttcgtgttcagcagacaccccactgctccccgtcgcctccgcatctcggggaccttgcacctcgctagcgcatccggcgacttcccagaagctgtagcggccgcgccgggcactagtaccggcgcggagcccatcactttccgcctacctcgccgccgccgcttcggccggcggccatggcgaactacctcgcgcagttccagaccatcaagtcctcctgcgaccgcatcgtcatcgccggtacgaacctgtcgcctcccctcttaattgcaaaaacataattctatccccaaggatctgaactgcgctgcgggggcgcgatctgggtagcttggtccacctgatcttgttgccgtgtgatctggaaggttccgaacgagcctagattcgtgcaggaatggcgttaccgtgctttgtctggttgtgtagctgagtgcctgctcgttgcatagtgcctatagtgatagtttcagaatgctcaagtttttttttcctttgccctctttagtttcagattgcttaagctaatgaatacgtgagagatctcgaattaccattttggtagctcaatcttgttcctgc

SEQ ID NO: 17774 - DNA, 658 bp, Zea Mays
gcagtatagtatcaggtacagttgatgggtcacagtgatgtccccaacttcctaagtcttcttcagtaggtcttccaatctgaaaaaagtgggcatagaaaattaatcgaatcccttgaggtttaaagctgaagaaatgccttgtccagtcttccccaatgggtcaagttaaacaaagattactggctactgcagagctaggcaacatataaatagggtgccatcaaaattacctgctgatgtgtgctattcattttctgcaaacatccagatatctcaccaaacccaccaatatcagcataatcttgcactccaggtattgaagccttatgaccagtggctgcaaaaccagtaccatccaaagctggatctccatccttgtcacagcggctacacttcaaatttttatgtatttcagacctgtgcaaatgaaggtaagcaacaatatgatacatggtattaactaaaggtacaaggaactgcatttaaatgacaatactgaacacagatattgccttttgcaagtgctgacaaattttcttgtttgtatcacatctcttgtttgtgtggcacatatgtatcagctttttctgtctttgttaaacattttcttcttctattaagacacttgcatgttcaagaaaaatatggggaaatt

SEQ ID NO: 17775 - DNA, 390 bp, Zea Mays
agaaaaggagggccggcgaggacgtctggccgtctgggtccctatatatgagacagcgaggaggtgggtgtgaaggctgtgcccagtgagctcagctcgatccatcgatcggagagcttttgcactgcaccagctctgaagccatggctgctgcttcttcctccatggacaggatcgcccagtggtacgtatgctgatcgctcaagcctctgttcgtacgtgcttcaatccggttcggggaggtgaattgacgacgctccctatgtttgctgttgccctctatctgcagggtgtcgtcccaggaggtcccgaccgacctcaccgtccgcatcgccgactccgtcttctctctccacaaggtacggtggtgttcactcaccgatcatctcc

SEQ ID NO: 17776 - DNA, 749 bp, Zea Mays
ggggcgcggctgggccgaaatggggaaggaggggggaggggagagaggaaaaggttttccttttcttcaattttagatgagtgatttccacaatctcaaccaaacaaaataaatgcatagctcggcatggtgtggcaaacaaaataaagcattttagggttttgctttacacgagatctaaagccaaaacccgctataactttggaaaaggtcaaggtttagcgaggggaaaagggaaaaggaaagggtaacgcccgaatttggcgagtgaagaaaagaaaaaattcaactaaaaaattcggggcgttacagggtcctggctgaatagctggcacaacaagagcctgaagagtgagagaccaaggtaccaagtagccaaagctgaatatgagtggcagcctccctgtaacccatccgtggcagaagcgtccgcctcatgagctgatatagaaacttggccgctgtggtgaagtctgccggagaacatcgcgacccatctgagaagggcagtcggaacaaagccgcgatgtgagctgtatctggagcaactccaccgtgagggcgtcgaggaggatcagaggtaccgtagcacaagctatgaagacgagtcaatgactcaggaaatccaaacagctggcgaatctggctggcatgaatagtgacatcctctcgctcaaagcggaacctcatccactagtgatcagggtcgatccatacagaagcataaaaaactcagacccattcctcaa

SEQ ID NO: 17777 - DNA, 594 bp, Zea Mays
gccggataagcacaacaagtgcgttaatcgaagtcttttactaaaaagacactccgcgcaaaagtcgcctaagggtgcagccaggttagcacaacaagtgcgcgacacgcagtctctcactcaaagaaggccaacaggccacattacaatacaagttgcagttacatacactcagcgagggcaccacattctacatcggctcaaccttcgggatgatgcccgcctccctataattgaacaacattattttcaattcctcaccctcaaaaagattccttagatccccctcaccaatgctcgtcccaatcggcaaagatagtagctctcgtttaccaaaccgatctactcgaagacggtcccgctccatccccatctgatggctcctaccacttcgcgaaacctcgcccacgctatgcttcgacaccaccctttgtcgccggaacttggtcctcacactaggaagatcagacacctcgccaacctccacccgcgacgaggactccgtcgcggccacatctaacgcagcaaaataatccaagtcttcatccgaagactcttcggtccaggaaaacggactcccaaactcaccatcag

SEQ ID NO: 17778 - DNA, 566 bp, Zea Mays
aagccgcgtccgccattgctgccgccaaaccatgaccttgccgtgacgggagtaagttatccattgtctgtttcaccttcttgtccgcatcgcgtaggtagtcgcaatttgtggtttgggcactcgagatcgggtttggggcattgccggtgagcttcgtcgtcgtttggcggggcggcgccgccgggttggccgcctggttagaggagagtgctggggccgttgatctcgggctgtacggttacgattagatctgaagcataccgtttcgagatttcgatttgggccgtggatcagtgatcctgcggtcgtgggcgggtgagagatagtgcgccgtccgatcatgatccagtggtagtcagggtgcgccctttttaaataaccgtgatctaatctcggcctctggatcaggatcctacggctgaaattagagaataccccttcggttgcgcaattgcataagagcccctctagatttatagattagaacccgcagtccaactagtagtgtttcctgtgtcttggacatcttcccccgagacccctggactttccaggaaatgagg

SEQ ID NO: 17779 - DNA, 605 bp, Zea Mays
cccaactcgagttttatatgaaggatctaggccctcttcatcactttctcgagatgcatgttcaacgtcatggcgtagtctgttcctatcttagtgacaatacatggtagatgttcttgctcaggtcggcatgtccgactacaagccttgcatcatgcccgttgacactcaacctaaggttgctatagaggatcccaacaaccaccgcaacttggttggcgcactccagtacctgatgtttaccagttggacatatcttgtgcagtttaacagatttgtcttcacatgcatgatcctcaggcaccccatcctactgctccgaagcacatcctctagtacattcaaggcacccttgacctaggacttgttcttttggctatcttcgtaatctgacttggtggtgtattcatatgctaattaggctggttgtccagatacacgcagttctacttccggatatgtagtattccttggtgacaacctcgtttagcgatcctccaagcaacaagctaccatgtctcttttcagcactaaagtagaataccatgatgtggccaatactatcgtcgaggctacttggctgtgctagctatccttgagctcca

SEQ ID NO: 17780 - DNA, 497 bp, Zea Mays
gttagggtttagtgaccctcacaggcaatgcgtcatatgcttgataaccatctttcgtagttcagggtacttattgcttgggatctcggctgagatcaaaaggccgtactgctcaggacatgtgagcttgtacttcctctgcattatgagtagaaaatgggcatgcggcaaaccctacttctgaaactccacgacatagacgtaggctcggaccttaccaagaatatcatgtttagtcagcctatgctttaactcttgtagcttcgcatgaaagacacgcactacaagatccggacgatcttgcggtgtctgcccagggagaagctccctccttatctcatcccagttagggttacatgtcacgataagaaatatgtctggtttaccaaacttccacaccagagccatagcatccatataccgacgtctcatgtcacgaggaccgccaataaacgacgtcgacagcacagttcgcttgccaaccttatctgctctaa

SEQ ID NO: 17781 - DNA, 552 bp, Zea Mays
gccacgggcgtatggatttcgttcaccgggtaaatatctcgtcgtggatgtgcatgagctactgtggcctcgttgtcccctgccccttttcaccggcgacgtggcctcatggtcgtcaccggagttgccgtgctttactgcggctgtgccacactccaagtcttccaccacgtcgtccctagccgtaacagctcaccagtaaccgccgtagctcctcaaccggtgatcaccggaggaagcgccacggtgaaagccacccatcccttgctccagtatcactgttccccccggccgccagcacgaccttgcgaaattggacaccaccatcgatgggacttataaattgagccccccctcggcttcgccatgtatcccagcagctaccgcacacacctgcatcccaaatcccccactagcgagcacaaatttcggattctccccaatccggttctagaacaccgtgaactcaatctcgtcgtggccagcctgttctggtaaaaatctgcccaattcaaaccttgtttaagtgctctcgtatgcttgtgatgccca

SEQ ID NO: 17782 - DNA, 1332 bp, Zea Mays
aattactacaggaaattagggttctaagaaaattggtctcatatttttcggattttcctaccattttctacactttttcaaagttctgctgaaaaagaaaaagaaaaactctaaacagtactgggccactttagcccaggcggcccagcaacacagggaataaggaagcgcccgcgcccgcgggggaaatttctcagaaaggcccttggggtttttactaactggagatgtgtttggttactgttgtaccgtgtcgctgacaacttgcagataaagccctcgatttctatctcttctccaaggagctccccgaccgtggcgcgctcaagaacgatgatcctgctgctcggtccggccaagatcagtagtggctgcccgattaagctactgggtgagtgttacgggcgtgagacaaccctagaacgagtttcaattatgtagctacggccctgggtttggcctgaccacggtggcggaataataccgacgtgaattcctgtgtcccgggtgattgattgtgactaagcaaaaagggtcgggccgataagcatcactagcgcatccagatactggaacatgaattaaacgagcaggagcagacctgggacgagctgtccacggagcgcggaggatccaagctcgcgggtaacagaaaaggggaaaattgaagccgcaacggtctcggttggaattgggaggcaagtttaaggctacacgtccgtaaaggagtatagtttcaccatgcactatcaattttgggaacggtggagggaatttcgcgaatttgggcttctactgagcttcactggtggagatgaaagcaccttgccgtgactctctgctcaatttataggcacgatgttcaggctagctatccgtggtcacgaaacacgtcgccaacgcatgacgaccacgtaataaaggagcacagtgaggtagaattgagacgcgagtgacacggcggcggaaacgacagatgcggtggccgccggtgaagcactccgaccgagctcgggagatagcgccacgtatgagtcacctttttcccggcgttatccaaccctcaccgtgcatgaatccgggcggcgatcaacgacggcgagcttagctggcaacctgatccatctgaccccatcccaatctatagtgccactgatcttcaccgttccactgaaccgacctcctttctttccccctttctcttgattctggttaagaacaggttaatctctattaacaagagttatttactagataagggtcttcaactttactataggatttatggatcaaaactgcctagattctaagatacggtgctcgcaatctggc

SEQ ID NO: 17783 - DNA, 839 bp, Zea Mays
ttattcgtctccgcataaatctagtcatgtctcttcaagacttctggtgaagcgtgccggcgatgggagtccgaacatcattattactccttttgtccacctctgtctatgttgacccttggtttccctggcctgacctcgggcctcccttcaccgtcttgtgttcttcgtaggatgtcaaaggactcaggtctaggttatgtaggtctaggccatgtaggtcatgaatggggctcatgcctagggcccataggtcataagtggggataacgcctagacccaaagatcatgagtggagctcaggcctaggtcccgtaggtcatgaatgtggctcgggcctaggacccataggtcatgagtgtggctcaggcttaggacctgtcgggcatgagtgggagacagacttgccctttcccacgccgcgactcggtgccaaacacagttaatgtggcgtgtgtggtgttaatggcaagagttttcctagggccaaacgcggaatccactcgagtggctccatgtcggttcgtctgatctccttgctaggcttcgcctcgcacgaccctaggcacaacgctgggtcattcgggggcagattcacctgggcgggcttctccctatcttccttctaactcgtgaccccctagaagcccagggatctaatccgtgacgtagccctcgagcccccaacaagagtgtgtctccccctggtggcttcttttgatggtggggtcggttaacattagggaaatgtcttctatgtgacttgggtcttgaaatgtcgccttcggatagcctcgaggggtcgtctgttcattgggaactggtcatgattttaatct

SEQ ID NO: 17784 - DNA, 1137 bp, Zea Mays
gaaaaacctgttacaagttgctctgtcagaacagtttcagaaaactgaaactgaacctaaggttaaaacaaggttccagtgaggtgaggtcaagtttgatgtgccatatcttcgaatccccttggttttgacccaaatgtcctgtataaggattgaagactgttaaatcaagaacaaaccttattaaggaattttgcccggttattcacaagaatcatgagagctagtcggtggaagggggacggttcaggcgactgacgaagatgtgccatggtacagtgccccgatggatcagaccgccagctcagctcgccaccgttgatcgccgcccggattcgtgcacggtatagacggataacgccgggaaaagggtgaatcgtacgtggcgccatctcctgtgctcggccggagtgattcaccggcggccatcgcgtcaatccttttctgccgcggtgtcctcggcaccgtgattcttcctcactgtaccagttctctacgtgcttggcatgcgcttgtgatggtattcgagccgtgaggtgatcgccggacctccgcggctataaatagcccatggttcgcggcgaggctcggtcatcacacacatactagtgaaccaaatcgagtcaaattcgcactgccctctccacctttgcccaaatcgtttgcgcacggtgaaagcatagtttcttacggccgtgtagcctcaatccccgcccccaatttcacccagagccgccgcaacgccgtttttccccaattcggtcgactgcgccgccgtgaatcacctgctcgcggccagatgattccaggtccgtccacgccctcgttgttcgtgtttcagcacccacatgtgcttgtgatcgttacctgcccagcccttggagcttgacttcacctaatcaaccggaacacctcgatctgagttctgtacccgcggtcaccgtggtcaggcacatcctggcccgaattagtccgattagagcatgttctagggtaaccttgggtcggttatgcctcccctatagctagacatgacgaccatcgccggtcatggccagcccgtgcggcgtctgtgatgaacgacgagcgcaccgtggcaagggacgttgtggagaagaaatagaagtacgagggtat

SEQ ID NO: 17785 - DNA, 273 bp, Zea Mays
acatatcccacaattgccacgaatcactgtgccagtaacatctcccctctccggccgccaccgcgccatccccgattcacaagccaccgctcccggagcctataaattgagtgtgtcgtcggctctgcaaggtagtcaagcaaccaatacaccaactcgtgcctcgaattatccaccagagaaattcaatttgggatttcccccaaatcaaccaagaacaccgtgtagtgtgagctcaccgtggctagctcgttgcaggtccgttcatggctt

SEQ ID NO: 17786 - DNA, 693 bp, Zea Mays
catcgaggaaatagagaaattcaatagactctacaagcagaaactggatgagatcgtcgaaagaggcgaaatatccctggacctggcactcgaggcaaggctacctaaaccgaaatgtaaaccaaggacgcatctgcagctcaatacctgctcacagaaaagttttggtcgtctgcaggtatcatcgccaggcgcagagaggcttctgaaggtgcctgaggatctggaccgcttcaaggacatggctatgagggtgcagtacctcgctgaaggcaacagtgaccttgcgtcgaagcagagcctgctgaaggacggcatcttcttgctcgagtccgttaacgctgaggctgggcactgtgtttggaggctggcagatgtgaaggaaaaccgagcagaagctgggaagggaaggccgctgaacaggaaacagagagactggaggctgcagacttgcttcaccgcagtgaagaaggtgaccttgtacttggacgccaactagtaaatccgggccaggaggactattatggcttgtgaaaactatcctaaccctagcagattatgtagaataagaatgttgggttttctttatatagagtagagctatgttggtaggctgcacaaattggatatccatgaaattgctttgctatgagttgctagtgcgaaattgactgatgtttctcacacttgcag

SEQ ID NO: 17787 - DNA, 336 bp, Zea Mays
gatcacgaaagaaaagggaaaaatacatttaacttcttttcagaaaattgggtatcacaagctccgtcaccaccaccgtgccgcccttcgtcgacatcgggttcctctacgccaccatcggccggtatgatttcccttggacgactcgccgcatcctggtctctttaaatctttagttaatcgcacgctagtagctattagctcgcgttcagccgatcggctatggcgttgccgccgcgacagcacggtgggtcgccgttgttctgttggggaagaagagggtcttcggaccattcgatctttgatggacggccctggaaccgcgataccctttcg

SEQ ID NO: 17788 - DNA, 367 bp, Zea Mays
ggacccttactcatggcagggtccttctcgtcccgggaccttgccaaggctcgaacctctcctggagggggattgggatcctccaaaggggcccggcgtgccttcttgggggctccggacttgtacgcataagggtccggcgtccctctgaggaggtccagatccaatgttgaacacctggaatatacttcctttccttgccacgtggcgcccttggacctgtccatgtggtagggttgggtgtcattctccgcgtgccttgaggtgttgcacgggtgcggcgccttcatgctatagaagagggtacccctgatccagggtaccgacacatgcaattccaccacaagggggacatgttctaatcgac

SEQ ID NO: 17789 - DNA, 383 bp, Zea Mays
tatgtatgtgtatggatatgacatagatggatatggtggtggaggtgtccatgcaggtacgttaggtcttaactgaacattatgacctcccgtccttttcgattggtgtggtggtccaatcggcctaacctgccatcgcacctgggtgggtaagagaggtcgctttggtggccggtcgctggggtcagccttctttttcacatatttagacaataattgatcaaaagtcggactggattttaccaaccgaccagttgccttgaacgtgttagttttccacgtacctatttctggtcgttgtggtttgaaggtacgtggtcgccttggttcttcggtgttgccggaccgtccgctggaacgctccggaccgtctggcgatgtca

SEQ ID NO: 17790 - DNA, 331 bp, Zea Mays
ggaacgaggacggagagtgtcgactgcaaacctagagaggcgaaggaagcgagggtcctcccaagcaagtagacgaaacgaagaccaaatgtcagctagaagtatctagagacgggatgtgttggtacgatagaagccgtaggtggatgaacgaatgcatgcatgtaattgtgaagacatggatagcctcgttgggcccatttccatccggctttaacagtaaggaaacaccatgtgcacacattgctggttcttatggatacttatacattgctccaggtaaacaaatctttttgccgttgttattagtcatcattgttcttatttcttc

SEQ ID NO: 17791 - DNA, 571 bp, Zea Mays
ttcatcctttctccatcgcaacagagaaggtttgcagcaaggaagtgctgtggtggcttgggtccatccggtttgcagtggcgccgctccgttgccggcttgccgcatcttgagcagggatgggtggagcactagggacagatgaatgtgtaagggtgtaggggatgtggttaacttgggctattttgttggttgggtggccacagcttgaacttgtgcatcacaatgaagcagtaggcagtagcaataggcggagggtgatgacaggtgttgtcattgcttttttgacttcaggaacctacagattatactgctgtcatgttagaaaaacatgtgctgttgttctgtgatattctttatgttttaggaaggaacagtgtgatgctgaacgcctgaacttaaaattaactgaatgtgaccaggggtgccaccattgcattttacgggaaaacctccagctgaatgttgttagtccaaactatgttgggtccacagatttttaatggcaagtttgcaattgtacctttataatgtcagtttcacataacccttcatattattggcaaatttg

SEQ ID NO: 17792 - DNA, 794 bp, Zea Mays
gtttgaaacctttgtttgatatattgtctgaattgatgtagagaaagcagaaaagatataaaaggatgggttaaaagaaagtctatctgcaagtatacgaagcaatgaaggtacttgtccacatatgctgagacgagtgaaggtacttgtgccacgccgccttgcgctacttcgtcgttgacaccgcgaggattaggattctactccttgcgccgctccatctccttccatgcgggcgccccagccctcaacaagcccaccacatcgctctcctcctctgccgctgcgggtggtgctggggcagcaaagagcagattcgggcaggtcacccacgtgctgcatcatgccgcaaccgccctcgcccttggccacgatcttggcttccaacgaatgtgttagggaccgtaggtgacctcatcacgagtggagcattcaggcaggtctacctcgacatggacctcgagtccaatgagatcctcgctgtcaaacaggttagtcttccatctcgatgttggtgatttgatggatcttgtgttgttttctcgctgactcagtttatctatgtatctattcattcattccactctaaaatgcttacacgagagtcttttgactaggcacatgtacaagagctcgaggaacttctcccacaataatattgttgtaagtacactgccatttcaacattgttatcctctttttttggttgtggtatttgatctaggctgtgttgtttgatcaaaggtatattgggatggcatgggaggaaaacacgctaaatattctactagaat

SEQ ID NO: 17793 - DNA, 475 bp, Zea Mays
attttcacgatatatccatagtgagggttagaggagagaacactgtttctcttcctgaagctgacgaagtggtggtattcaaaggatttttgaaggctagtctttggtttcccttgcataaggtgttggtcgaagtgctaaagaaatttgaaatataccttcatcagtttactcccaaagctttaattaaaaattggagttttcatttgggcgatgaggagccaagggctggaccttgacgtcaactgcttctgtaatatacacgaattatcctacccgacgaaggtgattgggaaggaacaatatcataacaactttggatgttactccttcgtatatcgctctgatgcgagacgccctatcccaacatttcgaaaaagtggccaggatcctagatgaggcaatggttctatgttaagaatgatttggttgagagagaggacatgaaggatgtaattcatcatcccatacaatc

SEQ ID NO: 17794 - DNA, 562 bp, Zea Mays
agcctcaattacaggaaagtccaggggttaatgcgcgaaaagtcccaagacacagatctaccccgcggtggatggcgggttgatttctaaataagacgagggctctttagagaaaaatatccaggccgaaggggtactgatgtttgccagccgtcggattagaaaccagtggatccgattagatcgatcttcatccagagtggacgatcacccgcacctgcccgatcgatggtcaacggtcaggatcgatccactccaccgatcacgccacagccctacgattagccagctacggtccagattcgaatttagtgaagacacgcttctaccgaccgattctcgatgaagggctgggatcggccgcgcgagaatgggatactccatatctaatcgcagccgtcaactagaaatcccacggtcgccagctttcttctccatcgcgcgcatgcacacagcgcgccccgacgcgccggagctctcaccggcgacgaggagtgcccccagtcgcactttcgccgtagttcgtcccctcccaggcgccccatctataatccccaatgcc

SEQ ID NO: 17795 - DNA, 2255 bp, Zea Mays
ccaccatcacgctccacctccagccatctccaacccctcccctcccaacaccatcatcaaccatagccaaggcctctcgctgacttccaccccggactcggcgaccacctcatcaacctcccggcgtttctctcaaggcgacgagcctttcagtttccaggctcgacaaggtggacgttcaaagacccaacgctggagtgacgactcctcgtctggtggttcgtctcataagttttgctcctttaaagaggccctcgtatcaggatccaggcgcctccattctcttgtcacgactagttcaagtgccccagagggtgtgaaagacaagaaggagaaggctggtgtggtggagcagaagcagctagtggaatcacttcgggacgagcttggctggcaggtggttgagcgcaggaagaagacccagcgtgtgcatcttcctcgtcgagggtcccttgtggatctccgaggcaggtgcttcaactgtttttcttcctcccatcttgctgcagcgtgtcgacgttccacccgatgctttcgatgctttgacttcgggcatcaggtgagctcttgccccacgagacctgtggcacgtacgaggcagtgtggcggattgaagcaagaaaagaaggttgacagaatccctgtctggcagcggttgactaggatggtgggggacgttcctcttaggacggatggtcagggctcaagaccaaggaagtcggtctggaaaaggatctcaccactgcaggagggggggatgccggaatatatatctccttcatctgtgcaaggtgctagcgttggaggccatgaaggattgcgatgcaagcgaaagaggaaccgttccaagcgcggacgaggagaaaagatgacgattgatcaccctcagcaagaagctccggtgtcggttattggagcagcaagcccggacccatccctgttgtttggcaacaattctgaggagtttgactccacacttaactccaactgcgttctggattactcggatgatttggcgagggaggaaattgctctccgacgagctctatttgtctctgtggctggaacacgcccaatggtccttgcttcagaagttgtggacgaagttgcacgccagttcgatattgcagtgaagaacatgtcaatccagcgaacaatgccagaagacttccttctgttactgcctgatgaagatgctgcagctatggttttcaacgatggaaaggcactgcgggggcctcgtttcaccttgttgttcaagaagtggtcgagatttgctcatgcttccgcctcgtctttgtccaaattagtggatattgaaattagaggcattcctgagcacgctcggtctcgttctacggcggagcatattctgagaaattcatgctggataacagaggttcatcaaaattcaggatctgagagagattttgcatccttttgggtgcgtgcttggtgtttaagcccggaacggttgtgcagaaaattggatctacatatccttgagcctggagatgttatccatgagaagagatgcttaacatacaaaattgatatctcatgtcgcctagttgatctccacccggcgaactcagctgctccacctatacccccggagcccttccaggaatcggaggaagatcaggatcaagatgagcaggagccacatcgtcgtcactgcggtgatgctaacgctgctggggatccacggcggtctctccatcttcgcctgggaccgcgcccccccttgggccgtacgcatgacatgcatggatctcgggaggacccccggccgtttagtgctctgggcattaactgtgatatggctgggaggcccgaggagctgctgcctcgcgtgcctggaaagaggggagatgaggggactgctgggggacacgagcggtttgaagtgctgacgcctcgggctgcgaaaggaacgggacacgaggaggcagtttggagccaagagatgcagtcaatgtgttgcatgggaaatatggaagatatggcggcagaggagcagacgatctctacctctgaagctatcggccagcggacggtggaaaaaataaacaacctctcctcctttcgccctggtgggccgcggggctggattgctccatggacgccccagctggacatatctgctgggttgctgaattcctgtggacccagctcgccccacaaggcctcttgtaacatattttacccccttgctgagtcgctgggccctaattggacacctttgccccaac

SEQ ID NO: 17796 - DNA, 371 bp, Zea Mays
ttgcctccttgctatcaatagccatctgatgacaacctcctttccttggatcgggtgagactaactcagccaccacttcttctcctagtgggacaccaacttaattgtcctcttatcacaactgataattgcttggtacttatctagccaatttatgcttaggatgacatctattccctgagtacccattactatgaggttagcgggaaactctattccccttatttccacacttacattcaagcaaacactatcggctcgaactttaccaccggctgaatcaatttgaatgggtgttgacatggtagttattggaagattatgcgcttctacccatgatgcagtaatgaatgaatgcattgctccagtat

SEQ ID NO: 17797 - DNA, 381 bp, Zea Mays
taattgtgttgacggcggcatgagcagcacaatacgcatcccaccaatccgcagcgggaccagtaagacgactcgatgcgtagagcactttctctctgtccgagcactgagctatgttgagcatcttctctacagactttagccagtcatctgcttgcagtgggtctgcggagttagagaaggttggtggtttgtgactcataaactctcggtgcttatccctgggtggagctagtggtggtggtggaggtagtggcggttgttgttgttgcacccttcgctcctggcggatctcctccctctcttggcgcatctcttgacgctcatgtcgcatctgcacgtgcatatctgccatagtatcaaccatctgttgcattatcc

SEQ ID NO: 17798 - DNA, 406 bp, Zea Mays
caggcgaccctgacataggactgcgggttcaatctaaaataacaaggggtctcttttgtaagattagcgccgcaaaagggtattctctattatcgtccgtaggatctagatcttgtggcttggattagattgcccactcttcgaaccggtacgcgatacccgccctcggattcgcaatacacgaccaggatttaattacgcaaatacaactcggacccctcgatcccgatcgaacggtctagcacactttccaccctattagcgcacgggatctaatctaagccgtcctagggcatcaacggtcacgacccatctccctaccccgacgctgccagggcagagccaccggaatcccctcggccgtggagctcaccggtgcacccaaagtcagcgacccagacctcta

SEQ ID NO: 17799 - DNA, 864 bp, Zea Mays
gctgctctgtggggccgacctgtcggcgccgtttcttttcgcacgagcactctctctctccctctgcctcgcggaccccatccgtcagccccctccgcgtccctaacctctcgctcatgtcccccactgtggacgcgcccacgaccgcgcgttctccggccacttcctcatgccctcgcccctttagaagcccgcacatcgctcgcccacttcccccgctcatttgcaccttcagccgagcttttttgacctctctctcggcctgcgcacgcgaccagccaagctctgtcgccgctcaccagggaccatcgtcgttctgtgaccattgttgagtcggcatcgcgcccgttccctcggtaagctctgccgcatcacccgcagctcgggataccctttggttcgccctttcctcctctggtttgcccggtccgcgttcaccggagcacttcttgcgcagccagagagctgccgccgtcgacccgcgtccttgccgcgccctagcttccgttcgtgcattcctgggactcccctcaaggtaaccgttctagccccgcccttattttcccatgtctcgcatttacctacccgcgattgctcaccggagtatcctccggcccgccgagaactcccctccaccgtttggccgcctctccctcgttcacacaaaaccgaccccgccatagagttcgcacgaccctccccaacctttccagctacccggaccgacccctcgcgccctaggagacccaatctgcctcgcctccggcgatggcatcgccgtgcccatggggagcgccgcccctggcttcccggtggagacaaaaccccctggtgtgcatctagaccgcccaactccaatcggac

SEQ ID NO: 17800 - DNA, 410 bp, Zea Mays
agcaccagctacgtacgtgtacgtagctttgctagagctgcccgtaacgtaacgccccctgttgacatgcggccttttgttttcaagaagatcggctggaccagtgtgagagccttagcacactgcacgtaccaggatgggtcagatcacttggcggtcacaaagtccgcgccagacgccgaaatggttaagctgctgtacgtactcactggtaaagtgataagcctagtaggacttgcacttttggacagtcttcacatacgtattctcttcacacgggacgggacagtcggcagcaggagccacatgcgtcacgagacgccaccacctctgcgcgtgcacttcccgagacagccttggtcctacgcctacctacgtactactgctctgagtgctatctccctccgtcc

SEQ ID NO: 17801 - DNA, 683 bp, Zea Mays
cttaatgtgtgcattgtcaacaccactgcacaaacacaaagatcaacaaaaaaggaagaaggaagagctcactcaaatgaccaaaggccggacaaaagaaccaaagacattaaaaatgagcaaagcttgtttccttaagacattagcaacgactcaacacaaccaaacaaaaatggctagccctcaagaagaggtagaaaaaggcttaacaccactatacaatgataagagcaaaagatgaaaagcaccaaaaactctaaaagcaaaaacaatccctctagaacgaggcaaaggctcaacatgaatagcaaaagcatccatctcctcctaacaaaaacatctcctcctgaactccccctgaagaagtgcacaaaacttcacagatgaatgcactctcaacaagacgcttgtgtatgtgtataattctcccccttgttgataaatgcactcaacaagcaccacccatatgcacaaaagctacaacttcccctcaaaaggagtcccccttgtgatatgcatgagagtagaaaagaatatataaaattcaagagcttcagaagtatagtagtcaaaatgtaaagatgttctaagggatgttgtgctatacgttcagcaatatatgcatgtgttagcagatgttcaaactgatcatatgcacaatattgtaaagtacaagcatttga

SEQ ID NO: 17802 - DNA, 668 bp, Zea Mays
agtaatgtgccgtgttgccggctctagatggtgtgtgagatgacacaagcaattatcctggttcaggcttctcgaggctctacttctagaagaggggatgaggcttatattactcgcatggtggtgcctgtagtaggggtttacaagcacagcaggagaggggaagtccccaagtccctagagatgatagaggcaactgccaatatctaagacaaagtgagagagcaagaactcgtctacgtgtgtctcccccgttaatggagggaccactaccctatttatacatctaggggagcgtccgtggcgaaattgagtcttgtatttgaaggagagatgccctgacatctgatgtgacggcaaatcgtgcagtagattcttgcttgctaacttcccatggagagtcgaggctgagaccgaggggtcgtccgtacgcccgagctcccaagggataggtcgcccatgccgtagtggttgtaacagcgccggggtatgggcctaaggctacttacggggtacatcatcgtcctggcgcgtgatgacgtcgagattctctacaacactcatggagatcagagccctcgcttggttgatgcagaagtcttctcgaggtgctagccgagccatctcttgacatgctttacagtcggccgaaatggttgtttgtagga

SEQ ID NO: 17803 - DNA, 484 bp, Zea Mays
gccggatcaaaggtggatggcacggactcctgaaccggtacacgatacaacacgttggaatggagatcaatggcgtggattttaaacattagagatctgcttctgcgcaaaacgcttccctccatctaatctaagccaatcatctctagatcaacgatactggtttctctccctctcctgtcactcttgctcgtagaggcaaaggttccacacggcggcgccattgcctggggtcatccccatgaggccccctacatccaaactcgacacccatggtgctataggaagagtgcgacccgacgaatagggttaagggaattgtgttgcggatcgcgcactcatatgcaccaaccacaacacacggcggaagctcagggatgtcctaccctgatgaggaattgtgctccccccataaccaaaactcaacctccgatggctactaagcgctaccataaccttactagagaccatggagcaatggccc

SEQ ID NO: 17804 - DNA, 308 bp, Zea Mays
cactggcgagattccggcgaggcggtccgtcgtggtccaaagagcagggtgcgaatgtgaggagcgagggagaacttaggggaggaagggagttctgttgtgggagagagaaagatccgtcaccaatttatagagggaaagagagaagatgagagggtgccagggagaggaaatggggcgtcggtcgacttcaaggcagtcatcaatggggagagggagtaatgggggagggagtaacggctgctttgaagctccattaacgaaggataaacggacggtcgcggcgcggactgctcggtcgatcttcg

SEQ ID NO: 17805 - DNA, 631 bp, Zea Mays
ttgactcagccggtggtagaatttgagccgatagcatttgtttgaatgtaagtttggaaataagggggatagcatttcccgctaacctcatagcaatgggtactcagggaatagatgtcatcctagggatgaactggctagataagtattaggcagttatcagttgtgataagaggacaatcaagttgatgtccccactaggagaggaagtggtgaccgagttagtcccacctgagccaaagaaaggaagttgttatcagatggctgttgatagcagtgaagcagatccacttgagattatcaaggttgtgtccgagttcccagatgtgtttccaaaggacttaccaggtttgccaccagaacgaaaagttgagtttgctatagagcttcttcctggcaccgcccccatctttaagagagcttatagagtatctagaccagagttggttgagcttaagaagtagatcgatgatctatcagagaaaggttacatccggccaagcaccttgccttgggccgcccctgttctattcgtggagaagaaggatggtactagaaggatgtgcatcgattatcgagctttgaatgaggtcacgatcaagaacaagtactccttgcccagaatagaaga

SEQ ID NO: 17806 - DNA, 281 bp, Zea Mays
agcggtcaccgcgatcgctatgaagacagcggaccacgacgaccaaattttacctttccccactttgacggtgaagctgaccccttgccttggatcaacaaatgcgacacatattttcgcggcatgggcgttcatcaagatgagcgggtttggcaagcatccttgcacttggaaggcgtcgcaacagagtggttttatgccctggagcgtgacattggtggtgtactcacttggtcaaggtttatagaattcctccagatgcgttttgggccaccactccg

SEQ ID NO: 17807 - DNA, 474 bp, Zea Mays
tcattagtgtctagcagaaggctattgagtataatcatcaaggatttgtagcattctataactgcatcatatctgtctccatcaagtttgattttctcaataagctcatgctcatccccttctttggaattcatggccatatgaacagctgcgggtacctggtaaatccaaagtccataagtttcctagtttacatatttggtcatttttgtgaggtatgataattattcaccttgctagcaaggaggaaaggtggccactgaatgatggataaattgcttgaatatgacggagccatcaacatgtccttctctctgacataacaaaaacatattttgtttaaccttaaggtgaataatatactggttcgacaaactgtaaacttttagggttccaacctatcactaatgaagtcttcctctcttaaggaattgatgaatgaattccaaacacgaaagaagcttctgtgctcaa

SEQ ID NO: 17808 - DNA, 823 bp, Zea Mays
ctttcacagctctggcagtagctaaggtttatttatctcaagtgtacaagcttcatggacttcccaccgctatcatttcagaccgcgacccaatcttcactagcaacctatggaaggaactgttcagactttcaggcacaaaactatgcttgagtagctcttaccacccacaatcagacgggcaaaccgagcgagtaaatcaatgcttggagacctatctccgctgttttgtgcagtcctgtccacgtcagtggcccagttggttaccgctcgctgaattctggtacaacacatgttaccatacagccttgggaaaatctccattcgaggttttatatggtcattcaccagcacaggcaggcattggatcagctgaacattgcaccgttccagatttacaacaattcctgcagagtagacagaacatgctgcaacaagtgcgtatgcatctgcaccgcgcccaacagcgaatgaagaagcaagcagataaaaacaggactgaacgggtgttctcagtgggtgatcgtgtcttcctcaagctccaaccatactgtcaatcttcgcttgttgagcgtcagaatcataaattatcatttcgatttttcggaccctacaccattgtgaaacagattaatccagtggcctatgaactcgacctgccagttgggagctccgtccacccagtatttcacgtctcgcaactaaaagcggtaatcagtcctcaaactcatgtcagccctactttacctaatctgcaccatggtattcaggtaccagaaatagtgttggctaccagacttcaccgccgtgcaggcaaggtggt

SEQ ID NO: 17809 - DNA, 392 bp, Zea Mays
gagaaattcatgtgaaatgcttggaggtttattgcgtagtttagggatggaccctgcctgcggtggtcgtcaagcactgagtgtgggtccactttcgctcggtcatcaccgacggttggtatctcgggtttgtgcaagcacgtctactagatgtagcccccgagcaattcatgtgaattgcttggcgatttattgcgcagtttagggatggaccctaccttcgatggtcgtcatacactaagcatgggtccactttagctcggttatcaccgacggtggaatcacgcactgagcgtggtccttagcgcgtcggagttgggcacagtccttgggtgacgaccttttgggtcgatcgttccctgaatattcgatccttgtttggcaagcttctc

SEQ ID NO: 17810 - DNA, 540 bp, Zea Mays
gaaaatcttcagatacatcgcacctcgccgctagctggtgacccccgcgcatagattcacgttggccatcatgatttgtgctcggcgcgaagtggataaccacgggggggaggtaaaagatctggcaggggtgatttggtcgcgggcaggggcttatcggatgcacttgatggccgtgcgacgtggccggacagtcatcgccgtggagatcgtcgttcaccacgattgtgccatgccgtagtctattcaccacatcgtcacaagctgtaaggactcgatagtgaccgccgtagatagttagccagtgagcgccacgttagcgacctccggtgactcttcccccttctcaccgcgagcgcttccccatccaaatttgtcctcctcgcggccgtcctctataaattgatgccttggcctgctccgtctacttgttatgaaccaagtgaaccactcctcacgcccgatcgtccatcgtagcgccctaatttggaatttcccccaaatccactctccgcgctgccgtgagcacctcctccatcg

SEQ ID NO: 17811 - DNA, 617 bp, Zea Mays
ctcaggaagaaggtgtttgacaaaagcgagaagcttccagggacatggattagggaactgccatatgtagtctggagcctgcgaacctagccgagccaagctctaaacggaaacaccccattcttcatggtgtatgggtcggaggcagtgctactagtagatctaatctttggagcacccagattaacctttgaaagcatagccgaagcataagcaaccaggatagaggacatcgacgtactagaggaagaatggctaaatgtggtaatccaattagccagataccatcagaccctaaggcgctaccatgaaaaagcggtgtggcatcgatcctttgcagtactagacttggtcctccaccgagtactaacgggggagggacgacacaaactgtcgccaccatgggaaggaccgttcatcgttgtagaggtcacaggactaggatcctaccggctcactcagatggacggcatcgaagtggggaattcatggaatattgagcacctcaggaaattctacgcctaacaatgcctcaaaactctttaggacgagttgtactttgtaagcataaggtttcatcatcaataaaagcttccattttccaaggcatacaagtt

SEQ ID NO: 17812 - DNA, 452 bp, Zea Mays
cgccggagccgggggagggggtgttttgtgtttaacagacgaaagggtgtggtattttggtgggctcctagcggtctaggccaccaccgagccaactattgtttgttgattgggccgcccgagcacgagcagcagccctgctagctatgtaatgggtcgtgctgctgattctagcccacacaacatttgcccgtaccgtgtatatgccagacagaaaatcgtgcttcgtaccgaggaaggtgtcgttcgtgacccgggttgcattgcacctgcacgcgtcggcgtccgtccatcatgagcgaacatgagttaggtcctaggagaccgactggccctgcagttactgcaccaaccaacgcatcatcagcccgcgctcgagcgcgtcgcgtgacacgccaccatgggccaaggccaccttttcgtgatcttccaggaatgcccacctgcggccg

SEQ ID NO: 17813 - DNA, 633 bp, Zea Mays
caacaatttctctgcagacagatgatcatgttgtcacacaaaaattgaagaataaagcgcttcaattagctctgtcaggcgctctgaatggagttccaatggtacagtgacctgaagaagatctcaggtgcagtacacctcgccgccggtgagaccgtgcccagattcgcgccggcgctgttattcgtgcctagtaccatgcggataaccactccgggtgaaaagatctcgtcgtggatgtggttggggcactgtggttgctcagacgccgtacccacttgccggcgacgtggccgagcggccatcgccgaggtgtacgctggtcgtagtgattgcaccacgccgtgaccctttcaccacgtcgttgctagccgtaataactcggtaatgaccgtcgtagctcctcagccagtgatcgccacaatagctcgcatcagtaaactccccctctctccagccgctagtatgccttctccaaattggacgccaccgctattggcttctataaattgagtgatcaactaggtccgctaggttattacgcacccagtgcaccagctctcacccctgatcgtccaccatagcatcccaatttccttttcccccaattctgttttccgcgccgccgtgaac

SEQ ID NO: 17814 - DNA, 508 bp, Zea Mays
gtgatatgctccttgtgcggcggttcgccttcttcgcactcgaagaccaacgcgccagctgtatgacttgtgggaccgggtccccgtgtcataggatggataccccggtgtgcatcaggggagacttctcgcgacgtttcgaggcgggagcaggggagactacctttaaaggggggttcatccctcgagtagcagccatgccttgcttctctcccactcgcagcgtcctctcgcctccgagctctctgcgcccctttgccttcaaggtctctgctttgcgttgccgtagtttgccatggccttgtaagttcatcccgagcgtgcccagactgagtgagtgctcaacatggtataccgcctgcttggatgggatgcgccggcgttcggtggaaggatttgcgccggtgccctccaccctggtgaacttgccgctggagagttcgtgccttttgtcctccccagcgggttggtgctgccggtcttgcctttcctctactggaggtgcacg

SEQ ID NO: 17815 - DNA, 1526 bp, Zea Mays
gcggcgcgtgcttcctcggctggcagacgcggccgctcatggcggtttcgtcttggcaatagacaacgtgaagcggccagcgctgactcttggaccttgtcgtgcatacctacctggtgtgctcttctgcttcgccatgattaatgtggcatcgatcttgctggctacctaaacatggatggcacctgcatgcaccactgcattgccggcaacaagcaaggagccatgacacttgtggatcgagtgtggcaatctgatctgttacgcggttgaagagatttatttggtaagattttggatggaagaagaccgcgcccctgcgtgcgcccatggatctagggggaaatgaacactagccagaggagaggagttaagttaccagctgcttggccaccaccaccattctcatggatgatggccaaaggcatggcggctagcttctcaaacttgcaaggtcgatactacttttggtttagtgcaatggcggatgaaggaggtggaggaagaagatgcgatggcgtgcgtgatggacacgttgcatggaaacgcaccattgggagatccatgctaggatctttggcataattcaattgttcaacttggtaagccttccttcaaccactagttagctcctaccaattcctttgtttttttttcttgtcataatataatatatatgctactattacaagtctctctctttctctctctctgcctcacacggtacatttggtggagttgttatagtttgctgaccattttgatatggctatctaatgctgccaatattgtaatgggtaaagcgggatatgctcatttgcatgctcctgagaaaattaggtcaagtccctagataaagctgatttgttcgctcccaataatgaagaggatcttgaagttcctgcacacgcctcagtagtggatcgggtccatctttttaaaagtttatcctgaaaaatttcgcttgctcttctatatatcttgctgtttgttgcggttgtttgtattataactaatcgtgctttggcctccactggtaataagttaatgccccatttggttggtcttcttattttactctgcgtaatcatcactcttgtgtgctacggaaggccagctagcgtgcattcccagcgcatacatatatatacaccgccatgcgcatatagtatatagtacacatataaaggaaaaatgtatacaaagctagtactctcttgcatgtagctaataatagagaggttccctagctgcctgaggacgaggaggatgtggttcttgttttctgcctcatgtcgagcacaggctacacagaaatagcacgatcccatgcatcagtggctagtgctgcgtgccctaattcctgctcactgtcccctcaagcaaaatcatgggacttctcaaaaccaggcacccctttttggtggccagcctgcagccctgaatctctctcctgttgagttgtcccctctcgtcctatctcagagcaaaagatcattctcttttggatgcgtgtcttgacttgc

SEQ ID NO: 17816 - DNA, 651 bp, Zea Mays
ctcgtactgaactatccagagatcgctggtgaggttgccacggttgcagccactaatctcgtgcgccagtgactcctttcttcttcgaccgccaccacgccaaaccaaattcactggccaccgcttagcgccactataaattgatggcacggtctgctgcgttaggtcatcaccaagcctgagcacccgctcctgcctctgattagccaccacaactctccaatttcccatttcccccaattctgttttccgccaccgtggtagagccctcaccgtggtcagtgaattccaggtctgttcgtgctccctgctctcttgtttcagcatccttaggttctcctgatgctcctcagccaattcgattgagttaagctgtcttagatcatcgggaacacgttgtgctgttcgttgtgtccgctgtcacagtggacagagagagttagagctccgctagtaaaattagttgaggggaaactctcgttagggcttgaatttggtctctgccgaagtagaacaccggtcatcgagtgatccgaccggtataagctcgtcgaagttcggttccccgtcgttcgccgtcgtggactgcggaatgtaaagagatgaaagcgcgggggtatttctgcaagtgtcagcgagacagaggaatag

SEQ ID NO: 17817 - DNA, 508 bp, Zea Mays
aagaagatgaggtccctctggctcgaaagaacagtcgacagtatgtcgccggtggtgaaagtagtggagttccttctcctgctttgtctgctctcattggtctgcaagaattgtccctggcgaattttgatcagactcttgaggatatggtcccagaggatctgttatccgagccggcagatgatggtgtgatggaggtttgtgctgatgtgctcgacgctggattgaggtcatcccgtgcctcatcgaccttagagtgcggtctcgagggtcaggagactaacttggatcgtcctggtcccatggaagtaactgagggtccatcagccttagaggcggctactgcagagaacttggttctcaaggacggtgttgacacttgcccagcccccgaggatgttgccggggatgactcggctcgggtgggaagcgcaagccactgcccagcccccgagggtactgccggagatgatccggctcaagtgggcagcgcgaaccgtgacccagc

SEQ ID NO: 17818 - DNA, 456 bp, Zea Mays
ctggagtctttacgcccggccttgacgatgtcgattattttggacgaatcaaagaaatatatgaactcaatttttatggttccaaacctcttactccagtgatattcaaatgtcattggttcgaccctcaagtgactcaagaatggtttgatcataactcttatcatcactatcaaccatttcatagtcaacaccatctgaaggcgcaagttcgccattaatgtcattgccttcaaggattactaagtcattctcattttgcacctcatcatcctcctcatcaacaaccatttcaatatctacgtccattctgatagcttcggttaagtctatctcaaatcgcccttctagcccatcttcttggaagaactctccatcatatgtgtccgggtctaagttataatcttcatcgttaggaacaggtaatctcccgtgcggcgatgccttatacataac

SEQ ID NO: 17819 - DNA, 1231 bp, Zea Mays
tttctcagagcccaacaatgtcaagtgcactggtggcattcataatttttggcaccgacgaactgtcaactttgtttaatttcaatacactgtgacacatggatacatggggtggggcagaatatcctgtatcagatatgtataagataaagacacgcaggataccttggatacgtatcagaaacttatcagaataaaaaataaattcaataaatcacgatacagcgggcagatacgtatcagggcagactgctgatacagcccagtccagttaacccccgaaccccctttgcctcatccgctcaacacataacacggtcacctctgcaccagtgtttacaagtcgtccgactaatcgcgattagtcgggctggtcgcctggaagagggcgattaggaggacgacgcgattagggtttctagtcgtcctagtcgtccgactagtcgtcgacctgggcgattagtcgtctggtcgaacacttcctagtcgtttttggtcgttgcagttttggtactgggcttcactctagtttttggcccatctacagtagcctgccccctccaaaaatcctcctagccgccaggacccctcccagacgccagaaacccagcagaaccgttcccagccgccagaaaccctactcctctcctctgtcctcttctctggtttctgtcgacgtctctgctccagcctccaagtgctccagccgtccagcggcgtccagtactccagtgctccggcgtctgtcagctagtcaagaattgaagatgagctcgtcatctgaaggcagcacttgctctcccttctctgattatctcccagtctcccttccctttccctctattacctggacgaagatggtgctgctgctgctgcattttgtttggatgctgatctgctctaggtagcagccagcaggtaatgcagtactttttactaaattactgcaagtaattatgccaattttactttcagtttggactttggatggatccaattttacacttttactgaattactgctagtctgctactaactatgcctatattattgcagaaatgcagtgttcatatagttaatatatagttatatacatatacatatgtccttaaatctataggacgactaacggacgaccagaggtcgaccaggaccgattaggtcgactaatcgtcgccctaatcgcgattagtcgcctggtcgcccctctcactcgaccagctggtcgccc

SEQ ID NO: 17820 - DNA, 555 bp, Zea Mays
tgcttggtttgagagatttatttctgtcatcacggctgctagcttttctcctagtgatcatgatcctgcattatttattcacatcctccaaaagtacgtaccttacttgtattatatgtggatgatatgttgattacaggtgatgattcagagcatatttctcgtgtcaagaagcattttagtaaggaatttcagatgtctgatttgggacctctgagctatttcttgggcattgaagtacaacagattccaaaaggtttttatctgtcacaatccaagtacatacaagatcttcttgatcgctctggacttactgatacacgcacagctgtgacaccaatggatattcatttacaacttcgtccgactgatgggataccactagcagatccatctcgatatcgacatattgtgggcagccttgtttatctcacaatcaccaggcctgatattgctcatgctcttcatatactaagccaatttgtatccacacctaccttagttcattatagtcatttgctttgtgtgctgagatatttacgcgagacaagatct

SEQ ID NO: 17821 - DNA, 601 bp, Zea Mays
aggctcatccagatttttgaggtgaattgcgttcccctatctgacactatttttcgtggaatcccatgaagtctgactatttctttgagatatatcctggcaagggtggctcctccgaaggtagtttttactggaatgaagtgagctaccttggtaagacggtcgattataacccagatagaatcgtttcccttttgggtccgaggcagtccgattacgaaatccatgcctatttcttcccacttccatttgggcactggaaggggttgcagtaggcctacaggcctctgatgttctgccttagttcgttggcaagtatcacattgggccacatactgagctatctccttttcattcctctccaccagtatctggtcttgaggtctaggtacatcttggtcgtccctgggtggatagagtaggttgagttgtgggcctcgtcgagcaggattcctcgtgcctctcccttcagcacacacagacgtttcctgaaccaaacgaccccttttcatttgtcctgaggtccggaagttgttccttgcgagctttttctgcaagtcctgctatctcgttgtgaggtttccaaacgctgggctttgcg

SEQ ID NO: 17822 - DNA, 543 bp, Zea Mays
gcaactccgcgtcccccgggagagatctatctccaccagggacaggccaccgttttggcacccgatcccattgatccgacaaccattgttgttgtcaaacaacaccagatcgtgatgggtcttacttgggtgtcgtcgtcggtcggttgtccatcgttgcatcaaccttctcgtcgttgggtcatgtctcgtcgttcatctggtcccctcggcatagtgtcttgtcttgcccactagcgctgcatagcgcctaactatcttgaggcccacggcagtgtccctctactcgaccatttgggcgaactgaagagcagcgatgtggtccgcctgggtctggcggcgcgcgacgttagctgcatgggcatggtctacctctgtggtgtgggtgcactccgcctcatgatccgcctaggttgcgcaatcgcgctctgcctcgaccgtgcgggcgcgctccgccttggatcctctgtcttgcattaggccacacgccctccaccccatcgggccaggccttgcctcgtcgctagcattgctcgcccctgc

SEQ ID NO: 17823 - DNA, 663 bp, Zea Mays
cctaggacacatacctagacttggactaatacctagttggcactcctagattgatcaatgttgtactatatcccgtactcctcgcaatgcccctgcaaagatttaggtgtggtaggattttccttaaacaactccacatcatgtagagcttcatgtttcctcctcggtgatggggtcatgaatagaaggtgggttgacattgtcgagaacttttcaacattggatggctaccttgtataggcattcaaacatgtccaggagcttaagcaacacatggttaagatgctcagtggttttaggagaacatgtagcacgagaaacaatatgcctaacctctgttgtgtgcagctccatctcattcactgtccatttcaaggcatcatatggagtgcatgacatctaagaggagtcaaacaaaaaactagcaggatatattggccaaatcaataccatacaagttacaaatctttgcaacttccacatccacatgtctacgtaccaaatatgccctcttgacgtgataagaggtagaaacccaccttgaaacacgatcatgtaataatgtagatcgaccacttcctagcgaagcagaccaccccttgttgctatgattgtgattcatgctgcctttggatcctttgccacttgccacatgttgtcgat

SEQ ID NO: 17824 - DNA, 441 bp, Zea Mays
tttctgttgaagttctacgatctggagctttagttctgccaattctatgggagccatgcggtatggtctctttatgattggtgcggtgcctaggatgagatcaatgtagaattctacctctctttccagaggcaatcctggcaattctttagggaacacatccatgaattcttctaccacatatatactttctgctgctaggctgaacaccattaggtcttgggttgatggctgagctttacatgaaactgattttccttggtggtcagtgagaagaatagtcttatctgagtagtttatgatgccattgtgcttggtcaaccaatccattcctaggatcacatcaattctgtgggacggtagtacgactaagtccgccagaaatactaccccacttaaaagaattctgacttgggagcatttgaggtggcatagaaggtc

SEQ ID NO: 17825 - DNA, 878 bp, Zea Mays
ccagtggaaatttttactagagctgaccccaatgggtgtgaccctgttgacgctgaccccaatgggtgtaatccggccagagctgatcccaatgggtgtgaccttgatgatgctgatcccaatgggtgcaatctggccagagctgacccccatgggtgtgctgttcgtattgttgacgaggatgaggaagaagaggaggaaatccccttaattcggaaaaatagtcggtgctacctggtcagtgggggagtagtgatattccttctccagccttgtctgcactcattggtctgcaagagttgtctatagcaaattttgatgaggctctcgaggatatggttcctgaggatctgctgtccgagccaacagatggtggtatgatggacgtttgtactgacattccggctgtggggttagagtcatcccgagcagcgtctcgggcctcatcgaccttggagtgcggtcttcagagtcaagaagctggtctaggttgctctattcccatggaggtaactgagaatccttcagccttggaggtggctgttgtagaggactcggtcccctaggatggtgccagcgattacccagcccccgagggtgttgccggcaatgatccggctcgggtgggtagtgtgagctacgacccagcccccgagggtgctgccggtgatgatccggctccgatgggcaatgtaggctgcgacctaacccccgagggtgtccgagcgggctcctcttctcatacctccatggatgtcagtcgggtcttctcctccacattctgattgcatggccgcaacacgtgctttaaatcaggaagtcgccttagagaccgacacacccaacgctagagtttcgattcctgctggtgatgttga

SEQ ID NO: 17826 - DNA, 575 bp, Zea Mays
gtccggatagggggttgttacaatggttccagtcgagccttcggctatccatggcgctccgtggatccgtgatggtggtgaagcactggtgagcaattgtcggcgtcccaagctccaatcgcgccaagtgaggccacacacgcacaccgacaaccgtgctggagcacccaagcctgctatcgcgaccacaccggcaatgcagatgcgacaccacggcagtagaccttctctttccttcactcaccgattcctcgctactcgatgtcgttagggcaaaggaggagaaagggaggggttggccttggtatatagaaggcagggtgcggtcagatagtgccgagtagatctcggttgttaggctagccagaatctcaggcggggcagctatggcggcgtaattctcggatagtggagaagaaggggagtctcggctaacaggtggggtcaggcgcgtctgaccgagttgtgaagatcgtggggggtccactagtcagagtacgtgcgcgcagagacaagcgactgacgcgtgggcccgtactggcagtgaggagttctcacgggtgcgaggaacggtg

SEQ ID NO: 17827 - DNA, 405 bp, Zea Mays
gcacccccggacggaattgacattccacccaacagggatcgagatcgccatggaaattgtttctaggacgaaagccatgtaggctcatggttaccggtatctttgcacgctgctgatggcgaaatgcaaccaccactatagaggaggctcctggttgttgttcttgactgcttggatcgagtagaataataaagacagcaggggatgattccttccccctgccgctgcatgctcgtttcttctctagtgtttgttcccttgtttcttttcccagtactgctcctttgttcgcttcctatccttcctcctcctccccgcctcccgagtcccgtccctctgcggatttagctcccacccagtggctcagctcaactcggaccactgagctctgaccactaactcaac

SEQ ID NO: 17828 - DNA, 874 bp, Zea Mays
ttgcgtaaacttggacggaggcaacctggaacggtcggtcgacatgagccatgtccacgacgacgttcccgggcgacaacgcacattccctaagctacggtgtggtagcgttcaattggccgagaccaggagcttcactggcagtaaggaatgctaaaacataagtttgggaggcattaactgacctgagaacggcaggccacggcgtgatgcctcacggcagtgacggtgaccagagttgggggaaattccaaattctcgggctacagtggagtggtgctctgggcgcgtaacaagagggtggaatagagagggcactcagtttatagagtccgactatggttgctccgaatttggacggagatgaactcacagtggtgaaggggtgagtcaccggagctcgtctatcgtggcgctaaatggggttaggactcagggcagtaaatggccatccaccacgacttactgcgacgtggtacgatggcatatggcatggcatgatcagggtaaacggcggcatgacaacgatggtcgcgtggccacgtcaccgagcaagtgggtacggtgagaccggcctaatccaatcctcctctgttcttttcatcctcgaggtaatatgccactcgaacggagcacaaatctcggtgactggcttgaatcatcgcgcggaggtcgccgtcggacaggttccctgcacccgcaatcttcttcaggttagtgtaccatgccgatttccattcagcatgtctgatagaacaacttcaagggcatttctcgttgattttcatacagcgaactaccagctcgataataccaaagttgttcccctatatgctagcttcaactttatcataaggatcttgagcagttaccc

SEQ ID NO: 17829 - DNA, 558 bp, Zea Mays
gctgaagcacctcggagccggagatagcgtcgaatggtgggtgcgcactgaggcggaagcgaagtgggaaaaaagaaggatctgtcggtagacctaggtctgtgataccatgtaagtaagcaggattgaggaagaatgattgttgtatagaatgggggacatactgtgtacatatataggcgaggaggaagagaggtaaaacgaaacccctatgtctatggaagctaataatacacaggatcaatcagatccggactcctctccctaattccctctatccataagtacagtggccggccgacacaggattgccaggctcaggcccttccatatgtagctgattctctaacaggcatcaacttcttttaaaaattgaatatgtgacctcagacgtgcaactgtcctttgcaaagaagccaggaccagacaatgttgtttaagctgtctcaataaccaaatttcctccctggacaaaattttgttatcttgcgccatttccagtctatgcattacctcacgagcaagacccaactggacattcacattgcccacttcttt

SEQ ID NO: 17830 - DNA, 834 bp, Zea Mays
ggctcctggcacccgaagttggaggtgaccatcgacaatcccaagttcaaagtatagaagatgtcgaatcactaggactgagcgatgttcgatggaacgttgcacaacgtagactcatcgtttctctgttattagcgagcacactctcacctactggaatccccactaatgggctcagtggacacatcatgattgcattagctacatgatgggaaattcaatctagggtcatcacgacctagacccatgttgcggtcaagggtatgcatctggatcttgttctttagttacatcaagatgtttctagtttagtttgccctcctccattgttcctttgcacccaccaccacagttgcggtttgtgtcctcaccgtcacttccttccaaaccacttgccccagtctatcctcctttactaattgacctcttgccaaaactccacttccccaaatttgatgacgagaacccgcaaatgtggcaatcttgttgtgtggaatacttgaacaagtatgtagttaaggagcacctatggattggtattgttgagatgcatttttagagtcatactgcccattcgttccaatctattaaaccccaaactgtgaatcattttctggcttgattttttgttgtctgttacatgatcgttttgaccgtgaccaacatttgttgttgatccatcaattgttcaatatcaaataacattcctgtatgtataaatatgtctcacaattctgtggacttgttgattagctcatagcttatacttcgtccactgatcccttccatttcactattgtttcatcgacaaagtgttacttgctataaaatttg

SEQ ID NO: 17831 - DNA, 409 bp, Zea Mays
ttggttggttgtctatacaactgctgtctgggccgctggggcaactgaagatgtgatgactgcatacttgcccatcgtcctcgggcaagatgcattacaatggctacgacacctaccgcgtcattgcatcgacgattggagcgacttcagtcagtgttttattgccaacttctaatccctctccgacaagccggctcaaccatgggacctcaaatccatcaggcgccgaggggacgaaacgcttcaatcgtacctcaaaagatttcagaccatgagaaatcgcatccccgaggtcgctgaggcagtagtgattgaggacttctaccggggatccaatgactcggccttcgtccgagccatactgcaaaaggcgctgaccacctccgagtagctattcagggaagcggac

SEQ ID NO: 17832 - DNA, 702 bp, Zea Mays
cagcgttgtgtcgggcgggtagtttagtttgtttctgctttgcacagcaccagcacagcaatgaagggtaaaaactcgaaaagggactaggcaagacagtgtaacgatacgctacgtacgtacgtagagagagtgagtgactgctgatgcgtagcttgtgctcacttggagagtacacttgtactgcctacagtacaatggttggtcagtggtgtgagtgtgactcgggagtaatttatagtacgaccggcctagtaggttgattaggtagctagtagtacacgcgagagccacttttgcggccaggaccaggaggacgtgagcgattcagagccgtaggccccagatcttcgcgctaatctacaagtacactagtgcaccgcctgccgtcaaatacatgcattcgcctgctcgatcatcagtcactaccgtatgaggtccatcaagcatgaaacatcgggttaggttaggtcccgtccatgcggccgaccatcatcatcatgcaatgcacggggggcaccgtaggcaacagacagagccatgcatgcagaacggattatcgctgctgagctagctccctgcctgccttcccgagccagacgcgcacgcaacaggcacgggagggaaaatggtccggccgtgcaggattgaccctcaggtccccgactccggaccaagctggcaagctttagcttacggtgc

SEQ ID NO: 17833 - DNA, 412 bp, Zea Mays
gatgggacttatccccagtggcaccagcgctgtgctcgcctcaccgacccactcagccatccgctggaccacaacgcgtgttctgcctagagatcttccaaggccttcttggtggcctccgtcacctggggacccgacgccgcctgcgcggcttcgaaccggcggatctgctcctctagcttctgctccttctcctccgcctcaagctcatgctcggccagcaacatgccccgcctgaaggcgagttccttctcccgactggcaaggtccgtctcccgcctgtccagggacgtacccttctccttgaggttctcctcggcgagggcaatgtcactggccttgtcctccggctcttgttgccattttttcatcctttctatggcctcctcttgctggacccgttgggcctcca

SEQ ID NO: 17834 - DNA, 606 bp, Zea Mays
tgagacttttatgatcggtgtaaatgtcacaagactcgccataaagataatgcctccacgattttagagcaaagaccactgcggccaactcgagatcatgcgttggataattcccctcatgcttcctcaactgccttgagccataagcaatcactctgccttcctgcatcaacacacagccaagaccaattcgagaagcatccgcaaaaactgtgaaacgtttaccactctcaggcaaagctagaataggagcgttcaccaacttgttcttcaatgtctgataactgacctcgcaatcgctggaccagacgaaaagaacaccctttcccaagagtctggtcaaaggcttagcaatgctggaaaaatttggtacgaaacgccgataatatccggcaagccccaagaaacttcggatttcagagacactagagggtctcttccactccaccacagcagcgacattcttgggatcaactgcaatgccctgttgattaatcacatgacccaagaaagccacttccgacagccaaaaggcacacttcttcaatttgccaaaaaactgattcttcctaagagcacccagaacgagacggagatgccgctcat

SEQ ID NO: 17835 - DNA, 837 bp, Zea Mays
ttgagggcatcgaaggccgctgctgccgcgtcggaccactcgaaaccttccttcgtaaggagggcagtcaagggcgtggcgatggtcccgaagttgtgcacgaatttgcgatagtgtcccgctaagcctaggaagccgcggaccgctcgagctgaccgaggagccagccactcatggatggcctgcaccttggccggatccatggcaacgcccgcctcggagatgacatggccaaggtacgcgaccgaggtggcgtcgaaagcacacttggtgcgcttgacgaagagttgttgttgccgaagcttagataagatggcacgaagatggcgcaggtggtcggcccatgtcttgctgtagattaaaatgtcatcaaagaagacatggacaaactgacagaggaacggtcggagaacatcgttcatgagcacctggaatgtggccggcgcattgcagaggccgaacgccatcactaggaactcgtacaggccatcatgaatacggaacgcggtcttgtgcacattctcgggccgcatcctcacttgatggtaacccgaacgtaagtcgagcttggtgaagaagcacgcgccgtgaagctcgtccaccaccggaatgggaaaatcgtccttgacggtgagcacattcaaggcgcggtaatccacgcagaatcgccatgacccgtccggtttcttgacgaggaggaccgacgaggagaacggtgagtcactgcggcggacgatgccctgttttgtcatggcagcgcactgtcgctcgagtttgttcttgtgggcgaccgggtacctgtatgggcgcaccgccaccggtgaagcatcgggcttg

SEQ ID NO: 17836 - DNA, 1275 bp, Zea Mays
cttcatccagttcaggtaactggattctccagccttcctactttcacccacagccagtacctccccataacacattaacagagaatatacaaatttgccatctctctcggatattttgtggtgctctccaaccaagtttttgacaactttttcgtagaacagctttcagcattttaccagtatccctctgcagttgaggaaaaaaaagatagaaattagtgcatagtagcacaacaaatcaaacatgaaacaagtgcacttggacattcttccatacatcacgtttccaagaagatggccataaccatcatgtaataatttctctatttattgctgtttcaagatttctggagccactgtctctcaaacagatgtgtcttcaaagaacatgttatcaagatctaccacctcttcatctacctcctttctacaagttctattgacatccttagaaatcgacttcgtcaaatcagatccttcatctatattgcctagactctcagtattacctcgctctacaaaaaactacacattggagaccataccaacatctgaaactgcggtgaggatagtttaacagattcaaacaaaaggtgaaccatgaacggaaggagagacctgatttgttgtgaaactgaaacagatttctcagtgaacaatagtttcaatcttgtataaccattttgagttatttttttcaaacagtaaaaacattgggctacttagattaacacaccaaatcaattatttgtctcctgcacaagttcatgatatagaggctcttcgtatccatgggaagttcagtacaacttcagagaaatatgaaacagaacaatacaacaaaatccaatggttcttcgaagagtactaaagatgactcaattcaagtgataaattttcattgataccacctcttgctgttccctgtattgaccaatccatgcaacttgcgacaacagcccatcatccggtgacacattctcttctctccggccaccgattctaacttccaacaactcagtgcacaccttcacctcctaaggttcacaactctgtgacacccaattgtccttgactatggacgatacaacaacagaaccttcagctcctgcatcacataccaacaatgtaatcatcacatgattctaacataaaaaaagcaacacctgattaatcaaccaatcagcacctgtataagtggaaaagaagagacaaactcaacacttcaacatttatacaatattggaaaagaagagacaaaccagcaagttcatg

SEQ ID NO: 17837 - DNA, 734 bp, Zea Mays
cgcgggtgaagtcgtgcgccgtcccgtctgcgtgaaccacctggggagcttcgtcgggccgctggaggggggcgctctagtcagtgccacgcggagtgggtgctggatcttgggtgatggttgggtcttcaccgggccggaattctagcgtcgaacagcgccagcgtcaggacctcggtgagacccatttttccacctggctactgctaagattctcgttcttataggtagtgcttcttaggctgagatgttgggggccaggggaaaaaactgtgagtcgagcgccagtgaggttatggcttcgggagcgggtgtaggcatggcgcggtcggccggtcctggtgtcgtcaggttgaagaaaagcgggaaccgtccgttttatgatgaacgctctagattgaaaggaaaagaagtgaagcccctgaccgtagatccgctcagcaacggtcgtgattcaaccgtcataccgactcatctgtggatgatcctagccctcgattgccagatctgcgcttaagattagatttccgttcttaaaatctcgaccgttcgattgaaatccggtgtccagtggtgggtaccgattcgtaataggctagatctaatctgggccatcgggataggaattagcggccggatcggtctgataccccttctcgacgactatttttctaaagagccctccgaagattagtgaatcaacctgcagttctggcaggggagttctgagtctg

SEQ ID NO: 17838 - DNA, 452 bp, Zea Mays
tatgtagtgctatgtatatatgcattggtctattggcattttgttatagccctacattgcctgcgctacgcctctgttgctgccctatctagcataacaatgcttctttcatctagtactacttcaactctggcctcttagcacttatagcagtaaaaaatcttagtttcggtccattgggtttggaactgaaacgaatggtagtaggtgtgaccgtggtttgaggcacagccgcacaggcaatgcaagtagccagttgggtatcctgaatgctgattcctatacaccaccgcttcatcagcacacgccgtgtttgatcaaggagataacgtgaggtccgggcggccggcacgatgccaccacctctgacctcgtcgtgctgcggtgctggtgctaccacacaggacaatactgttggcaaactatactagctacaggtgcgtcgtgaagac

SEQ ID NO: 17839 - DNA, 509 bp, Zea Mays
gcaccctgcagcgtctccgacgtgatttccacttccctaacatgaaggagttggtgcaggattgggtgcggtcatgtgcagtctgccagcgatacaaatccgagcacctccacccggcgggcctcttgatgccactaccggtgccacagggtgtgtggacggactcgcgcttgactttgtggaggccttgccacgcgttcgcgggaagtctgtgatcctcacggtggtggatcgcctgagcaagtattgccacttcatccccttggcacatccctactccgcagagtccgtcgcctaagcattcttcgtcgaagtcgtccgcctccatggggtcccacagtccatggtctccgacaaggaccctgtcttcacgtctctattttggcaggagcttatgcggctaatgggtaccaaactccacatgacgacgacgttccatcctcagtcgaacggacagtccgagtcggccaaccgcgtcatcatcatgtacctaaggtgtcttacgggcg

SEQ ID NO: 17840 - DNA, 424 bp, Zea Mays
aggttatagggggtttgctcactgagacgcaggtgatttcagagttgcagaggttggtttctagtgagtggaattgggaggttgttaagatgggtttcaattgttttagtaccacttttacatctcgtgctgagcttgatcatatggtggagtggggagtggtacagacaaagtacaatggcaccatgaaagtggaagagtctgtgttgcataagaaagcaaaggcagagctcagaagggtttggattcaatttattggcctcccatctgagatgaaccaattccttcttatttgggcggtgggttccattctggggtgacaaaggcagttgatatgaaattcactaataggttgatgtatgtcggcttcaagtgttagtgctggatccgaacctcattcctcaattcgtagatgtggtgatcg

SEQ ID NO: 17841 - DNA, 794 bp, Zea Mays
ggcgccatgtgaaaccaaaagtcctacctgttgccccacttattctttgcgcaaggaacaatttcaatcacatcggccgatgtctcctcggtgtgaacgtgcaggacccaaattgcgcaatcaaactacctatctttctcttctgccaatgcaagcaataattcttggcgaagacctcagcagacaactctccatcatacgatgacacaggctagacatacttcgccaatgcaaccatagcgttcagcgtcaattgatgaatttgaatttcaaacttcctcataacttccactatgaatcgatgcgtcagtaagcgaaggccaacaacgaaaaatgcctcgaacacaaccaactccccctccggctctaggacatcttcatccctcgccgccctcctaacttcgttcccaaaataacccagacgctgcatctcgagcatgtggcctgagtaaattcgcgatgtaccaaactccattgtatgcccatgctatagctccacaaccgccgctggatcactaatcatcttctctaacgatagctcgttcgaggacgcaatcgcggcggacgacaatgaggaagaagacgacatgatcacgtaccgttagcggtggtgagcagtttgcttgacgcgggccagatcaccagtgacacgagagcgaaagagggtaagcaagtagagagcaaggaagctagggtttttccgcacgcagatgggtaaaaacccagtagctcgggcacgtctttttataggcaagggacaacgcctcaggaactcaacagtcccatagtaaaac

SEQ ID NO: 17842 - DNA, 697 bp, Zea Mays
ttgggatactgttcctggtgcaccggacagtcttaatcccacaaaggcttgtgctctgatttaatctcatccatcgattaggatccaacggctgagcgccatcttctccacccgacggtagaccgcggcggcaccctcatgccctcgccgacgccatggccaaattccacatacaccgagcaccagggccctaattccttgatccgaactattctaaacgaaacccacaacactctaaacccagaaaccacccttacaacacccattaacaggctcggtccccttaccacgatgcatggcggacccaccgcaatttaccaactccggcgagcgattcccaacccttcggttgctcctactcaatttgatcggaacgaaatgcggatagaacaattgctaaccaaataaggttttcctcacttgggtcggtggtggcagcggcgttgcccacgtcgcacgaccatcagcggcggaggagagaccacgacaagtagtcttagatcctcgcgacctccttcccacctagcgacagcacgtcccggaggacctccctaaccaccatccgaagccccagtaccggtgcaccggagttgtctccgcggcggccctccgcccttctctcaacgccaccgcacagctcaccccccgttcgcccaccatatgaggatcaaggggcgtgcaccacactgtactttat

SEQ ID NO: 17843 - DNA, 534 bp, Zea Mays
gaaaagtatatcgcgatgcgtccacccgacgtaataaaatgcgtggatggatgcatgcatgaggccgtgatgatgatcatcgggtgtaaaatcttcttggtgcgtgcgtgttggaacttgaattggtttcatggcgtaaaggctggaaagcaaccttgggcgaagcagtcgatatgatcgccgccactgcttattagctgccggggtagcttcttctatgaactgccagttaccctctctctcctgcgccggtcaccgcgcctaacttggtacggggaccggatcggattgggcgcgctacatggaaacctgtacgtaccactccgcgttggcgcgttggatctcggtcctctgccgcgcaccggcgcacgtactaaggtagcggttgtttccggagacagttggatgtttcgtctgaaagattttacggagccaaatactttaacatttaagtactccctccgtccaagtttaactcgcgttttagcttttctcagacataataccagccaagataatagacgcatgtacccc

SEQ ID NO: 17844 - DNA, 718 bp, Zea Mays
agcggcgacaacgtaacagcgaggtcagttcagcctggagcgcgcgcgcagctttgcaggggctcggacgaggaacgagcgggggctttgggcgccagcactcggcaccaggggccgccatggctgcagtgtagaggaagaagaaaagcctgtagaagaggggagaaggagatgatttgtcacctgcgcatgaagaacaacggagcaggcacgcaaggaagagggtgacgacggggctgctcctctagcgacacgaggaagatgacgaggcggctcctccaaccatggcaacacaacacatagagaagaaagggcgtaggttgctgctgtgcgagaaggaagagggagggggtgaggttgctgtgcgcagacggttttgtgcgaatccgagaaaaatgggatgaggcgcgtgcatcgtgtgggagcagacggaaagttggggaagagagagatggcagttgggtccacagctgacgcgtggggccggggtgggcggcggcgctggggaatggcttctgctggggcgctcgtgggcagcggctgggccgaccacgaggaaggcgaggtgaggtagcgggccattggctgggagggaatattgggccttttcctattttctttctttttctcctttttatttccaattgaattccctactaggtgcatgcttcacaaattcactcatcaaacaaaatgaaagaatgctccagcatgatgc

SEQ ID NO: 17845 - DNA, 792 bp, Zea Mays
tgttccatggcgaggatgaggatggtgaattggtgataccaaaatagcaagacaacgatgattcccaaggaaactacaagcacgtagggtccgtggctagacggctagagcgagacggccgaaggacactcttgcacaacgaccagagaaggggctttggcacctggggcgacagcgacaagacgcgcgttgaggcttggagctgggcgtgcgagtggcaaggcaagcactgaggagaccaagcgcatagcaagagaagggtggcaattgacgtccagacatcaccgggtgtttgacagctgttgctccagcgttggggaggagagggagatgacgaggaggagctggggtcgagcggctgctgctacaccaagcgatgggatgagggagggagatggcatggaggaagaagtgttgagagccaagcgttttggacttccagagagctagcgtgaggactggagctttccaaaggagtgatcgtgctttggctaggaagcaagaggtggtgttgaagatcacaagggacagacacgtgcacgtagggatagaagatgctagaagattgcagcgtacggtagacaaggaggactaaacgtgggagggaaaaaatgggatttttcttccttctttcatttttgtacccttttatttaccaccttttcagacctctatccaatactacagctcgaactggcacgagtgagacacaacagagacgtgggaatgcttctttctccccgaaactgaatcaggtcttagttatctgaaatgaagttcagtgcacacaac

SEQ ID NO: 17846 - DNA, 612 bp, Zea Mays
attaattaggacgcgacaacaatatgtgttgctagtacagtaacatttataatattagaacacaggctcgatcttcctccctaactgtagcagtgacctaacctgaaatcacctgctcctgttcccctcgcagactcgcagccgccagccctgatgagcctcctgcttccccagtatccattccctaatcctagcgtcgtaggaaccaccatccacggtgacggccgtggttacacgacaacgagccaccgcacatgcacccacgacagaggctcactgcctagtgcccatggccaagttggaggagcatagtcgatctaccgccaagccgttatatggtggtcgccctcgcccagcctttgatctgccgtgccggaggaccacacccgattcatcggcacaccacatgcgcccacggcggaggtccacctatagttgtcgcccaagacgatggaccgaaggacgccggggttccgccgtggtggcctcctggattcgattgtcgcctctgcgtctcctcctcttcctctgctggtaatgcctatctgatcctcacgctctctcctctaatgccagtgtttctctctctgtaggggtgtacgcttgtaccgc

SEQ ID NO: 17847 - DNA, 678 bp, Zea Mays
ggcactcccgagcggctaacactcaattgaactctcctcgaatgactctcctaagttaatttctcatttggtaaactatcatgttctgtccacgtgaaccgcggatgaggaagaaaatggtatgtgttcccggcgatccctggcggtccgattcaattaaaggggtcggggagcatcaccatcatgtaaggatgctagaacagggacaagaagggaatgagcagacctggggaaggctggccgcggtgatgtgtggttcacggcggcggagaatcgatttgggggaaaacccgaattgcggggctacggtgaacgagtggagatgagagtgggtgctatagcttgacgattacatggcacaaccgacctggccctcaatttatagaagggtaaagtggtggccagcgaatttggggaggacgcgcggcggccggaatgaaagggtgagtcatcggcgcgacttacagtggcacttactggttgaggagctacgacggtcatcgtcgagctggtgcggctagtggcgacgtgtttaacggctggaagcgtggcacaatcacggcgcagaacggcaactccggcgatggccaagaagccacgtcgccggcgtaaaaggtgagggacagcgaggccacagtagttcatacccatctgcaatgagatcttttcaaggccagc

SEQ ID NO: 17848 - DNA, 557 bp, Zea Mays
ctagcacactggccatcctccttctcttgggagttgcgacaggagcctttggcgcattcggcaattctgcctctgctggtgggctcagaatatccggcattatcactgttatttccaatttttgctctttggacacataatctttggcttcggttggcccgactgtaggcaccttcggcactacaatagacccttcagcgctccgagcggcgggagcgtcttgttctgcttcgacagtggaggaagtcccctcaccaaattcaggcactacgaccgtttcaatatatcgaggccggtgcgtcaaaaccttcattttcttgcccttcggcacatcggtggtggccgaagcgacatttttcctcttttttcctttcctcaaggggtagcagtaatcaggatatatgaagccaattgcatcaaaaaccctgtttaatcttttcttgccccgacccccgaaggctgcggacaaggcatcatcttcggccttggaatatgtcccaagcagctcgtcgttggtagcttcaatgcatttcaaccagtcatcatttggtttgtca

SEQ ID NO: 17849 - DNA, 453 bp, Zea Mays
ggctatggagtcagctgaatccatctgatgtggatttattaggtcgttagtataccagacatggggactatgtacacaaatcttggcttacttttccagtgcctaggctgctaacaaaggaggctataccaaacatttactactaacttgtgtacttttgacactacaaacacagtttcaatggagtaaccaaaaaacgtgaacatatgaacaattactgcttaacatacacaatgttaatgacaagaaggggaaattaattaaatgtgaacatcaccttcgttggagtggagattctgtgatgcaacagagagacaaacagctaacaccccgagatctgaacatcaaataaacaggattttcgttacatagcagttcacaattggcttcattacagtgggaagtttgaaccacacacgtcgatgcaacctaaagcataatcactacatgggg

SEQ ID NO: 17850 - DNA, 437 bp, Zea Mays
ttttctttctttcttcttcctcccaccaatccaccaatggagaatgcagcacaccaaaggaggaaccagggggcggctagggtttagagggacgtgggtgcagcaccttggggaggagaggagcggctacaatggggaagaaggggggcggctgctgcaaaaatgagggaaggatgggggacggctgctgctatgagggaaggggaggggtggctagggtttttgagaagaggagggagcgatgcccccgatgcccttgatgctaaactgacggctcacaaccaaatcccccatccatgccccgattcagacaaatgaatactcaaatgatatcgtttaaatgagatcttcacatctgcggactccgaacttctaacggcccacaaccattttcccacatccacgcaccgaagatcaacttttggtcaacatttttt

SEQ ID NO: 17851 - DNA, 700 bp, Zea Mays
ggcccatggaggaacgaccagacttccaccctccacctcctcatcgtaggagacgaagacggaacaaccgcaatcgcgtcacaggcagcactccatgcctggtcgacgctcccaagccagctgacgacgcagactcccttgcgagggacctgacgagcgttaggctcacagctagagcatcgacgtcaacacgcgtctcccaagcaccgactctgctggttcctccccctgtagcatgggggcgccagcttcaccggctctcccacctgcgggtctaggagcgccagcttcgctgactcctcctatggtttgggaggcgccaactccccctactccgggccaggaggtgccgatttcaccattaggggagaaccatcagtgttcaaccctatcctctttctagcaagctttgacacaagcgccttcaccaacatgtatgctaatctcccctttcactcagggtgcctagactccgaggaggaagacggtccgggtcttggcttggacttctccaggcttcgtgatcctgaagccatgctgcagttcctgttcgcatgcgacgacctcctctccgatggctccaacgactacaactccaatgaggagggttacgactcaactctagagtgttttcatgcggggcacgaggagcatgacgaagggaaccaactcgacatgcctcgggagaacgccccggcac

SEQ ID NO: 17852 - DNA, 450 bp, Zea Mays
tttccatcagacggctgccgttatttaagatgacgtggcctaatctcgtgtcggagttgatcccgctgttaatatagtaaataggcatggtgaaggggtatgggataactctggctgcccgatcaaaacccgacgggtgcgattagatctatcacatcatgaagcggtacgcgatccggtccctcggatcaaagaccaaacgttaggattcaaaacgcgcccgatccaatctgtccccacatcaacgatgcggcggctgagacaaacccaagccaaagcggtacgctaactctaatctacgccatacatccaaaatccgacggctcacattcacgccctttcgggaaaccagcgcacggcggcaccgcccgcctatacggcggcgaccatggccgaagatgacccgtacgacaccccgggacactacctctgacctattacgcgccaaag

SEQ ID NO: 17853 - DNA, 533 bp, Zea Mays
gtcatagcgaaaacccaaggacactccgcagtccagcaggacatgggtcaggcctgcgtagtcgaactcatgccggccaaaccgtaaccggtcccaagtgcacaccatctctaatcagcagctgactggagacaccgctcgttgccacgagtaccccacgcaaaaaggccatggcgaaaacaccagaggcagaggcagaggccgagtcccccaacaacaaaggttctagtgtcttttccatggcaaagactcggcacatcctaccagggattgccctgaaaccaaggccaccaaggatagaatggccagaaattaaccagctgacaaccaaagagttgtcgcccacacctaccatccccaacaatatcaccaacaccaattacataataccatccccacaagcaaaaccacaacatgtaccagaaacaccaagaaatccaacctctactgccacctccaccacatcaccaaaatccaccaccaccagcagcacccaaacaagaggacttcgccgatcaacccttcggaggggt

SEQ ID NO: 17854 - DNA, 539 bp, Zea Mays
gaggaaagcagtggatctccctcgacaggttagaattgatggtcaatgccaatatatcattttctgcgtgaaattatgttgtattgagatttgatttaaacattgagttgtgattatgcagatgtaaatgtttacgttattcattgtatacattatttcagcagaggcttaatgtgagatgcaatccccaagatgttatagtaagcattcagattttaaatgacagacaacgtcaagctattgcatggagggggttctctagtatacttgatatgagagttgacgcgcttggcagtagatctcatttagcttggctgatggaaaagcttgaccataatgatatgacaattcgagccgccccagggaaggagctaaaaattacaaaggagacggtgcaccttattttggggttaccaaatgctaggggaggaaaggcattaagcattgatgaagctgttgctgcaaacaatttaagggctgaacttggtttatccaaagaagaatttggtgttgcagctcttcaagatcgtttgaggaaa

SEQ ID NO: 17855 - DNA, 578 bp, Zea Mays
attattttgctgcgttagatgtggccgcggtggagtcctcgccgcgggtggaggttggcgaggtggctgatcttcctagtgcgaggaccaagtgtcggcgacgaagggtggtgtcgaagcatagcgtgggcgaggtttcacgaagtggtaggcgttgtcggatggggatggagcgggaccatcttcgagtagatcggtttggtaaacgagagctattatctttgccgattgggacgagcattggtgagggggatctgcggaatctttttgagggtgaggaattgaaaataatgttgttcaattatagggaggcgggcatcatcccgaaggttgagccgatgtagtatgtggtgccctcgctgagtgtgtgtaactgcaacttgtattgtaatgtggcctgttggccgtctttgagtgagagactggttgtcgcgcacttgtgctaatccggctgcacccttaggcgacttttgcgcggagtgtctttttagtaaaagactttgattgacgcacttattgcgcttatccggctgcacccttgggcgacttttgcacggagtgtctttttagtaaaagac

SEQ ID NO: 17856 - DNA, 546 bp, Zea Mays
ctgggccacacttcggaccgccaggacgaaggacttcgcaatgactgctgagttaccattgtacgaagatatggtagccttgtaactcatgaggaactgctttgggtcggtcaagtcgtcatagacaggcagtgtaggaggcctgtatagtggtggctatggtatagcctgtaattttggtgtcaacggggaagcttcatcatagaggaaatcatggacattgaattcttcatgatgaaggttgtcatggttgcgtccatcataatcttggtccctatagttgttcatgttttcgtgcgcctcgatgttgcgcatctctttagttgcttcgtcaatcttcctctgaaggtcagaaagacaaagcattttctccttgggcttctcaacttgttgatggatggttactgatcttgtcaagctcctcttctcgaggtggtgggctagtggccttcttcttcttcttccgattccttgcttctctaatgagagcttcgttcccttgattgggatcgatgggtgcaaggatagagccagttgttgttgctt

SEQ ID NO: 17857 - DNA, 384 bp, Zea Mays
gcgcgacaaggcgtcgcacccttggaatagtttcttcggaaagcgacccactgatcaataggagtacaagtttacctcggcaaataacctcggcgggccctgcatgccttggctggatccaccgcgaaaacctagccgcctgccctcctccgccgtggccgggacttgtgagaaactcagatgccgttaatcaaccgtcgccaacgacgaggagacccttgcgagcacggccatcatccgtccgcgaccgaggcgcgcccgcgcgcggcggcggcaaggcgtcgcacccttggaatagtttcttcggaaagcgacccactgatcaataggagtacaagtttacctcggcgaataacctcggcgggccctgcatgccttggctgg

SEQ ID NO: 17858 - DNA, 591 bp, Zea Mays
gcggcatcgcgaacacgaggtcttggtcgcagtactacggcagcggcttctccatccgcgtgcctccgtccttcgacgacatcctcgagcccgatgtaattaccgacctgaactgtttcttcactcctacattccatcgtcctcctgcggttagggttgctgggcgtcgcgggggtgcggaggagctcagtgtttggtttcgaatttagtgaatgctgactcattcagtccttccgcgtctcaggactacaacgccgggatgacatactacggtgacaaggccaagccccgggcgtacgcggcccgctttgcatctccagataggtaggtaggtaaggcctcactctactccatcaactgcggccattccagttctgtactgtacatcaatttgtgattacatttgtctcactttcacaaggatgctgtaggaaatgaattttggtggtgacgtgttgcacatgctaaatgcggagtgctctgctcctttgtttgatgtagggatgagctcatcagtgtggtgattaagccgtcaaatcagctcaaaatcacattcctagaggttataagagacttgccattttattgttt

SEQ ID NO: 17859 - DNA, 340 bp, Zea Mays
cccgccataaatgattggttgtgttaaccatgcctggcaccaagccacagcgtaagcgctggtccgctttccactcatgacctacggaccccttaggccgcatagcactcataacctacgagcccccggactccagcacattaatagctcgcgcgccccttggcctgtggcgcacttatggtctatcggactaggcctgagtgcgagcgcagggcactacacgatgagacgcgccgagccctaggctacggaggccaggggtcagtatagctcgaatgatggcacctaggaccatcgctgcccccacgtcatccaccacgataaatatgcgataaccagg

SEQ ID NO: 17860 - DNA, 861 bp, Zea Mays
attttttgtttaaaccctcagggcccacacgcccttgtaatccaccaaacaatactattccggcccgcactcttttcctcccagggggtgaggtttttaacgaggcggagccatgtaatatacctgcaaaaatccccccgcaaaaactccgacgcaacatgtcaaaaaagaccgcatcgacggtcttcgacattcgaccactccgaagtcactgcaagaggcagcgtagactaccctcgtgtgcgacattccgcgcaaaagtcgtctaagggtgcagccggaatagcacaacaagtgcgttaatcgaagtcttttatctaaaagacactccatgcaaaagtcgcctaagggtgcagtcggaatagcacaacaagtgcgttaatcgaagtctctcattaaaaagacactccgtgcaaatttgcccacgggcgcagccagaccaacacaggcgtacgaatacggcaaacaggccacattaccatacaaattacaattacatacacacgacgagggcatcacatattacatcggctcaacctttgggatgatacccatctccctgtaattaaacagcattatcctcaattgctcacccttaaaaagcttccgaagatcccctcgcctatgctcgccccagtcggcgaggacaacaattctcgtttaccaacccggtctactcggagatggtcacgctccatccccatacgacggcgcctgccactccgcgaaaattcacccacactatgttttcccattacacttcgccgcctacacctagtactcgcactaggaagatccctggcaccctccacacgcggcgaagtctccgccgcagccacatccaacgcaacaaaataatcc

SEQ ID NO: 17861 - DNA, 545 bp, Zea Mays
gccgagttaatctagagatattttgtaataaaaagtcacatgccaagatcaatgggtttagtactagcagtgaggcggcacagataagttagattggttatttcttgttttcctccttaaccatgctttattcttgtatgtatgcaatctgaatttattttgttgattctttatgcttcgttgtgaaagctgaaatgggcgcggataattctatggtttgatactctgaatttgattgtgtgagtcgggacatgggatagataggatatacattttccacatgttctatatggattataatctggccagctttatttttctcccttgtattttttcctaggagactgcgtaatcctttcatttgtacccattgtgtgatcgaatgatcctagatttgaatggtcttcatgtaccttccggccgtatatgtatatatgtgtttctggtcttcattggaatagcgtggtaaattaagtttgtagtggctaatagaaccaccagtaaaaaataacttttataggcagctcatgtttacctcagtttcc

SEQ ID NO: 17862 - DNA, 555 bp, Zea Mays
acctattgcttctttaacctcagctaaggccgtggaattcatacaagacataatattcagattcggaatatcgaacagtatcataactgacctaggatccaacttcacaagttcagagttcttcgatttctgcgagcaaaagagcattcagatcaagtatgcttcggtggcacacccaagagccaacgggcaggttgaacgagctaacaggatgatattagaggcactcaggaaaaaagtcttcgataaaaatgaaaagttcgcaggaaagcggataaaggagttaccctacgtcgtttggagcctaagaactcaatctagtcgagctttgcatggaaatactcctttcttcatggtctgtgggtcagaagtagtactgcccgctgatctcaagtttggggcaccaaggttggtctttgaaagcatatcagaagccgaggctactaggctggaggatgttgatgtactcgaagaagaacggctgaacacggtaattcaatcagcacggtaccagcaaactctgagacgctatcacgacaaggccatgcgatgtcg

SEQ ID NO: 17863 - DNA, 541 bp, Zea Mays
gtccggtgtgcaccggacagtgcactggctgggcgcgcgtggatatgccactttgctgacctgtttggtggttcaccggataggcactgtacagtgttcggtgtgcccatgaagcgtttttaaaaagatttcctcacccgcgcccgaggcctgcctcagtttatcactagcgccagctctctgctctctgtctttctccttcgtcgctgcctaggctcatcgccggcgagctccagctgtcgtgctccggtgtgctgctccagctggtgttgtctccttcccagtctcatttttctctgtagtgaaggcgagtctcccacctcttgattcattctctctaatcctgtgaaatcgtgtgcaattactttgtgccattgtatccactatccttcagtgaggttctctgcaggttcccctctccttttcggagattttccattcacaaatagttgtttcgcggtcgtttaatgaacctgtgcaccaagtgcttggtgaaatgcccaaaccagtcaaaatagctcaaatcgacctcaactttttc

SEQ ID NO: 17864 - DNA, 1152 bp, Zea Mays
gtcctttgcccctggagggaccactgccctatttgtacacgaaggggagcgtccagggtgaaactgggtgttgtatccgaaggagagatgtcctggcgtctgtaagccgacgtgacagtgaactttattgttgacttgcgcccgctggtttcccgtagagagccgaggccaaggcagaggggtcgtccatacgcctaagcccccgagggagaggcttcccatgccgtagttgttgtaacagcgctggggtcttggctaaagactgcttatgaggtgcgtcggcgtccttgcacgggatgacattgagattccctactgcgttcatcgagatcagagccctagctcgaatgaggcgtaaatcttcccgaggcattggacgagcctccccctaacgtgcgccacagtgaggcagagcgttcgtctgcgagattcacggcgtagtaggtggccgagaccgagctcaggcaaggcagagaattcgcccaaggtccgaactcgtcgtcggacaaggcggagaaatcggccgaaggctggacccggggttgggcgaggcggagagattgcgcccgtgggctgaatcctacttcgggcgaagcagagagaatgcgcccgagggcaagtctgctctgcttgtcgtattaggcgtcccatcggagggtggcagtgtagacgtaatcatgctgttgcgccagacgtgatcgccatcttgtcagtcactgtgctatgctgccacagcgtgggttggcatgagcattaaatgtgcatgtttccttcctgttttcgggtgcccctgtcttttctgcctgaggctggctcgggtgagacggacggtgcgacggcgaccttaggcgaggcggagtcctgcccgaggtgcgagactcttggggatatatctcggtttttataggtagctcggctgtcacccctcgagagtttcgcccttatctctctgagtgcatttgttatggggataattcaggtcctaattattaccaccgacacattataaataaaccttcatttctttcttcatgattcacctttaccttagtacgtactggcgacatgacaacagaggcaaagttaagaagagataaattgttttcaccgacaatagtgacgaggggacaaattggtgtggcgacatccctc

SEQ ID NO: 17865 - DNA, 437 bp, Zea Mays
ttcatcagaaaagtattagttaacaagaactactttattcattaaaaaggattgttttcatcctagtacaaactactacttttcctaccagaataagctaccatgcagcagtcgacgacgcttgcagggaggcatctcatcatattgtcttgccccaccatcatcgtcgccacttctatcgctgtcctcgtcacttctgtcgtagtcactgctgtcgtcgttgttctcgtcatctccgtcgtccgaggagacgatgctcatccaatatccagacatcgggtcgtcatcattgtcaaaggactccacatccgacgattctccgtcgtacgtccaaaaccagtcagtgctggtgtcggagtctagctccccatcgaggaactggaggtcgtccccatcggtgaggtcgccgtcggattccgatgtaacctcaaagtccc

SEQ ID NO: 17866 - DNA, 439 bp, Zea Mays
cagggagctccgccaccactcgttctgtggccaccgtcgagccctcgccgtgtctgttgcctcggtaagctctgccttttcgtcagcagtgtggaacaccctccggtttgcacccaacccctctagtttgcccactccgcgctcaccggcgttctccccgtgcaaccgaagccccaccaccgtcgacccatgcccttgtcgtgccccgtacaccgttcgagagtccctgagcctcccctcaaggtaactgacctaacctcgcccctaatttcccctgtcatgcacttagtcgcgcgcgattgctcgctggagtgttccccggtccgccgaggactctccctccgccgtctggtcgcctcaaccccgttcatgcaaccccgaccctgccataacgcttgtcaggtcatccccaacctctccaactattcataccaacccc

SEQ ID NO: 17867 - DNA, 501 bp, Zea Mays
tccgaaaataccattatgcagccataatatacaatattaaggcagtatggacagaacaatgcaagcaaatatcagcctaagttagcacaatgtcaacatactcctatgcagctagaagactactctagaaaaaaaaactcgtttctgcaaatgtcaaatatcctagtacctatgcagtataagatagtggagatagcttgcgacattatctttccagaaggcaagtgccccctaacaggtatgctgctagttactaattatacaagcttatcctctatttaaccataagctggccatcaaacagtggaaacatgtgtcagcatcaaaagaaaagatatatttagaaacaatattatttcacttagctgctcctagaacttgaggtcagatcagaatggcacaaattagtagcacaaaatgcagtatcaaaatacggaaatgaatgcattttaaacattgaaaacagcacagcagaagcagctaacatcacagtaaaaaaaa

SEQ ID NO: 17868 - DNA, 621 bp, Zea Mays
gtatacttgagaaccatcagcagcaattagatttgacctcaaataaaattcagtccgcatcatggttggattaggcaatccacatcatctagttctcaaaaaatcgctgctccagaaatacatgaaacgcaaccaaatcagtatcatattaagcagcacaaaaaacgtgacaggagaaagcacacatgtaactatgtaagtaaaggctcagatgaaaaatgggtaaaaagttcgtttgtcagcccaaagagagaaaattccctcattcagagtggtgcatgactttgtatcatcattgcccgtacaacctagcttagtagctttcctctgcaaacgaggaagaaagaggaacaccagaagctataacagacccaaaatcaagcaatgaatacacggtcgccaatcgaaatacacgatctagaagagaaaacagatccacaatcaagcaataaaaactcaagcagaaggaacaacgagtgagctactgtgctgcctctgcttggcagaggcggcgacaagccaaggcaatgattccatagctgctgcggcggtagtaacagggtattactggataaccatcagaggcaatagcgcaagtgtattgactacctagcaaagcac

SEQ ID NO: 17869 - DNA, 527 bp, Zea Mays
ctgtgttgcttctccgactggctactgccatgtcttgtcgtgtccgcaggtgggtgatggcttgttgcagtagaatacggagtagcctgggacgcctgttgtgcgtagaggtgtataggcggagccatttagattccctctgccttagtaacgcatgagcaatcagcgggagtcatgatgattgcagtccatgcagcattgataggcagtaacccttttcatggaaacgcgtgagtaatggtgagtcattgtccttgctatggtaacgtgtgagtaacagcacgacccacacagcgtggactgggcacgccgcctgtcactggaatggataggcgcacgtcttatccgtaatgaatgcaaagatgcgcgtagcccagaggcttcatgttaggttccgcccattggcttacgccgcgcgcagtaggccacgtggcagcattgggtctccgcttgggcggggagtaggagtgtatgtgataaggtccggatcccaccggattaggtttggacacgtgtcggcaccggac

SEQ ID NO: 17870 - DNA, 662 bp, Zea Mays
cttcgaaaggtgggagcagtgggttcgcttggttcctgtgactctaatggtgaccgctccggtgacgaatctccacagggagcaccgcaattgctcgctggaacggtccgttcaccgttggccgcaggatgccatggccagggggcccgcgcggttcattgcaggtaatacacccctctgtcgtgttccctgttgcttcctctctctgctacacctagttacaagggtagtcgggcacctggggatttgatcgtcgcgctccggcgaacttcgccgcgggcgcttatgcgccgccgcctgggcgtgtcgggggtagaagaaaggattgggtgagttgtcagccgttggatcgtgacaatgagatagagattagatggagcgtcggctggtcgtgggattggtgacggatggctatgatcgggtcgcagatacccttcgcattgtagtgtcctagccgttcgttctaagatgatcgaccgcgattagacgacttcataacccttcgcgcgatctgatctggaccctcagattttgatcgggcagctcagaatagaacgtaccccttcgggctggccatctgtgaatcaaaccgccgtccccacgggggtagcctgtgtctgggttattttgtgagttaaaccccgaccttctctgtattagtg

SEQ ID NO: 17871 - DNA, 1035 bp, Zea Mays
aataacccgaactgagttcaccgcactatttctatgagtcgctgacagtttacaaaaacctcccccgagttctatttcttcgcaggccgaggtccacgatggcgaacggcggggagccgagctccggcgagcgcatactggtcgaattactcaatgactggtgctctgcttcggtctaaacctaattccaaccttaatgagtgttccccccaactaatttcatcaaaggggctttaacacggtctgtccacgacgacagcgggtaaaacggacagtcaaccgtgttcccggcgatctaagatagcttaggtcaatcgagttggtcggggagtatcaggagcacacaagaacgctaaaacgggagggcagagggtatgagcggacctgagatgcgttggccacggcgaggtcacaaggcacggtgttcttggttgatttgggggaaatcccaaattggagctctttggtgaaggatctgaggtacgggtgggtgcgctagatgcctgaatatatagcgaagacgatggcgcactcaatttataggctccgggggcggtggcgtccaatttcacgaagagatgctggaggccggaggggaaaaaggttactggcgcgcaagcttagtggctttcaccgtggcaagctccccagcgatgaacggatggctaatgcgagtcacggcgatgcggtggttgtgccaaggcacgtggcgcaaggccgtgaagcggctgtctccggcgaactcatccgaatccgccgtggtctgctcggtacggtggccggagtaaaataatggccggagtgtttccatgatgtgatatttactaaccccagcgctatccaactgatctgagcgtgaatcatagtggcgaaaacacgaatccgcgtgtggctcatcggcggtgtgagactgagctggcgatccaatccagtcactgtacaattggaacctctattcagtcagcctgacagatcaagtttgggctggattttctcctaattttacatggcaacaaggccatcgttctgtagcaa

SEQ ID NO: 17872 - DNA, 328 bp, Zea Mays
caaccatcatacgcacaacatccctcctagctttcctattaagccctctgacattccaaatgagaatttttgacagattcatcgataacagaaatacaaccaaaacaatgcgaggctacagaaagccatcaagcacacatttcaaggcttaactccctaagcaaaggaacatccaagcattcttgcacattatctgggaccgaccatccaaacaaagctgctagggccttgatgtgtgagttggaaaggggcttgttaaacagctgtccaaattcctccagcaattcatcagtaacagccacctgtgaatttgtgacgttcaacttca

SEQ ID NO: 17873 - DNA, 342 bp, Zea Mays
agcacgcgtgcgtggggaattcgaagtgacccaacccattcctggccttgactcggggtggctcggcccatatctcggtgactccgttcgcccctataaatccgcccgagggctctttcgttctttgccttctgctcttgctttcctgccctagccacaaaaactcttgcgctctcttcttgtcttcttccttagctctgatggacgagaaactaagcgtccttcctccccacgacccatggccgatctcctctatcaccgtcgatgacctgcaggcattggtggacatcgggctgctccgtcccagctcccacgggccacagctggagtggattgcaccag

SEQ ID NO: 17874 - DNA, 442 bp, Zea Mays
gaatgtcacaccgtcaggaggggagatgacgaggaccctcctcgccccttcagacaggtcaaggggaagatagtataccttgagcagcaagagggcaggaagaagagatgtatggacagagccgcacgtgcagcacttgcaatggcagcggcggcagattaggctgagcggggaggccaactccaattttcttctaatcagatagcctatcgagttcgtcgcctcgtgtctcggcctcgctcgactgctccccccactccttccgccacagtctccactccacctcccacttcgtcagctcctgtcgctcccgagccatccaccacacccgctatgtccaccaccttcgccactataggttccactgctcccgctcccgcttccgctctgcctattcctccacctcgcttcagggagcgtgatgagactgaggtgagaccac

SEQ ID NO: 17875 - DNA, 728 bp, Zea Mays
ttcatctcgagaaccacaagcgagactctagttcataagttgggcataaaagcccgcgaaccatgaaggaactccacgacatcgcgactagccacgtgtcgggggaagatgtggtgggggctatctttgaccaccataagcagaaggccaaacgtgacaaagagccccacagagcttccatcgggcaacccaataagagaaataagaaggacatgggcggcacgatgaaatgctagtggtcgcatcaggccagaaaggaaggaagccttcgaccaaggaggccatcaaccatttcgaaaaactattggaggccccatgcccaaaccaccgctacccggtctgataagcctgcaaggactgtgggtgcttaggaaattcctgagcaaataggtgcaatccagaaaggggtctgaaccctagagggatggcgagcaggagagaaggggcctcactttccccgacgaaactagatgcatgctaatcttcggtgagcccgactactacacataaaagaggcactagaagcttgaacgacgtgaggtattccaagttcggcaagcggctccggccctcctcgactggttcgaccacgccattaccttcgatcgcttcgaccatcccgagcacatcccctggtctagacgatacctgcttattgtcaatcccatcatcggatcggtgtgactatcaaaagtgctaatgcattggggcagtgggctcaatattct

SEQ ID NO: 17876 - DNA, 287 bp, Zea Mays
gatcctgcgtgcgtagtcgccttctttggcttcagcttgctgatggatgagcctcctctagctctagcttgctgatggttggcccaaaactcccatggagcatgtgcttccctggctgctaccttggcagaagtcttgttacggttgttataaaaccagttgagcacctggatgcatgcatgtccagatcggaatgaaaccgcaggttcatgggagagggaatttgaaattgatatgtggaacggaacatcgtcgatgcacatacctgctttggcttgacgggaacc

SEQ ID NO: 17877 - DNA, 739 bp, Zea Mays
cgtcggcctggcaaggagagggtcgacgacggtgatgtggccgcgggagaacgggacctcaggtatcagtcccccgagcaggtcctcaaggacatcctcactggagactctaactccagtgattataatgaccacctcaagaagttgtacgtgatgtacggcgggagctgggagctcacctcccacaggaacgtcaagtccctccaccgggaggtcctttcgcatggtcctaagggttccgaaggctgctccacaccagcagtggcggagcaccactatctccttcggggcatccgactgccccgagaacatggtaggggccggcatactgccgctcatcatcgcccctgtcattgccaacatcaagctgcatcatgttctgatcgacggtggggctgggctcaacatcatcagccacgctgcgtttaggcagctgtagatctcagggtcccgactgggaccctcttgtccattctccggagtgggcgctcaaccggtgtatccctttgggagcatcacgctctcggttacattcgggacaaaggaaaacttccgcacagagaacgtccagttcgacgttgcggaggttaacctcccgttcaatgccatcattggcaggccgaccctataccggttcatggccattgcccattacgggtatttggtcctcaagatgtcgtccccagccggggtcctcactgtgcagggcgaccgtgccgctgcgcttgcggccgttgag

SEQ ID NO: 17878 - DNA, 280 bp, Zea Mays
ggccgctgtacccacttgcctcacgaccggtccagatagcctcgccgaagttggccgcctgccacgtgatggccacgtgccttgaagctttaccatgtcgcagtaagccgctttaggtagctggttcgtcgccggtaatcttgccacggtgaaagccacgcatctcttgcgctagtgacctcccctctctccggccgccagtgcgccatctcaaaattagccaacaccaccgatgaaacctataaattgccgccccagtgaactccgctaggtaattgcg

SEQ ID NO: 17879 - DNA, 794 bp, Zea Mays
ctccccttggcagatggctttggataaaaccacgcctaccgcctccgggattggagccaggtttcccctaggagctgaaggagaagccgatggagaagggagtgagacccacctccccgcacctccggagctaccattagatttagcccaagttctagccaaccaaacccgactcattgaagtcctcactagaagtctggagaatcagcgcccgaatggtggaagaccacatgacaggatgggagattttctaaggctcgaacctcccacattcgctggatccagcaatcccctcgatgctgatgactggctgtgcacgataaaaaggaagttagaagccatcagatgccctgagaatcagcgtgttcaattggctgctcatcaactttctaggatggccctaacttggtgggataccttcagcacagccgtcagagatgctacctgggcagaatttgaaactgcttttcgagaacatcatgtgccccaagggatcgttcagctcaaggaagatgcgtttcgggaactaactcaaggtggaagatctgtcagtgagtatgtgcacaaattcacagaattggctcgctacgcgcctgacgatgtcagcacagaagccaagaagatggcccattttttgaaaggactaagaccagaactcaagaccatcctcgccagccaagatttcctcagcttctcgcacctctcaaacaaagctatacaagtggagagggcaagggaagaagaaaaaggtcacctcaagagaaaattccaagtcctccaagctcagcagcaag

SEQ ID NO: 17880 - DNA, 562 bp, Zea Mays
ggcgacgtggcttgtcaccggagttggcgtctttcaccacggttgtgccacgccccaggcctttaaccacgtcgctactagccgcaccagctcgccgataaccgccatagcccctcagcaggtgagtgccacggtaaaacacgtcggtgactcaaccttctttctagccgccgcgcgtctccatcaaattcaccagccaccgcttaacgccactataaattgatggcacggcctgctgcgttaggtcatcaccaagctcgagcacccgctcctgccttcgattagccaccgcagtcctccaatttcccatttcccccaattctgtttccgccgccgtggtaaagccctcaccatggtcagcgtattccaggtcggttcatactccccgttctcttgttttagcatgcttgtgtgcccctgttgctccccgaccccgccaattgagctaagctaccttagatcgccgggaacgcagtaggatgtccgtcaatcatgcggtcaccgtggacagtgcatgttagagcgccattagtgaaattagttgaggggaaactctcattag

SEQ ID NO: 17881 - DNA, 647 bp, Zea Mays
gatgaagatttagattattttgctgcactggatttggccgcggcggagtccttgccacagcctgaagtgcgcgaagagtctgctcccccgttagcaaaaggtggtgttgaagcacaatgttggtgagatgtcacgaagtgggaggcatcgacggatggggatagaatgatcccgtcttcaattagatcggggcgaccaacgcgatatgctatcctcgacgtccgggacgtgtattggggagggggatttgcggaatctgtttgagggcgaagagttgaagatgatgttgtttaatttccgagaggtgggtcttattccgaaggctgatccgatgtagcatgtttgctgccctcgctctcgtgttgcgatagtgagtgaaaacgctgccctcccccagttcgcaatagagagggagggcaacaagatgcgatttgtattattgtgcaatgtggccgacgggtccttcgttctgtgtatgtaaactatgatgacaccgcatgctgcgcttgttgtaagattgtcccgacttgtgatcgtgttggcatggcacttagatgtggtggagacctcgcttaccgcggcgatgttggacgcttatggcgcatacccggctgcgccgtaggcagtttttgttcggccatgtcaga

SEQ ID NO: 17882 - DNA, 439 bp, Zea Mays
cgcaataggtagcctgcctgtcctctgagtcgacgcgccagtgaatgccacggtaacccgcgccagtgaacctcccctctctccggtcgccagcacatcttctcaaaattgggcgccaccactgatgaactctataaattgatgccccagtgagctccgctaggttattacgcatccaaagcaccagctctcgcctctgatcgttcaagagagcctcccaatttcgtatttcccccaaatcggtcggaacaccgccgtgagacatctcgccgtggccagtcgtctacgggttagttcatgcccttctgtgtgatgttctagcctccctcaagtctcctgttgctcgtagacccgtttgattgaactagaccgcattaaatcgtctggaacaccacgatttgtctctgatattcgtcgctgccatggacaagcgaactcc

SEQ ID NO: 17883 - DNA, 854 bp, Zea Mays
aatttagaaacactttacacttcacagtctcagcttcacaagatcaatacaaactcaggcagcagcaccagcaccagcaccagcaccttcttcatctagctagagctccttgaaggactcgtccaactcattgtccaccacagcatgttgtgcccgttgttggtctagctcccaatctttgatgcacaccaacatctccactgtctctgcattcaagcgctgtcgccgatcctcaagaattctgccatacaaactaaaagtagactccgaagaagtagttgaggcaggaacagacataatgtctctagccataattgaaagaattggataggttagttttatgctcatgccaccaatttaagatatcaaaatcatcctcataggcagccacattgtcactgtcaaggtaaacagttagctcataaagacctacaccaggtccactactacctgaagaacctgatgcagttgaggatctagaagcacctgttcctccaaaaattttgccccatgcctattttctcttacctgtcatacctgattgatgtgtggttctagatagcctagcagcaccaaacttagtttcatacttggcatatagcttatacaactcagtcttaacatcagcaaaataagtactgtaattataattgttcattagagccaacagcatcactaaccgacccgacaggtgccccctcagggtcgatggcagtatgactgctaccgacaccaaaaagggcagcagcagcatctcccatgtcgtcgacgtcatcgggaagctgccctaactcaacgagctcgtcgttgatggttctagggtacccgccgttgtcgtcatcgtcatccatgtc

SEQ ID NO: 17884 - DNA, 376 bp, Zea Mays
cggacggcagacacgacgcgagccccatgcgggacacatacgatataggtcatgtagctctcgttcggtcgtcactctccccgcttgccccttcctccgctcgcagctgctcattgttgtcctagatcccccgtctccatcatcggatatctcgtctccactgccggatctatgtcatgagccggcgacatcttcagtcttcgctgctggatctccgtcatcagctgacaacatcttcagtctccactggcgtgcggcgcgctgacgctcgcccttctccctcctcaatccctaaccctaatctcatggctcgctgtgtatcagggtgttgctatcgtcgcttgtcgcacgtcatcatcaccgcttctctagctcc

SEQ ID NO: 17885 - DNA, 384 bp, Zea Mays
ggaggcaacagggaagatggtcgtgcactagggtgggttttatagctgtggcgcgggtgtgggcacgaggtgggcgagggcgcgtgggggttcgcgtgcgggcgtcctctgggcgcgctctcgagtgtcagcccacgtcgaacacgtgggggtttacttctgccaaggttcaacggccgatttggtcgacttagcatgcagatcttagcaaaacccccgtgtacggtctcttctctgcaccaaatcctaccttttttatgtgagttccaagcaaagatatggtctggttagagagatatggggggtgagaagttggctctgtccggactgtccacaccgagacaaaagccatgccaagtcatgtcaaatgacttagggtcgggt

SEQ ID NO: 17886 - DNA, 802 bp, Zea Mays
catccataacccacttctatctcggcaccgtacctcgatggcactggtggcactagcacgaccacgtagtcggccgacgacctaccaaagtccacaagcaagcagcgaagagattagggtttgagaatgccgactggggagtggggactggtgaggaagagtgacatacctgccaagccagagcccggagccggagatgagggtcaagtgcgcgacgacggacgacgtgagagggagagccagagaagaggagattagggttagggctagggattgggttggccgactggagagggagagccagagagggacttatctgccaagccgcagcccggagccgaagatgatgacgcgggacagcgggagggagagccggagtctggagaagaggggattagggttaggtatttctgattagggttagggatttcaccgatggagagccggagtctggagaggggcgccgcacggaaggggggcggtgacgaagatccggcagagactactgcgacggtcgatggtgaggcggtgagcagcaggcagagcgcgacgcagagcgaggagcgacggagaggccgagaggcgagagggaatgagagagtggacagcagatgagcggagagtggccgagtggagagggaggctggacttatgccccgctccccgttatcggaccggttcgtgcctgccgttttctggcgggccgggccgtgccactcggcggccgcagcaggtagcccaggcacggtctggttagttggttcgggccgacccaggcacgaatccagcggggccgtgccgt

SEQ ID NO: 17887 - DNA, 305 bp, Zea Mays
acgcgccaccattccccctatccaaacaccacagcagaaaccatccggtggttcacgctaacaccgcggttactttgcacgctccgaacggcttttcaagccagttactcgcacggcgcccccacgctcccccctcactcttttgcaccggcgcctggttagcccctacccaaaccatggttcaggggatcgaggcagtgcatacgcatttatactctcgccacggggagtccattctggtggcgaacgacgggctaatcgttctgttgtcgtgaatcatgggggaaaggggagtacgctcgagt

SEQ ID NO: 17888 - DNA, 803 bp, Zea Mays
gttggatagcttaattgacccctattctatagggagtaatgcgaccatattgtcatggtttcggaaatcgggacccagtagaatttatgtttggtgggagaaggctcgagtggacacactccgaatggtgaatcaggtaactcgagaggggttatacttgtttaggcttgtgtcctacgtccagtgtagtgttgatcgtttattgcttagggaaatgtgttacaaaggttgcaaatgtgagaatgagatgaaggggagaacttaggtagaatgctcctcgctctttgtatgcctgttcgttcgtccctttttataattcaagggggaggctcttacaaggggcttatctgcagcatggcacaatctatcgtctacggaagtacttatgagcagtcctccttacgttgtcttctgattcgtgcgtaggtgtatgtccggtatggcggatcgctccatcctacctggtatgcgggtcactgtagatactccaatgctgaggttccccgtagcggagttttgctggtcccacgaggcagaatcaggagatatttggggtcgtacgcggtaacgtctcatcctattgacagagacccccgtcactccatgcgtgtcatggcgtcagccatggcggtgtatggtggtgttgtgccttatcgtagctggcatggggcaatagtgccattcgtgtccccacgtcagtcgggtacagacgtgtggcttccatgtgcatgacagggggtcatgtcatttgggcccacaggtgtactggcccatgttacgagcctttgctccttcgcctcgca

SEQ ID NO: 17889 - DNA, 347 bp, Zea Mays
cctaaatcgacgtccaccacgcatccttctcctatgccgtgatagggcggtggtgcacataatgccgcggcgaagctcccgccggtgacacccgtcccggccagccgacgactgattccccaaacctgctaggattatgtgcaaaagggaacacgacatatgagatgggacacttactggagacaggaatgacgcccgaagagccacccacggcacgcagcggcccacgatggcattgtgcggtctggcgagaaattgccggtgactgccggttcccgcacccaatagaacactcgagcaccttccttggtccctggcgactcctcccaccctcttgcggagcccaa

SEQ ID NO: 17890 - DNA, 869 bp, Zea Mays
cggtcacgttgaggtacgtgtcagcgtctctggtgcccagagctggtctggccacgaatctaggcggcggatctcatcggtgtaacctgtaccagccataccatgacggtagagctcaatccgaccgcacagggaggtttactgggtggcagggagtgtgcgtgtgaaaggaatcaaagaatggatcagtgattacctggtccacgtgctctggtaggtgaaggaagtccgacgaggtgttctggcttctctggcgaggtaccgtttggtccgagtggctgggaaacctttctagcctctagggaagctggctaggaaactagattggacggggttgggctagagtggtcgatctacggcggtcgtcgcatcaacaatcttgcggggtgtcgtgctcggtgttcaggcaattaccagcgctcagtcgtcggtggaagggtatgggcatgtgggagggcaaggccaagggatggggcttcttataggcgaggattcgagcacgggcgcagggtggagcgcacggccgagccgacagggctcatggcgtgcgcggcgcagtcaaagcgcgctcagctcgggtaaaacacgtggaggattgcttctgcccgtgttcaagcgcttgtttagctgccctagtgtgcctatctcagcaaggatctcatgtaggatctcttccgtgcgccaagatcttgcttttccatgtgagtcccgagccgtgatacactatgggtgaggagctacgctagtgtcaagtcaggtttgtcacagcgtccaggtcgcgacaaaagcttgtgccaagcgtgtcaaacgggctcggttcgatgtcaactttttccaggacgtgtctgaggtaattaggcgccattttg

SEQ ID NO: 17891 - DNA, 730 bp, Zea Mays
tcggtgaaaggcttcggccgaacttcaattggtcggtattgagagcaataggaggctacaaatgagctagaatagggagcaattgggaagttactaacccgaagagcgctgaccacggtggagttcttcacggcggaggtaagaatagggagaaaggggatttgtggactgtgtgagttctccggtgaaattgaatcgagtgcttagtcgctgaggtgcgggatgtggtgaagaagcgaagtccgggctcaatttataggctgacggtcggaatcggatgaagatcacggattttagatcgcgctggcgagcttaccgcgcggtagaatccggtgatggcacggtggccaccgtttaaccggggcctgccacctcctcgctttaacgccacatcgcaaagatctttaccgcggccgccgacgacccatcccaagccgcggtggcgttcttatcaccggcgaggttgatttggtaattccagtgcttggattcagtaaaattgcgtctgacagcccatctttagatcaaactaactccaattttcatatggtaccaagacttaatatctgcagcaaagttgttcctctataatagctctacaactttgttatagtgacccaaggcaaattctttgaatctctcaatctacagagctccaaagttgactcaaacccactggtaatccaatttcagacttcaaacagcctgaaagtccaactttgggtttaat

SEQ ID NO: 17892 - DNA, 796 bp, Zea Mays
ggggaaggtgcgggtctcgcgaaggacactccatggtgaccaggcaggccccgaggaggtcgtgtttggtggcaattgcttgccgctgtagaagacgcgagggaagccatcggcgccaccaccgttcacctcataggtacggtgctccgcccttgatgtgctaaataccatacgtcacacgtagattaagggggggaagagtattgttgcgccgggccctggaattggggctcatcgtggtcttacactctgtgtcggccgtcgcgcactggaatttggagtttacatcgcattgatccctggatgccacccacctttgtgtccattacctcctaggctaagtatagcacttctcggtgtccgttttagccgaggggagcgttatgtcctatttcgtcggcggtgccccaccgcgggctgcgcgtgcgctgctggagcttagggactgagctgcacgattagcccaagccgtcgatggctggatggacgatcctaatttgatagaagctcccagtttgggggagtggatttgaaccgttgatgcatgggggagcgtatgagatttgatcatcgcgtgcattagactcggccgtaggattaggatcgtggggccgtgatcatgtatcagttcataaatgtgctggttttgatcaggggcgtagaactttaatcgaacagttgatcgacgtatgtaacccagttgctagttccgttttgcaaaggagccctcgaactttgcatgaatcaaaccgtcgttcgcctagacacaggaattagcactgtgaggtccaccaat

SEQ ID NO: 17893 - DNA, 592 bp, Zea Mays
agtagcctgggcgctgagcacgaccgaatgtcgggcaactagattcactcttttttgtctactatatggatcggaggccatgacctcgcaggaaataaagcacggatcacctcgaacaagtgcatcagccgtcctcgactaagatgaaccaacatccaaagacctcatcgacggagaccgcgtcttcgccctgcaggccctcaacaaataccaagctcaaacgaaggcctggcgtgaccacgcagtcatcccaagagaattcaacgaaggagacctcgtactcgtccgaaccacacggatagagtcacggggcaagctggagccaaaatgggagggtccattcatcgtcaagtcgaaggcgtcccccagcacatacaggctaacaacgccatccggtgaagacctagaccattcctggaatattgacaaactccgcaaattttttgtttaaatcctcagggcctacgcgcccttgtaattcaccaaacaatattatcctagcccacactcttttcctcccgggggttgaggtttttaacgaggcggagcctttaatatatctgcaaaaatcccccgcaaaaactaagataca

SEQ ID NO: 17894 - DNA, 564 bp, Zea Mays
tgctgactcacgctgtggcggagcggcaacctggagggcgaggaaacggggctgttgcgatcgacggcgtctcgatctcgacgaaaccgtctgggatttttcccctgccaaaagaaacaaatcggcccttgttcctttttttggtgggcccaagcgagaactgtgtgccgaggatctaggcatgattctgctctctctggtcattcgcatgccgtgacacggtcaaatgtgatgcatgcatcttctggaagtggtttagattgttgatgccctctgctgagtgctgacacatgggccgtccgagattaggactgaccgtgcgtgcgcggcatgggtggatggattcatcccctggccttccgtgtgctgaagtttccagtgttaggcccggtcacagtcccagacttctttgctcctgtatcgttcgttctccatgcatcttcctccatcacttgttttctttttcattggtcgtgtgatgtggaaagagagcttgcatgccatgacttctttttatttttagtgcttcccacgttgggcaggagtatgtatgcatgtttttta

SEQ ID NO: 17895 - DNA, 582 bp, Zea Mays
cgtggcggaaggatctcgtctcgcctaggttggaccaaaaaattaggccgttgggtttggtctggtccctgatagaactccgtgctgggctgctggctcttgtttgaaatcagagcgagcgaatgctcctaggcgccctagattggagaatgtctgtttgtgtttgtgtttgtgtttggcgaagacacgtcgaacgaggtcggaacgtgagcgtcgatcgtgcgcgcgcgggagggagagaatgccatgttgatgttggtgacccgtgtgcactgcagtctgctccccaaactcgactgtacatctctgctgctcgagcctgctctctcagctctctcgcagggctcttgaggagatgcacatgacgacggcgatccccaggccaccccgtcctgttcggctgttcctgtcccgcagcatctcgccctgctggctgctgcaatccaatccatccatggactaatttcgacttgccatcacgatgtgctcggcatccctgacacgtgcacgtgaacacgaaacggaggctttcttagagaaactccaacaaaaccctaaactgtaaaacatttgttgggaaaa

SEQ ID NO: 17896 - DNA, 572 bp, Zea Mays
gggctaccaccatgccaccagagagtggaggagatccgacatgaacatccatggaagtacaagagggagaccccgctcggacaccctcgggggctgggtcatagctcacgctacccacttgagccggatcgtctccggcaacaccctcgggggctaggtcgtgacttacgccacccacccgagccgaaccatccccggcaacaccctcgggggctgggtgagcgttaacaccatccctgagggtcaagctctctacggcagccacctctaaggctgaaggcccctcagttacttccatgagagcaagacaaacaaagtcagtttcctggccctcaagaccgcgctctaaggtcgacgaggcgcgggacgctgcccgggatgaccccaacccggcgtcgagcacatcagcacaaacctccatcacaccatcatccgctggctctgataacaggtcttctggaaccatatcttcaagagtctgatcaaagtttgccagggacaactcctgcagaccgacgagggctgacagagcaggagaaggaactccactactctccccactagcaatatac

SEQ ID NO: 17897 - DNA, 670 bp, Zea Mays
agaaaattcagattttctcttctctcttttctatacaaatatacacagataaatacaatttcagcaactaggattttaaagatgcattgggtgtgagatggcctccggcggcggtgattcttggggttcggagtccatgattattgggcggcggtggtcgttcccgagggaggcattgggtgtgtatggtgagaaggcgtcgcgggatggaaacaaaatgatagcgatttgtatatatcatcaactcaaggtgatttcactatttgctacatttttcatatatgtcttgtcagactatcatgtgaagacggttccatatttataagtgtctagtatactcactaacatctatgacggttcttatagtctagacgactcttagtattcttatttgagatggtttcatacatagaagtgtctcaaatgctcattgccatctaagacagttgttaaagtagagatgactcaaatactatccttatttgagatagtttataataaaaacatgtcttaaatcaatataagacatttgttacgacgtaactgtctcaaaaaacttttccaattaagacggatttccaaacaattgtcttatcttactcaacatcgtatgatataagacacttctataaaatgtacttatatgagtctttaatggtgtgtcttaaat

SEQ ID NO: 17898 - DNA, 636 bp, Zea Mays
cacagaccaggaggtggctgaggcaggggctctgctagctgaagttggattgttgaaagaaaggggtctgactgcagaagctgtggttgctgactttgttttcaagaacattcagccgctgaaagacaaagcatatccggcctatctgtatcgaggcctggctgattcaacccgggtaaccaacagaagaattcctgctgtggacttggtgagccggctcgagatgatactcagaggcaaggtgtcgaacatcggcgctcctattgcatactcggcctggaatctgcctccttctaaggcctttaccagtttcgtgtcaaatcctcctgctggtgatagcggtttgggccttagagtgcgaccctcttccgaagaagttagtgctttggttgcctcactcgaagaaattcctgacgacgagaggcaggttcattttgaggtgcctttgaatccaagtgacacagagataagtgccatgctggatatgttagctgaggattcttctgatgccgctcctgctgaacactggtggtggcgtccatccttgatgccggcaaagctttggatgctcagaggtctgacagtggtctctcgaagcgttctcgccgagacaatcatcccacttctcctgctgag

SEQ ID NO: 17899 - DNA, 283 bp, Zea Mays
tcccatcctcggcagaagagtccgtctgatgagctcatataagtactgtgctgctgtagtaaaatctgccggagaacgtcgcgacccatctgtgaagggcgggcggaacagagccgcgacgtgagctgtacccggagccacaccaccgtgagggcgacgaggagggtcagaagtgccgtagcagagactgtgaaggcgagtcgtcgactcggggaatccaaatagctggcggatctgactggcagtaattgtgacatcctcacgctcaaagcggaacctcatc

SEQ ID NO: 17900 - DNA, 394 bp, Zea Mays
ctggggatggcatcttgaggcccaaatacccgtaatgggcaatggccatgaaccggtacagggtcggcctgccaatgatggcgttgaaggggaggttgacttctgcaacgtcaaagacgacgttctccatgcggaagttttcctcagttccaaatgtaactgggagtgtgatactcccaaggggatacaccggctgtgggcccactctggagaatgggcgcgagggtcccagacgggactctgggatttgcagctgcttgaacacaacatggctgatgacgttgaggcctgccccgctgtcaatcagcacatggtgcagtcacatgttggcgatgacaggggcggtgacgagtggcagtatgccggcccctgccatgttgtcggggcagtcggg

SEQ ID NO: 17901 - DNA, 396 bp, Zea Mays
ggttttgaacaatcattgggatatgaaggtaagcatatatgaaaatattagtatgcaagattccaatggtacgggcgtaccaagaccaaaggaataggaaaagctaaaagataacggcttcacaacggaatagaaagggggtctcaggagacaagaagttcacggacatataaactgaaatgactaagtaggcagtagaaattcagatgtaagtatttgaaacaagagtattgaagaatctatgagtacgagcatgttaatattaagagaacaaagatagtcaaagggtagcaatttaatgacggaagagggaagaatcccaacagacaaaaaaggttatggtcagggggcatctacaaagatgtcgcaagcacaagagtgagatcagatctaata

SEQ ID NO: 17902 - DNA, 1046 bp, Zea Mays
gccctaggggatgtccaccatgtcgaggtcccgaaggaactccgccaccgcatcggacagctccctcagctcagtcacctttcgctccacggtttgtgacagagtccgagaggtctgggctgcggtatccatattcttctcaaggcctagaaagagaacgggagtgttaagccatagctcgaaaaagaagatcaaacctaaaaatgagataaggcttcggcaaaatgcctcctatccaggcctttaaggcttggccctcggaccgctcgacctttaggtgcttggagagggagtcaatgcagatggaagcttcaacgacctgacgccaagactcgtcccactccaccgtcaccgcctcaaggttttccttcatctgtcgcatctcctcctcgcgctagtctgcctctgccttcatgcagcgtacttcgtccgccagccgatgcatgccctcgcgatcagtcacgtcctcttctttcggtcccacgcaacaggatgtcaagtccaccacctcggcgctcctcagcgccagctgctcgttggaatgaagcagcgtgacccaaatgccccgaacaaagatggacttggccatctacctcgtcatgacctcctgcagaaggaaaactctcatcgttgcactgcaaagggcaaaggattcctaacataggaaagcaacgcccttacctaggtcaccgccctcagctcctcccatagctcccgcttctcggtgtcgtcgaggacaaagtacgggtcgcccccatggacatccacgtcagggtcagccctccccatattgagggttcggcgtgacgtgaatgaggtcaccactacccctgagagaggaggttggatgatgatctcctcgaacgacccccttaggcggcttcgagggactagcctcctcagcaacccccgcccccgagctcagcacagcttcgagggtatcagggatggcgcgcaagaggtcagagacccaaggcgacgctacgcctagctagtatcacccgcctccgcctcctccctgcaggagacggtgatggattccatcg

SEQ ID NO: 17903 - DNA, 395 bp, Zea Mays
acaagctctcaccgtcaccgacagacgcttgattatttaacttgggccgagacacacttaagttccagatacgtaacgaaggctgtaaattgatcctaccgatgtcaacgcactgttatgtcttagctagctatatatgtacacatccaactgaactggccggtggtgagcttagcacactacagactacagctagctaggtagaggcagttgctcgagatgggagcgcacgagccactgcatccccacaagcagatgaggacatcgtcgtcttcttccaaaggcgggtacttcgtgcccagatccgtgtgcgcttggcttgtctgcggcttcgtcgccttggccctcctccacgtcctgtgctgcactccccccggcactcaagaagccgtgtt

SEQ ID NO: 17904 - DNA, 580 bp, Zea Mays
atgaaccctttcttctcaagaccaaggagatgactctcctggattagggaaaaagggaacgacaccatgcgtgcagtgggcaaactagacgggcacaaggaggcacaacgagaaagaacaagtagctagatggcttctaggggagaaaggaagcaagggctcgagcgcaagaatatggtaagcgaaaccaacctcgagcactccccctctctatttatgcaggggacaggggtgacacttgaaaagtggggccaccccaaacatcatcggaagatctgcccccttcaaccaaggccacattggatatcgggcagaaacgatcgtatgccttacaggttcccaccacctaggataaagttctaacagggtacactgcaaaggatgccccaacaatgggcagggtggttaaccaagccactatgtcatcccagtgttatagggcaggcagaccgtttcgcgtcccaccaagccacccgctcccgactgtgtcatgatggccatccccttttaccatgctgagccagtgaccacatcataccaaccaggtaaaaaacttgaactcaccttaatttattaggca

SEQ ID NO: 17905 - DNA, 464 bp, Zea Mays
atttgattcgtgtagacagtgatgatgataaaacgaagaatcagtctggtttggcaggcaggcagcagaaagtgggggacgatggcccatgggctgcctttcctctaaggcaggacaagaaggcccatatgctgtcttttctccgttacgtggaagacactaatctataggccatgaaggaacgaactgggccagcggcggcggcggccctgaactaaggaaagaggaatcgcgacatccacgtcacgatgtggacgtgttagaattcattcatcatcatgcattcatgcgtgtattattgcacgttggacctggggaccacagcaaagcacgctgtcactgctaatcagcgctgccatagacgatgacaaaattcgcatggccttgaccgtccggagaccgatgctcgcttactccgtagtacaaatccacaaatgccccggcgcttcaccctctccacgccc

SEQ ID NO: 17906 - DNA, 634 bp, Zea Mays
cttttgcaccaaaaggactggagacgcaaacgggctcacgcttggggtgatcagacctgatttcaataaatctgccacttgcctctcaatctctgtcttatgatgaggtgaatatttgtagggccaggcattaaccggtatggatctcggaagcaaaggaatgtgatgatcaaatggttgggatggagataataccgtaggtgtagcaaaaatgtccttgaactcgcccaacggccctgtaaattagtgtgtatctccttgttgccctctgcagtcacctcttccaatagagcaaacacccagatatcattccctcttagccacttctccacttgtaaagtagacacttcctgcactaccttcggctgttgaggattccccaccaactggacctccactcccttatccataaagcaaatcaccttgccttcctagtcacacttcatagggttgtgtctccttaaccaatcatagcctagaataacatcgtaggccaccagccccagcactctcatatcactctggtatgtatgcccattggcccaccattccaatgatctcaccatcgtgtcactatacataatctctccatttgccaccctcactttacatgaggcacaaggatatactggca

SEQ ID NO: 17907 - DNA, 517 bp, Zea Mays
gccgggggtcagtaaatatcacactgtggatatgcttcggccactaaattacttcgagcaccgtacccgagctagccacggcggattcggatgagttcgccggagacagtcgcttcacggccttgcgccatgtgccttggcacatccaccgcatcgtcgtgactcgcattagccgcccgttcgtcgccggggagcttgccacggtaataggacaccaatcacgcgcgctagtaacttcctgtttctccgaccgccgcgtgtcttcatccaattcaccggctaccgctcacagactctataaattgagcgcaccgtcgggtccgtagggtaatcacacaccaagccaccaagtcatggctccaattgttcaccagagagctccaatttctcatttcccccaaatcattcaagaacaccactcggtttgacctcgccgtggccagcgcatctcaggtccgctcatatcctctgccctcccgttttagcgttctggtgtgcccctgatactccccgacca

SEQ ID NO: 17908 - DNA, 294 bp, Zea Mays
gttggctgaccccctttttgtaaagctggtcgtcgatgagcgtgaagtcccggcttcggtgtttgaggcgcttggcctcgttgatatcggttgggtgatagtacccctgcaggaacagggttattggtgcccgccagtcttcggtcatgatgaggttgactatgcggtggccctcgctgtcattggttatttgaaggcctctgggctgcggacggctggcgtgccgatgacatggtagaatacgtcggagggcagggcctcgcctctagcggctgccttggccaaagcatcggc

SEQ ID NO: 17909 - DNA, 546 bp, Zea Mays
ggcgatgctgtggcgcggttaggacacgtggtggacaacggagatggcacgacgacggtgaccaactttacccgcgggcggtgagccaggggagaggcacagcgactagctggagtggtgtccagctcaccggcggcgaagatttttaaccccgcgacgttatccaactatccagagcacaaagtggaccgacggtcgcacgaatcacggcggcaatcggtcgccggcggtaaggtagctgcgctggcggtctgatccttaacggactactgtaccatggtgaacacctcatcagagcagctgacagagaaacttcagagccatttttctccaaattcctagtgacaacacaagtccatccctgcagcaaagttgttcctgtatagtagctctataactttgttatagcaatcttaggtatattcctactggatcttagtctaaatagctctcaatcttggatcaaagtcactgtccatctgaagttcagtctataccagcctgatagtccatctttgggtaagattatcttccaatttctcacaa

SEQ ID NO: 17910 - DNA, 352 bp, Zea Mays
cgagcgatgactgaagagcgccaacccccacgaggtcacgctcctccaacagcagcaagaagaaggcaacacaggtgcaccccatctgggggctcggaaggtggaaagacgtgatgaatgcgaggagtgcgaaggcatggctactgcctgagggatcgatccctttttaaaggcggatctccccactcgcgccccaaagcatcacgggcaaaatccctcccgacgcgctccagggtttccaccctacgacataggggctaggtcccacatgtcatacaaaccgacccgaaacgcgaggagggcgaaccgccgcacacgaagcatgcaactaccccgcaggtaagcactctct

SEQ ID NO: 17911 - DNA, 435 bp, Zea Mays
ccggcggcgctgcataccaagggcttcccctgcccgcgccgatgccgcgcaagcacgcgccggcgtttacgccggaggcagcctccgcctcttcgtcaggcggggctggccagccgcataacctccccgtgcttcaggcgaagatgaagcgtgacccggagggctacgaggaggagctccgccagctccaccgccacttcgagtcctcggtgttcctattccagcagcaggcggcgctggctacaacctcgtcctcgggaggcggcggggaggtggccaaggagctcggggacctcgccctgttccttgcccacgtcgcgcctttctacccggatgacctcgccgatttgcccgaccagattggtggcttgctcgacaccaacgcgcgtgggctgccgccggggctcaggtctcacctcgtgcaggcgcttgtat

SEQ ID NO: 17912 - DNA, 303 bp, Zea Mays
gcaaagcacatatggtcggctgatcaaagctgaccctacttttgatcagttgctctccaagagtgctcgcaagaagaccgttctacgtgatcggtcaacgaagaaaccccgatcaccttctaaaacaaaacggccaaacaaaatggctcgaaaggcgacacaacaagcatcgcctatgcatcctatgggaccagggtactttccacccgtttactcatcgtcggtatattatcctgttcaaatatggaatggtacgacgatgaatccatggtacatgtatagtccctttgtctatccagactg

SEQ ID NO: 17913 - DNA, 710 bp, Zea Mays
gctacagctagtgtttcagcagggaccgaatcagaggaatcctcagccaacatgtccagcatagcacttatttctgcgtcgctcgggtttataggcatctcaaaatgaacctgcctctcgtcattggggatttcaccaagcgaaacaatcaaagcttcaacctcttcgggagagggtcgcactctaaggcccaaaccactgtcaccagcaggaggatttgacacaaaactgatgaaagtcttggaaggaggcagattccaggctgaatacgcaacaggagcaccaatattcgacaccttgcctctaagaatcatctcaagccggcttaccagatccacagcaggaatccttctgttggtaacccgggtcgagtctgtgatgccacgatacagataagctgggtacgctctgtccttcagtggctgaatgttcttaaaaacaaaatcggcgaccacaatttcagcagtcagacctttctccttcaacaagcctacctcggcaagcagaaccctggcctcggctatctccaagtccgtgggggattcagtccaacttggagcgcgaacatccggctgtctccccaaccgagggggtagagaattgtcgtgattctctacaataaaccattccaggcgccatcccttgatgatgtccttgagtgggatgtcgaggtactctgtcttcctcccacggcgcatctctaaactcgc

SEQ ID NO: 17914 - DNA, 1057 bp, Zea Mays
gaactttacagagtttcacttctgaggtgcgggtcttccggactattgaatcaaggatctttactggcttctcacggtactgaagatctttctgaatctgcactgcctcttcttcgatgtgactttatggtgcttgtaggcatttgcggagctgggatacgtgaaacacattgtggatgttagacatggattctggtagttcaagacgatatgctgcgggtcccactctgccaatgatgggatagggactgacgaatcgcggtgctagctttccttttactttgaaccttctgacaccacgcatcgtggagaccttgaggtagacgaagtctccttcctcaaatctgagttctctccgtctgttgtccgcataactcttctgccgactctgagcttcaagtaatctcctgcggatcagggcaactttctcttccacctctttgacaaaggcaggtccttccagtgcctttttccctatgttggaccacatgagaggggtctggcattttcgtccatacaatgcttcgaatggtgacatcttgatgttggcctgatagctgttattatatgagaactccgcatagggtaaactggattcccaacttctatcgaatgctagcacacaggctcttaatagatcttcgaggaccttgttgactctttctgtctgcccgtctgtctgagggtgataggcggtgctgaaatctagcttggtgcccatagctttctgaaggcttgtccagaatttggaggtgaactgggttcctctgtctgacactatctttcttggaattccatggagtctgactatctctttgaggtaaattcgggcgagggtggctcctccaaaggtagttttcactgggatgaaatgggctaccttggtgaggcgatctattattacccagatagagtcattccctttttgcgtccggggtagtccggttacaaaatccatgcctatttcttcccacttccattcaggcactgggaggggttgtaataagcctgcatgtttttggtgctcggcctttgttcgttggcaggtgtcacaccg

SEQ ID NO: 17915 - DNA, 947 bp, Zea Mays
ataataatgcacacaagcatcgagtagtaagatgtatgcaaaccttattaaacactagtcctaaacctagagcaagcgcataagcgatggcttgattagcctaaacacttcagaaaacacctacactaattaccatgtgtatcactaagcaatatgcaagtagagatcactagaatggagcaccagcttctttgatatgttcttcagctcccacacacttcaaatggccaaccaaggggcatgggaggggggggggtatatatagcctccaaacaaaatatagctgttggagactgcacaacctttctatgtaggcacagaagagttcgatgcacccacagaacacgtccggtgcgtccatggcagctagtcgttgagcttctagccattaccaatcgttggagattgagtgtccggtgagccactaggcatgtctgatgctttatggcctttctccaatacggctgcattcctcgctgagttccctattcggtgtgggaattggtgcttcattggacccgtccagtgcacacctgcttgtcccgtgcgtctgattgcagttgcccttctttgacatagtgttgtgctattaagtgcccttctcaacattgcaccgagcatgttcgatgtcactatgcaacatccgatttattctgtttcttcgtattgagttattgcaccaaccagtttaacccaaaagcttaagttgatggagagatgaacaattcacttgtattgcaacacttcccctcacatggaggcttcctgaggtctcagatgtggaacaggagtgagcaactattacttcattgaattgctctaatcgggattgggactcgagacctttagctccgataccatattgagttgcatgtatcaatcaattcagcccaaaaggttaaactgatagaaagaggtgaacattcacttgtattccaacacacttt

SEQ ID NO: 17916 - DNA, 460 bp, Zea Mays
tctgcggctcctattattaaaaaagtcggggtcttttctgtgaaaatctggacctatgcgctatgttcattgaactccaagggactgagggtttatttcgacaagaaccaggggctcatatgtgaaaaacccaaacccaaaggggtatccgctgatgagggtcgttcagatcagatcctatggtttggattacatcagcgcttaaatgagacaacgagcgaccgtggcccatggatcatagatctatggcccccatattacccacaccacgcactaattcgcgtcatcggatctcaaatcgatggcctagatttaaaatagtgaaatgtttccccctcattgatctgaaccgtagccacttagatctacgactcagatacccccacgactcggtacgcccctgatcgctggattttgatcctacggtccagagatcatcttctaccaccagtgtccaatc

SEQ ID NO: 17917 - DNA, 364 bp, Zea Mays
gttgaaaattgcttttggatattggtcctttctttttatatagaggaaacatttgatgatttgtctatgcatatatcataaatcttattgatgattgatgcttttgtcaggggttatgttgctatgcttcagaagaaggatccaaaactttgctctcctcatattttccatagccagccacaatatgatgagcaccatggttcgtccccacttttggtgtcaaagtatcgtcgatgggattgctcaaaatgtcttgaaagagtgaaagtttcaggccatcgacctacatctggaaatgtttctatcgagcaggatggaatgaatgatggctgctctatttcaattgttcggattttgcctaata

SEQ ID NO: 17918 - DNA, 822 bp, Zea Mays
attctaggcatataataatataattaaatagaacccattacctctggtgattccaaatttgaattcagatttgataataactctttaggtgggtggtttctcagcatgtcagcaagctttggagtaagaagagcctttagcgcattgtatgcaggtttgttatctgggtacagtatatcatcgctgctgagaccagaaagcttagacaaagcctgagttgcatgaacagcatgcagatttttagcaatctgcacccttgccccaacaccatgtgcctcacatatctcattctcttctgctgtcgaatcatactgaagcagcaggggtagcacatacctgcaagtatatttcaattatataaatcagcgataggaatttttttctcctaatgtactatcatatttcggttagcatctcttttccacattaatcttagaagcaacaaggatagcaggcaaggcaactaccataaaaatccagccctgagcaaagcattttgcaactcagatgacaccgaaacatttgcagctgtcagcagtgcagcatccacagctgaaggaacaaattcaagttctgtacaatgcacaatgtcctcaacaaggccaccaaacttaagaacctcaactcttcctgactcaaactgactgaggacagagaaagtatgcattatgttggtgactattcttgcagctggttcatttgccggtgttgtgggctgaacaatgcacatacagcgagaaagaagtgttgccaacaaggggataccaccatcccttataagttcttctccatttaatgaagatgatgcacatctaaaagaac

SEQ ID NO: 17919 - DNA, 321 bp, Zea Mays
tggacgttgtggcatcgattccgacggagacatgcctcgcgctgcagaggctcctcccactatacagtgggcttgtcattggagatgggatcgtcgtctaacccccgccccattgatgaagaagatgttgatgtagtagaggggaggcttcgccttcgctggcttgatgatcgaacccacgggacaagtgactatggcgtcagtccgccgcattttgaggctcttgaagatggcagggtcctcgacccttttcctcctactgatatgagttttgaaccgggtcgggtaagtagataacgaagttcgctgtgttgaaattgt

SEQ ID NO: 17920 - DNA, 586 bp, Zea Mays
gctcggtcagtccaactgaatgccattcgccatggtacagtaactgaacgaatatggttgccagcgcggcttgctcgtcgacggcgacctccctgcgcgaagattcacgccgccgccgtgattcgtgttcaccggcggttggataactacggcagagaaaagatctcacgacggggaagggataggatcacgaattggagtttatcgccgtgggtatagtcgctgcgacatggccagactaccggagtcgccgtggaagcgccggtgacctcggctgcgccacacctaagcttgttactacgcgattgtaagcgtggcacccttaggagtattctccttgcgtcgttacaccggtgactgccacggttacagccaccgtgttcttccctatctccggccgccaacacatcgcggtcaaattgagagctaccgacctcggggtctataaattgagcgcgtcctcagctccgtcaagtattcacgcagctactgcacccacctgcatcccaaaccccccacccgagaactctaattttgaattctccccaattcactttcgaactccactcggtttagcctcaccgcg

SEQ ID NO: 17921 - DNA, 455 bp, Zea Mays
ggaagttgtcctctgactttgcacggtgaaatgagagtgcatggtccgtgcatcggagctccgaggagaatctgcttgggggaagaagcgctaagctatgattggacccgggcgtggggattgctgcttgattcgccgccttggcggcaggtcgtcgtgtcgcgcagccccagcccagccagaacgattcatcagacttccagtgcacagcggcaaacccggagggccttctgcagttgcccttccaagtggccgtgtcgtagtcgtagcttccatttgtttttcctcctcttggttctggaaccccggccctgtatttttacaagctgtacatattcgagcggccgagttcttccatgctgctgtaatttttttgggcgatctctgactctctgtatatactcgcctttctttttatttcccggaaataatgtgcatccgtggctcgaatcgaa

SEQ ID NO: 17922 - DNA, 302 bp, Zea Mays
ctaatgggcatatttgagggtggtcctttggagtgccgggtgatggagaaagttggctgtatggactactctgttacagcatgggaacctgtcagagctgatatttaccagaggcaagttcattataagtttgacaagaaatcagcacggcacggaggagaagcaatgagcacccagcaaaagtcccctttgtctaataagaatggctggcttgttgaagaagtgatgacacttgaaggtatccctgttggcgaatgtttcaatgtaagagctgactctggtattttattatacaaatttca

SEQ ID NO: 17923 - DNA, 686 bp, Zea Mays
aataaattgattctttaaaccaaataccttttaatgcgtgataggggaaaatttgaatatccaaggcgaattaatcaatttccttttgtgtgtgtgtggtgggggggggggggtcatcatcactcctcattcttcctctatctgttcctctcctcggagcaagtataacaaaatgttgtagacgggttgtaagatataccacatcagatgattcagattcatggtaacgtggaagaaaaagatatgaagaaaaaattgaagtatcaacatgtgggctgcaaagatgttatgtcagatttatggtaagagaaggaaagggaaaaaacatactccttaatcgttactagtagccagctgagagtaggctgcacacggactctaaaagtgtctgtgagatagaaagtacatcaaatattaaatgtacggcttgaatcatgtggtagttaaacttgctctcgctaatagtcacctaaaagttggctgcttaccgatttcaagatagattataagagaaagagatgagctaaatattaaatatacaattttgtattattgtataatcttgattataggtgacctagttacatcataaagtcgtccactgttattataaacttcctctcagcccaatcgaaaatatccaacgtattatgcggtccacgttcgtgccgtacgatcccaccgtg

SEQ ID NO: 17924 - DNA, 421 bp, Zea Mays
ctagcgcgcctccctctgtcggcaccgcgcagctgttcctaggcccctcccccttccctactgcagcgccgacgggcttctccactcctcgcctacggtgctctccgaccccactgcctgcgctcgcgtggccctctctccgccgctggctctcccccatggctagagccgcctacacgacgcccccctctgtgctcgcggcggactccctgagtcctacgcccctagcatcgatagtggcaccccttcccctttcttggcgcccgatgcccattccctggctggcgcaaccccctgcagatgtgacgccgacgactccatcccctacctttcattagcgtggcgcagaccctacctcatcgccgccgtcggcgtcgcctcggccaccgctgaccccctgttcctgtgtcacgctggcccc

SEQ ID NO: 17925 - DNA, 515 bp, Zea Mays
cacagatgcaagcatgtcggatgcatgggatgaacaacaattcccagcctatagcagtatagctagctagcaagcttggccatgcagaggcaaccagaagcgtgacggtaaagcctaacccatgctatgcatggagtgcaagcaacacaggccccgccttgtgagacatgtgacaagtacgtgacaatgcatgcagtacaggctccaagagtggtggtcgaccaattgtagtagtacgttgcctttgtacgtacacgttgcactgcatgtgagctctacacagttccaaacagagctatggccggtggatttggagtagggtacggtacgtgtcgtctcccccgcgcgagtcaagcatggacgttgcagctgacccgtacgaaagccaaaaaaaagtgcagcgacacctgcgccctgcgtgccagtgtcagcagtgcaggtcttctccacgcgtcacgtttccaactcccaactgaaactagctactgccacgcgtcaccaccatatccctctat

SEQ ID NO: 17926 - DNA, 772 bp, Zea Mays
aggagctgcttgcgggccccttgcccttgtccgagggactgaggactgcagaagaaactctaggggccacatcagctggttgggggctgcctcccagtgcaccaggaatgtggatcccccggtggggatcccgaccaccggtttggcggaccgccacaccactctcattgagggtcagcagttgggccaggaccgctgaccgcagcccaggattgtcgcagagcggcgaaatcccctagggaagcatcaaggattcgaggataaaagcctcaccagtgaccccctcaccaaaatttccaactcctctcaggtcagatcagtccgaggcccacgctggatcctaccaatgtcgctggggtcggtaaaccagcagctcagacgcggcctccgctgcagcggcatgacttggcgcttcaggaaatccccgagtacgtgcattgaggtcaggcctccaaacgccagtttcctaatcctgtccaagatgggctcgaactccggcacgaggcatggtttcaccctccattgtttccacttgaggctgggcccgtcactcggaagagcaaggcggtcgctggcctcagcgctggcgatcacccagttacttcgctagttctcccacctcacaccgccaagggaggcaatgtaggtcactgtcggatctgaccttgactagaagtagtaggccccgaggtgatccttgcccttcctagacctcaccagcacgaaaaactggcggaaaaggtaagtgcaagccgccactcccacaaacatc

SEQ ID NO: 17927 - DNA, 542 bp, Zea Mays
tgaaacatcccatggtacaatagctgaatcagatcccggatgcatccctctcgccgccggtgatctttacgccgtgattcacgccgtcgctgcgattcgtgttcgctggtgagaggataaccacgacggagtaaaaatcttgttactggatcagctcgggctcgagcgcggatgagattcaccgtacccacttgttcgtcgtgcggccgggatagatttcgccgctgttgatcgctcaccgttgtgcgccacgtgcttaagcgctagcccacatcgtggtgaatcatggtatgcatgtccggtgatcgccggagggctgccacggtgaaagccactcgtcccgagcgccagtacctcttttccccttcggtcgccaacacatcctcgtgaaattggacgccaccgccgttggaagctataaattgccgcccccgtccgctccgctaggtaattgtgcaaccagtgaagcaactcgtgcctcaaatcctcccctagaactccccaatttgggatttcccccaaatccctcaagaacaccgagc

SEQ ID NO: 17928 - DNA, 388 bp, Zea Mays
accgtcgtcgtcgtcatccataacccacttctatctcggcactgtacctcgacggcactggcggaactagcacgaccacgtagttgtccgacgacctaccaaagtccacaagcaagcagcgaagaggagattaggtttagagaatgccgactggggagtggggactggtgaggaagagtgacatacctgccaagccggagcccggagccggagacgagggtcaagtgcacgacgatggacgacgcgagagggagagccggagaagaggagattagggttagggttagggattgggatggccgactggagagggagagccggagagggacttatctgccaagccgcagcccagagccagagacgatgacgcgggacggcgggagggaga

SEQ ID NO: 17929 - DNA, 442 bp, Zea Mays
tgaaggaagatctggaatatcttcaatacttcaaccacaaatttgctcaaaggaaaccgaagaccagccttcaaaaagcttcgatagacaacaacttcgttttccttaggagcagggacgatgttgtctcctccaaccctcacgagagacatgttgcggaaatacctccccctcatagcgtcaatatgactctgtttgatagtcgactttccgaagatagtatgacttggccgccagggccgatcctcagaatcttcatccccactctctacgtcataactatcgctgtcttcagaatctatggataaaccctccatgatctccttagtaattttctctgtatttgtcttcgccatggattcaaaaaatccagcgatgaaaggatctgcaacctttttctcttcatacaacttcgtctcctcggttattttcttctcttgag

SEQ ID NO: 17930 - DNA, 406 bp, Zea Mays
acctgcccacgcccctgttattcgaggtttggtcctccatcgggcagaggctcgtcgtgttggcaatgagccagttactgatttcactaccagcggaggttctgctcttctttaggacatccgtttctagaatcctgcattgcgcattcgtgatgccaggattgatgggaaccgtttctggactctccagcatgtggatttttacaaagtgatcctccccaagaaacatcagcccatactacatcaacgttacatcaactgggaaggatgtgaggctattagggacccggagatgacacaggcgttgagggcctgtgaaagaaagaagatgaagaatataatgacattccaatatgattggaatgatgaagtcattgcccagttttactcaactctgtggatcaag

SEQ ID NO: 17931 - DNA, 842 bp, Zea Mays
tggccgtgcggtcgctctatgttcgcgcgtgacctaggtgcggccacgatttctcaccggtgttgggcgatgtcgtggatccgcgccgtgaccctgggctccgccacggtataaaactgggcatctctgcgccttctcctatcgactaccctgtgcttgtaaagcccaagctcgcggccgccaccaggagagagagagagcagagcgcagagagaggaagcagcgccgccgtcggcccggtttcgtgttcaccgccgtcgcgtccaagaatttggccctgtgagtctcgccgtgcgtcggggattgatccggggacctccctgctgtggattggcggccggagccctcgggattcgtcgccgtggtgcgaacaccgctgtgcgtccgccaaactccgtggggcggttcgttcattgccggaatcaaggtaagaattccttcgttgagttcgctatcatctcggcaacgcataggagctttcggatcggaggatttgtacgtgtgtacgcgattgggttcactggtggggtctccgccgtcggacctgtgggcgccgtcgtccccggccgtcgggaggttgagggcagtgcggtggctgttggattagaatgaacggcctggattagaaagcggcttaccccttcggctaagtgagcactgaccgtagatatgcgatccaatgaatacgatttgatctcagttatttaagatccatgccgtagatataggatccagcggccatcatggcaacctggttcggggaaggtttggatctaatcctaagcgtggaaccgagatccaacggccgaaaacactagataccccttcgccttggcatttag

SEQ ID NO: 17932 - DNA, 307 bp, Zea Mays
cttcgatgttccagtggggggtagctaaagacagcgacttccattgtgaggagcagaggagacgagcgcgcagtaacaccaggttggttgacggcaatagtcaactctactcttgaccatgcgcctggaaccgcttggctgacgcatcacggccgttcgtctgtcctcctacggcatacgggcggtcagccagtcagcccgggaccggagaacggacatggacttctgtggtgctgcctctccgttctacagcgtgccccagacgtccagccagtggtagaaccccaaggctgcccttccatctcca

SEQ ID NO: 17933 - DNA, 712 bp, Zea Mays
cacgaccccacctcaatttttataagctcttatatatagacttagatatacaataaaataataaacttttatatactatattggactaattttaatgaaaactagactttgatataaccttttctcggtgcttcactactcagcccactccccacctgagtcgtggtgctcgttgctatatcgggatcctacatgtagcatagctactttgcttccgaatccgcacccgcggatgggtagactattagtgggattctgccttggcaccacagcgccacctgccctcgctatctcacaagggtcccgtcgcgccgtcgcaacacgacaatgactgtagcttgccgccacagccttttcgccttgtcgtcgccatctaccgccgcattgtcgccttcccttgctatcccacgcctgttgtcgtctcaccatcgtaattttgcggtggactcgttgactctccacaccgacgtgccgatacgcctgcttcgcccaaacgtccagtcctcgtcagtccatccctttcttctctccaactctcctttagggtggtcaaaatgaacttttggtattcatgttattttataacactcctcatattatcacttaatgtccatgttattatcgtgaaattatttttatcaaatggtctagtatattgatttgtctcctacggtatcgccccacctgaaatttcgccctgtgtccgtcactg

SEQ ID NO: 17934 - DNA, 532 bp, Zea Mays
gggaagcgctgcctcgacttgggcttcctcgtagtcctgatgatctggagcaagaaggtggttgcagtcatcaccgtcgcctcctcactcttcctgctcgagtccggcggaccgagcgtctacagtagccacacgtggtgagcgcctgcaggagccacacgcgtgaactgccagggtacagggaagcgcgtccatggaaccggtgatagggttgatggcgtggatcgagaggggctctcctgcgtctgcgtcaatgggcgcctctccttcgatttgacagctatgcagatgggattcatctatgtcttgtcgttacattttgagtcctattatactctgaagcggtgccagattctcgaccctgtcaatggaatcattgaatcagtggtgatggggaatggacggttaaggggatagtcccacactgtagttttctttaggtctgtcctcttttgtcttcttgtctcctctcccacagtagactgaacaagtgtaaataaagtttaaaactcagtccataggatcaccagta

SEQ ID NO: 17935 - DNA, 347 bp, Zea Mays
gtcgcgcgcacaacgactgccgaaatccacgcgacttcctcgatccatctcgacctcgtcccccacctcgcggcaagctcggaggagtctgcggactcaatcgtgaacagatgggcgcggaaatcgcgggggctcggccaacggctccgtgaaccatggcgtgatccccgcgcggacttcctgacctcggtgcataagaacggatccgcacccgcccctcttccatccgctcaccctgttccaagccatggggcactgtgaatttctcgccgttgatgaatctttaccgcggatccgcccaacgtcgtgggaagccccgtatctatcgtccctgtcggtaagaatcc

SEQ ID NO: 17936 - DNA, 809 bp, Zea Mays
gccatggtgaagtcttgagctccacggtctcacacgcacaggctaggatgttaaggagacacaaattgtaatccccaccacgaacacaagcggactctgtaacttgatccacgtatgagtaagggctcgaaagattagactccaacaagcaacgcaaatagtgtcatccaggaaaacaaaaggcggtaagttaacttctcctattattccaaaaaatggcactagagcacattacaacgttgggtcaggagcgctgtggacgatatcgtccaccgataacctatgaacaacacaccttgccgcattatcatagtactccaacatctccttcaggcccttgtccggtaaggccaagggagggccgacgacatcctgtagttcacagccaatcttgagctcccagacgagcagcgctacggcgacacctcggtgaacgctaagagcaacgatgccccggacgcgatgcgggatgttgtctaagtgctccactagagaggagccatgagccctcacaaaatctagagcccgacccaaatggaggcgcagctcctctagcctggcttccaaggctgttagaagagaaagagataagggcaaggagaacatcgaggattctaagaagcaggggataagtgccttaccagccgcgcggccatcagactaggtaagttgagatcggagcagctcgacctcggcctcgacagcctctagcgccgtacgaaaaactccataactctccagagagaccaaagggagaggtgacaacagtttcgaccacgacgagccgacagatgacccctcggtggacc

SEQ ID NO: 17937 - DNA, 410 bp, Zea Mays
ctgggtccacgctcggctgggtgaggtggacaaaggagtctaccacgtcaagggcactaccttagttggtcaggccacaggtgctactatggccctgggcctggccgccgcggccgcagtcttgcgcggggcggaagttggttgaggtcttcgtactttggagttcgtcggagtagtccttgctagggtcatgtggggcgagcctgcgtccgcgatcggtaccataagagaacatcccttctcggatggatccgcgatgcggtgcaggatgcctttccggtctgggatgcaggagagggatccaaagcggaaaacctccccgacgttgaagatgatcagggtgttgaagatgatggccatggagttgtcgtgaatcaacatcgcaccccctacctggtgcaccaactgtc

SEQ ID NO: 17938 - DNA, 577 bp, Zea Mays
gaggcaaaacagaggtcgacaagcatgttgcctctgacctcgtgcactctagttaattataccgtatcgcttaaagggccgatgataagcggggaccgatcgctccctgagggttggggagcagccggtcctgggaaggaaaaaggttctgctctctgtggcctttcattttcctagggttcgggccccctcccagacgacgtcgtttggcgtaagaaatctttgagtaactcgtagtccttataggcatgttggaatgagccttgatggttcgaacatggggcttcaagtagtttttcaaagtgattaggggtttcctcatctgcaggccttcctcccgtccggcttatcgtagctgttgatgcatcagctcattgtcgtcgacctcttctcctttttgcgttgaggcagtcgtcgacatcttcatccgaccccctatcgtgcttagtcctccatttgcgttgaccaacgatggccctctctacgtcctctcctgatgcatggccggtcgcaatgtcgaaaagctcctttatcgttcgcggggtcttccgtccgagcttatgcaccaaggttttgt

SEQ ID NO: 17939 - DNA, 868 bp, Zea Mays
gccgagtactaaatacagagaaccgcgggggtcgaacgagaaattttccctagactcagggaacacctgggatggactgcgggttgtttctataatattccaggggctcatatgaaagacggccagtcgaaggggtatccaatgatcctggtcaccccatcaacttcctacagttcagattagatttaggtttaaacgaagcggtatgtaatcctgatccttgtaccagaggtcgacggtctctattctatctaactgagatcatcccgcatcctttggattctcgatctacggtcacggttggatgcggtcgaatcggtatgaagatctaatccaattagtccaaaacgcatccaacggcctaacgtctttcttccctactcggcgtcagacggtgcggtcacgcccacggccgttcgacggcggttactctggcgagcccccgttggccgtccgctgctccaaaaccctccccgtagagtcctacgcgaagctcacggtatggtgaataagattgggtcatttttacctgcaataggatggtgccgcagctcggctacaatagcaggcgcactgcggtgatgaggagcaaccagcgagaaattccccgggctacatctaggctccccaccgattaactcttcccctagaagcttccattagagtccgatgtcgtccaggtacccgcactggagcacgaaacccgccgctggtgagaacccacggtggcggcccgtttttctgtgtttcctctcccttttctgtagtcggcggcgcaacatactagggaaaagggaacgggtcattgcgcacgaaatttattcgccaggagctggcgtaacaacccccgcggagatcggggctgctg

SEQ ID NO: 17940 - DNA, 668 bp, Zea Mays
gaaggcccagcttcggtaagagcgatggcagcgctcgcagcaatagcttctttcacatccttagtttttccgctagaagcttcggcagaagcgggagatggcaccttcgtggattccaaaacagcgtctaatacactagccattctcctttttcttggagtcgctatggaaacacttgatggcttcggcagttctgttgtagttgctggtctcagtaccttcagctattctgctgccttctctaattttggctcctcagccagatttgtatgagtttcgattgacatgactggacatgattctgtggtagaaggggtggtttctgcaccttcaataagctttggcacatcgtccgtctcaatgtgtctcggtctacgtgtcaagaccttcactttcttcgccttcgacgcactagaggatgccaaagcaacaattttcctttttctcaattgtttccgagcaggaaaacagtaataagggtagacgaacctgataacatcaaaaactctatttagcctctttttccctcgagcaccgaaggcgaccgtcatagcttcgtcttcggccttcgagtaagctccaagtagctcatcactagttgcctctatagcatctagccagtcatcgtttggttcatcaaattggattctgtatcggaaggtatactt

SEQ ID NO: 17941 - DNA, 1204 bp, Zea Mays
gaaagagtagcggccgaagaggtatccatggatttcaaccgcaggatcaccatccgacggtaaccagatgatcaattcacttaatgaaccagtacctaccctagccatccgatctaggatcaacgactcgaaaccttccgcgccaaattctcttccctggccctcgatctctcgatcaacgcttcagattctaagtgctgaaagggtatcctcacgttctaatctgagccgtttgctatggaatcaacggccctcgacccgtcatctacctcacgcctacagccgagctccccacggcggcgctccatccaagcacggccagtaggggccccggtaccctaatccaacccaagttcggtacatacactggtgaggacaaggagcacggcatggaagcattaccggtgtcaggatttgaggaggtgctcgaccacgtactggaggaggtccgccgcgcccaacgacaacaacgcaagcatcgaagctcgccgtcgaccaacgaaccgaggccaaccatcacgcgctcgttaaagatccgcacatgagcacgatctctctctctccctaaccttctctctgccccgctcgactcaccactttccccgacgttcgtgtagaccggaggagagggaaaaaaaaggggtcgcggccttggatttatacccagggcggaaggagaaaaggtccgagcaggggagggcacatgcttcgttgatctcggtgatccgtttgccacaatctccgaaccgagcggagccaggaaatgtccgccgagatctccgctgcatttgtttttctgctgcgttggcttcggggtgagcgcaagagggaaggtgtggattctgttataggggtgtcgctgccatctcggccccgcatggaagtggcaggagcacaagagcgcagagtggctggtcgtggtgactgaggggagaagctagcgccaatggcccacctgtaagcgccataacaaaagaaaaggagaggagaaggagatgggctgcacggtgagggttaatgggctggccagttagaagcggcccaattagggttttgtttcctttattctttttcctgctttcttattccaaatttctatttctatttccaaatttaaacttggttttggatttccaatttaattaaatgcacaatcataaggaccagcatgagaggtcaatatatttatacatacacacacaca

SEQ ID NO: 17942 - DNA, 577 bp, Zea Mays
gaagtttttttgaagcccaagaggcaaagaaaatggaggaggaggcgaaggctaggatgcgagagcttttgcttgctcatgatggtggcgttgctgtaacggccgaggcgtcaattgcgccctccaagcggagcgtagagctttaggagtttcacctggttgtcagtatggtgtgcgccccctctcgcccctgcctctgatcaaggtgcctctagttgatcggctgtgggcgttacctggacacgtggagcgcgttgttgctgaaggcacgttccactagagcaacgtagctctagggcagatggtctcccattttgatgagatcgacgttgtcgtgattgcagaaggttttgccatcaattggagcgacaaggaactagatgccattgaagatcaagaccacccccaagcttgattgctcaccgaacgggttgatgtgaagaccctactgacgacacttggagcctaacttcgcccaccggtgatccgctagccggtgcttagacaactttttatttcaatgcttttttgtaataattcttttgaatggacaggatccctgcgtgatacattactt

SEQ ID NO: 17943 - DNA, 414 bp, Zea Mays
cggacggcgtgggcatcgtggggcttgagcgccatcattttgagctatgttgacccctgtccttcgtagcctggggctcggtgtggctcattgtgttatgccctgccagcagtctgtgcactcagacctagtcccgatatatcatgagtgtgtcgtagggcggggggtgcacgggccataaatatgtcacacgaggggttcataggtcatgggtgttctatggcccgaggggttcataggtcatgattgggagggggacccgtgcctctgtcacggcttgtcgttaggcacagttaatgtgaccgatcacttataacaggtcagtctcgggccaggcgtgggatcaactcgagtggtttccctctaccacgctcgtcccctgttgggttccgccacacccaaccccgggccggt

SEQ ID NO: 17944 - DNA, 552 bp, Zea Mays
aaaatgcaaacataaaagaaaaaggagaaaacaactttctaggctgaattacgctggtcggcccacttgtgcttcccgtccactcctgcgcgacccaacccagtgcacccacgcgctaacacgctggtcccacgggacagcctcacgccaacacgcctgtggctttgctgtctccgccaggtggggcccctctgtcaggttcaccttgctccaccagacaatctgagtccgcacgaatctgttgcatgcgtgcgggtcgctgtcggggttgttgggatactccgcctcctctgatggactcctggatatatatgctcctgccccagggtcatctcgctctgcaccagtagccacaccaagccatatccgaagccctcgtagctaactcatcgtaattgccgtaagaacagagaagaggaaggtatgggagatggaccctggagaaccataccggcggcgcaagaagcaggtcgggcgcggggtagaagcttcccagtgctgcggggttcatgcgggtcgactgggatggatgaattcctcgccggtggggac

SEQ ID NO: 17945 - DNA, 806 bp, Zea Mays
gaaacaaggtagctaaagcctttatctgactgacggaaagaggcttatcaaattctctagcgcagcgttccagatcatccgcagaaacaggagcctgcccatttttcaaccctagcttcaaacaaatagtgtgagccgctgagttccccctaaggggaggaagtttggctacacgtcttgatcttcttggcacgaagttgggcgggatagactttctggctttaagctttggagatgaaggaaccgacaacacatttgtgaggggctttacgatcttgttaatgaatgtcatagccacctcctcctctgaagctatacgactttgcttggggtgttttcttcgagaatacacttgcaagaccttgcaaggctgctggaccagggcaggagatggccacataatgtccaaagagctgtgaaggctatcattctgctcaatagacaaatcatcagaatccactgagatctgagtacagactgtgtccagatgagccaagccaccatcctgagcaggttcagacaccataagagcagaagtcacagagtcatgagcttcaccaatctctgacagcactaatgagtcatccacttttgaatctgcaagagatggcgccaaaacagcaggcaccaaagcagaaactagggagccagaactcgaaacatcccacaaggtagcagagtatcggaatctctccaccctaggcgtcatccaactaatatccgaagtcatcaatagcactgcctgattaaacatacgggccagggcattaactgccaccgccccacccaaaacatccgtattaaag

SEQ ID NO: 17946 - DNA, 1156 bp, Zea Mays
acctcttcttgatgcttacggccagcactctgcagaaaagaaaccaaatcagatccaccatactctaaaagctcattttctagaccaagctcaataagtgtcctgtatagatgctcatggaaaactgtgtccggccattggacactaagttgtatgatttgtttgatatacttgcttcgagaagctggatcagcagcagttgctagagcagatgacttgtctgcactttgcattcgactatgcccaacacccttgagagtgcacagcgcatccataacaatcctatagcattgttcacgctgcaacattattgtatcatgatgccttgggtctatttgaccattgataatatcagcattggagtcaagtgcttgagctttctgcagaggcaatcggactacagcctcataaaatctaaacccacacccaacaagaaatcatataaatatatcagttggcagatgtgaaaaatcaataaagttatcaagataggtctatcctaagtcaaatattttctactgtagaaaaaaatattcactgattgaaatgaggtatagatacatctaggtttgtcctaagcagtgtttttaaagtgtaaggcgaggcaaggcgttggaccaacgtctggacgcctaggcgggcaaggcgcctaggatttctgggtgttggcccaccgcctggacgccaaggcgactccttaaaaacactggtcctaagtcgaatattttcaactgtaaaaaacatagtatcttgagtgaaaacccagtatagattccaaaagtatgagcacgtctagtaatttctacctgtttccaatccatatagaagttcagatattggtgataaaagttaaacatgtttgactgaccagatacagtatttgttatcggaggaagtcactaaccttaggttctcaaatctcttgcatatggcactcaaatcagcagagtctggaattttagtcaagaggttgaaagcatctctagcaagaatatctctctcatcagcattattagtcatagatgctctctcaaggcattccactgccaagtaatatttgtagtctgactcattgaagtaactagggcaaccctccctcaatttagtactgatttcttcaacagttcctctgccctctgggccaatatagtactgc

SEQ ID NO: 17947 - DNA, 399 bp, Zea Mays
ttcaataaccattttgctgaagatgaagatatgggtggcggggaatgggcactggatgatgtggattctgaagagcttgtggatcgtcagatgaagtagagtagtatgtgtggtgtggaatgacactggatgttagctgtgtaaggttatttgtgtaagagttatctgtgttaccagtgtaaggttagtatgtgtggtgtggcagtgtaagagttatttgtgttagcagtgtaagagttatctgttcatggtatctgtgttagtatgtgttaactgaacttggaggttatctgtgtaactgaacttggaggttagtatgtgtggctgtgtaacttctcgcatttgttcaaacagccattcagctgtgttatctgtgttagtatgtgtgaattatttcag

SEQ ID NO: 17948 - DNA, 452 bp, Zea Mays
ttcagatcacgcatgtgacagagcttaaggtttaaaaccagcatgtgacagaacacgtgcatcacggtaggatggcgaatctctccatagttcacaatttcacatgagtttaacacaacacaaatgtgagatactacgctcttgaaacattcttagaaaattaataaggaaaacaaaaaccatttcaccacttgctgcaaatgtatatttatcttatagcaaaggtactcacaccgatgttgtgaaaacacatactaacttgtgagtatacttgtaaccccattagtgtgttaggtttagagccgactttatggtcaacaagcattagccagatggacatggccacactactctaacaaaagagtggcaaaggagagatgcaaaatttcagacatagatcaaatggttttcaaatcaactaatcgacatagtcaccatggcaccaaccagac

SEQ ID NO: 17949 - DNA, 404 bp, Zea Mays
gggagctactagtactagattagcatagctagagcggctagagagagagagatcatctacttctgctgctcctactagctagatagtgagggagattggatgtgtgggtgcgtgtgtgtgcaagaaaaggtgccatcatcattgcacaataatgcaacgtgtgtctggtcctgcaagccgcgcccaacctccaaagctagctagcagtgaagtgagcgcaacatgggcacgcacggacgacgagatcatcagagtcagagaagagccggcccaccccattgcgatttcctttggacagttctggccggccgggtgctccgttttgtgtgcgatttccctttctccccccgccccacacgatctcctccctccctccctcccgatgcgagcagaaactgtgtccg

SEQ ID NO: 17950 - DNA, 659 bp, Zea Mays
caactgtgggccattggattagatttgaacgcgctagattagatctgccaaacagaaatgttcccacgccattccagctgttcgatccaaccctaacgtcccagatcgcagcgcgaaccggtatgagcccgcgagcgcaggatccggatccaatggtctacgagcatggttccctttcacccgtacgtccgctgatctctggccgagattgactcgaccgaaacaaaacgcagattcctatcgtggccgttggcaaggaatctaacggctgcgcccggttcatcctagaccatcggattgacatccagcggacaccagtccttgccacgaatcagtgaacgcctaatgatcacagccgtccatctacccatccacggtataggcctactcctctacatctcgtgccggagcgcggcaacacgtagaccagggcggcgaactccggtgaactgcccaggtgcaacccgccctaatacatgccccgattaatactacatggtcaccgagttaaagcgaaattggtggtaggcgactcaccggagatcaggcaacggagactgctgcccacgctcacgcggatccgacattcaacaagagcgacgtcgagaaattacgagcacgccagaggcccccgatctcccaggttgacgcaaccgcgc

SEQ ID NO: 17951 - DNA, 708 bp, Zea Mays
ccagaccgccccaccgaacctccaacagacgatggatccccgcgctgagtcgacaacgctggcgatcaaaactccaaaacaggtaaaacaatagggcgaggtatgggaggacacatacccttgaccgaaggatgaagaagggtggtgactgacctaaatccatcctcctgatgcacaagtcgacacagcgcccatggggcgaatttgttggagatccaacaggtgggcgctcgacagccgtaggagagaggaagcgagaactcccgccatcgatgactgcttgtcaaccaccacgcgctcctaatgcttcgagatcataaaccatatcttccatgctcatatgtcaatcatcgagcagcacaccagttgccttctctaaggcattgacaagcccttcctgacccgatgtgaactttgaaaaggcagtatcccaacgagattcctgcttggacacatgacggtcccatttggcgtcatggtcaacgcaacgtcgagaaatctcatccaatatgatctgagtatttggattcatgaggacttattggcaatgaagacaagtaaaatggtggtgaacaacggtcagatccagcgtgagacagggagcacccaagaaagccgagaatcgacgaatccgataccacttgttagcgtctacctctcaccatcgtcggcagtagggaagaagaagagaaacagaagataacatag

SEQ ID NO: 17952 - DNA, 430 bp, Zea Mays
attgctgtagccggccatgtcctcgccgccgcacgggccaagggcgctgccgtgtgtgtgggggccgccgcacggctgatttgggggaagaagaaagtactcgcaccgttggatctccgaccgatggaggagatttgatcccaaggtatctcttcgccaaatgaatatgggccgttgatcactggatggtggagatctagctgaagcataacttttcgctctgacgaatgtgaaccatgggatgggaatcggatggacctggtctcgtaccggttcacttagaagaaaacctaatcggtgccattgagttatgatccaacggccggtagagagtgtgagaacatgtaagaatgatctaatctgggtgcttgatggacgatcggacggcccataatgcaccataccccttcgtcgtttgattttgtaaaag

SEQ ID NO: 17953 - DNA, 660 bp, Zea Mays
gaacgattcggtgctacacctagggaagatttaggcaaattgatgggggatcaatacatcggctaccatgtgccccccccacaccgatgcccccacacaggcggcgttgaaacaaggacccgagcctggcaccaattccacagtcggtgagcacaacgatttggtgccgccatggtactattcaatggaaggaataaggcaaggtagagaggaggtcgcaccgaggacgatgacgaggaggacgctggcacggcggggcgcagatttgtgaacctgtcgcaccccaattgaagcacgcagcggaggttgtggcgaagagcagggcggcggtgagatcgtctccacttctctcgcttttcctggtgctatggcgattgtggttggggctcggagcggacgaaatcgtggtctagaaatccacctccccatttatgaactcggagcctaggcggtcagctcgtccgcgcatgccgcggacggttcccaccatccgattgacgcgggcgcaagggagaagaaagtacccaccagtcctccattagcgccggttaatagggaatccattgcaccgccagggaggattttatgcagctgggaggtgcgtccatggcgaggatcacagtcagttggcgagaaagacggtctgctcccaggcgctgc

SEQ ID NO: 17954 - DNA, 347 bp, Zea Mays
gtggatggaagacaaactgctcatgaggcaatatgccaatatccttcactatatcgtattgtgagacagaaaagtgatacggttgcgtctatcttgagttacaattcccctcaatgttgtgtttcgtaggacgcagcggggtcagaacttagctttgtggtatgatcttgttaatcgggtggtgctcatcccgctgagttctaatagagatgtttttaagtgaagagtcacatcttctggtcagttcaccgtgcaattaatgtatcacaggtacacactcagcttagatattgggctcagctacaaaaggatgaagctgatggagtttttaataaagaatgtttttg

SEQ ID NO: 17955 - DNA, 482 bp, Zea Mays
gaaaaaggtcacctcaagaggaaattccaagtcctccgagctcagcagcaagaccggcaccagagaactcgatcctttgggtttccacccaagggaccaagcttcattagaccagctggacccactccgtcacgttttagtcagcagagtcagagctcctttcaggccccctcggttgcaagcaaaccaaccgccagcaaatgcctgttggcactgcggagatcccagtcacttcaagaacaactgcccccagttgaaggcatcaggacctgcttactccaactcggtgaatggccccaagaatatctcagcacccgcccccaaggtgccttcctccatcagccagcagaacgagacccaatatcaaggaagggcatgagtaaaccacgtcgatgctcaagagactcagcaagctccaggagaagtgctcggtgagttccttattgaatttactcccgctactgtactttttgattcaggag

SEQ ID NO: 17956 - DNA, 767 bp, Zea Mays
gaaaaggggggctgaatagggaggatcaggctagctaaagcaattcagtgcttccaaaatatctgaagaagatttttttccctgcagaaaatatcaaacctttggatgtgtttgagcctgccgcagtggaatttttttatccgtccttcctctgtctgtattactggacagtggatatttgtgggcagtgaaccttatctgctctattccctatttgagtaattggacaagttgatattttgggctgaaagtgctgactaggttcagtgttatgggtgtgtctgtgcatctgtgaggaacttgagcatgaaagacacgtaggggatgtccatgtactgctggcaccctgggaatacatttgcactgaatttgtgcaagtccagggacacctgccccactttagctgccataaaagacatggttcagtgaacttctttccctgagttccttgcagcgtgtggtccctatgccttcaggttcgtgtagcttctcctttccccagccatcattgtgctctatccagagctgcacgcgccaaactcctatgagttgtgaccacgcctaccaatttgtcacctcgccgtggccaggctaactcaggcaagtattggtctttgttgtgcttgttccatgtcccccttagatcagtgaagctcaccgagctgttatccctaacgatactgtcatgttttggccggaacaagagcgcaccgccgcagactgacaccgtgaacagctccgccgtcgcccgaccgacttgcttcgtc

SEQ ID NO: 17957 - DNA, 460 bp, Zea Mays
catcaccttcaacctctggttcttgcgttctctacatagagatgtcgtgtgagcagggggaaccggcgagggtcatccaaggggtcaggtttcggcggtgggggtcgacgaggagaagtagaggacgtcgtcaggtggtcgtcgacaaactccggacagcggtaaggctttaatggcgagcaggggctcccccggcgctctggtcagtgagtagtgaggaggaggtgtggggatcgagctcgatgatcgggaaccgaatccctagggctcggcgttgggttttatagagagagggaggagagagggcgttgggtgagggagaaacggccgacgacaaccatcaaactccattgatggcgctgccgcagtgaagagcgagagtggggaagaggagagggagacacactgcggtttctggtgaggggatgagagcggctgagcgaagcgacgtaggtccggg

SEQ ID NO: 17958 - DNA, 505 bp, Zea Mays
gccagttcttccctggggatggcaggagcaagtcgttctgcctcaaaagtggaagatgtcccttcaccaagcttcagcactgtggccgtttcaatgtatctaggccgatgcgttaaaaccttgatcttttttcccttcggcacaacagaaatggccaaagtagcagcttttcttttctttccctgctttcacgagggatagctataatcagggtatacgaaaccaatgacgtcaaaaactctattcaaccttttctggcctcagccttcgaaggccaaggtcattgcatcatctttggcccttgtataggccctaagtaattcgtcactagttgcctcaatactgctccaccactcatcatttggctcatcaaactcgcctctatatctgaaagtatactttagatagattaggccaccctgactagacccgacagcagcttccttcggcatctcccactcattcacgagcggccatactctgtaggcgatatgctcttgaacca

SEQ ID NO: 17959 - DNA, 415 bp, Zea Mays
gggtgtaagagtcggcaaaggtttcgtaaaaaaacgaattcaggtagtaaactgtaaatcgtctatcataagttgtaaactacgttctagaatatttatgtaatgttactttatttttaaactaagcaacagataaaaaaaattgaggaaatattgcctgcacggcactacgggctacggctgaatattatgtgtagctagattggcccgtgactcccgacaagtctcagattagacgtgagacgtcgatcctgattggtcgctcgtggtacagcccatcactgtggaggtgttcttttcgtggcatgatgatccgaggctacaaacagttgggtcaaatcaagatcgaaaagcagtaggataggggacaggaaaaataggcgaatgacatgctgtgtaaactgcagtgtagggc

SEQ ID NO: 17960 - DNA, 911 bp, Zea Mays
gttttttttctaaagtttcttttttcgcaaaaaagatgatgtgctgctttcaaaaaatatttcctccatcctgaattgtaagttgttttgacctttttttaagtgcatagcaaagctatgtatttagatatgtacaccacgtctacacgcacagatgcgcaagcatgcagatgtatgcgtgtgtagatagatagatagattgatagacacacacacttatgaatctagaaaatctaaaacgacttcaggtttggaatgcagttgttcgcttcctttgtttctatatgagctttggtggttggcatgtctcggaatgaaattacgatattacattggtattttatttggacttctgtttttatattttctgctggagcaatggtggggtaattctttgttctcttacgaccgctaacctgatcaatggaatggcttcatgtaccttctaacctttacatttgcagcaaaagtgcacgacacaagcacggcacacgtatcttgcagtttcctattgtatatggcctttttcgtgttttccctcagcggcgtgtcacgctacgcttacaaccgctctgctttgacacagaaccgtgaacgatgtaatgctgactaaggctgacctggggaccctataccagttgggatttggtaccgtttgaccacgtgattctggattccatttgtctggctatctatcgttgcacgagcttggttcaaaagcagcattacaaaagcactagtacaagtttccaacacggttgcgttatatgctaccgtgaaggtcttactgcatcaccgaaggtttgactgaagctgggagtatctccataatttgctacgctactcctatgcgtattgaccacgttatgattgcgtagaatgaacacgttatgattgcctaggatgacgtt

SEQ ID NO: 17961 - DNA, 1278 bp, Zea Mays
aaatccatggcctagagagtatttcccctaacttaattgtgcaaatggtggcctattctatcctgcccacgagaaccgcgaaggccaagagcatttgatcgcgttcccgatgattggtggtctctcggttcgaattggtgactcggtaagcatcacagagctatgagagtgctcaaacgagggagagagagggatgagctgaccggattggggccggccgcggtgaggttagtttcgcggtggcggagaactgatttggggcgaaaccaaaattctagctcttggatgcacggttgctaacgattcttggtggcggggtggatgatgaccttgcggagctggtggagggctcaatttataggaagtaagagcggcggccgggaattttaatggtgacgcacggcggtcggaggggcagggaactactggcgcgcatgaacttgcgtctaccgtcgtggcgatggcaccggtgatcaacggagagcaagggtgagtcacggtgatgcggtagatggacagagacacgcggcgggcaacggcgaaggtttgacgacggtgagaaccttatccacgggcggtgagcaaggggggagggattatggctggccggagtggcgtccagtccaccgacggcgaagatccccttaccccgtgatgctatccatccgctcagacacgaatcccaacgccggtgacacgaatcacggcggagggagtcgttgacggtgaggacagtgtgctggtcatctcatccattacagttactgtaccatcgcagagtgtatgcagtcgacctgacagaccatttttgaacatgattttctcccaaacctgtatggcaacacataccaaactctgcagcaaagttatagagctactaaccagctacaagtttgtcatagatgccatgggcagattcatgctggatcatagttgaatccatgctcaaagtctcagtggttgcactgttggtctaaaaattcagacctagtgacctgacaatccaactttggacttaattatctcccaactttacttaacaactatgctcacaaccttaagcaaagttgttctccaatgattgatctttaattttgatgtggtgacatagggcaaaaaccctgtagtttgaaagttataaagctcaaaagttgagctcacaaatctgaaattcagacttagagtgaaatctcaattggggtcctttttgcaatttaatccaaaacttagggtttggtttgtaaatcttcccaaatgtgaaccatgtgactttatatg

SEQ ID NO: 17962 - DNA, 521 bp, Zea Mays
aaaacttccagagatgttctatgttccatgagttcccaatttccgtgccatccatttgactaaggcgatacgatccaggccgagtgacttctgctactatgaacggtccttcccatagtggcgacagtttgtgccgtccctccccagttagaattcggcggaggacgaggtctcctactgcgaaggatcgatgccgtatggccttgtcatgatagcgcctcagagtttgctgatatcgggctgactgaatcaccgtattcaatcgttcttcttctagtatatcgacatcctccagtctagtagcttcagcttctaaagtccactggaatttgtctaccttcttgagcaacttatagaatggtaagcccttctctcccagcctggatatgaatctgctcagagcggccatacatccggtaagtctttgtactttcttctatgatcgtggtgcttccatcctcatgatagcctcgatcttctctggattggcctcaattcctcggtggctgacaataaatccg

SEQ ID NO: 17963 - DNA, 512 bp, Zea Mays
ctgggggctggatattgtcgggccactacctacggctcaagggaacctcaagttcaccttcgtcgccgtcgaatacttcaccaagtggatcgaggccagggcagtatccacaataatgtcgaagactgcccagaagttcttctggcaaaacattgtttgccgattcggagtcccgtccgagctcacagttgacaacggcaaacagttagacagccaggacttcagggacttctgcttctccatcggcaccaagcttgccttcgcctcggtataccacccgcaatccaacggcgtcgtcgaccgcgccaacggcaagattttcactgccatcaataaaaggctcctcaacaacaagaagggtaaatggcccgacccagctacctgaagtagtttgggccctaaacacgaccgaatgccgggcaaccggattcacaccttttcgtctactatatggatcggaggccatgacgtcgcaggagataaagcatgggtcgccccgaacaagcacatca

SEQ ID NO: 17964 - DNA, 279 bp, Zea Mays
cggtcgacggcttataaattgcgcccgagttctgcttcttcaccacatcccgcacctcagtgactgagcaatcgactcaatttcattggagcactcccgcagcccccaaatcccctttctccctgttcttaactccgccgtggtcagcgctcttcgggttaataacttctcaattgctccctgttctagctcatttgtagcctcctattactctcagtaccgaccaattgaaatttggccgaagcctttcaccgaaacacgcacctgctctatagaacg

SEQ ID NO: 17965 - DNA, 459 bp, Zea Mays
cctcctctgcagccacatctttaattacatctgatataaccctatcaatatctggcattgtagcttcggcttcatcggtgcccttggcttcgacagcagctttagcttcggcacccgcagcagtcacggtcttagccgccgaagctgaaggcggtgttcgttcaatggcttgcatcacatttactattcgtcgtttcttttgctcttttattttctcctctgcaaccgaaggctgtcctttcttctgtaaaaattgtgtcagttctgatcccagtggacttagcagcttgaagggtggggagtcagtcattaccttcagaatctctgcttcttcggcagcagagggcatcgaaggagcttcttctcccgctttcggctcagaataaggcactatgctaagctttcgcttcttagaaattgccatatttggctcttgtgttgttcttggtttcttcaaaa

SEQ ID NO: 17966 - DNA, 1072 bp, Zea Mays
ttaggaaagagcaattcccagtcaactgaacaaaaaactctgtccaatttgacaaggacaggggcttcacgctggtttgaccaagtaaagcggcctccatgcagggggatctccttaagagcaacatcttcaattaatcttctgaatcgatgcatcataggtcgattaagatttgaattatttttatcatacgcctgaagaataatattgaaatcccaaactacaagccacggcccattgcagacattcctgatatacctcagctcttgaaggaacataaccttttcatgatcatcttggggcccatacacacaagttagccaccagcaggtgccattctctttgcggaattagatagaaacactacgattatcaattctggaagatccagtgaaacccaaatgacttttccatgccaccacaataccaccactggctccaactgaagggagaaacacaaaatcagcaaaatctgcacctaaccacgagagaatagagaatctagagatctcttccattttggtttcctggatacaaactacctctgcccaaaacgaagaaaccagctctctcacaacattttgccaagaggacgagttgagccctctcacattcccacaaataatttttgatggatccattaaacaaacatcatcaacgcatccacaaggggaggagggggaaaagcctgactagcagatcccatctggggtactccacccaaaaagggctgacaaagcctccacatgacaaggggacagaggttgcttgaaaaggctgacatactcatgcagtgcttcctggctgattccttcattatctgagatgatatgtagggacctcattacgttcttggtggccttacttcccaaatcttgcatattaaactccacacccactcctgcaacccggcgacttgttcttggagcagaaaattttgttgctggaggagggagtcccaagtcacagcttggaaccgttaacagtcttgaagactgccgtgtaatcttctttaagaagtcctctcttttcttatgaggcaacagattctgtgtctccctctcaccttcag

SEQ ID NO: 17967 - DNA, 379 bp, Zea Mays
cagtcagacacgtcacccgcacccgcccaagctcgccgtccatggaactcgggttccgattccatagctccgtcgcaagccgttggggtcaacgcgggtttgtaggattccgttctggtgttccgcagagcgctcggactccgctacggagtataaagccggggtacctcgtgcacccctcttccattggcaccctggtgtttgaccgcgctgcacgagctaaacgccgccaccgtcaggagcgaggtagatcgtcgattggtccttggggaggggatgctcggagtcgtgggcatctcttgatgctagttgatgtgtcgctggacctggcgtaccgctgggaagcttccaattggtcgtcagaatctcctccgccccg

SEQ ID NO: 17968 - DNA, 622 bp, Zea Mays
ttttccctggccatctctacccacactaagcccatttctaagttccctgagtcgctcttgagctcaccaagccactctttacagcccaatgtacaaggggaccttcttcccctcgtgcaccggtgatgccaagccataggacacaagtgtcaccacaccaccgacaatcttcgacgatcaggtgatctaggccatccaaccatgatctgatgtctagaaacaccttagcatacatatctaatccctaccatccatcgaagatccattggccagtcgggcgccatatcgattcgcaaagtcgatcccctcaccaccgttggattcaagatcgatggttcagcccattttcctatgctcgagccacaccgccttgccacatgtcggctagcgatcggccacgcacaaagacgcccccacacatgttcccacattagatatggccacatccacatcaaatccttaagatcctttgtgtcccaaccctatggaccaacatgtggtcggtccgcagccacttagaggacgccacatcgtccaaacccgtatgccctcgagacttttccatcgagacccttgcctttctttgaaactcgttccctgctcaaaaccctctgctagcccc

SEQ ID NO: 17969 - DNA, 440 bp, Zea Mays
ggaggttgcagcgccgaataaggtagaggttggtctagcggaggatgcaggtgttgtggcatatagcgatggcgcagacgagaaggtggatctgaagccaaaagcggaagaggatgcggcaacgaacgaggccccgaacagggaggtctcaaaagtgggagcagaggcggcggcgacagcggcaggatcaccgtgcaggagtggggtgcacctatggtagaggggtggagtcgtggggagggagcaccagcctcgcggcgatcggattgtcctgcagcaaataggggtgaaaatgggacggatacagggtcatattgtatcctaccctaatgtatttccctcctatacaagaccgggtacgggtatttaaaattcgagacggatacaggacgggaccaggtaataatttgggtgggtaagaaacgaatatcagatattac

SEQ ID NO: 17970 - DNA, 489 bp, Zea Mays
gtagagtagtgtaatgtaatgtaatgaccaaggggtgaaggaggccgactcataatgagtcgttctcaagtttgtgacaatctccccctacgaataaaatgtagttctttgctgggccaaagttgcatgcttttgtttgcgcaattgacggctcgctagcattttagagctaatgcctgagtgatgcttgtgatttctgcttttctgagttatgatctggcacttttgcgtccgacttatcgagccaactcatatttatgctgacatatccccttgagttttgaaccctatttctttgctttttcctccgtcgcttctctgtttcctgagttcttgagcttgcccgcttcgcttgagaggttgcgatggctcccaagaggaagagacagagtgctattgttccaattatcccgccaatcgatcctaatagccaacttccatttgctggcatacatatgtccgtcgtctccgagtctaacctcttgcgcc

SEQ ID NO: 17971 - DNA, 422 bp, Zea Mays
ctttcaatgttgctaatccaattatcgtttccgcaagccgtttaagtgctgctttggaagtaattttagcatcggaattataattttgcacaaaaaaaggttgcatgctaatgatacatcatctgtcaattttgctactctagctgctgtcattacaaaccatgttgtcattacaaaccgtttaggtgttgtttggagacagatttgtacttttgaagtagaacaattgcttgcagctaaaacattatctgcagacgcaaaaattaataagctaaaaatattattcatcgtaaacactaatccgtttgcacacataccttctataaccaatatacagtttgcacctaaaaatcttattcatcataatcagaaatccgcttgcatacatactaaaatttgcggcccatatttttacttgagag

SEQ ID NO: 17972 - DNA, 303 bp, Zea Mays
gattatgatgtttatgtttctatgatggtgttgacaatgcactcatcaacagaaagattgcgaacacaaggttggcatgtgcccttgtgtttaggttgtgatgagtggttgtcagcgggtagcgccttggggtgagtcagttggactaaccagggtgtgatttgtgtatgtgcaaacatgtctctcgacttgtggtgtgtaggttgtagtcaggagacgatggtcaacaaagaaggtgaatgtcatgtggtttgtgccgatggaccgaaagcagcaaaggacgagcatagagccttgatcgat

SEQ ID NO: 17973 - DNA, 666 bp, Zea Mays
gatggataccgtctagcatgaaggcacccgccacttgatgaacctcgcggtaccaaacctgaggtcggacgtggcagaacctggcagggggtcgggcgtgtcggagggaaccactccagtggattccacacccaggctaggactaacccgtcataaataactggtcgtattaactacatctagcaccgagccgttgcggaggcaccagtccgcctcccactcacgacccacgaacccttcggtatgtggttcatttatggcccacacgtcccttgggctgcgacacactcatgatctattgcgactaagcctgagtgcgcaggctgatggtagagcgcaaaactacgagccacgtcgagcccagcctacgaagcccagagtcggcatagtctaaatgatggcacctgggactcgcaaatcccacgccatccgccataaataatatgagacaatcaggcgatcccgggcccacgaacacgtgtggctttaccctaggtagaacgtttggttttatcgttgccttatgactcctttccatagaagccaccgttggtctacccctcttccagcctataaaaggagaggttggccctcaaacaaaggggctggcaagattaaggtctaggttgagttcacttggatacgcacccacaagcacaaaaccca

SEQ ID NO: 17974 - DNA, 916 bp, Zea Mays
ggggggccgtatcatatatctggtgccgaaaaacgcccttggaacggagaaaagcaaggtcgcggtgaagtgtgagcagcctctcctctagtggttctgctgggacgacaccaccagcactgcagtaccactactagttagtaagtacgctgctgcacacaacaatattcttttttctctccataatactacaaatactgcagtatcaatgtggctgtccctcctcttttccgctgatggagttgagatgttctgcactacttttccaccccgaatccggatggcacccgtaccgtagtgcttgtatgccttctttccctttcttctacttgtacctacatgctactacaggtgtactacgtattttgctccccccacttggttttgcaagcaagaccagcgtaaaagcagaggagactgtcagattcctctttcgctttattctcccgcccagcctcacacacacgtagttagtgttgggctactcacacatgacacaacttcgcctccctccaaatacccagagttttgaagcagggaggaaggaagacagagcagaagcagagcgctctccgtctccggtccagtatctccgctcgccctcctccctcctcctcctccttcgcttcaggttcaggagccagttagaacattggtgttagcgcgcgctctttcctccaagcagaatcaagattttgttcccatcctcaagtacttactcctcctctcccccactctccagccgtcctctctccttctccatcaaatcacaggctttgtttatagggaaaaaaaaacaaacaaacaaacagttgtctctgcgcccgcccgcccgccttggcttcttctacctacatcagctgtccatttcgcagcacgcagcagcagtctctacgctacggctgcatgagtgtta

SEQ ID NO: 17975 - DNA, 610 bp, Zea Mays
ttagccatccgatcccgatctgaagggccagattagatcgtgaagcggtacacgacagacaccacaggatccaagatccacggtcaagaatctttctcctgctttaaactactctagccttggatccaatacccatggaccagatccaatactggaaatggccatccccgatctaatcgtgaccctccattctcgatccaaaggccaggggctgttctcctacctccataccagtcgggcagcggcgcagggcataccgcagtggcgcctccccggtaaacacctgcctaggtgagcccgtgcacgaaaacgagcgcaaagagttgttgagcgatgcagcatcatagagaaaagggatctagggcttcctaccgggtcttgatgcagcggtggatgtggccacggtgcaaagcggaaccatgacgctccttaactctgatgagtaattctgattgcccccgatcgtgatctcccccgaagacgtgacacgcgactcccatagttgtcgatgaagcccccaatccgaacccgaggaacgaaacgatgctgaagatggagcatgccatcggcggcaatcccatcccccacggcgccctccccacatgcttgg

SEQ ID NO: 17976 - DNA, 812 bp, Zea Mays
catcgaatggtgatcatggagggcgacgaggtcaccacatctcaccctcgtcaacgacacacaaagggtaatgtaagatcatgatctaccacgccaccatagacatactcgtcgtcgctcacacacaccaactaacagcagtggggcgatgttaatgcaagtgaacttgaaggcggcacgatggtggtacaacgtcgagctaagagaaagacaagaataccgtctaccaccacgattgtctagcgctcgccacaatcctacgctctgtgacgcccaacatgttggttggtcatcgatagaggagaacatcaataacacgggcgatggttaagaagatctgcatcgaggtctagccggtgagtgaggccaatacacaatagctccatcatgactttagcaccttgttatggaaggaggcagagaacacggaagatttcacaaaccacatcatccagcaacgcaaacatcaagaagcacaatggtcgtgggcgaggccgtcgagagcgttggctccgcatcacgcgaaggctacaagggctagtatggtgatggataggctcccaaccatgaccaatgcaagcgccgtaaaaaatggccattgtgctagggattgtcttagcaagcccaaggacgaggcccacatcacgcaaagagacttggagtccacgttgtagatgtcattaaagaggacgtatttgagctgcttagcagtatgatgaggaggaggcttagaggtggagttgtacgtagtcactattcatccccaaacgaccaatattctttttatcgttgtcgtcaacaggttaaagtat

SEQ ID NO: 17977 - DNA, 486 bp, Zea Mays
tggccacacactggcattctagttcatccttctggagctggggatatctgtaggggcgaaccatgactggaggagtgcttggaagaagatggatgcggtggtcatatgggtaaggtgggggcaaccttgtaggttcagtgaacaccacctcaaattgttggagcaggtggtccatgagcgattagctaggtgttgacatatggcgtagacggccagtggacgcgcccgatcctagcgtgggctcaacccagtccatcgcacagaccgagatgccctcgtgaacgacatgcacatctccttgaaattccatagtatgggtcccaggatgtggaggaactcaacgccaaggataacaccgaactcgccaaggttgatgccatagcagttgacgtggaattcttcggcttctatcatgatgtccacgtctcgtgccacgccaacacgcattccccattagccaccatcacccaaagagtggggcaggga

SEQ ID NO: 17978 - DNA, 536 bp, Zea Mays
atcattacatgcactatccatttggcaaaattaatagcaatttgtatttcttctctgtttcaggagtgctggtcggttcctgttggctataagatattcagatagtgtatgcctgtccaactgaagtaggcgtccacatagaagaaatacaaattgctattaatttgtttcgttgtttttccctgatccgtaatttgattttagatgcagtactcgcgatccaacctatttgggatgtagtactcgcgcaagcgctacttcgtgctcgaggacgccgcgctccgctgcttcaagtctgcgccatcctccaagggcgaggtaccctattgccacgactgaataactacaggccccctccaatcatgtttcgttgtttttccctgatccgtaatttgattttagttgttttttgtgcttcaagtctgtgccgtcctccaagggcgaggtaccctattgccaccactgaataactacaggccccctccaatcttgtttcattgtttttccctgattcgtaatttgattttagttgtttt

SEQ ID NO: 17979 - DNA, 472 bp, Zea Mays
atttttcaatgagaacgtgcgtccgcactaatcacgtctcattgtcatctttgacttcgtccacaaaaagaactccactggatgatgcccggtgttcagccagcagctgtgactcagcgtggctggaacattaataggaaggagctgatcaaccgcaactgggagacagagagactagttaaatcccagcacatgattcacagaccaaataaccagccagattgaacatatactactttgatccctccccgatcagtgtgtgtgagcaactttgttaatctccacttgaacaggagcgggagacgccgtcagcctcggcaaaagtagcgtagacatgttcatctcaacggacaggtttagttgcactcacatgttcatctactttgactcgttacgggcgcacatgacagcttcatttgaccgtaccatgctaagctgctagccaggattcagaacaacgggacctgatctg

SEQ ID NO: 17980 - DNA, 571 bp, Zea Mays
ggggaaccgaagtccagctttcatgaagcttctgaaaattaccacttcatcagctttgggaagaggaacagtactctcccctccagccctcacgatggaaatatcacgaaagtatctccctttcatcgcttcgatctgcccttgcttgatagtcgactttccaaaaacaacatggcttggcctccatggccggtcttcggtatcttcatttccactttgtacatcaaaactctcgctatcgctggagttttcagataacccagctagcatttcattggtgattttctttgtgttggtcctctccatagattcgtaaaatcgaccaatgcgtggtcagtaatcttcttctcctcagccattcaaacgatggtcgcatagatgccaaaactcaaaaagttaatcaagcttcagaaagcaaagaaagctaaatggcaaacacaatgcaagcagctagatagcacgaaaaatactcacgacacatgtatctatatatacactcaaaaccccgtagggtggtgggtcccatgggtcataatgattcgctattctagcgaagggaaggtgttttttc

SEQ ID NO: 17981 - DNA, 700 bp, Zea Mays
ttataccgaaggggtatcagatagtactggccgccagatcacgattgaacggcccggattagattgtcattaaaatgaagcggtatgcgatcacggccctcggattgcagatcaacgcttcggatttaaagtggcgagggacactcccgcgcgtaggatcaagatctcgtggccacgctggattctccacgaatcagtatctacatctaatcgtagccgctcatcagccaattgacgatcaatcttttcttccccaatcccagcagccgagcgcggcggtgacgaagctgtgcggcggcgcatcgccggcgacacacgaattggcgctaccgagccggtcccacaacccaactaggtgctaaacgatctagggcgtgcaacgaatcgaatgagttagtccttacccaagatttgagtgtcacgggtgcagtccacggcggcatgcggtccacgatggtcatggttttccgtttgagcgattccttagtgataggcgcacatccaccagtgctggtgccgctaacacgtacgccaggtcacggcgaaccctcctagtcactggtttgaccccgaccgacggcgtgaacggaaaacagtcggcggcggtgctcctccctctccgcgaattcggtggtttttgcacgatgctttggacaatgggaggtggtcgggtcttatagctggtcttgcgaaaatctcg

SEQ ID NO: 17982 - DNA, 321 bp, Zea Mays
gatccgcaaaagattacttaaagctcagagtcggtagaaaagttatgcagacaacaggcagagagaactcaggttcgaggaaggagacttcgtctacctcagggtctcccctatgcacggagtcaaaaggtttcaagtgaaaggaaagctagctccacggttcgtcggcccctatcctatcattggcagggtaggacccgcagcctaccgccttgaattgccagaatccatgtcagatatccacaatgtgtttcacgtatcccagctccgcaaatgcctgcaagtgccagaaagtcacatcgaagaagagacaattcagat

SEQ ID NO: 17983 - DNA, 695 bp, Zea Mays
cgatgccatagttacggagtggagctggcaatgaagctgtgtgcagcagggaggcacagggggtatagcggcccgaagctattgcacttgacgatcacgttccgagacaacagatccttcaaagagcaaccagagggatcaaactcaatggaacaattattgtcggtagtaaactggcgaacataaattaggttcttaataagtttaggtgacacaagaacattgttgagatgtaaagaaccatgcaaagtggtagagccagtggaaatgacaggaagaagcgagccgtcaccgacaataatggaggaaggtgcagtaataaaggatgttggaagtttttgatagggtaccggtgttggaggtcatgtgggaggttgcacctgtgtcgaagtaccagtcggtctgttgaggcggagttagggacacagtactaaaagcggatgcaagggagtgagcgtcctaagatggagtggccggctgtgccaggatgtcatagggagactagggaacgcttccctgtagagggccggtctgcagagtgtgttgaagtggtgcgcctccctgtccttgaagagtaccaattaacgtactgctgggtatggtgggccagcaacgcctggtgaggattgatggaggccagagcagcgtagaaggcctcttgctgctgggccgtcggaggcagcagggcttggtgt

SEQ ID NO: 17984 - DNA, 488 bp, Zea Mays
gtgtcgtttgagaaaagaaaaacacatttatcaatcaaggaacgtgtgtcaatgtgcaataacatgcgaccgcaatggccctgtttcagtaacgaggttaagcaacagaatagacatactatggaataatatgttcctgacaagttataacagagaacacagaatccaaataagatacaggatatgtgttcccatatcaggaaatgcacagcaacgtaaatccatgagtggcacaaggctcgtgtgcaatgccggtctcgagtgagtagtgaccaaagggctaatctgctagatcgcgtgcagcgctggtccaagtgaccgcaggactaatctgctatagtccaacacatccatccattcccatggctcctatcccgtcagctcgaaatccagatgaactctgaaaagctaaagtagtgctgtaagcattgcagataagtaaatattgctcccaatcgacttcaggacaagctaactgggcgagcagc

SEQ ID NO: 17985 - DNA, 527 bp, Zea Mays
ctgaagcagccgagtccgcctttgcagccctcaaaacagcattaacagaagcacctgtactccagctaccatcattcaccaaagacttcatggttgattgtgatgcatccagcacaggctttggggcagtccttcatcagggaacaggagccattgcattattcagtcgtccttttgcagcaagacaccacaaattaacagcatatgaaagagagcttattggtctcgtacaagcagtacgacactggcggccatatttgtggggatgctgcttcatcatacggacagaccactatagtctcaagtttctcctcgaccagcgactctccacaatcccgcagcaccagtggattagtaaaatccttgggtttgatttctctgtccagtaccagccaggtcacctcaacacagtagtagatgcactctcccgtcgcaatgcggatacccttttctctgtagctctatcggggccaacttttaccctctatgatgacctccgaagggacaccgctagggacccagactgc

SEQ ID NO: 17986 - DNA, 700 bp, Zea Mays
tcgagcagaatataaacactaggggtgttacagcgcgcacaattaaaccaaagtgcagggccttctgcgtaaaaagtcctaagactcagaaccacccatgctggactgcgggtacaattttattttttccaaggactcttaagtaatatgcacggtcgaaatggtatgggaagtccctgcctgccggattatacatctacggtcccgatcgtaccctaccccagatcgaaccggtatacctaacgtccgttggatcggacaccaatgttccggattaaattaatcatgatttgatctcgcccgcgcagtttgaatcgaacgaccaccgccgatgccgcgctacgctacacctagattggatctgtgctgttcatcagtgattccacggctcccaccgatacgacctttcatctaatcttgaccgcaagccttgagatcaacggtccagacatactcccgacccaagctaccatgacggcggtgccgccctcgacccatgacggcgccattgccagctacgcaatccacaccatcacgcatcaatacttccaccagagacattctacacgttgtagaggatgactcaagcacaagggatggacttacagggggtaaaatgtgcacaaggggcctagccatggcgcgtggtggcccaacaacttcggcgagcaattcgcagtgcatcgaagcttcccacgcc

SEQ ID NO: 17987 - DNA, 467 bp, Zea Mays
ggggtggcaaggcggagatcgccagtggcggtgacaagaaagtcgagggtgcccaacatgatgtggctccccaacgtgaaggtttcgccgctggcaaatgttgatgtgtgggccattggagtggtggtgtctattggcacgctaaaagttcccctacctagcgcgccaagtgtcgtggctttggaaaccaggggcagtaagatttgtgttcggaggggaagttagcgtggactcactccgaatggtgagtcgctgggactcgagcggtggattgagacggtgggttatactggtttaggctagcacccttgtctagtgtagtactgatcgtagtattgctgagggctacaactggtgtgctcgtgtgtctagaaagggagggggtccttctcttttatagttcaagggccatactttacaatgaggacttgtgttctactggagggatctcggccagtgacccttgg

SEQ ID NO: 17988 - DNA, 752 bp, Zea Mays
gggcgcgcggaaacaacgagccaatagccaatctgtcaaactttggccccacctgcaggctcgtatcctcccctaaggcgggcccgggggccactgtcggtaccctgaatcaggggtaccccttactacagtatgaagacacggtgcccgtacgacgatctctagccgcacgaagaacagcacccaaccccaccacgtggacggctcaagtggcaccacgtggcgagaaaagatgatacatcccaggatgtgtcagttggaccggacctccgcgaggaagcaccggacccctgtacgcgcaacccggacccctgattacgatctgggactcccaagtaagcgtgccgggtcccttggatggggtccagatccctccaggtaaggtccgggccacaacgagatcccaggacaggagataccctggcataagcaagggtccgttactgacccgtgtcaggccgtatcctatgcacttgcgctccccgctcaggcggagacccgctgctgctgcgtggcttgttgcccgtgacgtaagccagcgggcggggcctgacgtaaggcctctaggccgcatggtctctgcatttattgcggagaggacgcgccgcctatccaccctgctaacaggcgatgtgccccctcagcatttaatgtgtcatgtccactccgctggcaggtggcgccagggccatcctacagacggcgcgcctgttcagtccattgtcaaacagtgcgcccatgctgcgcggcgc

SEQ ID NO: 17989 - DNA, 769 bp, Zea Mays
ttctcaacaaaagtcttgctcatgaaagtatgtgatgcaccagaatcaaaaaggatgacagcgggatgattagcaacggaaaacgtacacatcatcacaggctctcctttcggggtggtagccacttgagtatagtagactagcctagtttttcttgtatttttacctgcctgagtgcttgctacatttcccttgccttgagatgtgctcctagaagtctgttggaaattagatttattttgctttggatagggacagtccttgatgaagtgtccagacttcccatagttaaagtagttgttagatgaactgggtaaggcagagaaacgagaaccaggggcactcagctgattgttctgagcaggggcaggagtgggacggaagaaaactggttgcttgaaaggataggtgggtggatgaggaaaagagcgatttgggttataaggacgaatcaccaaccttgtccgcttctccgatccttgagaggatccttcacccccttcacgcccacatctctttgtctttccctgccccgaattcttggcttccaccggaagcactgtgctcacggccctgctgtaagtaagatctaggcaagtggcccatctttcgctgtagtcaatcatttagacctctcatgaagcaattcttctttttcaggtctgtgtcaacttactctatagcatactgggagagatggttgaatttggcgaggtattgcatcaccgagtttcccccttgctttaagcatacaaactcttcaagtttc

SEQ ID NO: 17990 - DNA, 799 bp, Zea Mays
tttggatatttattgaacttcgctcatctgcactcgattttgttccacattcacatacatattgtgcctgtcctacagctccacatactatatcttctgatcaatacagatttgaccttgcaatcgcggtttcactacctcttggtaagtatcatgaaccagcctttgattgtaccatcctttgcattgtgtttcattagatactagtaagaacttaataagacacggtagtgtgtgttcctattcacccagagagcgtgtagttgcttattagggataacctttactgtttgttcctgttttggtgtttccaatggcaggatccgatgacgagattgaggtagtcattcccacacaattttctgattgtgtcagccgtgaagacttcgatgttatttgcaagcgtatggaggaaaatatggaggaaacggtccacaagtctatccatgacaattattgcaatggatcttggcaaagtgctaaatagggtggagagacggataaccgagcttgtcgatcgggttgccacattggagacacgtccactacatcagcagcctcctccaccaccacaaccccagcagcatccaccacggcatcagcaacctccaccacaggctcaagatgatgccattttcgatgcacgtggcaattttgatgaggcagctaccagagacgcccacctacgacgccatcttcgtcggaatagggtaggtatgggtgacaaccagcgaggtaataacaatcttattcccgatgacccttttgctaagattaagttcaacataccttctttttc

SEQ ID NO: 17991 - DNA, 676 bp, Zea Mays
cgaaagagcgttcaggattgttgaggcagagctgggcttctgctacgatttcttcttcacaaagtactactacaccttcgtaatcactaatctgctaccggtgccgttcctccagtctctggctttagcaaagatcactctaatcttaacagtaggggtgtttgccgtcaggaattcactgctacttgagacgccaaatccgatcatacaagtacgcatctcaagagctgacaacatcatcactctgctgcttctgggtatagccctcatagtggagctggtgcatgcggcattttatctggcatcggactgggcccaggtatcagtagccaccatgtatgtcaagagatactggtacgaaatcagcccatccatctttgcaacagtcatcgctttccttagaagggtcacgttttctggacagctgatgagaaacaggatgaagcagcactcagtgattctcgggcagagacagcaagatccagtggaggtttctgatgcagtgaagatagctgttgctagatcgctcatatcaatgtatagcggcaacccaaccaacgacgtcggagaaacatcgcaatggcaggaccacaggtattcttgggcactcctccagggcctctctcagtctcagctggaagtcatgttaatttggcatgtcgcaactgagtactgt

SEQ ID NO: 17992 - DNA, 435 bp, Zea Mays
ctctggtgggccattgccgtcgctcatgggcgcgccgctgcgagcgtggtgtgtgcggccgagcttggctgctggaggatgaagatgatcgcgccatcatcgatcgtatgttgaacggttcgaatttggtctagccatcggatgtggttgggtgaatctgagccatcggttgcgtgtcgggcgggtgtgatcgtgcgctggtctatatgaagggaccggggaccgttcgatccacatcggacggtagagattagaagataacgtttcgatacatcgccaacctaatctgggccgtgcgtcgtggatccaacgactctgggtgcttcataccccttcgcgcatgtcaagttgcaaaagaacccctggaacctttataaatcaacccgcggcccttccacctttaagattcataacaagcgggtcctgtaacctttc

SEQ ID NO: 17993 - DNA, 849 bp, Zea Mays
gcatgatagaggccctcaaaatgtttccgactatgagtagagtctagactactggaaagcttggtcatgacgtcaggtcctaggtggccgagacgacgatgccaggtggtggaggtggtggcgaagaccaggacgggaggtggggacgcaccggtggacgaagggcggagcgtgtagaggggctcgatgctgtcatatcgggcgaatgggatcctggtggccagatccttcacagaaaaaccagaagtgtcaaactcaatggaacaggaattgttggtagtgaaccaacgaacagaaaggagattgtgagtgatgtgaggggcgacaagaacgtcattgagatggaatggtccagggagaaccgaggcatctactaaggtgatcgggagagtggaaccattcccaacaacgatcaaagtggggtaggaggaatgaggtgggtgagaacgagataacatgcctgccgtgggggtggtgtggtaggatgcaccagagtcgacaacccaatcaggggagggtggagccaacaccatggtgctgtaggcggcggcaagggaggatgtgtcccaacctccagccaggggcgaccagggagtcaccggaggcacgagttgaggtggggtcagggtcgtcgggagtacgccgtaagggagcataccgaaggcaggtggtgagggagctccataggtggatgcactctggagagtcggcgcctatgaaggaggactggaagcactaggagcctgacccggccacatggagatggtgtcggtccaggggttgtagaccgatggccatccgtggccttggccgcccccagccggtggaacctccacgcgtagagctgct

SEQ ID NO: 17994 - DNA, 478 bp, Zea Mays
gcatcttgtcaaagaccagggttaagtcttctactagggtcgaccctctcttagtcttgaccacgatgtcatcgacgtatacctccaccttgtccctaatcaggtccccgaaagtcttactcatcgcccgcacaaatgttggcaaggcattttttagaccgtaaggcattacggcatagcagtaaagcccatccactgttacaaaagcagtatgcttcctatcttccctagacatctggatttgatggaaaccagagtaagcatctaagaaggacaagaggtcgcactcggaggtagaatccacgatttgatctatccgtggaagtggattcgggtccttgggacaagctttattaatgctggtgtagtcgatgcacatccgaagcttaccatttgcctttggaacgatgactggattggccagccacactgggtgatgaacctcttcgatgaagccggcgtctagcagctttcggac

SEQ ID NO: 17995 - DNA, 737 bp, Zea Mays
aaattacaaaattttagaaattggaatgggtcaatttggactaaaatgaattttctatgatttaatcaagttctagcatatatttttgtattaaaaatccatttttccaatttatttattcaatttcaaacagcactggactgggcctcaattacaggaaagtccagggggtctcggggtaacatttctaagacacagggaacagtggtggagaatggcgggttaaatctctaaaaactgaggggcgcataaataaaacgacccagcgaaggggtatcgcacgccctgggccattggatcccccacgaacgacccggattagattaattcctggtggagccagcgttcaatccacgccgatgagtccaagatcggcggtcccgatttaatgacccgaaggggtacgcccaagatcgatctaggccattccctacacgatcgacggttgagatccaactcccactagatctaatcctagccctccaacggtccgcgcgttttcttcctccaacgccgcctaccagacggacgacggcgtgtatggaagcggcggtgccatggccgaagccttcctccctccattctaagccttagaatccaattcggctggtgaaacgtgactagacaattacatagaatgagggcgggggtcgattaccagtgatcacgtcatgaagcgctctggccacggttgagtccgaaccacggcggaaacgaagctccaacgacgaattcag

SEQ ID NO: 17996 - DNA, 476 bp, Zea Mays
gccgtgtgctactgcggctgcgccacgctccaagctttccaccacgacgtctctagccgcaccagctcaccggtaaccgccgtagcttcttaaccggtgatcaccggaggaagcgccacggtgaaagccacctgtttcacacaccgagcgctttgtttcctctggccgccagcgctgctcgaccggattgatcaccaccgctcatgtatcctataaattgaggcctcagcttgctccgctaggtaaccgtgcgtccagtgaaaccactcgtagctccgatcgtctcccacagcgtcccaatttgggatttcccccaaaatggttgaagaacaccgcgaacccaagctcaccgtggtcagtcctgtctgaggaaatcccagccccactgctatctgttctagctccctttaggtgtcgtggtgctcactagctttggaattggaactctactgcagcagatcatcgagaacatcgcc

SEQ ID NO: 17997 - DNA, 1313 bp, Zea Mays
gcaaaatagcccacacagcccggtaagcaaacctctgcttgcatctgcctcaacctgtgtctgagctcgacgcttcgaccaatcctcccccgcactcactgctagggttagggaaccagccgtgtcattgccacgacgccttcgcgagcagcacaacctccaccacggccacctccggcacactgcgcaaacaacttagaggtgcagcagtctcttttggtggcatctaaggtgaccccgaccatgtctctccaatgtgatggcggcaacgccacgctccatcgtccagcgacagtgtagagcgacgacaacccatatacaacaccattatccaacgacacctgacgagatgcgtaagtggtcccaggcggcgctgccatcctcgatccgagcagccttccacggggcatctactccaacccttcggccagcatgacctcaccaatccggactccctgatggccagatttgcatcccctgaagttagccatctactaccaatcaattggtccccatccgcagagcactcgcccaggtacattcccaactcatttgatgtcccagatgctactgtgtgtttgtataattttcttcccttacccggtacaatcgttcttatgttgtacctcggccttagcttgaggattttttaacttcatcattagcctcatatcttagcacgccccctgccatacactagggtagtatttcttcagatatttaccattgaggccttgggtaatctccttccttgcaagtcctcaacgaaatatgcattcccatgcacaatacctacaaccttgaatggtccttcccaattcggcgaccatttgtcgaatttattatttttgactcccacgggtaaaatcgttttccataccaactctccaatctgaaatgatttctccttcacctttttattataagctctcgccactctcagcttttctttctctatttcacttaaggctgttaatcgactttcattattcccatcaattctgtctagcattagctcaccatataccttagccgataacggattttgacaagctactctacaagcctgtaaattcacctcaataggaagcaccgcctcttgtcaataaaccaattcaaatggtgtcactttagttgctccatgccgagatactcgatgagcccataacgcctctgacaacacttcatgccacctcttcggctgttctacaatcttcttctttatcaacctgatcaacaccttgttgctagattcaacctgcccattagctgctctcgctgtccagcagacgacgacttaaataggccaccac

SEQ ID NO: 17998 - DNA, 395 bp, Zea Mays
gagataagtaaagtagatagtgatcacaacttgtaaagggataactctccggtcgtgtatataaggccaagggggacccctacaaaatgatctcatctcactccaccctcatcaacaagacttgagcaatcgcaaagctcacttgtaaccttcataccccaggaatcaaaatacggccacaaacaggaagtagggtgttacgcattccgaagcagcctgaacctgtataaacccttgtgcgtcatcgacgtgctcctacacgtaccatcgagttgtaatcaacgacgtcgtcctacccaaaagcatcacgtggattaccccgtggtgcgcgatcaggtcacaaacattggcagaccctagttaggcactagctatgatagatgctaaaggaccac

SEQ ID NO: 17999 - DNA, 554 bp, Zea Mays
agacggtctaggtacgagactacctaggtagcaccatatacggctggacaatccggatataccttcggaccatttggccaggtcacggaccatccgaccttttacgccggaccgtctggatatgcgtacgtagagccgagagctgcacaatacggacaatttccacattcatcgcaacaacattatggtgccccaccagcaacacattatattcataccataccacctcatggacatagggctgaatactgttcggccacaagagagcctgagaggtatagggcaggactggtgacattaataggacacctaacacacacatcaaacatccctgggaggaaagccgacagagtgatgtcaggcaacctgagaattccacccacaaactcaatggatgttcgccagacatggcggagaggatcagagacgaggtagtcgggatgttcagggacaaactcaatgttagtgtgtcaggtacagggcaatcgtatcggaagccttatagccaccgattcgacaccatgccgtatccatagggaactagaataccagac

SEQ ID NO: 18000 - DNA, 493 bp, Zea Mays
caccagcaacaatttgaggaccccctcgcaactatgaccacaaccagcaatcaggaataggaggtagagcaccaagcgatagggcgtggtcgtgaccccacctgtgatcgcaatccctactgtgttttccacggcgaagacgtcagtcactcaactagggactgtcgtgccaccaaagaaatcaaggagagaatggatgtcgaaaggacagtgaggggtcaccaagaatagctacataaggccataaaccataacatccaaccacaattccaccacccatacaaagaaaggtaccaaccctaccaataataccaacaacactacaacccctgcccaaccacctagaaaggctacaactcccaccaccaccacaaccaatccaacatcaaaggaagctccctctttttccactaaaagaggaggagggttaccccagcctccggttcacagcataatcaacgttgacaccagcgcagacttcaacaccaaaagg

SEQ ID NO: 18001 - DNA, 603 bp, Zea Mays
cgcggatagccttcgcgatagactctggttttttcgcacttgtgctagtccggctgcacccttaggcgacttctgcgcggatttgtcgcacgcgagggttgctagcgcttagcctcgcggtgacctcgtgttggtcgaatgtcgaagaccgtcgtcgcggtcttttttcgacgcatgtttttgcgggggatttgtcacacatatattacatggctccgcctcgttaaaaacctcacccccgagaggaaaagagtgcgggccgatacaagattgtttttgcgaattacaagggcgaaatcagccctgaggagtcaaacaaaaaatttacggaggttgtcgatgttctaggagtgctccaggtcctcgccgcttggcgttgtgagcctgtaagcactgggggaagcttttgtcttgactataaaggggccctcccacctgggctccagcttgcccttggactccatccgagctgtccggatgagtacgaggtccccctcactgaactccctcgggatgactgagtggtcgcgccatgctttggtctaggcttggtacttgttcagggcctgtagggcgaagactcggtctccgtcaatgagatcc

SEQ ID NO: 18002 - DNA, 518 bp, Zea Mays
catccttttcctcttgggggtcgctataagatctttttgtgccttcggcactgtcacttctgccgaagggctcagaacttctgatatttttgtttcttcgactctaggttcttcaattttgttaatctttggcattgtagccagttcttcaatcttctgcgtgagggtaggtttgtcggcttcagtagccgaagaggtctcaccaccaaattcgggcactgtggccggttcaatgaagcgcggtcggtgagtaaggaccttcacctttttctcttcggcgcagactcgcttggagcagctgaagcatcatctttcccggaagttgcacttttcttttttgcccccgtgacgggtagcggtagtcagggtacatgaatccgatggcatcaaaaactctatttagtctcttctttttccggtttccgaaggccgcagataacgcattatcttccgctttggagtacggcccaagcagttcatcacttgtagcttcgacacacttgagccaatcgtcgtct

SEQ ID NO: 18003 - DNA, 620 bp, Zea Mays
cgaaaagtagcttgggactcgtgggctggcttgtatcggagtggttcgcctcggctggtgagccagtacgagtttaagcctggtttctagcttgcaaagttagcgagccaagctaaaccagctcaccatggctcatgagctcggcctagtaagcaccgttggctcaataagacctcaatcctagtatccaattttgttttccctccccattcttagtaacatgtcacttgttgtcatgcgccctttcgatctcttgttaacatgtgccatttgtgtccacctgggtcctcatcagtcggtactccttgccaactcgcttccttcagatggcatgagatgagacgacgctatctccccaatgaccccacctcgacctccttgggcctcgcccttgtaggttcgtcatcgtagcagtgcgatgtgtcccctgccccctatctcgtaggcttcctggtacgaggacacgtggcccttcggcatgctgtgccctacctggctagccccttctccctggctctctgtctcaatctcacgagctccacatgcccttgacgccccacctcctcgggcccttaggctcctcgatgcggcgatggctcgtgtcccctattccctggctc

SEQ ID NO: 18004 - DNA, 948 bp, Zea Mays
aactgcgatagacatgacatttgatgaatctaatggctcgcaagggcatgtttctaatgatattgcaggaaatgatatcccacctaatgaagccatcaagaagcttgcaataggtgaagtgaagccacaagaaaaggacgatgatgaagggagaatttgatacaattttgacatcatggttagtagcatagacaattaatattcttatggactctaaccttgctactggtgcatatgtttctccaaagtcaagtcctttcacttgagtgaaaccttgagcaaccagtcgcgccttgttccttgtgaccaatccgttttcatcttgcttgttgcggaaaactcatttagttccaattacgttttgcttgggtcttgctactaaggaccagacttcatttcttgtgaagttgttaagctcttcttgcattgcaatgatctagtctggatcgcttagtgcttcctccaccctaagtggttcaatagaggagacaaacgagtaaaattcacaaaagtttgctaaacgagatcgagttgttacccctctcctgatgctacccaggatgttgtccacaggatgatctctctgaatgccctggtgaacttgagggtgaggcaccagagaatgtctctgaatttgatcatcactttcatcttgttcaatggcttcttcactagcaacttctttctcattttccacaatggttggcatatcttgcggtagaagctcttcttcaaggattggatgacttgaggttgatgggtttgcttggatggaaggattttcaccaaccactctagcactcccatcaacaaccctatttgtcatccaaattctctcttcatcatcgtccttttcttgtggcttcacttcacctattgcaagcttcatgatggcttcattaggtgggatatcattttctgcaatatcattagaaacatgcccttgcg

SEQ ID NO: 18005 - DNA, 392 bp, Zea Mays
cacaaagtggtaaaacatccaggaaaagcagtgtgttacacaatccatcaggtacgaatgtgtaccctaaaccctaaattacactgggcacaagcatacataaatgaaatgcctaaccatggcgacgaaggagtcgtggacgactgacctgcaaaggggagtgggagacattgtcgtttccgtcgtcggtggtggcggcaaacgttgaaatccacggcgacggaagggagagagggttatcgccgatgccgtgacagagggaaggggaaaggtggcctattttgacgggagatggagttcttctatgccagagagacggagtcggtgagaccgtaagggcataaacggcacaacgaggctatgggcccacctgtcagatccgccaaacaatc

SEQ ID NO: 18006 - DNA, 1077 bp, Zea Mays
ctaagctccagttcaatcagatcatgcacatcaataatagaattaaataaagaactccacctattagtgccaccaggtttatttttatccgactcgtttctaagaatgttaaagtcaccaccaatcaacatggggtgagagcacttggaacagaaaccggacaactcactcaaaaatttatgcttctggtcattttgagcagccccatatacgtttatgaaattccaaataaagcctgattccttgtgaatcaccagaatacgaatcataaattcccccaagtctttttctctcacatcaaagatgtcagcatcaaattcaacaagtaagccaccagatctcccattagggggggaccaaacccaagcaaaatttctattgccaccaatgaaattcaaccaagagtcatcaaagttttttttgttggtttcttgcagaccaataaaatcaattctctctttcctaataatatctcttaggaaatcacttttcacatctttacccaggccttgacagttccaaattaagcctatcattctgaacaactttgggtgagcccctcattcagacctctccatttaataggaatattcctatgtttaggagatttgttgtctctttttttcctcacagatttttttctgtggtgaattttacgaccttttctgagcaccatcacattttcaagatcagtcaaggcattatcctctccttcattatggacactattatccatatcagaatcatgaatagctgccttgttagtatcaaaattacatttaacagattgcacaaaaagattcttcctagaaggctctaacgattttatcaggtctaaattttccatagcttcattaatagaagatcctaattgaacccctagtttgtgcgcaatatccataagaacagcattatcagtattaagaacagaaaatggattataagacgtacctttgttaatgaacgcgtctttagccattgctctcgctgtagccttatccgcaatcttcatttcgtcattggactccgtcctgctgcttcttcagacgccttctgcaagctccccttccgtggacc

SEQ ID NO: 18007 - DNA, 333 bp, Zea Mays
gggcgaagtcggggtacaggttttgggtgaggagtggattctcccgtcggagcctagcatcatgctcagttagcccccgctcgcgttcctgagcttgacggcagtcgcggcggcgagagatgcgtcgttctcaatgtgctctttcatcatgggtttcccccatctccgaggcttcgtccttagagatgggttgtgccggatcccgttctttggcttcatgatgtcgccgcatgtttcgacgtctgtttctccgtcgccgagcatcgcgctggggaggttcttccccaacacggtgggttcatcgtcaaggatgggcgatgactccagtctccc

SEQ ID NO: 18008 - DNA, 555 bp, Zea Mays
acccagagggattacaagtaaccaacgacgctgaaggccatcgcatcgtcaacctcattatgactgaagattggcgggccccaataacactgtttctgcaaggatactaccactcgagtgacgtcaatgaggccaagcgcctcaaacaccgaagcagggacttcatactagtcggggaccagctatacaagaaagggatcagtcaacccatgctaaaatgcgtcaccgaaaccaaaggcattcagatcctacgtgaagtccacaacggaacttgcggctcccactcagggcccagggccctcgctaccaaggtgatctgtcaaggattttactggcccgctataatctgcgccgcgaatcgagtcacgaggtcgtgcgaagcttgccactggttttctccccgcttgggcaacccttcgcagttcaccaagctgattgttcacacatggccacttcaacgctgggggctggatattgtcgggccactacctatggctcaagggaacctcaagttcaccttcgtcgccgtcgaatactttaccaagtggatcgagg

SEQ ID NO: 18009 - DNA, 468 bp, Zea Mays
ccaagtgatgcaaagtgttcctatgtgcttcttgagtatccttgcaggttcctagctccttcgggagggttttcccacctcaaatagccatttccccaaaaccctaaaactccgccccccacgtgttcggtgaaatgcccaaaccagccaaaaatgctccaattgaacccaaatttttcaggcaccttcaaaacatctccagtaacttattcgcaaaatttcacgcccatccgatattccaggctttaatttttccaaattccccgtttcaagcgatcgtttccgagctgagtgcccaaatctctttttcttcgcctaaattcaaaccaagcacacacttcactcctattcacccacataaacctattcgtgaagtatcggctcaattccacgtcatttcatgcctcaattcgaattccaaacctcctatggcactttttatcgttcaaacgtcgttttcacgtcgtt

SEQ ID NO: 18010 - DNA, 413 bp, Zea Mays
ggacccggcgccgcttgcgccgcatcgaactggcggatctgctcctccagcttcctctccttttcctctgcttcgagctcatgctcggccagcaactcacctcgccggacgagcatttcttccttgaaggcgagatctgtctctcgcctagcaagatctgtctcccgcctgtccaaggatagctccttctccttaaggttttcctcggcgagggcgatgtcgctggccttgccctcgagctcttgctgccatttctgcagcctttccacagcctttacctgctaggcccgctgggcttctagagtcttgtccagagcactcagcttggtctggtactccgtcgtgagggcctccctctgggtcacggcttcctccctcccggccacattcttctccctccaggtcgcctccag

SEQ ID NO: 18011 - DNA, 568 bp, Zea Mays
attgaatcagccacataagctcgttgtgcattggtcaaagagtctattgaattgttaaaattggcccaagctttgtggatgttgcgttgtcttcggcgacgtcgctttggagatgttgaattttgtgcagagggccaagacaccaccacctctgatgatatgggatcagatattgatgcagctggatctacatgtccccttgttatgtcattgaaagagagatgaagcccttgccagcggagttcatatttgggttgaccattgctgggattatggaccagcatagggataaattctggagcttcgacccgaagtcgacttttggtggatgaatcactgtcagtagatgacaaactattttccatcgtcatagctttctcttcattagccggatgtcggggatttatttcttccaccgcttcacctctttcttcgggatttgacccactatcgtcacttgtctcaacatggaaaccatggttgcgcagcaaacacttatggcgccttcggttatcctcgctccccttttcggaggcagcttgacttacaacatgagaaattacctcat

SEQ ID NO: 18012 - DNA, 605 bp, Zea Mays
gtcatcagatcgctacgcactgggtcgtggctctcgcgtgcgagtttagcacccgtggcggaaggaatttctcaacggagcttgattcgtcgtcgtaactcacacctttccggagacagggagcttcacgccgatagagctacggtaagaaccctctgttgtcttcgctcccttccctgatacgtttaggaccgtattaatctgggattcatgcgccgggtcaccactaatttctcgccgaagatcatctccgccgcgattcacgacttgtcgtggcctagacttctctgtgctatcaatcccggtgtgacgttctctctattattagtggtgtcatccgcatcgcgtagaacctattggctatagcgatagagccccggggcgtcggccatgctgaccgctggtgggcacggccgtgcgggctgtcgggcgccgccgcgatgcgtggccagaagaagaggagatgccagaaccgtcgataggctaatgagtggtgggatttaggttggcgtacctccttcggcttgggctcctctcggccgctgatcggggatcgtgtggctattagggcgtactggttcatctctaggttgggctaatctggt

SEQ ID NO: 18013 - DNA, 634 bp, Zea Mays
tgggcccagaaatacaataatatgaagcgcagagcgtcggataagactggtggaccaagatattcatccatggtgtgcaagaatcttctcttggtcgtcgtgtgcgctcctctagccagactcgtctccgccccatcttgtcaccatgtgggtgaaggctctagcgtagcttgcagggtaggctggctcgccgtcttgcgtaggggagcaggtggacaatgatgttgtgtctcctccgtctgtctcttcacctacctctacagcgggaatattagaaatcatgataggagttactcacgcgtgacatagtaggtcaatggtctttgcctcggtaacgcatggattactgacgcaccccaggccttgtggacaccccgccttcatttaatatggggcacacgctacatgcccttggtgtggacaggtgcgcatccttcccatactaaatgtggacagccccgtgttagaggcacgcgctaagcgacgcctagcatcttcctcaatatgccttgagccacgtggtagcatcgcaccgccttgggtagagagcagtacctaggagcgcatactgacgtggtagctctagagttcccctggccgggggtctggaaggcacttgtggaggtttgggtcc

SEQ ID NO: 18014 - DNA, 624 bp, Zea Mays
gtgggtttgctcgttgttgacgtaccatatttcttctcacgaaatagaaggcagccccagtcttcgaccatgtcctcctccacacatggccgtcgggcccttccctgatttgcgaccatggctagcgtcgcccctcccgaattcgtgtgtgcttcgttcttgccccgtcccagatgtgcatcgcgtggccgtcgtcaccccatcctagctctgagcccatggccagcgtcgcctccatcgagctcaacattattcaccggatgtggttgcgtcgcgtgatggaggtcgacatcgtcgtgcttggagacgtcgcgggcaatgccacctccatctccgcgctcgatctccgactcccaagtatccgcttgatctcctctctttcctcgttctagccccctcttttataactttttgatgtcgtcagcgttgcagctgaaccaagttgctccccatcggcagtgttgctgctttgacctccagaagcttccgaggcagtgtaggagagaacaggaggagatggtgtgcgctcgtgaatagttgaatgtggcaaacgaggaatacatgctacattttagcagaagttttagcatttcttgttggagctatactggacatgtaaaacgt

SEQ ID NO: 18015 - DNA, 679 bp, Zea Mays
cccgaaccagggggagcctggctggacggcacttggccgaagacttcaatgcttctactgattggacttgtgctcgatggagtctggacttccttcaatttgaccaatctcccactttgtcgttgtgtattcattgcgtatatgttgcagggcatgtcactctagaaaatctcgaaaaatccggatgctacacctaatgggtgtacccaatgggtgtctatctagtgaaaggtgtcaatcgtcttgtcccgaaatagtaaactaatgcgacggggaggtgtaacgctatgtctgagcgcttgactttgatttcttccggtgccatgttatgtgaaacagcgccagccgcctgacccatttcttggagacatgagtcgctattgaaatcttgtgactgtttggtgaacgggtgggaaacgaacggttgtctcctggctcctttaaatagcccactcgcccccggttgccttcgccatttgcacttgttaactcgtcttcttccccaccctctacccttcacgcccgagaacaatggccggaggcaaacgaggcaaggggaagcatcactcgtcagagggaaagcgcaagcgccctccgagccctccatctgaggatttcggagtctcggagttctttgaggaggaattctcctcggagtacgacggctcgctggccccgg

SEQ ID NO: 18016 - DNA, 460 bp, Zea Mays
gacgacgatgctgtacccccttgaattagtctgaactaggagaaaggtggtttttcaggcctgacatggttaaagaggtggaagaaaaggttcaacgaatcatacataacttgaaagaggcataaactcgaaaaaataattatgcagacaaatgacgccgacccgtgtactttcaagtcaaagattatgtgtacctgaaagtatcgccaatgacgggtgtgacccgtttcggtgtaaacggaaagcttgcaccccgatacattggtctgtttcctattcttgaacaatgtggaccagtggcataccgcctccaactacctgaaacattgtctgcagtgcacaatgtgttccatgtatcccaattgaagaagtgccttcgggttcttgatcgaaccattgaggtgaaggatgttaccttggaaccagacttaacatattcagaacatcccatttgagttct

SEQ ID NO: 18017 - DNA, 632 bp, Zea Mays
catccttcttcttttgggagttgctgcaagacctttttgtgccttcggcactgttacttctgccgaagggcttaaaacttctaacatttttgttccttcgatttttggctcttcagccttatcagtcttcgactcagctagcttggctgagggtaccttcggcattacagccggatcttcaaccttctacgcaggagaaatgggctcctttggtttagcagctgaagaagtctccccgccaaactcaggcaccacggccggttcaatatagcgtggccggtggataaggactttcagctttttgctcttcggtgcaggctcatcgggggcggccgaagcagcagccttcctcttctttccccgtcctcgcagcgggtagcagtagtcggggtaaacaaaaccaatggcatcaaaaactctatttaatctcttttttccccggcccccgaaggatgtggataaggcattatcttccgctttggaatacggcccaagcagttcatcacttgtagctttgatacattttagccagtcatcattcggttcatcaaatttatctccgtatctgaaggtgtatttcagtcgaaccagctcaccttcaccagacttggtgacagtctccttcggcattt

SEQ ID NO: 18018 - DNA, 499 bp, Zea Mays
ggataacgactcctggttaaaagatctcgccgtggatgaagtcggagcactgtattgccctgtcgccgtacccacttgcccagcaacgtggccgcacagtcatcaccgaggctgccgtcattttccccggttgcgccatgccttaggtagtttaccacgtcgctttgcaccatggaggttaaccagtgacagccatccgcctaggtccggtgaatgccacggtagaacgccgcagtgacttagtccctctctccgaccgccaacacactttcttcaaattggacgccaccgccgatggagtctataaattgctgccccactgagctccgcttagttattacgcatccaaagcaccggctcttgcctccgatcgtccaccagagcctcccaatttcccatttcccccaaatcggtcagaacgccgccgtgagacatctcgtcgtggccagacgtctacgggttagttcatgcccttctgtgtgatgttctagcctccctc

SEQ ID NO: 18019 - DNA, 425 bp, Zea Mays
gaaggcttgctccgcctcttcggtccaagagaagggcccggacttccgcagcagcttgaagaagggcagcgctatctcagacagcctcgaaatgaagcggctaagggcggctaatggttccgtaagcttctggacgtccttgactcggaccgggggcctcattgcctcaatcgctctgatcttctccgagttcgcttcaatgccccggtacgaaaccaggaatcccagcaacttcccagcggaaatgacaaaaacgcatttgtgcgggttcagctttgtgcgggttgcccacagcttgtcgaagaccagggttaagtcttccactagggttgaccctctcagtcttgaccatgatgtcatcgacatagacttctactttgtccctaatcaggtccccgaaagtcttactcatcgcccgcacaaat

SEQ ID NO: 18020 - DNA, 279 bp, Zea Mays
gaaaaagaatgtggcaccgtcggatgttagatggaatctatttccattatagaaaaccgttggatcttagatggaatctatttccgttataaaaaaccgtcggatggaatctaaaatgggccagcaggcagcgagtatagcgtccatggcgtgggcaacaccagctaacggataaaccaaaaatgagccgtcgctctccttgcttgcattccccagcctatatataaaggctagccgcgcgcagcacctggacacgtcgctctcctgcttgcattcccc

SEQ ID NO: 18021 - DNA, 556 bp, Zea Mays
ggaaatttgacatcataattcatcatgcacccatatttcatcttccccatctccgatttgttccgcttccatacaatgatcaatgccctaaactagtctagatgggaaagtgcctagacaaggcacttaggtgccaagtgagctggtgagtaggaccacctttcaaaatagaggctgtaatgatggtatactggtctgtagcaaagtagtattatgtctgttgggtttgattatttacagtttgcaatttatcagcacacatgatgctagtaatagtagtattctggtaatatggaattatttcatctgtttcagtgaccgctgcactgtaccccattaatttatgcatgttcccttatgaaggacttatgttttaattcatgccgtcatggagttccaagtgctgcttaacatcaactagaattatccacatatgatagcttgttatgtttacatgttctttgtcgttgaacgcattatgtttacacgttatgtttaatggcatagatactgattccaatttgaaggactcaaggattattatattttcccatta

SEQ ID NO: 18022 - DNA, 372 bp, Zea Mays
cttctccctctgccagtaccgcagggcgtgtggttggacatcactgtcgacttcatcgaggcgctccctcgcgtgcggggcaagtcggtcatcctcaccgtggtcgaccggttcaacaagtattcccacttcatcccactcgctcacccgtactctaccgagtccgtcgcccaagctttcttagccgacattgtccgtcttcatggagtgccgcaatccattgtgttagaccgcgacccgatcttcacgtcgacattctggcgcgagcttatgcgcttggtgggcaccaagttacacatgacgactgccttccacccgcagtctaatgggtagtacgaggcggctaacagaggcatcatcatgtaccttcgc

SEQ ID NO: 18023 - DNA, 272 bp, Zea Mays
gcgcgattgccagttttgcctgcgagctggagggctttttccgttgggggaaacttgcggggagggttttagggaaggcgcgcgcttgcaggaggtgttcgatttctggtgttcacttgcatttattgcttgatttgttgggcttcgtatctcctagttaggtgcttcgattatacaaagtggtggggtttgctctaattttgggaccctatagcggcaacagcctgttagcaaatggaattgataattgatgggatatattattggatcac

SEQ ID NO: 18024 - DNA, 532 bp, Zea Mays
gtgcaatgagctgactaaccttgatgacatcaatgttatcattgcattcatctcgggaaccatgagtgaaactctagtgcacaagctagggcgcaaatgcccgcaaaccacgaaggaactcttggacatcacgacaacccacgcatcgggggaggatgcagtaggggcaattttcaagcaccgtaagcagaaaggccaagcacaacaaagagctcgatggaggccctgaagggtggcccgataagagaaattaggacaagcggaggcacaacgaagtgctcgtagctgtggcaggttagaaaggaaggaaaccgccgagcgaggaggccaccagccattttaagaaactgctcgagacccgtgtccgaaccaccgctatctggttcgacacgcctataaggactatggttttctgaggaaattcttaagcaagggaacacttctcgggtgaggggtcaaaccccaacagagtggcgagcatgggaaagtgggggctgccttccctaatgagatcggttgtctgttgatctta

SEQ ID NO: 18025 - DNA, 460 bp, Zea Mays
agacagatatgcacaacaagtgcgcgatacgaagtctctactaaaagacatccgagcaaaagccgcctaagggtgcaaccggatatgcacaacaagtgctcaacacaaagtctttactataagacaaatccgagcaaaagccacctaagggtgcagccggacatgcacaacaagtgcgcgatacaaagtctctactacaagacatccgagcaaaagtcgcctaagggtgcagccagaaatgcacgaatacatgacatcaccctaatggcacaaatgtcaagtactatcaccttcaaggtgcgaagtctatgttgtctgacatgatcaaactaaagcaacctatgatgcaaccaagtacgcgtcataaacgtccaacatcaccacggaaagtgaggtccccatcccgtttcacaacatgtcttcatagtgtacatacacacagcgaagggccgccgaccat

SEQ ID NO: 18026 - DNA, 730 bp, Zea Mays
atgaatggcccttcccatagtggcgagaatttgtgtcgtccctcccccgttagaattaggcggagcacgaggtctcccactgcgaaggatcgatgtcgtatggccttgtcatgatagcgccttagagtttgctgataccgagctgactgaatcaccgtattcaatcgttcttcttctagtatatcaacattctccagtctagtagcttcagcttctgctatgttttcaaagattaacctcggtgccccaaacttgagatcagcttgtagcactgactctgaaccatagaccatgaagaaaggagtgtttccatgcagagctcggctaggttgagttctcaggctctaaacaacatacggcagctctctgatccactttcctgcgaacttttcattcttgtcgaagactttctttctgagcgcttccaatatcatcccgttggctctttctacttgcccgttggctcttgggtgcgccaccgaggcatatttgatctgaatgcttttttgttcgcagaaatcgaagaactctgagcttgtgaaattggatcccaggtcggttatgatactatttggtatcccgaacctgaatattatgtcttgtatgaattccactgctttagctgaagttagagaagcaatgagtttgaactctatccatttagtgaatttgtcgatagcaaccagtacatgagtgtatcctccttgagctttcttgaagggtccgatca

SEQ ID NO: 18027 - DNA, 974 bp, Zea Mays
ttgtgattagcacaagtctgtgcaggtgggatcaccgtgagccatccgatcgagatccaaaggacagaacccacccagtgacgtaacgaaccgtacgagccttgattcgtccgatgcaagattgacagcctagatccaaataggcgcgaatgaacatcatccgcccgatcacagatgaagggatcggatcgaagcaccaaatggataccaatggatctaatctcgagcgcccgttttctgatgaacggccattggcaatctcctacctcagtccgagctgagcgactgccccaaccgcgacagcgccatggccgcaaccccggacctcgacgccccggcaacccagaacacccaacactcggatgatcgatgctacgcgcggcagagggtagggtgattctcgcgtgtgtttccgtactggagatgaaggggccgataatgttgtctccatgaacgggatggtatacggcggagcgtccatgccatggacatacacggttccgagcgctggtgaaggacgacggagaaacagggacggtcgtggatcgacgaccggagcgtggcgcgatagactggggcgccatgatggtcgacgagcacagggagatggcggcagcgaaggtgggtaccaacagcggtgacccgagccatcattctctctccttctcattctcctccggcccatagttcgctctgcgcatacacacgacacgggggcaacttgcttcggcatggcgtatctacggaggacttatggggcgaggggtcctgatccatagccgcacgactcgtgagcatgccgctacgagaaactcggcccagacgcaacaacctgccacggggaagatcagtctgacccgatggacctaggcatcagcgaatgaacccagtggtgtgcccaaagacaacgacgcacgggggactgacggcatgacccgcctgtcagcgcccatggtttccagctgggccgcgtg

SEQ ID NO: 18028 - DNA, 799 bp, Zea Mays
cttgtttcggcagctcattgcaaggcgtttctttgggctagttgtccaacggcccaagaccatccctgaaataaaagaccatgatttcgtattcaagaaactgctgccctctgaagagcatttcaaaagagccttcaggattatcgaggcagagctgggcttctgctacgactacttcttcacaaagtactactacaccttcgcagcgacgaatcagctaccggtgccgttcctccagtctttggctttagcaaagatcactctaatcttaaccgttggtgtgtttgccgtcaggaattcactggtacttgagacgccaaatccgatcatacaagtacgcatctcaagagctgactacatcatcactctgctgcttttggttatagccctcacagtggagctggtgcatgcggcattttatctggcatcggactgggcccaggtatcactagccaccatgtatgtcaagagatactggtacgaaatcagcccatccatctttgcaacagtcatcgctttccttagaagggtcacgttttctggacagctgatgagaaacaggatgaagcagcactcattgatgagaaacgggataaaacagcaagatccagtggaggtttctgatgcagtgaagagagctgttgctagatcgctcatatcaacgtatggcggcaacgacccaaccaaggacgacgacgccgtagaaacatcgcaatggcaggaccagatgccgttccatacgtattcttgtgaacttaagggcctctctcagctggaagtcatgctaatttggcacatc

SEQ ID NO: 18029 - DNA, 534 bp, Zea Mays
ggaggagggtatgacagatgagccaatgcaattaaaattcatacctgcgccgttggctgcccggatttgatcagttccagtgtagccttcatgagtggtgagtttctcgagctcacctatgatatgattagtggcaccaaagtccagtaatcattgtggatcattaccttgagagtatgttgcagacgccgcgaggcgtgaatcaggaacatagtcctcatcaaatcggtaccagcatatgtttgctatgtctccggttttgaagcaaacttggcactgtggactgtcatcggaggaacgggaggcaccattatgcgacgattgttgctatgtgagaatccactgcgcgagttaccagatgactgcccaagtgagggtgcacgaccacgaccacaccccttgttgccatttcggttccaaggagtaccccgaccccgagaggccgaatttacagatgactgataggtgcctccagattgccagttcgtgcgaagttcatagctcaacatttgtgagagtaattcagaaggcgta

SEQ ID NO: 18030 - DNA, 388 bp, Zea Mays
aaaggagtctgatggtacagtaatctgaacctgatctctagtttagcccccctcgccaccggcagcctttgcacccggattcgcgccggctgtcgcgattcgtgcctcgggcgagtcgatttcgctcacccgtgagaagatctcgtcgcggatgggttcgagttactgtggcctcgctgtcctcgaccacttgcaccggcgacgtggctttacggctgtcaccggagttggtgtccttcaccgcgattgtgccacgccctaggcctttaaccacgtcgctactagccgcaccagctcgccgataaccgccatagcccctcagccggtgagtgccacggtaaaatgcgccggtgactcatcctttctttccggccgccgcgcgtctccc

SEQ ID NO: 18031 - DNA, 499 bp, Zea Mays
cagcgatgggcaaccgacaacattacacagtcacagcttacatacatacatacaacgaggggccaacaaccctgccgcacaaataaataccacattctttcccctccctctttattgcgagccgggggagggcagcgttttcactcattaccgcaagacaagagcgagggcacaaaacacactacatcggctcggccttcgggataatgcccacatccctatagttgaacaagatcatttttaattcctcatcctcaaaaagattccgcagatccccctcaccaatactcgtcccaatcggcgaggacagcagatctcgttgaccacaccgatctactcgaaggcgggttcgctctatccccatccgacggcacctcccactttgcgacatctcaccaacgctatacttcgacaccacttttcgtcgccggcgctcgatcctcgcgccagccaggggatcagacacttcgcccacctccagccacagcgaggactccac

SEQ ID NO: 18032 - DNA, 328 bp, Zea Mays
ctgataccttgtagtgggaaacctggccaattagccactttcacttgccgatctagagcctagacgcgggtgctagtgcttgttggctatgctcgtgccatataggagatagagggaaacaccatacatacaaagacgagccaatgactaacaggtagcgtgtgccaaatatcgaacgactagaattaggacgcatgttgggacgagaccggtgtcatgatgtgcgtgtgtccgatggagacttttagtcttttgtcatctttaaggatgacactaaataaccaatcatagatagctgagtcattaacataacattttatgtggcaac

SEQ ID NO: 18033 - DNA, 732 bp, Zea Mays
gtttctcagcctgataacctctgatcgaaggttattgagagctatagtgcaactctcatcttcagcattcttttgcgcccttagggtgttgctaagtattaagccctgcaagacagaataaaggattaacataagaataaaaagactccgttacagagtccataagcttcaaaattcacaacttttgtaccttcagactgttgtacgcaagactatttgcgagatcgtccttcgtcatggcacaaaggccagcttcgagcttcggaaaacccatacttttggccatctcccggcagacggataattctttgttgtccgggaggcagtacaagaaatcatcttcattcatactgttaaacactaaggcccccttcggatacttcagttctcgggcatagtgcttagcttcaaaaatttcttcttcggataatctctttcccgaagcatgtcgaatgatataatcaaaatcttcggagaatgcttcatgggcaagggattcggcctctttggccacactcttctcaaaagctatattaatatctggagttattcctttagccttctgctcggtggtggcaagctttgtttcagtaggcactgtgggccctgcctcggtttcagcctgggttattgtagtttcaacttctatttgcttagtatcagctttgggttgcattttgtcagcttcggtaaccttccctgtggaagcgggacttatggagttggttgttt

SEQ ID NO: 18034 - DNA, 756 bp, Zea Mays
cttttacctgtgaaattgcctcaaaaatttaggcagaaaatcaccctctccagtaaaagttcactatgaaccctagatgaatcacgcgggatactccagttccctacaccagctatagagagctgttctaattcaagcctagataagctacagaccaaaagctcaccactctgctactctactcctaatgcaaccctagacacttcaaaaaaaacgacagaagactactgaatcgaactaaacaacggaggtgagccccgcgctcaaatcactgccacacgcctgatccgacccccagatgtaccattcccacgcgcaatacaccgaatcgagacgtactagcctcgttaaggaacatggataaaagggggctacctcggaggggaactgtgcgcagaggcgctcgcagaggaatatggcgttgcggtacatgaagaggcggaggctactgtggacgcggtctaccattagggtttccatcgccgcccagcggcggcggcgagcgcgggtgggcgatatcaaggggattggggaagtagtgcggtggccgaaacgcaggcggcaggcgcagcaggggagtgtgagtgtccggactctggtcgtttgaatcagccgtttgaatccagcaggctcttgatttttgggtgcgatgcgatctgatagggcattccaagtttccaacgagtgccgtgcctgtgcgaaacagccgagttacatggccgacaagtgggccatagggttcgctccgaatatgtg

SEQ ID NO: 18035 - DNA, 433 bp, Zea Mays
ttcttttcatgacttttcttttagtgtaggcacccacatatttaacaaccagtttccctgaatcccaagtcaacatataatcacaaaggtaagaatgtgaaatgggagctctaaacttttctccacttgtggagaccacatccttcatcttgtcttttgtgtaactcaagtttacctttgcttgagttgacttgtcatttgaggaatgaatcctccccaaggcatcatatagggcggttccctctatgaacttgggggatctccaccccttatgctctatgctagggtttaccttatgtgagttgtacccaagcccctttctcccattgttgggctttaaggacttgtacttgggttcaactttctttaacccataattgctagagcatctcttcaaaatttctttaaccttaacctgtgggcttttcttcct

SEQ ID NO: 18036 - DNA, 808 bp, Zea Mays
ctacccccaacaccatatgctccagcaccatatgttccacttccagcaccatatgctatagtaccatatgtcccacccctagcaccatatgctccagcaacacctccaccatccctatatctaccatcacctccatcattgttgctaacatcaccttcactagggtcaattgtgctttcttcagtctcaaactcttcttcctcatcatcaaatttgacccttttttcctttgctttctgacggaccatattttgtttttctttttccagggtgggtgttagcagctgttgtatcagcccatttgtgtgcatcctctgtgtcttcctgttgttggacaattgatgtaaacaactagttagaaacatgtgtgtcactatgagatgaatcctcatccaacgttagaggtgcattagatctccctttctccaaccaatcacgtctagtttcattatgcctatgtaatgatagatccatgaaggctaaggcaggatcaaaatcactaggttcaggcatatgtgttgcacgttgaatgcatatacataggttgtagttcatgaacaccaactcatgtagcttctcacaccctagtctgttgcggagctttgtatgaatgaaagcaaatgtactacaattgtgctcacacccacttaatgaaacacattgtgcaagaagccgcttcgtaacacgttgtagagttggtgtctctaacccaaacatagcccaccagctggatgtagatgtattgctgtcagttgacattctccttgctaggtcactagagaattctcctcttttcctcttgaagaac

SEQ ID NO: 18037 - DNA, 571 bp, Zea Mays
ggcggacctggcgcggggtcactattccgacataggacatccatgaggctgttgtttacgtgtcgtttctcatccgcggacttgctcttcctgtttctccctttttctgcggtctccttgacttttatgatttaaatcttacacatttaaatcccaattccattcttcaagttgccatttttgtacacctgtgcgaggcttttcttggaattctcccccactttggactctagaggtatctttaccactgtcggcccggtatggctggaggacagcatcagctcgtcggtggtgccagtttggagcttcgccgagggaggaaagtggaataccttgacatcccccttaaggacagcatcaagggatggcgcctcgagtggttcaccatggagaatcacaacaaatccctccccctcgatcaggaaggcagctcgacgttcgcacacccagctgggtggagtcccccacttattcagaggtagccgaagctaagttgctgcttgctgaaatttgcttgctgaaggacaaaggcctgactaccgaagccgtagttgctgactttgtcttcaag

SEQ ID NO: 18038 - DNA, 1006 bp, Zea Mays
gcagccactcggcccagccccaatttgtctcccagtcggcccatttctccacaccctgctcggcccatctacctcttgccccctcccaccaccacgcagcccaagtaactcacccgcgcgccttggcgtcactgacgagtgggccccctcggtcgacacacaccgtgcgcgcccgtgctggctttctcgtcactgacagaggaacccacgtagccagcgctctaacgtctacgacctcgctgacgggccgggcccgttccccagcggatctcactgtgtcactgccatgtgggtccatattgtcgggtaatcttcttctacctggggcgctctccgtaacaagcaccggagatcccgaaatcgcctgcgtcgatctcgctcgcccaaccgaaccctcacccgccgccgtgaaccgcagacttggcccatcgcgatcttggagctcttggctatataagtgcagggcgccgcaaacaccagctcgagcagggaggcaaacgaagagggagaaacccgccgtcagattagtgcacaccaaatcaacaacttgaccgtcgtggggcataggggcaatcccgggtgactaccgaagctaaccatggccttccagggcagagcaaaccaccaggccatcgtgaattcgtcgccggagtcatctcgccgttgtgaatccgccctgggccgtggttggggaattccgtgctgtaattgccggtccgcttctctctcacagattcacattctcgtatggtacgcgtagcatcattctggttggaggattgggccccggagtacgggatccgcgcgctccggccatggcgctgccaccagcttggggcgccgctgccgcatctcggcctatgtttggggtgacataggagaagccacatgacccgttggatcttattcaacggctaggattagaatgcttttacccgttcggtttatttgaatctgggccatcaatagtcgatcgggcggtgctagtgtagctcgcgcttcggac

SEQ ID NO: 18039 - DNA, 437 bp, Zea Mays
ctgcactgcaccgtacgcatgctactccgctgagtgcagagcacacggtgcagcaccgcagcgcagttcatgtacatgcatggtttgcccggcaggcaggcacacacatggctccgccatggtgctacttactcttactcagctcgcactttacccgttcacgacaaaggccaacgaccgtgccaacggagaagggaagcgtatgaacgtttgcaagataggagtacgaccgtgtccctgtgctaggctgctagctgtgtgcatcacgaaaattcccattttccccccttccaagggcctgcaaatatagaaaaagagaagacactcatcgagctgtgtcattttatatgtgggttaactggttctcagtcgtcaattcgtcatccgtctcgtaaagtgactggctaggggctagggcttcacgaggacgacggaaa

SEQ ID NO: 18040 - DNA, 430 bp, Zea Mays
agcagctttcctcttcttcccttgcttccacgaaggataacagtagtctgggtacacaaacccgatgacatcaaacaccctattcaatctctttttgccccaagcaccgaaagcagttgtcatagcttcatcttcggccttcgagtatgctccaagtagctcgtcgctggttgcctctatagcatccagccagtcatcatttggttcatcaaattggctcctgtatctaaaggtatactttagataaaccaaaccattttggctggagccaacgacagcctccttcggcatttcccatccatgtgcaagcggccacactctataagcaatatgttcttggaccaagtctcttgtgccgatgtaagtacacactgtattaaaagctacttggcacgcttgcacgtcatttccaagtacaataattggcctc

SEQ ID NO: 18041 - DNA, 757 bp, Zea Mays
ctgaacgcatcgtacatcggctgtaatacctggattctagtgaataaaacagagagaatattggttgtaccttatagggttcttcatttagcatgcataaatatatagaaggtaacatggttaaattcattaataagttaaaatttatagtttcatcatgctggacttttgattgtgcacctagttttattttggaattcaaaactgacttgaattcatatttgaaaactggaatttgaaaacagaaaatgagaatcgaaaaaaagaaataataaaacttgcgctgggctgaaaacacccagccggcccacctcctctttctctccccctcacctgccggcctagctaagcatccatgccgatgagcagggcccactcgtcagcctcgctaccgcgtcacccacgcgcacgtctctttattatttccagccagtcttgtgtcaccctggcgtcagcaatgacgtcacctatacgcttacccactcgctgacggctgggtccctcggactacactccgtatcaagcgcgtatgtccccaggaaacggttacgaccgtaacggcctaccgtgatttccgatttccagctgcgtccaccgcctttgttcacctatttaaggcagccggcctccaaagctccgcctccccggtcgtctagagaagccaagcgggagattccccgtcgtgtggcacggctgatgaagggagagggtgagcgcagggagccgagaagggagttcaggttcttcaacgacgaag

SEQ ID NO: 18042 - DNA, 768 bp, Zea Mays
actaaaaatcttgactcaaaatatatgtgattctctgtcaaaaaagagaagaaataaaataattggaaaaatcttcatccgcttccccgtagatttttttcagctgccctctctatgccctgatatttctacgcgcagctccgcactcaggcctcctttggcagcccaggatcccgagaggatcccggcccattccctggccccgaataccgcgggccaaatcaccctcgggcatttttttctcgtttggtgaccacgcaccccggcccgatccacggaggagcacggtgttgccgcccccggcctcagagggtcgggaagggtttccccgtctccactcttgtgaagccgccgcctccctctcgaactcgtcgtcgtccactgcttcctcttccttgcgcacggcgtctcacgcacagctgcctcctcttcttcacgctcctcttcctcgcgcatggtgtctcacgcacgacagcctcctctacttcacgcatagcaccaaagccccctcctcttcgccgcgcgcggcggcctactcttcctcgcacagagcagcatacccccctcttcctcacgcaaggtggcctcctcagctcgcgcacggcgacctcctattcctcgcacaaagcagcagagccccgttctcttcctcgcgcgcagcagtttcattttctcgcgccagcctcctcttcctggttgcttctcagctcacgtactgcttacgacctcctcagctcacgtactgcttctcctgattgcgttttttca

SEQ ID NO: 18043 - DNA, 714 bp, Zea Mays
caaggttgctataacaaaatcaaagctggtttgtagaagaacaattttgctacagatggattagtgagttgttacatgaaaattagagaacggggctcctcaacttgctcggtcaggcgctctaaatgaagctcccatggtacagtgacctaaagaagatcactgattcagagaatctgtcgccgccggtgaacttgtgacatgattcatgccgaccgccgtgatccgtgccagtgtgaagtggataaccgtggcggtgaaaagatcttgggtgaggagaacttaggcctgagctggatcaccgccgtacccacttgccgcgcggtcagtggaatattgccgccggtgctcgccgtggtcgtagtgaaaggcacgtagttgcctgcttccttacggtcgcggtcgtggcaagcagctagttgccacccctgaaccgtttcctcctcacgcgccacggtaagccggtcaccgtagaaatatccaggccgcggtgaacttgatccccatccaaaattcgtgatcatctcaaccgggatctataaattgaagacaccccctgctccgcctccttgttacgcgtccaacccacccccagctagcccctctcgtgcatcgtagcgccgaatttagttcttccctcaaatcggtcgtctgcgccaccgtgagacgtcgcgccgtggccagccacccacaggtctgtcctcatacttcttg

SEQ ID NO: 18044 - DNA, 445 bp, Zea Mays
gtcttgaaggttttcgtgaaggctgcaagccctacttaagtatggattcgacagctctaaatggtcgttggaatggtcacctaccctcagctacaagtgttgatggacataattggatgtttcctgtggcttttggtttcttcgagtcagagataaaagatagttggatttggttcatgcaacaacttcgtaaggccataggagaccctccagttttagccatttgctcagatgcatgcaaaggactgacatcagcagtaaacgaagtatttccaaacgctgaaaaaagagaatgcttccgccacctcatgcaaaactacattaagcacttcacaggttcagagcacatgtatctcgcagctaaagcatataggaacaccattttcgagcaccacttcagtaatgccagggatatactaggtgtgaagcaatggattgatgagtg

SEQ ID NO: 18045 - DNA, 465 bp, Zea Mays
ctttgatacagagagttgattcagtcattacacaaaatctggagcaaatcgatgccaaacatgctctgacaggtcgactgaatgagcttgcgatggtacagtgaccggattggatcgccagctcagaaaccttgccgccaatgatcttgcgctcagatccgcgtcggcgtcgcgattcacgcccgaccgaactcagataagcgctcctcgataagaaatatcgcgcgggagataaactccggccactattctactccggccaccgtacacgagcatgtcacggccgatgtggatatgttcacaggagttagccatgtgccgctcggatgacacgtgcctagacgcagtacttcatcgtagtgactcgctctagcacgtctggtcatcgccgttgaggttgccacggtaaatgccactgatcgcgagggccagtaacccctttcatctccgaccgccaccacgcca

SEQ ID NO: 18046 - DNA, 920 bp, Zea Mays
ataaccttcaacattcgcaaagaggtttctcagagctcgagcgaagacatcaattcctcgggagacgcgcaggtctctagcaattcctcaacaaaatgaccaattgccctcagcaccgactctacagccgtcgtacctaattttctctttctgaaagccgcacctggagccctatcccttgagggaccttcatcagccgagggcctcacttgcttccctcaggcgatcagcggtgtcggcagagtctcccttcgggtaagaaccataaggcaaattatttagctcaaacacacggttcaacctggcgctggaaccacggatatcccaactcctcaatgtttctgtcctcggcgcgtatttaccgacaatcttgacggcttcagcctcgacttcgtgcacaaaagcagtcgcatctcggccgcgcaggtccacgacaaaggccggacttcgcaccaattggccacccaatgtcagcattcgacggggggtaacgtcgcccagtgcccaaccatgcgccaggggccacacatcgcaggcaataaactcttcgtctaaatcacatccactactcaagcggactgcatatcgaagggcccctcatcttgatcttcttctgccacctcaaaatgtggaaatgtcacatagcaatgcgagcacaggatggcagggggcaaactcggcaacccttcgacatttctgggagccacataaaaccaaaattcccaccaattgccccacttatttctggcacatgggacaatctcgataactttagccgaggtcttcccagtcctcgttgtgaaagtgcatgatccaaactgagcaatcttataacctattttccttttttgccagcgcagacagtaattcttcgcgaagaccactacagatggatgcccctcgtatgaggagacagccca

SEQ ID NO: 18047 - DNA, 885 bp, Zea Mays
gggatggcaagatggttaagtctgccaagaatactaccccacttaaaagaattatgacttgggagcatttgagctggcatataaggtctgaccctggggttcgggtgaccaagggaatttctaggggggtagagggaatgccatgcttttccacaaaactagtggctataaaagaatgggatgctcctgaatcaaaagtacagtaccaggagtaaattcaacaaggaactcaccgagcattactcccggagcttgctgagcctcctgggcatcaacgtggtttactcgtgcccttccttgatactgggtcttgttttgctggctgatggaggagggcgccttgggggcgagtgctgaggtattcttggggccattcaccgagttggagtaagcaggtcctgatgccttcaactaggggcagttgtttttgaagtgactggggtctccgcagtgccaacaggcatttgctggtggttggttgcttgcaaccgagggggcctgaaaggagctctgactctgctggctgaaacatgacgaagtgggtccagctggtctattgaagcttggtcccttgggtggaaacccaaaggatcgagttctctagtgccattcctgttgctgagctcggaggacttggaatttcctcttgaggtgacctttttcttcttcccttgccctttccacttgtatggctttgtttgagaggtgcgagaagctgaggaaatcttggctggctaggatggtcttgagttctggtctgagccctttcaaaaagtgggccatcttcttggcttctgtgctgacgtcatcaggcgtgtagcgggccaattctgtgaatttgtgcacgtactcactgacagatcttccaccttgagttagttcccg

SEQ ID NO: 18048 - DNA, 734 bp, Zea Mays
ctttctctcagtcatataacttcaatatgtgttattacatacaatgtttggaaatatgtcaaatataaatgcgagaaaagtaaatgttgtattgaccttatgctctactaaaaagtatcatccgtcttgtatttcttgacatgagtacacgatgttggaggagtgacacatgtataatggtcatgctctcctagggcacatgggggcatgcgacataatgccccatggcattgcacaccctagccggggcatgtgttgaatactagcctatagggaccatgctgcataggatttttgaggcaaatctgcctgatggaggccacaatggtgagggcagcatgaattcatatgcctcctatggcatgggtcatgattgaagttactggagcgggtgttagagatagttgctcatgctgacattgccatactcatgttgcacaacgaaacatgacatactcaaaaggaaatgcacagaccccctatttagtgcgccaaatgttgttgcataacagcactagggtacacagagtaccaagagagagttagaagggagcatgacgttggttgttgatcatgttaaacctgagcacgagtgagaaccctcacactggcagttagagaggtttaggatacattgtacataataccctatattctcttgctactcatcaattgatgattacaaaggaggaaaatattataagctcaagcactagtgagcatcaagatcctac

SEQ ID NO: 18049 - DNA, 655 bp, Zea Mays
ggcaatgtatgggtgcttatgacacgtacttggttgtgtccgtgggtggtttttgttcgaccatgtgagatagcagtgatcgtaatagactttgcgccattagggtagtgtttacgtgttcggctgcacccttggggggcctttgctcggatgtcttgccgtaaatacttcgtatggcgcacttgtagtgtatatccggctgcacccttaggcggcttttgcgtggatttatcttttagtaaagacttcgtatcgtgcacttgttgtgcttgtccggctgcacgcttaggcggcttttgcacggatgtcttttagaaaagacttcgtatcgtgcacttgttgtgtatatccggctgcaccgttaggcggcttttgcgcagatttgtcttttagtaaagacttcgtatcgtgcacttgttgtgcttgtccggctgcacccttaggcagcttttgcacggatgtcttttagtaaagacttcgtatcgtgcactttttgtgcttgtccagctgcacccttaggcggcttttgcacggatttgtcgcacgcgagggtagtctatgctacctgtcgtggtgacttcgtatatgtcgaatgtcgaagaccgtcgtagtggtctttttcgacacttatggtaatgatgtatggagttttttc

SEQ ID NO: 18050 - DNA, 437 bp, Zea Mays
cttgtgcttgccggtgacagagaaaggggaaaatggcgccgcgacgactctgggtggaattgggaggtgagattggggctacacggccataaggaactatagtttcaccgtgcacactcaatttgggaagaggtggtagaggcagtgcgaattttgggcttcaatcaactcactggtggagatgtgaatacctcgccgtggttcatagcgctatttatagccacggcggtccggctaatgattagcgaccgtggaaggctttgcatacgcatggtaaccacgtatagaagaggtacagtaagggaggagcaaggcatgggtgacaccgcggcggaaagcactgagtcacggcaatcgctggtgaatatcttcggccagcacgactgagctcgcgggatgatgccacgtccaaagttcccctcccccggatcgatccc

SEQ ID NO: 18051 - DNA, 431 bp, Zea Mays
ctcgggtgaaggtgatcgggtgcttagaccatcggtacggggcgggaggaccggtggccgccaccagtatctgacgatcgttgagctttgttgtctcttgctttcttgtgacccgtgtccaccgaagatgacgttgacttctctatcgacgcgtgggaaggctcctcctcttccctcctcctgctgctggggttgttgcggttctcccgatcctcctcgcggtgggggaggagggagaggttggaaaggtcggccgtgcccgacggagtgcttgaaatccctacagttctagagggtgtggcgcatgtccttgtggtacgagcactgggcgtcgaggatgtcgtccagcgtgcgttcgcctccgcgaggtcctcctcgggcgcgagaggcgggcggtccagcggcgtggacctcttcacgaggcctcttct

SEQ ID NO: 18052 - DNA, 631 bp, Zea Mays
gcatcaatgtatttgatatgatttggcgagaaatcatccatgctacctgcttccctctcaagggatgtcttcacgcccccttcatcatgaagatgattgaagtggtgactcagttttgctttgagaaaggaacaagacatctctcctacacccccttctggattgatccaaataatccagcagggcgtctgaggaaagccccctccagctctcgtggacatgctgctgccggtccctcgcgttcctctcctagtcgcggatctcccacaccatgtggtcgtggtcgtggtcgaggtcgtggtcgtgggatgggagctcgactggcccatggtattgcagccttcttttccatgtgcaggaacatatcttccgatgtgcatgagctggcgggacgtcaacgggagactgacgacaaccttcgtcgtcaagcctcttccatgggtatgccatttgctccgcgctcacctgatgtgcctcttcatcctcctccaccaaaatcaatgaatggcactagcaggcctatggggtgccctttatgtcagctgaagatgaagaagaagaggaagaatatttcgatgatcgtgagcagtttgccccgcctccccaccagggggatccgggtcaatcttct

SEQ ID NO: 18053 - DNA, 1196 bp, Zea Mays
aaaataatctcgtcctcgagatttaggaagatctagggaaaaggtgaggaaaatctatacgaagctcttcttctctttcccaagttgcttcatcttcaccgtggtgactccattgcactttgcacatctttatcactttattccttgtaactcgagtcaaagtatcaagaatcttgataggatactccgtgtaagtcaaatcaccctgaacactgagctcttccattggtaactgttcctcagggacacggatacacttcttaagttgagacacatggggtacattatgcacatcaggtagattatcaggtaactcgagttgataggccacctctccaacttgcctaaaaactcaaaatggtccaatatagcgaggggacaattgcccttgactttaaatctcctcattccacgaagtggtgacatcttgaggtacacatgatctccttcctcaaattccagtggtctccttctattatctgcgtagctcttttgcctggtgtgagctacccttaaattctcccgaattatacgaacttgttcttctgcctctagaataagttcaggtccaaagaactgtcttcctctagtctgatccaatgtagagaaatcctgcatttcctgccatataaagtctcgaacagtgacatcttcagactggcctggtaactattattatataagaactcagcataaggtagactcttgtcccaactactaccatgctaaagggcataaactctcaacatgtcctccaatacttgattagtcctttcagtctgcccatcagtctgacgatggtaggccgaactaaaattcaacttcaaaaccatattctcacgacaacttttccaaaatctggaggtaaactgtgatcctctatccaaaatgatcttcttcggtacaccgtatagagacacaatccgagccatatataattctgccaattgagatcacttataagtagtcttgaccggaacgaaatgagccactttggtctgtctatccataataacccatatagaatcgtattctttcgaggtgcgaggcatgaagtccataccaatctcttcccacttccactcgggtatcttcactgggtgtaatagtccggctggcctctggtgttcagctttaactctttggcacacatcgcacatagccacatgtgcagccacatctctcttcaatccata

SEQ ID NO: 18054 - DNA, 712 bp, Zea Mays
atttggatgaaccaaactgaagttatgaatttttcaagttctgtttgtatttaaatcagaaatatgaaaatggttttctagaaaatcactttgcatcgtagcccctgggcttctcttaaaacaatcccttcatttatacccctgcgccactattcctttgagtcgatgacattgcacaaaaccccctaaccctaaccgaaatctaacccgggctccctggctggcttaaacagtacccgcggcatagattacggcggcgaggcttaccggcgacagtagagctccggcggggttgtcagtgacgtagggtaggtcacggcggtcacgtcggtgtgcgggtcggcgtcagaggtggtcggagcgatcctggccacgagtgcaggcggcggaggtcgtcggcggctgctgctcctgccaaaccacggcggtatagttcaattaaacggcatgaggagctccacggggtgacgtagaggctatgcgtgcagtgaattggaaaatggtgcggagactcacccggtccacgtgctccggcggggtttcgaactccggcgagcacgattgcgctattccgtggcgggggtcctcggttcaagctcgggcaagcttcacggcctcctagtggagctatctaagggcttggatcgagcggaggagggcggaaaagggttcggccacggtggttgccctcgggcggctctggcgggtcgcg

SEQ ID NO: 18055 - DNA, 898 bp, Zea Mays
ccggtctgatggggaagttgtccaagtcgtagtggttggagcagtggtgggtatggtaaaaagctcttggtaatacgtcagctctgctacttctggtgacgtcggacgccctttcattggtaatatcgaggccgaagccatgctcgggtgaggtggaaatcttcttgaagtcgtggtcgagcctgctctagggctcgcaaccgtgtaggatacagtgggaggagtggccttctgtggaattcacggggagcaggtaaccgaggctaggctcgggcaggcagagattgttccgaggctaaggccggcttcaggcgagacagagtttctccctgagggttagcccatgctttgccgtacgcgcgtcccatctggagctggcagacggcgtgggggaatagctaccataattcctgggcacgtgtcatcatagttggtgaaagtggacaccgcggtcctatcacttatgttcgcctgcgacgtttcgtggggtaggtacatgcattgaatgctcatgtcccctatggcctttggccgagacgggctcgagctcggggttgtcttccttgcccgagacgggcgaggtgtaaatggtgttctgtggagaagggacctcggacgggacgaggatttccccgagtacgtacctggcccgaggggagcctcgagcgagtcgtggcttacactctcttcaccttggggaatgtgtctgacggtggtcttggagttaagcgcgttttaggggcataatctaggtacccttaattacgatacccaacagtagcacccgagtcctccaaggaagtgttttcacacttgtttgggggctcatatgtcttcatgtgggtatattgcttaaccctaagagatggtagacttatttccgatgggtgtgtgcgag

SEQ ID NO: 18056 - DNA, 865 bp, Zea Mays
gtgtcctgtcagatgctctgaatgacattccgatggtacagtaactgaatcagattacaggttcagcccctctcgccgccggtgaccctcgcgccgtgatccgcgccatcaccacgattcatgctctctggcaaggagattatcacggagggtaaaaattttggcaccagataggctcggacccggtcgacggtgagctcgccatacccacttgggctgcggtcgggcaaagtggtcctcgccggagttggccgcctatcgaccgtgcgccacgtgtcttagggcgttaccacgtcatagtataccactgaagcgtgtccggtcattgccgttgaccttgccatggtgaaagccacgaatcctttgcgccagtgctctcccctctctccgaccgctagcgcgccattccaaattcaagagccaccgccctcgggccctataaattaagcatgccatcagctccgctaggtagtcacgcatccagcgcacccactcgtgtctcggattgtccaccagagagctctaatttgggatttcccccaaatctgtcaagaacaccacattgtgtgagctcgccgtggccagctctccacaggtccgatcatgccctcctcgctctttttttagcattcctgtgtgctcttgatgctgctcgacccggccaattgagctagaacacgtaggatcaccaggaacacctcggtttgcccgttgatcgcgctgtcaccgtgggcagataaattaggagctaaaactttgcaattgatcgaggggtaatgatcgttaggagtagaattaggtgtcagccacaccggagcaccggtcgttgcgtatttcggctggtacaggctcaccggagatcggc

SEQ ID NO: 18057 - DNA, 1026 bp, Zea Mays
tcggtgccctccagtcactcggatctggtactgcttgctctattgctttgcattcctctcctggtcctaacgtgacgctgggctgctatgcgtcttggacgaagacaccccacggggcctgcgcccagcttgaccctagcttggataaagcataagctgccatgttgcgatctctatctatatggcaaaactccggtccctcgaatttatccttatcctaaccgcaacatagtagttgcccatggattccgtggagcagtaccaatctttattgacttggctgatcactagcggtgaatctccatataccatcaaccttttgattccgagtgacacggtgatattaagaccgtgtatgagggcttcatattccacactgttgttggaggcaggaagtaggagttgcggtgcatatttgagttgatctccccttggggcgatgaagaggacacctacccctactccctgtaatattagcgacccgtcgaagtacattttccacacttccattgactcaggattttcagggatctgctgctcggtccactctaatatgaaatccactagagcttgggccttgatcgctgtgcgaggccggaattctatgtcatgagctccgagtttgcacgcccacctggttgttcttcccactgcttctctgttgcggagtatgtctcctatcgagaagcctgtaactactacgactttgtggtcgtcaaagtagtggggcaacttttgtgcggtgagtacggtgtatagtagtttctggacttgagagtatctgatcttggagggcccgatgactttgctgatgaagtagacgaggtgttggacttgatgtgcgtgcccttcttctatccgctactactaatgcggtgcttaccacgtgagtcatgtatgaaatgtatagcaatagagctttagccggtcggtcagtggtggctcggttgtgtggttcgaggactggtggggtggtcaggaatttcttgagtgcttcaaatgcttcttgagcttcagggatccact

SEQ ID NO: 18058 - DNA, 583 bp, Zea Mays
ggacgagttccctatcctggtaggaggtagggctagaggggcttcttccttctgctcagtctgacatccttggcttttggtcttcttgcggatttttcttgcgggggcgagcttcttcagcttcttgtcgtaatccatcttcagagtgcggtaggcctcacgggtgttggtttcctcgccttctgctatctcgaggctctcttgaagggacgccttttcccttgtaaattccttgacttgttgctccaggctttccacttgggagtttaggtgagtacagtgggaggcaaggtcatcatattggttatcgagagtgtggaggtatccagccatgtagacgatggtggggtcatcctcggtagggtctctccctgacagggcctgaagtctttttctccaggcgggggtattcttgttgctgggtggaaagtagcgaagggggttacaaagattactctgctgtagttttggcatagttgtcggagggcttttcgggcaacattttggcaagtatctaggaagcggtatccggtgaaagtgacttggaaagaaggatggttcgggtagtttcgactttctccca

SEQ ID NO: 18059 - DNA, 583 bp, Zea Mays
gctcaatgctagggttcacctcataagcgttgtacccaagtccattttttccattgtttttccttaagggtttgtacttaggctcaaccttacttaacccatcattgctagagcgtcttttcaatacttgtttgacatcaacctttgaactattcttccttgcatggttagttaagcaacatgcagcatgatattttaaacaatgtttatatgtgctagtgttgcaagaactagcatgagagtctaccactaaggttgaggtggtggagatcttgcacttgtcaattagcacttgaagttattggttttgaaccttaaagcttgatatgcttgactcaagtgtctctttggcatttgcaagaccaactataaagactttaacacaagagagttcagtttctttatcctctatagttatattggctatagacacttctttaattaaaacattcaacatttcatccttactagttatcaacacctgaagctttaggtttctctccttttcaaggatgagcaagtcttttctagcatcaagagtttatttccttttctctagcttctctataagcttagtgatgac

SEQ ID NO: 18060 - DNA, 577 bp, Zea Mays
agcaacatgacgcaatatttgtgtcatacgaacttggctgcgtcatgtgattgctatgtcgcgctctctattaatcggatcactcctgttgagtcagaccgtcattgctgagtcgcgtatttttcgcataccctgtaggcattgtctgtcatccgtgatcatcgagccacaattgcgcctgttgtgcacgttgcgcggacttattgtgtacctcaattactgagccataattgtgcctgttgcgcttattacgaaggcttgttgtgttgtcgtagccctgatggccgcacacgcgttgacaccagacgctagagcttgtactcgcgtggattgtggtgggttgttcaagccccctaaagtcacattatacgcaaccttcgtaaacaattttgttttcactttatattttgtttgattgtgttgtgtggcatcatatatttatatatatcaccaagtggccataacaactatagtaaatccgggaaattaaatcgaaatacaatgaaacacagataagttaaatctctgctctctcctcgtgcataaagttttacccgaagtaacctgaagaaattca

SEQ ID NO: 18061 - DNA, 290 bp, Zea Mays
gtggaagaagagagatggagagggtctggagcaagagcgactgagcgagggcttcgctggaagcctagaacggtggaacctaggcttgtggcctgttggacgggagtacatgatattttaacggatatttgggtatttgggtatggatactgatttttcatacccgttttaaaaatatccacggatatcaagtgctacccgtatccgtatccatgggtacagactcgtacccaaaaccgtacccaacgggttttttatccgcgggtacgcggataaatcacatccattgc

SEQ ID NO: 18062 - DNA, 314 bp, Zea Mays
aggtcggacggcggcggtcgtcggcgttcttatcggttccaccgcggtgaacacggtacggcggccgggatactttaatggccgggcttatccacggcggtgtgttccgagcgtttatcaagtcatcctgagcacgaattgagacggcggcggcgcgaatcttagcgcagggagggtcaccggcggtgagcaagccgcgctggcgtcctgatccactcgagctactgtaccatggcgatccccccattcagttgcctgacagcccatgtttaggtcacattttctctaaaatttgcatgtgaacttcatcaaac

SEQ ID NO: 18063 - DNA, 918 bp, Zea Mays
caaagggctcctagctcgattgtgtgggtcggcaagcatcgcagacgcataagaatgcttaaacaagggagcagaggggaagagctaacctgagttgggctgaccacagcggggttgagttcacggtgttttagaaccggattggggagaatccgaaattcgtgcttgctagtgagggatttgggatgcaggtgggtgcagtaggtgcttgggtacatggcggagctgggggcacggtcaatttatagagcccgcgagcggtggccgtggatttgggcgacgacgcgcggcagtcggaggtagaagaaggtactggcgcaagcgctaggtggcttctaccgtggcggtcattccggcgatcaacggagaggctagagggagtcatggcgatgcggtggcgcggttaggacacgcggcataaggccggaagagggcagtgcaccggcgaggttatctggttccaccgcggtgaactttgtacggtggccgggatactttaatcgccgggcttatccacggcggtgtgctccgagcgtttatcacgacatccagagcacgaattgagacggcggcggcgcgaatcttagcgcagggagggtaaccggcggcgagcaagctacgctggcattctgatccactcgggttactgtaccatggaatgctccatcagtgcttctggcaggggaatttacagagccaataacttccaattttgtgcagtaacatgatcgacaccctttaacaaagttatagtcctaagatccagctacaatattgttatagcaatcctaggcaaatacttgctcgatcatgcattaattcatgcccaaagtgcttgcagttgcactgcttgtctgaaattcagaacttaatcagcctgacagctgaagtttgagcatgataatctctaaatttctc

SEQ ID NO: 18064 - DNA, 461 bp, Zea Mays
accggttcaaggtacgctcgatccatccccctgcccccctcttaagtcttaccacgcaatgcgcgcgccctccagttgcaccctcactccgcccatttggagttgtgaccttcacgaagggtcgagagatatgctgcagtaagctcggctctactgcgctccataaaatttcgctgcttcccgttaggatcctgtagtgcctttgcagcatgcatcggtgctactagtctactagtacatgctttgccgctgccaactcgctgccgacggttacgacatgatgctgcgcctgtgggtgtagtctgtagcgtggttcactcttcttctcatgtatctctaatcttcaaaatcagcacgctacccctatacggtgcatggaagaatgtaaaatgggtgcccgtacaggatgtgaagaatgtaaaattagtacccgtacaggatatcatccttgtccttgtcgt

SEQ ID NO: 18065 - DNA, 387 bp, Zea Mays
gcccagccgcgacctccccactcctcgtgcctttcgcttcttcccatccgcaccgtaaggagccgccagagtcaaccaccgccgcggtttccgccgctaaccggtgcatgcaccgtagtataagtacgcgggcctcgcgccgactcacccccacgatcccttgcccgcttcgctccacttctcccctagggccgccgtcgccgtcgctaccgaggtagccgaagctcgttgcggaccgccgcggcaccaaattcgtgagccaccgtcgtacgtagagctcggagctaaattggaaccttgcgggtggccaggaggcttcgcccgggtctctggttagcgtcggtggcaactgcgggacggggaggggaccggagcgcgcccaattcg

SEQ ID NO: 18066 - DNA, 378 bp, Zea Mays
atagggaatggttatcgacatcatgcatatgtaactttgagtattctgatacatttaggatattgaatatcaaaattcaaatctggacatatttcgccccttctaaatggatttggatttggatatggtcgaaaaatatctacataatttgccccttctaatcagggttgcctcgcgttggcacatcttactatcatggtctccttttggaagaaaaccccacaccgcgatcttccaagtcatcaaccttcttcatgacccctgacaagtgcttcacaccgaggtccacctactcaaccaacaatgtgattgaaaacaacaagaatacagtttggacactgccacacccggatttaaggggcaaacccgggcgcgaat

SEQ ID NO: 18067 - DNA, 856 bp, Zea Mays
attatttttacacttaattattcatttcttaaatagattttctgattaattatctgtcgagactgcgcgccaaataaaaagaaactcaggggccagagcgcaaggttccctagactcagcgaacagtgagcggggacggcgggttgattagctaaaacagcaggggcctaatagctaaatcgttcagccgaaggggtacgggacagtgaccgtgggatcacagatcgatgaccatgatttaatgaaaccgcgatctaatcctatccctctgcaaccgatccaacggaccacactacatcgcatgaacatctacgccagatcgaaccccaaccgtacatctgaggatcaacggtttagaattggtcgcgcgaaggggaaagagataacctgatcccgaccgcaccttactagatctacggtcagggcacttcctcttccccaacggtgtagcacggtgcgccagtactccccacggcggaatacgccggcgaggcacccaatcaaccgtacccgagcgtctaacacaaattgaaccggcgtaacgcggacctaggtgcatggggaaacaggaaattgagacttaccgagggttgggcggtggagtgaagctgtccacgacgcgagtggttacgcggcggagcgacgcttccgatgagaaattctgttggagctggtggctttcaccgtccgaaggcgccacaacgagaatcgaaacaatcatgcggttcccccccgaccagcagctggactgagaacgccgaaggtacccttcgcccacggcgtgcagtggaaccacggcggggctcaaggtccgatgagcaattggaggcagtccggagatgcgggcggcaaggaa

SEQ ID NO: 18068 - DNA, 520 bp, Zea Mays
cggtgacttgcgcgcccggattcgcgccggttgccgtgattcgtgcttggcacgcagtggatatccacggggaggtaaaaagatctcgcgggggagcggatttggtcgcggaggaagcttatcaccgcgcctgtagccgtgtgacatggccgggccggcggttttgctgtggaaactctggtgacctcggttatgccacgccatggctcgttattgtgtggtagtaaccgtggcacacttaggactacaatctttgagccgttgcaccggtgagcgccacgattaacccactagtgttctcctctctcttcggccgccagcgcgcgatttcaaattcacgagccactgccctcgggccctataaattgagcgtgccatcggctccgctaggtagtcacgcacccaatacagcaacccgtgccctagatcgtccaccaaagcgccccaatttgagatttcccccaaatcggtcaagaacaccgcgtgtgtgagctcgccgcggtcagcccttcacaggtcc

SEQ ID NO: 18069 - DNA, 503 bp, Zea Mays
gaaggctctcctcagaaacacttgcaaaatgatcaagcaagattatggaacttgaagcgaagtttgccagaagaaaccctttcgaagctattgacgatgccctattctatgtcttatccccactccacaagaagttttgttgtggatcccctggatctattatttgacttcttggttaggttgataggattgttctttagtattaagattttcgactagatcggtaatggcgatattatattatattataagaggttttctaatccttaatattgctatataacccttgactttttatacttttgttgtcttgccattgtattgccacccttgtgcaatatctaccttgatatattaaacttttgcctctctacttttctccttgataatgctttctccctattgaattattatacttttgttttcttgctattgtattgccacccttgcgcaatatctaccttgatatattgaattctttgtctccctactcctacttgaaa

SEQ ID NO: 18070 - DNA, 744 bp, Zea Mays
cgaattctacacaaaattaggggctaaaaataaaataagttcatctctgattcttgcgcagagaagacaacgagcaagaagggtttgacgacgatgggtgcagacttgggctgcggcgagatgttgaggacgcagatcgaggccgagttgcttgtcaccgcagtggagctccggcgtcgatggcacgaacggaaatggagaagcagcagcaggcacgcagtgggatggtgagtgcgggcactggatcggctgtatgcagagcacgagagcaagcaacgggaggaaggaaggggctctaaggcagcttttataggccgagtgagggagagaaattagtgccagattgtttgtgatttgaatgccgttgaagcgtcttgatttcgtgggagaacagtagctttcattgccattcacggtggctgtggaaacgacgactcagtaggcgcgattgtggctaacgcggcggaggctgggcatgggcaggtgcaggcacgaactggccaagcggtaacgcgcgtacgagcgatttagtttccactggtaacggcaagcatcaattccattaatggcagtccgaccatggctgtagtgaagacacgccgcgcggcgtggagcgcgagatggcagctgggcgacggcaacgggtgggcgcggaggctggagagtcagacgagcgactgggcagtcagctcggcgcacgacgagctggcctgcagcggcggcgagctgggctgcagcggcgac

SEQ ID NO: 18071 - DNA, 702 bp, Zea Mays
ataccatgttgctatactagcctagacctctagttgccataacagaccatgttgctatactagcctagacagaagtgcctcatgcaggaggcaatccaggaagactaccaaaacagtctaaccccccgcagtcaaaacatctagccaatgcaaatgttgagactggtcttgaactcaagaaacacgaaggaaggcaggcctttcgtaaagatgtctgcaaactgagaggtggtaggaacatgctgaacgcgaacttcaccagtagcaacccgctcacgaacaaaatggatatatatctcgacatgcttcgtccgatggtgctgaactagattagtggataagtagacaacgctgatgttgtcacaataaacaagggtgtttctatgaagagggttgtgaagttcttggaggagttgtcgtagccaacaagcctcggcaacactatttgcaacagcacggtactcaacttcagcactggagcgagaaacaactttttgtcggttggaagaccaggagacaagattatctccaagaaacgccgcataaccagaggtggagcgacgagtgtccagacacccagcccaatcagcatcagttaataccacgagctcggaaacagacgtggagcgtgggagaagaccatgatcagtcgtaccttgaaggtagcgaataatactcttcagagcagtcaggtgggactcg

SEQ ID NO: 18072 - DNA, 424 bp, Zea Mays
cgggaaacccaatttatactcgcgccgacgtgctttttttaatttctgagccctaacttcactttttcccttcgaaccactcatctgcttccctgagatctcgatcctgctggctccacctaaaagattgcgatggcgccaaagcgtaagaggcagagcatcgttgctgcgatcatatcgcctatcgaccccaacagccagctgccatttgttggtaactatatgtccatcgtttcggaatccgacctccttcatctcgttgacgttggggttttgcttccaaaagagctctgctcttggcagatttcaagcggcatcaccgttccgatagaggttacccatgaatctgtcgtttacgttccttttcttattcgtggtcttgctcttcccgtctccccctttttccgcggtcttcttgatttct

SEQ ID NO: 18073 - DNA, 627 bp, Zea Mays
ggcgagtgttggctttacctaattggtgtagggtagttaccgcggcgccatggtaaaaaaggcatggtcatcatgatgccgcatggcatgggcggcctgatgggacgcgagtcggtccatccattaatctatatgttggtggtgtgtcagcacgggtaactatctcgccatttaattgtgtgctctctatagtgcgtccttgtggcaccttgtcctaggtggcatagaccctgcaaaatgcacattcctccctgcttggcgaccgaggtggctcgcaattgggggcgacggattcctcgatgcttgttagccgtgggcccacctttcaggcaccgcttgggctccatgtgccctcacataagtagagaaaaaggatgctctaggttgattgtgcttactgtttcctcgcacagtcgcacttgagcgcttgctttcttccttccgccagaagcttcctgttagtttgttgccccttgtgtcctcgcgcctgcctcactagttccgtgcgaatggtgtcattcccaacctgcttgatccgagatagtcgccaccttggcctggagaagaaagggttcctccctccaaggggatctcgtagtggagattggagaaggaaggtgatgtgtt

SEQ ID NO: 18074 - DNA, 826 bp, Zea Mays
gtaaaaatccccagactcagagggcatcccgagctggacggcgggttagtttattaagtccctagggtttctttagcaaaaggtgcaggccgaagaggtacagagagatctcggccgctagatccagaaccgagggtccggattagaccggcgatgggtataaatcctgattcccgagtcatcgtcggatctgagatcgacgactcacagcgcacgatccccactatttcgctttagtcgtcagattgccggtctacggtggataacggttgggatgaaggggtatttcctgcttctaatcaaagccgtgcgattagtgatgaacggcgggtacgcgagattaatctaccccctccactcaccatcctacggtcccggtttcttcatccctatccctttaatccttaccgtccaacgcatgatcaagtgatgtcgggcgtcttcatcaccggttctctcccttctctcttttctctctccagtccacttcgccgcggccgagcgccaaggatctggcagcgatgacccgagtccgccattcgagtccccgttataaggcgcggaacgttcttcgcctcccactacccatctagctcggcaccaagccttcatctacagactgctcgagactacgtgccatccagtggcaagccatcccctcgacagcgcctggagcattgccctaccgcatccacgccagtgcctaggctaagacgtctcgcacttcctatcatactacagagaaggggcacggaacataccgtcgcggagggggtgaagacgggactgacgctcacagtccgaaggtcctccacgcgatgggagc

SEQ ID NO: 18075 - DNA, 461 bp, Zea Mays
cggaattgtgaaatgacgggggcatcgagatctgaatcgcagcggcggagatccgaagcccaaattcagatagcccgttttggattcgcattgcatctataactaggatatccgtattcggcatcaaattacagagatacattactgtaatcacacccagggatttagcgacgatgagcaccgctcccggtactctccctctcacgaagttctctgtttacagaattccaaggtagcaactagaaatgaaaaccgctcaacactctccagatccggacgcagccggcctatctgtctcgtccagccaattgtctgcctcgcctaaccctaacgaagctggcaaaaggattaaatatactcccctactgagtccagtccggcccatacaccgctctgttgggcttgtattgtcgtttggtccttctcggttctgggctcccaacaggtcttgtgacattctc

SEQ ID NO: 18076 - DNA, 1064 bp, Zea Mays
gtccaggggcctaaaccaaagttttctaagactcaagctatagttgccaaggacggcgggttggattatgtaaagtgcaggggtttaattgcaaattgcgcgagccgaaggggtatgaagtaatctaagtcgtctgatctgaaatataaggccacgattaaatccacccgagatcgaaccgttacgtcatataagccgctagatgccagatccacggcccacgcatgcgcacactcttttaccccctttcccctcggatcattaatcaacggtctagattctatacaggtgagatcgatccgcacgcgcgggatcggaatcggacgaatcctatcgactcgtacgaaacgacgccctagcttctaatctgtgccgtcaacgccccatcaaacggccacgacgttcccttcttccctgagccagaccgagcggcggcgctcatgactacaccactaccgaatgtcaccggtgagcgaccgatccaaccctgggcgcaccataccccaatccggccacgcaacacaatggggaaacggacacgagtcgtttggtggggttcttaccattgagggttgcgtagagatccccgcccacggagatgtgccgtcctccgcggtcatcgttgctccggtgagcaattggccgcgccgtgcttgacgcccggccctggttagcccgtgtacctcatcgttaggtccaatcgaacctcacagagcagtcatcgaggctgggacgtcatcctgagcgcagttcgacggcagcgacggtcattgaatctgccttccaatctctcttggtttcaccctcacggtgtggcatgttgtcgccgatggatgcgcaggtgctcggtgatgcggcgttcagttttataggggcaagcaaagcggactcgacggaatcccgccgtatacggcggaggttgagccgggcagtgcgcaacggccaacggaagggcttccatcattgagcgaacatctccgtggcaatgagagcccacccatcattgagcgaacagagagggtacggggggtcaaggcgcgggtccacggaggattcagttgacg

SEQ ID NO: 18077 - DNA, 326 bp, Zea Mays
tgttgtattggactcggtctagtgttgtacgatttctggagcaaatcgctcctcaacttcggtcgtcaggcactcgggtggatgtttagtgatgaacagtgacctgacgaataacgccaggttcagtgcactgtcgccggtgagctcgcgccaagatccgagtttgccggggagattcgtgcttgccgcatagtggataactgtgggggagtaaaagatctagcagggagtggatttggtcgcgggtagaaacttattggctgcacttgatggtcgtgcgacgtggccgagcggccggtgtcgtcgtggtatgccggcgacctcaa

SEQ ID NO: 18078 - DNA, 744 bp, Zea Mays
taagattctagaattattttaacactagaaatcattttctaattgaatttctgaatttcatatgattctggactgcgcctcaatttctatagaagacaggggccactgcacaagaatccctaagacacagagcactatacaccggactgcaggtttaattctaaaaacccgaggggctcattagaaaaatagacaccgcgaaggggtatcgcgggatcagggccattggatcaattctggatggctccgattagatctaaccctctcctgaaccggtatgcactaatagtcgctggattaagatcgggcggcccagacattatgaacccctatccaccactcgttacgagatcagtggttcacaccacccggatccaatcccctgatcatcaccattgattagtcaatcaactgtcagattgctccctagcgaactgttacgcgcctacctcaacccaccgcttgattaagatccgacgccaaggagagctcccccaaactcccgacgacggaaagcggcagcccacaccgagcacggcggcgccattgccgaccaggcgttccccggtttatgcgcgctaagcatcaatccaaccggctctatacactacgacaatgaagacgaaagcgctagaggtaaccgtaccggaagtcatgcgtggtggtgggctgtccacagcagttgcggacttcgatcaacgcatgaacggcgacgagcaattgccgcccactggtgagagcacc

SEQ ID NO: 18079 - DNA, 391 bp, Zea Mays
cctaagggtgcagccagactagcacaataagtgcgcaacatcgaagtcttttccaaaaagactctccgtgcaaaagtcgcctaagggtgcagccggaatgctaggcaagcaaaatcgaagtcttttctaaaagtctccgcgcaaaagtcacctacgaatgcagccggaatcataggtatgcaaaatcgaagtctttcccaaaagactccgtacagaagtcacctacgggagcggcctgatcaatgaaagcgtgcagcttcatcacacaaaattatggttacgtacacacagcgagggcatcacatattacatcggctcaaccttcgggatgatacccatctccctgtagttgaacaacactatcctcagttcctcaccctcaaacaaattt

SEQ ID NO: 18080 - DNA, 286 bp, Zea Mays
taggctttagcctacgtacagcggctagtgtgtagctgctgtaataaggcttgggttgatgtaattaaaagggtgagaaaggtaacagaatgggaacaataagatgcttaacttgtgcacatagtcactgtgggagacgattttcctggcaatcgccacggttttcactacgcccttcatgcttctctagtcctgtctcagagaatctataaagttgtggtcctttgtgtgtttacaaggaagtggcacaggtgctccggtgtttcctgaccatgtaacttcttgt

SEQ ID NO: 18081 - DNA, 819 bp, Zea Mays
acaaatttcaagagtgagagggaggtaagcatgtaccttgaaccagctgcttgcctctggcacattcatggccatgtgtgcagagttaagcacatcaatcgaaccagcctcttttttgttactcactatcttctcatcaagaatactctgtagcattaagttgcagccattagtaccatctaacccaacaacaaagctccttttgccacaagagagtaatccagcagcagatgatagtccattcttatgcagcttcaaatctgcccaagttcggccatgcaaaaggggacatgtagtatgcagtgtagacatggagcatagggatcacagcaggcacaggttcaatagccgtctccaagggtgaaatggcagcagcaccaagcattggtgtatcttccccatcacctaaaccctctgccatagaactagctccaccccccttcccatctattttatgttttttgaaagcatgttctggactcttatcctcttgttcataatccttgtccattccacccccaccatcattacgatactcctctctaaaaatcacatgagatgcagggatgaagttcttatcctccatagaataggtaatctcgtatcccttcttgtcaaaaacaatatcggtggtcagaggtagtggatctctactcatcattccaacaagcagcctgatgacgcccatctttctataggtgtacatgtctacatcaagagtggcgccgattaccgatcctagggcccaaaaaacccaaataatgcctccaagtgtgaggtactcccctcacatgaacccaaacctcgtccaattgataa

SEQ ID NO: 18082 - DNA, 485 bp, Zea Mays
acaaatacgggacccatacaggagctcaagggtgtccagcgagtcatggggtgcttggcttccctcagccgtttcgtgtcacacctcggggagcacgggttaccactatataaaccgtggaggaaaacttaccgcttgaatggacgacagaggcataggaggccctgacggtctcaagagtctcctgaaccagggcccatcctggtcccaccggagaataaggaaccgctctttctctactttgcagggcctactcaggtggtcagcccggtgctcatcatcgaaagataggagggagaatgtgtgcgaccgcttcaacgtgccatctacttcgtaagcaaagtcctcaccgcgtggaaactcgctacccccatgtacaaaagctcttgtacactgtcttaattactaacgaacgcttaaacactatttagaattgcatcctgtcactatggtcacgttgttccccctgggtgaagtaacccgca

SEQ ID NO: 18083 - DNA, 457 bp, Zea Mays
cacgaatggacctgagatcggctggccatggcgaggtgtctcacgacaacgaggctgatcgaattgggggaaaataggaattcgggggttgtggcggctaatcagcgatgaggagcggtgcactagctttgtaacaagatagcggagcaggccgaacactcattttatagagatcactcgaaggtttcgcgaatttgggacagaatgagcttgcgatcgaagcgaaggtgagtcaccggagttcgctcaacgtggcattcactagggtagagtcctgggctggtaactaaccatttcgcacgacacattgcgacgtggttacatggttagtagcgtggcgtatccagggtaacgacgaccatcacggtgatggtcgcgcggccacgtcgccgggcaagtaggtatggtgaagctggctctatccactctccttcagatctttttaccccccccctcg

SEQ ID NO: 18084 - DNA, 435 bp, Zea Mays
cccgcttagctaatactgaatcatccagttttctcccccttttcctaggatgggaagtacgagtagagtccataccctgcaggggtatctccactctctccggtgcattttctgtaggaatatgcgacttcgactcttctcttatatcagtaaaggcatctggcagattatttgctaagttttgtaggtgtattattcgttgaacttcaagttcggtttctatagtgcgtggatcaagcgattggatgctactagcactccattctatttctcgacattctttgttattaaggtacaatcctccccctaatgccgggaaatgctcttcatcgaagatgtatcagcgtaccgaaccgtgaatagatcccaagttctaggctctaaatatttgattatggacagagattcataaccaacatagatccccaacttccg

SEQ ID NO: 18085 - DNA, 455 bp, Zea Mays
atatcatcaatgcagagggcagctttggcctgagccaaggttttaacatgctcacaacctgacttctccaaaatagctgcaattcccctcgcactagagaaggcacagacatccccacggtcactcaaaatttcctcaaaagcttcggcttcactgctgatccactcaattgggccctcaggatcgcctcttatgaagttgtcttcactcgagtacgcgcccacgttggcgaagctagtttttatctttttgacgcattctacagatttttcaaaacatcttccttttgatgagcgaagctctgtaactatttcaaaataatttttccagtaatcactggcatctcggtcagcttcggcaatagcgcatttcaatttggcttcggccagttgtttttgaagattttcaatctcattcctttggatttcagattgagccttgaagttagcttcatc

SEQ ID NO: 18086 - DNA, 488 bp, Zea Mays
ctcatggcttctccgaaaacttgattttgggtacacctatacttcagaccaggataaatgagctggaatgtggcatggtgattttggcctggtctaggcacgacacgacccgaagcatggtaggatgtgctaggaacgacatagtgtgcatgatgggctatgggtgagcttcgagtccaacgggcggcacaacatggctcacttaaatgttagctcgccaaggcatgtcgggcgacatggcctagtagagttttgacctattaaagcatgacccattcaatctgtccccactagttcactatataaacttggtcgaccacatgctcgcccgcacgaccgcactccacaggccgcagctgcaactacttatcccttctaccctaacgaatgcctaaccctaatccctaatcgcattgacatccccattccccaaacaatccccatcttgaaccacatctactaccacatcatcgcccttccctagtccc

SEQ ID NO: 18087 - DNA, 683 bp, Zea Mays
ttgtattctatccacttcgtaaatttgttgatggcaaccagtatgtgagtatatcctccttgagctttcttgaaggacccgatcatgtccagcccccaacatgcaaatggccaggtcacaggaatagtctgcaactgctgtgcgggtagatgttgttattttgacaagaattggcatgcctcgcacttctggactaactcggcagcatcattcttcgcagtcgactagtaaaacctggatctgaaaacctttcccactagagttcttgatgttgcatgtatgccatactgcctggcatgaatctcatctaatagttgcctcccggtagccgagtggatgcacttcatgaggacccctcctgcgcctcttctgtacagcaggcccctatgatggtgtggtgggccaaatgtcttgcgacacactctattgtggacttgtcatacggtccttccttgtttcttatgtacctgatgatcgactctctccagtcattgggatctgcctctgcctgactcagagcgttgcattcctccatctgatctatggcaatactcggttgttgtatttcttagacgaagaccccaggtggaacttgggcccaactggatcccagctttgataatgcgtcagctgctgcattgtgatccctttccacgtggtggaattctaatccttcgaacttg

SEQ ID NO: 18088 - DNA, 824 bp, Zea Mays
ctcagagtcgtcagaagagttatgctgatgtgtggaggcaggatctggaatttgctgtgggtgaccaagtccttctcagggtatcacccactaagggagttgttcggttcggtgtctctgggaagctcagcccgagatacattggaccgttcactatcttggcccgagtgggcagcctggcttatcgcttgctactgccggattccatggcaggggtacacccggtctttcatgtctctatgttgaggaagttcttgcgggatccggaccatcagattgagatggaaccaattgcggtgcagcaggatctgactctggagtgtcgtccggtgcgtgtattggaattctcggagcgtgtattgaggaagagatcaattaagtatgtcaaggtcttatggactaatcagtctgagcacgaggctacgtgggaacttgaggagctgatgcggcagaagtacccggaacttttcgttgtgggtaagtgttgttgattcattaatctattcttttgtcattccgatagaagcgtcagaattcgaggttgaattctttttaagaggggtagagtgtgatacccggtttgcaaagaagagaagttgggggttgttctttttgtttttttcttcctcatccggttgttgttttggggatttggaatttgtggaaaacgttcacaattatggcagtagaatttatttggtttggcgctggcgatggggtcgggagctgtcgcgtgggctagttgggccgcggttggtgattcggcccactattcctcccaaaccctagccgccctccctcctcaccccctccccctttgtgca

SEQ ID NO: 18089 - DNA, 1080 bp, Zea Mays
agccatccggtcaggagactggagcatcggggcagatggcagtacgagccctaacgatgggctgatggggccagccagtgtggcaggtggctgaagcgccacctctgaaggagcgggtggcatagccggcgagtaagccaccagtgggggtggtagtgccatacgagtacctgaaaaagaagacacgagcgatagtccaaaaggagctgtaaccgggttagagtaatcatcaaggaagtcgaaggccgctggtgtgggtggattggaatcctcagaaaagggaaacaaggtttcataaaaaaccacatgacgggagataatggtgcgattggattggcgatcaaagcataggtagcctttgtggtggggggaatagccaaggaagacacaaagggttgagcgaggggataatttatgtggagtggtggcagaaaggttggggttgcatttgcagccaaaaacgcgaaggtgctcataggatgggttgcagccgaagagagcaaagtgtggtgtagagagtgcgagtgttttggtgggtaatatgttgaggagatatgttgcggtgccaagagctgcagcccaaaaactggggggaacactagattgaatgaggagggtgcgaatgatattgttgatggaacggatgacacgttcagccttaccattttgagctgaagtgtaggggcaagacatgcgtagatggactccatgggaggagaaaaaggtgtgggcttgaaggttgtcaaattcgtgaccattgtcgcactagatgctctggatagtgacaccgaactgtgtacggacgtaggcaaagaaattggttagggtggagagagtgtcaaatttgaggcgtaaaggaaatgtccataaatagtgggagcagtcatccaaaataacaaggtagtatttgtggccagacacactagtgatgggtgatgtccagagatcacagtgaattaactgaaaattacgggtggcgcgggaggaagaggtaggaaatggtagacggacatgtcgtccgagttgacaagcatgacatggatgagtactagtatttttattacaagaaattgcggatga

SEQ ID NO: 18090 - DNA, 689 bp, Zea Mays
taatattatagagtaatgattgtattggttggtgatatgatttataaaatagacatagaaccaattactttcgctcatgctcatgatatctcaaaatgtgggagcagttaatataagctaaaggatgattcgatttgatgcacaagaagtagaaaaccttaatctcataagttgcattaatcaaagggagcaattgtagagaccattaacaagccaacacttatatgtcaaaggactttaggaagaacatcaatagtaaagtagaaaccgaatgttccatgcacagactactattgtgtgcactttattattgccctctcagcctgacaaaatattctctgccacatcgctacactctgcgcaggcagtaaaccagttttgcatatgatgctggcagtaaaccaattctgagattttttatgccacgtctcaaattaaagttacactatgcgcagacagtaatccagtttttatgtcatttttatgtcagtataaagtgtatttgaactttaataagctgaactggattagttcatgatcaaccatctcctcatccaaattataggactacctcagaaactcctaatacatcaggagaaacaatagaagaaataacatgggctaaattacttggtagtgcattggtcactcttaggaggaggtggcgtagatgcagactgaagaactgg

SEQ ID NO: 18091 - DNA, 503 bp, Zea Mays
cgcgcgcggcggcgccatggcagagatgccaatcgtgtgaattggtgcacgatgtctacgcatctcaggtgcaaattggaattaagagaatggcgaactcgaggagcgcatccttaccacgatcccgacggtttccggccctgttcacggcgcacggtgaatccacggcgatggtgaaggcttgcggtcgccgcggtcgtctgtttttcccagccaacgctcccgaagcggcgaagaggctcgatagaagcccctgaccgcgcaccaaccctgaaggagaacaccagtggtgtccccacacggcgacccacccctatctctctctcgtccaatcgctaggcttgcacggcggcggaagtcgcaggatgcttggtctagggtttacgccaggtggaggagggagcacacgccgaggttttatactcccccgcaggtcgatacgggcgcaagtggtgcggtcgagcaggcgccatcgtcgccagagaaatcggtggggttgttag

SEQ ID NO: 18092 - DNA, 1980 bp, Zea Mays
gtgctacaaggtgactgcacaaccatgtcagctagctctcgaggaggctatccggttgctaaattaccaaggctgacgactctcgcctgaatctattgatatgcttcagtcttgatgatcgataataggtcctgcaccgtggttgaggactccctaaagcaccacacattccattccctccatacctgctacgacacaagcgcgaagagcgaatcaaagcttttccgttgtcctggatcagggtccacgaagatgacgccaccatccaaggacgctatgcgtcggcggtggcaactagtggcggaaagcacctggatggttctcaaacctggagggtaaaggggcatgagacaatgatgtggtctattgatactggtgcgtgggtgccaaggaagtggtgttctctagagtcaaggccgtgtctcgctcgtcgattcgctatctagtgccgcaggcaaaaggtgagccaaaggaagatcttgactcacaggggcacccatgtcttctggattaggttgttccctccctcacaggcggatggatctcgaatgtagtaatttgtatgtagacctcgtggattaggtgccatttgtagtctgtcgccacaccgatttgtctggtaggtcatttagcgtaggtacttggcaactgcgtgcaccaagaggcctcccgtgatttttcgcacccaacatctatcttgtaagacgtcgcaagcagtctgcctggacctcacccttctagacaccaattgggataagcacgacgtgatatctaacatgtagttgttgttcatccatttgtctttccagaataaggtgttcctgacattacccaccattgtatacatggacaaactgaagaaagcctgtacatggggtttgatttggattgatagcttgctccattctcgctcttgatcgatcttttgtagccataggataggtatgttccaagataggatgaatacgttatccattagaacctacaaccttggtgacttgtttgaagttcaagccatcatggtagtggaggtgttgccagccaggaatagtgtgtccattgctgcaatgtgagatggggttatgggcatcgtgaagatgtcatcgtagaatttcttggccgcaagtgagctcaatgagtgcatacctattaggcccatccttcgcatgagcaggacctcattgtgttttgaggccgagacgtgcgccagctcttgcgccactagacgcctaatgtggctcgacatgcttggttgcagggcaccctctgcttggatggttgacttgtagcggtgtcctcatcttcttctgaacttcttgtcggacaagcgtcaggcggcttcctttggagcaaggttcacttagagttgtctcaacaccctcagctatgcaggcatcatgccctcgccctcggtgtcgtcttctggttgtgtgacgtggtcgaagtgatagttcttgtcatggccctcattccctcgtgttctagcagtgatagaaggttctgcaggagtagttgcccataccaactccgcccagggagtataggatctaggaccatctgtcttacaactctgacaactctgtagaagaaacaggttgagtaccagatccaggcccatcaaatcataatttgaaccgcccactaggcaaggcgaccgagggaggagaacgtggggtggcactgttgtcaggagcgttgctagccgatgggaggccatcatcgccggcttcattcgcggtaccatgtacgatattagaattggcgtaattggatggatgtattgcattgagcctcatgggctaattatatagggtacataggactaacaccccacatgggtagacaatatggtactatttctatttactctaactttcgcctcgtggtcttggtgcggtggtgagaactgtttcactgagttactgggttgctggttcgaacaagcttctttgtatttgcgggagaaagcttgcattggtt

SEQ ID NO: 18093 - DNA, 569 bp, Zea Mays
gcgataggctcgccggtgaaccgccgccgtccgaccatgcgccgcgtgtcttaaccgcgccaccgtatcaccgcgaccccctccaactgtccatcgatcactggagttactgccacgccataggacacgtattcaccgcgccaggcttcttcctcatcttcggccgccaccgcgccatcatcaattcaagcgccaccgctcgctccgcctataaattgagcccccggccagctacgctaggtcataccaaagccatagccaccactcccgtctccaattagcccccatagccagagaatcactcacttcccccaattcagtttctgtcaccgtgaaacgagcctcaccgtcgccagccatactccggtcagttcccgtcttctgctcccttgtttaagcgttctcatgcatctgcgatgctccccggcccctttaatcgaaccaaatcgcctgggatcgccgggaacgcaacactttaaccgccatgctcacggccaccgtggccagagctacgtagttggttttagctgcaattaggttgggggaaatagtcagggtagccccgattt

SEQ ID NO: 18094 - DNA, 794 bp, Zea Mays
cgaagacaccacatgttcattaaactacaaacctcaaaacccttaacaccaattatgaaaagtttgcctaagtaccttagccatgccctggttaagtttgataccaagactccacaatttgacatgactagacatggattttctctcgggttgaagatgttggactaacccacctaggcgctccaatatcttctaattccaaccatatctacacttggaacttgcatagggttaatagaacatggcatggtgaagtgactttacatgaatatttggtcgagataagcatgtttggaccgactaatgaacgtttgacccatggcagaagcaaacacacaagtgtccgacgcctacccacacactagagcgcggactagccagcacccgtgtgcgtccccgcgtgctgtcaactcgattgagcgcccacacacgcctataaagtccaccccacagactcagttgggcgccaccgagcccctaccaccgtacccgagtgctagctgtcggtgatcgccgtcttggccaagctccacctaccgtaaacctgctcgtagcacggccaccgtggccagcttaaaccacacagccacaacatcgtccaaagccactgtcacattcctagagagtcaagggagcacatccaccctttctcgggccaattagctttccatagaagctagctaccgctcgtcgaagcaaacccgtccgccgatgaacgtggccagcccttacgccccaccccggccaattcctttcacctacagcatctctgtgatcctatgaagctccccggc

SEQ ID NO: 18095 - DNA, 491 bp, Zea Mays
gcatttgctgttggttggcgatattatggacctggaggtgctggtcgcattcttggtgaggctagtcttgttgtggacccctagtccattttctattggactgcagagtctcttttggttttcgctatgactccactttcctgtgatggagctcatcagatcggacgtatttctcaaagagctgatatagctcttggaagttgtatggtgggtctctggtagttacggtaaagctagcttgctcgaaggccgctaattgcataatggatcacaatcttatcgttgactgagggtagctgtgatttgaggaggaggaatttcttgtagttgtcgcgaatactctcttttgccttcttcctacagagggacaattctactaattcatcttactcaggcctgtagccttggaaatttagtaggaattagtcaagaagggtcatccatgagtcaatcgaaagtggtggtagtcttgagtaccatgtgagggtggg

SEQ ID NO: 18096 - DNA, 312 bp, Zea Mays
aatccaacaaatcgaaacacaattcatagaaattggatctaccaccgtgtacctcacaaaactattagtagtcaacaaaactattagtagtcaagacatcaaccacaaacaaaaataaagtcatctttgaagagggtcgggaagaaatttcaccagatcaacgccatggacctccagatccacatgatgtaccacctcgaggtcatcatgtaccacatcattcacacagctacaaaagctcatataagtacttaaataacaagcttatatgaattccaaaaaatgagcagcaatttgatcctaaacatttat

SEQ ID NO: 18097 - DNA, 1360 bp, Zea Mays
tgcaaaagttgtgatgttgatataccgcagactgtcagtttcctgtaaagaacagatgtgagtcttcttttcaagtttctcttgctcatatggccctggattctgtgaagttgatatttttatttggtttgcgatggatacttcttacactttgttattgcttttgcttgttaaaaatgtaattgttgttttcttaattcaggcctctgtttgcaagtagcctattaagcattgtccacacccttttagaccaaaagaggcaggatgatttatgtatcgttggatgcgaaaccttgtttgattttgctgtcaatcaggtattcctattggagtagatgccattgtccattagcaggactcagtttatatatagatatgtcccattattggtgatattgagtctgtctattccaggtggacggtacatatcagttcaatttggaagggctggtcccaagactgtgtgaaatagcacaagaagtaggagaagatgagcgagcaagtgccctacgagcggcagccctgcaatctctttcagctatggtaagttctgtgattgtgccatatctaactgatatcatatgttgatgttagcatgactttctaaaagttctggataaattaatacgaagttcaaaactcaaagtgtaagagaactgctatactcctattttaagaggtaagttaaaacattcttccagcataactctaagtcacagtttacttcgtttcttatgatgtaagcaatgaaagatcaaaggcagtaagtattcgtgagttgactaacttcatatgcataacttataaactaaaactagctcagttgtgtgcgagtgtggatgtatgcctatatcacccaagttcaaaccctatttgatgcaatgtttggctcctatttctgctttatcaactaaacatgacaacttgtagttcggcggagttgggttctctattattgtaacttcctatactccctccagtcacacgtgcatgtagttttggatataggcatggtgatggcatgttttgtttttgactggagggagtagctatctagaacttaaatctcttttcaaaaaatatttcagtgtatgcatggcatcttattaaagattactgattttcttattgttctattatgccaataaccactgagcacttaaaaattttaaacaaaatctttggtagtcattatatcatttagttttcttgttgagcaggtctggtttatgggggagctttctcatatctcgtcagagtttgacaatgtaagtaatatgcaagtgagctctttttcttgtgttactttcttgcaaggaaggttcattgcttatgttcattttgttactaccaaactgtc

SEQ ID NO: 18098 - DNA, 598 bp, Zea Mays
aaggtaacatctcacaacatttgcaaccaagttctaaaagtgtcggctagtgactttttatcctataggagataagggtcatgtcttcgatgaacatgtttttgcgccgctggattatgggagggatttcactgaagatccatccattccggcatttccaaatgctccacatcatgattatgacgatctccatagaccacggcttccttagctccgtcatgatcatcccgaccaccaagtgggggttggtcaacctggggaagtaattccgacgatttgccaacacctttttgcaaagctgcatctcaagaacaagtgagactaggtttcaagtttctgcagaatgcaattctcacatgtgtacgattccaactccattttccgtcgcttgagcatctctcttgtgttgagcctgtcatgcaagatcaaccagaaaaacatctattgtttcggctagcatttggagctccatagtcgcgaaaaggtccgtgaagcttgtgaatatgagagactcatcttataagctttatgagaagagaaacacgtggaaccccacgctacccccatttgtcactttgctcccttatatgaaccctac

SEQ ID NO: 18099 - DNA, 837 bp, Zea Mays
gtttttgctgaagttgaccccaatgggtgtgacccgactgatgctgaacccaatgggtgtgaccttgatgatgttgatcccaatgggtgtaatccggccaaagttgatcccaatggctgtaccgttcgtattattgatgaagatgaggaagaggaagaggaaattcccttggttcggaagaacagccggcgctacatagccagcggggagagtagtggtgttccttctccagctttgtctgctctcattggtctgcaagaattgtctctggcaaactttgatcagactctcgaagacatggtcccagaagatctgttgtcagagccggcagatggtggaatgatggaagtttgtgctaacgtgtctgatgccaggttagaattatcccgagcagcatctcgtgccttgtcgaccttggagcgcggtcttaagagtcgagaggctgatctagattgctccgttcccatggaagttgttgaaggtccttcagccttagaggtggctgccacaaagagctcggtcctcaacaatggtgctagcgtttgcccagcccccgagggtgttgccggagatgatccggctcggatgggtagcgcgagctatgacccagcccccgagggtgtccgagtgggttctccctctcatacttccatagatgttcatgtagggtcttctcctccgcattctggttgcatggcagcagcacgagcttcgggtcaggaagtcgccttagaggccagcgctcccgatgacagagttttgatttctgctgatgacgccgaattggtccccactgatgtattgcagattgctccggttggtgatccttcatcgagc

SEQ ID NO: 18100 - DNA, 549 bp, Zea Mays
cggcagaggggtcggccagcggtgtcttccttgggaaggggtcataaggcaagggtaaatccaatattctacccggggtaaaaccatgcgtactcatggggcccaggattgcctggttgtcttgtatttaccatggcggacgacgcggggctgtgatggtcccaggtgccatcatttaggctacgccgacccttggccttcatagcctaggactcggtgtggcccgtcatgttgtgcgctgctggaggtctatgcactcaagcctaatccggtaggccatgagtgcgtcgtaggatgaggggcacacataccataaatgtgtcacagtccgagggggctcataggtcatgagttctatgcgacctgagggattcgtaggtcatgagtgggaagtgtactggcacccgcgctatggctcggtgtcaggagaggttaatgcggccagatatttacggcgggttagcctggggtcaggtgcgggatccactcgagtggttcccttccgatacatccagccacctatcaggttctgccattcctgaccccggg

SEQ ID NO: 18101 - DNA, 658 bp, Zea Mays
cgggccacatgtggatggtgccaattcacaggttgtagaaatatggccactgggaaccacccggagagctgcctcggtcgcccgtcgtgccactgcgtccactctttcgaccgcgacccccccggagccagtaggctgccgaagagctctaggtggcggggaccgtagtgcggtgaagaggaacccccccccccccccgaggcagagggggcagcccgaggagcgttgtagagcggcggtggcggagaggcgaagctcctcgagaagcagatcgttcttggtctccgcaaaggttggaaaaggcttcatgcgggtaaggatgggcgttatgcgatcgaagcgagggctcaagccgcggaggatgttgaacacgaggcactcgtcggtgatgggggccccgagggtgcggagagtgttcgccatcgtcttgatctgacgacagtactcatccacagagagatcgccctgagcaagctgacggaaggcggtctcgaggtacaggatccgagtctggcggtggtcgaggaactaagcctcaagggcaccctagatccggtgagcagtatcatccggcacgcgaacgatgtcctgaagttcggccgtgagggtgccatcgatccaggaaagcaccacctcgtccatcagaagccaatccttt

SEQ ID NO: 18102 - DNA, 525 bp, Zea Mays
ctgtcaggcaaacagaagcaggtaaattcaggcatgaacagtagctgaacaagatcacaggttcagtgaacctcaccgccggtgatttgcacaccgtgattcatgctcggttcgagtaggatattaccagggagatcgcaaggggactggattgagcccatgtgtcgtacccacttgcccggtaacgtggtcgagcggccctcaccatggtggtcgctgtctctcgcggttgcgccacatcgtgttcatttcaccatgtatctataaccgtggcaagtagtcggttactgctctgggtcgttaacccatcgtgcgccacggagaacttgcctcggtagaaatatctcgtcgtcgtcgtgagctcaacttcatccaaattcgcgagtaggcggttcgatccctttaaattgaagactctccctgctccgcccccttgttatggacccaatgcacccccaaccacatactaccccaccatagctcacaaatttcagaattctctaaaatcggtcatgggccccgtcg

SEQ ID NO: 18103 - DNA, 1476 bp, Zea Mays
ctgctgcaagaaaccgcgtgccaccaagcgagccttgtgcttgatgatggcatcggcttcatctctcttcaatttgaacacccacttaagggtgatcatgcggtgaccacgagggaggtcagtgagctcctaggtgcggtttatctcaaccacacccatgtccgacttcatcgcgacatgccatgccgcgtgtctctcggccttcgctaaagaccgaggctcgccgtcgtcgcacgcatgatgtaactccgccgccatatcacgagacgtcaggcccgacatcgacgggtcgatgagaaggtcttgcaccgtatgataccgcaacggctcgccgtcatggtacgcgttgtgcgctcctcgtcgtgggagagtggggtaacgagctccatcgggttgtgatccacacgacctggtgtcagagtggacgggctcgaaggtattaccgtcggtgctggagtgcgtggtggtgaagagttcgttgtagtcagagtcgtggctggagagcatggcgtgggagttggagacttggggactagggtagatctgctcgatgaagaagagttgcctactcccccaactccctcgaagtgggcgtacttgatggtgaagtcgtcgtacgttagagtcgtgccgtcatccatcgccttgtcccatgcccatcctcacccttcgtcgaacactacgtcgcacgctgtgcgcgcacgctgtgttcttgggtcaagaatgcagtaggcctttgagccctccgcgtagccaatgaacacccccggggtgctcctgtcgttgagcttgacgatgtggcgaagctccttggtgaatgcgaggcagccgaagacccgtagttgagagaccgctggcttgcatccatgccaagcctcgtacgacgtcatcccgttgagtgccttggtaggtgagcggttgaggatgtagacatctgtcaccaccgcctctctctagagacagccgacattccctctacttgaggagagcccgagtcattcccacaaccgtttggttacgtcgctcgacggcgccgttctgttgcgggctgtacgacgcagagtagtggcgttgaacgtcctcatccgcgcagtacgacgcaaactcaaccgccatgaattcgtcgtcgttgtcggtgtgcatcatgcgcagcttgcggccgcactctgcctctgcagtgacctacacacacctgatggcattcgtagcctctcccttgctgccaaggaccatcacccacatgtagtgagagacgtcgtcgacgagcaacaagaagtagcattgtcctactggtgtgtggctattgtcatcgggccacacaagtttccgtgcatgagttcgagcttctccttggctcggaagctcgactgctagggaaaggggagccgcctctgcttttgtcatcacgcagacgtcgcagaactgttccacgtggtcaagacacgcaggcctcgtactatctccttgacactgagc

SEQ ID NO: 18104 - DNA, 483 bp, Zea Mays
gtccatgtaggcacgttaggtcgtaattggatattatgacctactatcctttttgattgatgaggtggtccaatcgatcttacctactatcgctcttgagtaggtgagcaaggtcggtttggtggccggtcatttgggccggccttcctctttcaaatatttagacaacaactgatcaaaggttaggctagatttgaccagtcgaccagctaccttgaacgtgttagttttccacgtacctatatctggtcgtcgtggtttgaaggtacgtggtcgccgtggctcctgtgcattgtcgggtcgtccgttggaatgatccggactttccggtgatgtcccggaccatccgcgtctgtgtgtcggaccatccgcgttgcgtagaacaggtgcccgcacctggctacctgtctgcgccggccccatagtgtcggaggtagtaatggtaaccttcagcgtctcacctccatcgggagtcctttccgc

SEQ ID NO: 18105 - DNA, 765 bp, Zea Mays
gttcttcctaaagttaatggagggagggctcgcgagcaaggatgcgggcttgacgctggtgctggtactctttttcttgattggagggctccttgtcccatccaccattgttgttgggcgacggcgttgccacgaagcaggccctttccggtgcttctttggcgtcagagttagccatggtcgagccgcagccctaatcgtcctcgagcaggtttaggatggatgtcgcttggtgagcgatgatggccactagagttgaagacggggcttatgccgccttgcttctagtgtgcatgttaaggtgccgctttgaggcagtgccatgctttttgaggcgtcgcttctccgctttgctcttggcggagtgcatgggtcgtgcgcccatggcgttgggcacgttgagggtggcgaggctgagctcgctgatggtggtggcaaagaagttgagggtggcaaatgtgatgaggctccctaggatgaaggtctggcctccaacgaatgctgacgattgggccatcggggcacaaagtgtcacttagtacgctagtgctcccctacctggcacaccaactttcatggtttcagaaactggggacaatagatttgtgttcggtggtggatgctagtgcagactcacttgcaatggtgaatcactgggacttaaacgatgaacttgggtgacgaggttatacaggttcaggccaaagccctagtttagtgtagtgatgatcatagtattgcaatggtatgtgttacatcttgtgt

SEQ ID NO: 18106 - DNA, 379 bp, Zea Mays
gttggccgtgggcgagccgtgattgcgtctcctgtcgaggttggcctcgagcaagtcatgactgcgtcggtcgattggccttgggcgagtcgtgactgcgtctggcggttggcctcgagcgagtcgtgactgtgtcaggcagttagcctcgggtgagtcgtgactgcgtcgagcggttggcctcgagcgagtcgtgactgcatctcccgtatggggttcatcttgggcgagtcgtgactatgtttgctgcccggggttggcctcgggcgagtcatgacttaggtccctcatgccttgttcggtgcccatccaagatggaaagtgaccaatcagtgattctccgaccgttgtaatgtgcattgtctgttgcacacccaga

SEQ ID NO: 18107 - DNA, 387 bp, Zea Mays
cgagcatcaagctaattaacataatcaggttgaggatcaagcaacttattccttcgagtgtcttggtgaggtaggcggcagcactcgagctcacgaagtggttggcaaggtgtacgataatgcagcccccgagctgacgaggcagtggcatagcctcccagagtcaacgaagtagcgagtcgacaaggtgggcaatgacctagcccttgactggtgaagcaatgaggcagcgaggtgggcgatgacctagcccttgagccggtgaagcaacgagtcagcgaggcaggtgatcacctagccctcgagctggcaaagtagctactcggcaaggtgggtgatggcctagcccctaagcccgtgaagcagtgagtcggcgaggcgagcgac

SEQ ID NO: 18108 - DNA, 520 bp, Zea Mays
aacgattggaggtgagggctagtgcattgggcacataacaacctagcagagcatgctgaacactcaatttatagagagcgatcgcgagtacgacaaatttgggcggagaagaactggcggtaagaaaggggaggagtcaccgtaggccgctcaacatggcattcagtgggctaagtcctcgacgacagaggggctatctatagcgacctactacaacatggtaacaaggtcagtagcatggcgtgcctaggttaaccgcgatcatcaccgcgacggccgcgcggccacgtcgaggcgcaagtgggtacggcgatagggtggccacagtgccccgacctcatccctggcgtgagatctttttaccctgggtcgttatctgcgcgccaccgggcatgaatcgtagtgccgacgaggatcacggtgcggggtcatcggcggtgagatacactgaacccgcgatcttcttcaggtcattgtaccatgggattctcatatgtgcgcctgacagagcaacttgccg

SEQ ID NO: 18109 - DNA, 608 bp, Zea Mays
ccggggtaagcctgactgactccccgctcccggcggccaggatcatcggcctgcttcgcgtgttgcgcgcttgctgtcccaagtagttacgtgcgcgtcatttccgttaccctgttcgatcgatgcgctgtggagtgagctacgactgcggcgtgcagagttctgttcagcgcggcagcgcgtttggtgcgtccctctgacaatttctctgaatctatgctgaattatccgagatcgaagtggtctgtggtattggcagtttggcactgctgttctgaatgtctgacgtgacgtgtttttggcttctgtgtcgaaggaaatactgtattgaagatggttacctcttgatgtagccttatttgtgtgcactggtttggtggcctggttactgattttacatattgcttactgccatatggagtggtttgtttggttaaaggttaaaacgtaaaacagtgatgtttgatatgtagttgaaagttgctgtgcaacagtgcaagtcgcagagcatttctaccttttaagatattgtgggggctaggcgatgctaacatgctggtgtttgtagttctctaggcagttaatgctaggcagggaaagggggtgaa

SEQ ID NO: 18110 - DNA, 741 bp, Zea Mays
gatgcatctaaaacgacctttatatgtccaagcttcattggtttatttgaattggttgtcatgacatttggtctgaaaaatgctagtgctacttatcagaggctatgaatttgatcttccatgagttgttgggaaacactgtggaagtctacattgatgatattgtagtcaaatcggctgagtttagttctcatatagttgatttgcgcaaagcctttgataaaatgtgtcggtatggtttgaaaatgaacccacaaaaatgtgcttttggagtgtcggctagtaagtttttaggatttgtcatccatgaacatggtatagagatagaccctgaccgaatcaagtctatttagaatgtgggatctccgacctgtaaggtcgaagtgtagaagtttctcggcaaggtgaattatttacgaaggtttatttttaacctagccgggaagattgatgccttcacccctatccttcggcttaagaatgatgccgaattcgcttggggggcagagcagcaggaagcatttgatctcattaaaaaatacttgtcttcggctcccgtattaaaagcaccacaagcaggagtactattccgattatacatggcagctaaagataacgtcattggggttgttctgacacaagaaactgaaggaaaggagcatgtggtgacatatctaagtcggaggttggtggatgctgaaacaaggtacacttttattgagaagttatgcttatgcttgt

SEQ ID NO: 18111 - DNA, 411 bp, Zea Mays
ggttaatcggcgatcaccggacgctcgccgtggctctgccgcgcgggtgagctcgccagcgcacttgcagatccttgaatctcatccaccttcggccatcttcctataaattgagcccgagcgctgcttcttcacctcatcacacacacgagtgcttgcgtaatcgacccaattccaccgaagaactcagataggccataaatctccccctcactgttcttagcgccgccgtgaaggacctcttcgtgggcagcccttctcgggtcagtactcgcctaattgtctcttgtcctagcgtgtctttagcttcatattgctctcggtgctgtccaattgaattttaccagtgccccaccacaggaacaccctgttgttccatagaacgtcgccgtatacaccctctctgtcgac

SEQ ID NO: 18112 - DNA, 503 bp, Zea Mays
aagaaatatcgcattaaagatgaacttaggccactgttctacctcggccaccgtgtccgcctgactcacggccggttcatataagctcgctggagttggccgcctattgatcggttgccacgtgcctatgtactctaccacgtcgcagtaacgtgccttagtgtgtccgttcatcgccggtaaccttgccgcagtgaaagccacgcacctcttgcgccagtgctctcccctctctccgaccgccagcacgccatgccaaattcaagagccaccaccctcgggtcctataaattgagtgtgccatcagctccactaggtagtcaagcatccagcgcacccactcgtgcctcggattgtccaccagagagctctaatttgagatttcccccaaatcggtcaagaacaccgcagtgtgagagctcgccgtggccagctctccgcaggtccgatcatgccctccttgctcttgttttagcaaccatgtgtgcttgtgatgcttctcg

SEQ ID NO: 18113 - DNA, 762 bp, Zea Mays
acggaaaatgttttttcatgttaactcagcaagaggacaagatacaaacactgaggataggcaactaatattgatgactgtgacatggagttcataccaggcggagagtgttggcaccaggggtgttgtgggctcctgatggtgtctgcacgttaggctaagcagggataatttcttttcctagcagcaggttgtctccctgatgtggggttgtctgtatcatacaatgcaaataaaagacatgtgtggagcttgtttctcagtgtatacagaaggagaatgaggctttatattgtagatagctgttttttcccactgagtacaacagtgcaccttagcgctagacgaaactttgcgactctccggtgttagcgacggctcgcggatgaaggcagcccccttgttttgtgtgacacctgatccttgccctgctgcagagttagcaagtagtccaaaaagcaggttagagacacaaagagctgaagtgtatgagtttagtcgttttttcatgtgtactaatcattctcattttgaccatttgagtttaaatgaggctagtttcaggtgagaattctgcagcctgtgtctattgggcagatgctgcagtctgtgtcattttagccctaggtgacccgacatacacaagtagaacggagtggaacatcaaataaacaagcagagaaaacgagccataattttcattcctaacttggcacaaactaatgtacatagctcgactaaacaaacacgataagctttacc

SEQ ID NO: 18114 - DNA, 1047 bp, Zea Mays
ttggcttcatgctcaaagtggcttacaatatctttaagttctttgctcaaccgtgaaggaactagacactctgattggttctgcgggcaagcatggcctggcccatttgagcttggcccactagaaacaatatccatactacgtacccatgcatgtagcattttcgcctgcactacacggacgaatgtagccctggcctccacgtaagtaggtaaccaaagagagtctgtcacttggtcagtgcatagggagagtccgaatgcgcacgtctaggtaaccaatcgtgcaaagagtgaaccgttgaactcagtcttagactagcttcaacgcaacctatgccgcctcccttacgacactttagcgacgacactttagcgacaatagaaagcacgacaaacactacatagtataccccttcgtgtccccactacttcactgcatttttctccgtcccttttgtttcagtgtgcctctactacgcatgtagcgtacaattggtcaacgtctacctcgggtctacttcgttcgcgtggcttatagtacaatgaaaatattattttatgctgagtggattttaggagaggagggtaggagaaatcattgtgagatggagtgaaataaggtgagagagattgctgatatggagagaaagtggaatatagagggtaaaatttagggggcatcgttacacatagtcttaaaagtgctgacacacggaaagatagtgagtctgtcaggttgattccgagtcctgacacatgcaccactgcactcggcaccggcgagcaaaatcccatccctatcccatgcccgagtgggagctggtgggcccttgggcctgtgtgagttgggctagactacgttatttatggtaaattccgagatgtaattctagtaaattctgactaaaatcgataaccaaatgaaacagctagtaaaagaccacatcgattactgccggggcggtaattagggacacccggattatccccctaacgaacgcactcagagaaataaggaccaaactcccgaagggtaacaaccgag

SEQ ID NO: 18115 - DNA, 471 bp, Zea Mays
taagcggcaattcaccagacagagcccacgaatatgatctacgcgcctaggtgaatgcgaaagttggttccgtacctgataacgcggagatagcctggatgtccacgacgcacggcgctccgccactgcccaccaactccggcgagcaattcgatccgggccggaccaccctttcgtgcggttaggcactggatacaagcgtcgccccgataccagctcccacactacttttcgacgggaatccaatggtggcgtctaggctcccgatctcaccctctcggctccgctcgcggtgattgtgatgcacgagcactttggcaactacagaagggctgcgtcaagggaagggcatggtgtctaaatagcgcgaacggcacggactaaagaatctggccgatgaactaactccctacggacgcggaggagagatgttagcgtgcggcggaatccgcgacgagagcaccagagaag

SEQ ID NO: 18116 - DNA, 807 bp, Zea Mays
caagaccctccaaccagaccattcctagtataaggccataaccatccaatggtaagaacatgaaatcaatacaaaaagttattccctcacatagccattgacagtttggtacccatttttaacaccacaaatagtacccatcaactactttgactttaataggtctgatcaaattctgcactcctttcactacttccatcagatgggtacccataaaactattcgagctacctgaaaccaccaataccagcacctgttgacaatgaattgaggtccataaacggttagtcctattgttttcactacaacttactgctgccatagacatagccaacactgcatcctcattttcattttcagaatgctcatcctttcgatcaatgttctctcctcctccccctggccagtcacagcccacatctcttccaccatatgaagaggaacattgttagaacaatggtggttataattcacttttcaccacatttaaaacataaacccttggctctttgataagatttcaaggcagcgagcttctgatcctctgtcttgccactgctcctagatggcctgcgacgatctttcgacaaaggatggatccgacttgctgtaattgatacttgatttccagcaaatgtagcagtcttcatggaaggtctaggataaccactcaattccactcttctgccttccttctgattgggttgtgtcaacatatcctcctataatagggctagggctattgaacaagccgtgtctagatcagctaggagttgaatggccgccacagaccggatctcatctttc

SEQ ID NO: 18117 - DNA, 655 bp, Zea Mays
gggggatgagaggcacaagaaaagggaagcaagaacgaagaggaaattagaaaactcaccagggacacgtagccttggtcagggcgcatagggacggcggtggtgtagtttgcctcccccaccgtccccttcacctgctggaggagctcgttggtggagagggcagccaaggccatcgaggatctccacggaggcctcgggcatcatctcgtccaagcggagccgacgcttggtcagtggtagcaccctcattcagtggaaggcggtgatgactcttaccgcagtatggccacgatcccgaagcctccacagggcatccagcaatggatgcaggtgggcctagagctccagaggagcgcccgccaccagtgttccgccgccgcaaagacgacacattgtgtatatgccgacagtcgcttgtcgtcgttgcggaggtagaaccaccgaccctgccaccatttattcgacgaggtgagggtggaagggatgtacaactgcgcctggtccgagcgtagcagaagcgtgtagccgccggcccgcaccgtgtggtgcaccttattcatgtcggtggagagggagaatggttttgcccggaataggtgaagccataggtcctaatgggactcgatgcccaggaaccccctcacagacggcg

SEQ ID NO: 18118 - DNA, 580 bp, Zea Mays
caggattataattaccacgcgaaacaaaaatgtggggatactaatgggtgggatgactccttaccatctaaagcagctatcaaacgatgattgctggcagttgttcaaaaaacatgcatttgtagatggtgactccagttcacacccagaattagaaataataggcaaggacatcgtgaagaagttgaaaggcctgccactagctgcaaaagcagtcagcagtttactatgtaccagggatgcagaggaagattggaagaacatactaaagagtgaaatatgggaattgccatcagacaagaacaacatattgccagctctgagattgagttacagccatttgccagccacactgaagcgatgttttgcattttgttcagtgtttcccaaagattacgtctttgagaaaacaaggttggttcaaatatggatggcccttgggttcattcagcctcaaggaaggagaaagatggaagaaattgggagtggctattttgatgaattgcaaagcagatccttcttccaacatcacaaaagtggatatgtcatgcatgatgccatgcatgacctagcacagtct

SEQ ID NO: 18119 - DNA, 558 bp, Zea Mays
gtatgcttcaaggtagttacgccgacatgaggagaattatcccactcatgatctggagctagctgcagtggttcatgcactgaagatctggcgtcattatctactgggtaatatctgtcacatttatacagatcataaaagcttgaagtatatcttcacccagtcagagttgaacatgagacaaaggcgatggcttgagcttattaaggattatgaattggaaattcattattacttgggcaaggccaatgtagtggcagatgcacttagccgtaaggtttcctgtcactgtcttacagtgaagacctctgacaatacactatgccaggagatggagaagttaaacctgggaatgatccaacaaggagccttaagtcagctaaagcttgagtcagtccttttacaaaggataatggatgctcaaaaggataatgagggtatgaaacacatccatgagaaaatagaggccggaaaagccaaatgcttcagaaaggatgatcaaggcattgtatggttcaacaaccgcatagttgtgccgaagaatgaagagctccgcca

SEQ ID NO: 18120 - DNA, 459 bp, Zea Mays
gggagctgcccgaatccaggagtataagaacatcaatgccttgtactgaacccaaaaacttcatagttttgttagctgtctgtcccaccagtgctgccttagacagaagcatagagttgagttgagcattgggggattctgattggctgtcagattcagcaatgtcaagcaattgccgaagttcctctaccaaatgtagctgaactatgtctgaacatttgtgccctctggaatatgcgagcccacacttgtagcaaagtcccttcgccttgcggtacgcatacagattggtcatgcgttcgtcagtattggatcctttgaaccattcaggccaagccttggcaggttgctgaaacaggtttggcggatggaacctccttagacagtggtggtggaagaggcatgtgacccttggagtaagggcgagatgtaatcccttggtcccacttgcggtactcg

SEQ ID NO: 18121 - DNA, 517 bp, Zea Mays
agaagaacgcgggtgtggtgaatacgtgtccagtgtcgtggcagtaactccggtggtcgacgggaagttagagggagtcacggcgatgcggtggcgagattggtacacgcggcgcaaggccggagaacgacggtcaccggcgaagctatccgcgccagccgcaaagcagaaaaggaagacgacggtgagtcaccggagtgacgtccagtgcacggcggtgaagatctttctacccagagcgttatccccgagccctgtgcacgaatccaaacgccagcgacacgaatcgcggcagagggatccgtcggcggtgaggacagccgcgctggcggtctgatccgatttagccactgtaccatggtgaaacttgatttagtcgcctgacagcccaacttggagcgaggttttctcttaattactagtgacaacacaagtcaagctttgcagcaaacttgtagagcattataccaactacatctttgctatatggtgttgtcacaaaaagccagcagatcag

SEQ ID NO: 18122 - DNA, 339 bp, Zea Mays
atcggctttggttgagtttggatactaaccatgacatgagtttgtggtgcaacatgtctcttggcttgtggtatgcaggtgtggagcacagaggcagtggttgacgatgaaggtgaaggtcaagtgcgtccatgccaatggattgtgagtggtggaggagggacgccaaggcttggaccgagggatagaagaagctagagaaatgaccgtggtgactgacaccttcagacatcaacaagtgcaagagtacagggatgggtatatcatgttgacaaagtcaagatgacgttgatcatgtcaagtggaggcatgggaggacttggtgatcgagtggtcaag

SEQ ID NO: 18123 - DNA, 567 bp, Zea Mays
gagatggcggacagaaacccaggcctaacgaaataccaaccgaaccaatggaggagagggatggctagtctgtactcacctggggcagatcatactacggcgacgcggctgctcacagagggagccgaaggtgaagcagtggttagggcgtctatctgaatgtgtccatgcgcctgaccacagtccgggtccccacagtccgggtcccccatcgaaaaccgatctcccagcccctgccctctcgccaaggacaacctcgcagcagcgcccatctagctccgtgtcgccatgcctcgcttgggttaggggggcacagtgcatctcgcgggcgagattgtcgaacgacaatcgtgagcgggggcacaatggggctgggcaagattggcaggtgtggctgagatccacgagcgtggccggtgagggcatgacggtgcctgcacgttcgtgtgggcaagatacgtgggcgggggcagggacacggtgggggctgggcaagatctacgggcgtgggcgagatctgcgaacattgtcgggcgagcgagggagaaatcatttgttgcaatggat

SEQ ID NO: 18124 - DNA, 619 bp, Zea Mays
gggcttcggaggaagacttcatcctaggcatgtcaggtcaatccataactctaatgccaacgatgaaagggccaacaatgcttaaagcagccatcatagctcatagccttcaggcatgcagcagacttcttacagaccactagctctaagaggcagaggaggaagaagcttcagtggaggaaggttcggtaatcaacccaggaagttgtactacctcttctgtggcgaggacaagggccacacaacaaggacgtgtcaggtcacaatttagaagcaaaaggaaattgttgaagccgaggcgcgacagacccagccgaagcaagtcctccatactgctttgtgctactctccattcatcccagaatatgtaggcaaccaatagactatgacttctgtagcttcaacaagtcactcccaagctcctgggctcaattaccaccacccccaccaatggcacctgccccaaaccatgatcatcagccagaagggcaccttcggcctcaacaacaacatgatattcaggagcagtcttaggctcgcacagttaatagcactatgcccgaatctaggcacatctactgaagatgacacaacgttttggccaaaagaaagccctgat

SEQ ID NO: 18125 - DNA, 608 bp, Zea Mays
aattgaggttgactgtcttgcacggctttactgtcggctggctcatccagcaaatcccaaacctcctcaataaattgtagttgcacagtattggggcatttgtgtcctctgaaccacttttctgcacagcgatcacagaggcctcgggagcgacgataactctttaatgaagcgacacgatcggttgatgaacccagccggcggccgtccgtcaccggcttgtcaactcctggagttacgccatcatgatcagtcgtcgttgttgtgtgaggccaagccatccagttggaaataggctcgacccgtcggtgtcttgtggattccaacgcctcttcctgcacaagagccagagcgcaggcaacatcgaggttggggggacgctgaaccataattacagccttattgtcatgcctaagaccatcaatgaaacgcatagtgtaatacaatggatcggtgcgagattcatatgctgctaactcatccactagtgacgcaaattgttctatatactcggacacaggacctagctgcctaatatgaaacagctgtctaatcagtgattcatgttgctccctaccaaatctctcatgaatgagctcacaaaattc

SEQ ID NO: 18126 - DNA, 1252 bp, Zea Mays
ctgccgccagcaaagaagacagttgctcaaaccgccatgagttcatttgttgtttctgctcctccaaagccaactacccaaaaggcaagcaagtcagtgaataccaagcttcgcaagtctccagaagtagttgtagagaggcataaaaacaaaacctcttagtctacactagagcactgcacaaagaaaggaaaaggaagccaaacaaattgttgacgaccatgttgatgattttctttgagaacaagattccaatgcacgtcaactcaaggagttgggaggttatgttggattccaatgggcagtatcagtatggtcctagataccgcggcctatcataccatgacgctagggtactttgtcttgagagagatatcaagaggacatcaacattgaggtagaagcatgaagaagcttggaaaaaacatgtatgcacacttatgttagatgggtggaccgatactagacaacgtcatttgatcaattttctttttaatagtccaatagggacctactttctaggttctgttgatgcatcaagtgaggtagcaaaggccaatatgttggctgatttgttgtagaagcaaattgacaagattgggatacccactttgtcctaacaatttggataccctaacaggaccatatgctcaccaccctcgtctactctggctccacgccatgcttcatggcggctcaggtggcacgccggctccacctgactcccacgaccaaggatggcacaacggtggaggtgccaacggcaagcatctgtcttacctcagggtatgctccgcgctcacgttctccatcgacgacgagtcgttccacatcgacttcctcgtcatcgccttggaaggttgagccgatactcgagtgcaactggttgcacactctcaagccaatcatctaggaattcttacgcactcaccatggcgttctaaaggctcaacaactgggtcacatggacaggattgggcgtgtctcgcccgccggcattcgctctctccaccgacaatctccggcaacttatcgcaaagttcgcggacatcttcgctgagccaacaggtctgcctccatcacggcccttcgactaccgcatacccctcccatcggagcgcgccgcctatcgccatcagaccgtaccgcaacccacagttgttgaaggatgaggtaaagcggcagtgcgacgacatgcttctgcaaggcatcacaaagcgggcccaatacggcgtcgttttctatacctgcc

SEQ ID NO: 18127 - DNA, 698 bp, Zea Mays
ctaccttctttctctctcacctcattgtgccagtggcgttgcagcggtgagcgagaacaccgcgagcacgggcacggctcagaaccacagaagagcgtgagcgcgtcaagcggctgcccgtgcccggtacacgcattattgccggtacttgcctcgtttatttatggcaaccggcactcatctatataaggtttttgccacaatgcttagggaacgggtggagccaggtattagtaggcgtacgtacatagaaggggttggagctgggcgaaaaaaaattatgacagaaattgtctgcttaacatatagttgtatatgaatagttattagtaggagttcgtacgtcgttaacaaataacaaaataatgtgacgggattattattaaggaagaaaaaagagcaaggaaaaaaagagtcttgctagcgactagtggttgcagtattattgcagtccgcctgctcttcccagtggggaagtgggcacctcggaagaagttggcatcgcgcggctgtgtggcgcctgcatatggcaagctgcagcgacaaggctgcttgctccaccagtgaaacaaaggcgcccagccagccacatcttggcttggtcgatcgacgacggattccacttccaacacggcggcgatgcacaaaacgcaatcgcatctcgtgggcggaagatgacccaagacacactgtaccgg

SEQ ID NO: 18128 - DNA, 806 bp, Zea Mays
tttggatttgtgctgatcagaaaaatgcttcttgcgtaagtgaatccaaaccaagtcccccggttcaaatatcactttcttcctatgcttgttcatgcttgcagccttgcgcactgctttgagctcaattgcttccttagtcttctcatgtatcttttttatgtatgaagcacgcttggaagcttccatattggttatttcctgcaatggaaggggcaacaaatttatcggagcaataggtttgaacccatatacgatttcgaaggggcataaattagttgtagaatgtactgccctgttataagcgaaatccacatgtggcaaacattcctcccaatccttcaagttcttctttaccattgttcgcagcagcattgccaatgtacgattcaccacttcagtttgtccatcagtttgggggtggcatgtggtggagaacaaaagtttagtcccaagctttgcccacaatgttttccaaaaatagctcataaacttcacatcacggtcagatacgatagtcttgggcactccatttagcctcaagatttctctgaaaaacaaattggcaacatgtgaagcatcgtcgctcttgttgcatggaataaaatgagccatttttgaaaatctatcaaccacaacaaaaatagaatctctctcttttttgagtcctcggcagccctaaaataaaatccatgcttatgtctccccaaggaattttaggagcgggtaaaggagtatataaaccatgagggttcaattttgacttagctttgtgacaggtgacaacgctccacaaatctgatgac

SEQ ID NO: 18129 - DNA, 1595 bp, Zea Mays
actatgaattaaaaaagaactagctaataagaatgatgaaaggtatagcataccacattacgccaacagcaattgtaaacaagatcgttgagaagatttcttgagcaaaacgtgttgatctacctgtagatttggggtcaacctaatgatgcaacaaaatctatcaaaacatggtttaagaattatgatcacaggataaaatttggcccctggcctattaacacgagcatgaataataatcagtagcattcctcaaagatctggtagacttaccattacaacatgtaaaggttgcttttctgatatcccagggttcatgaaaggtttgtcctcattcccagatacacgttgtttcaactcttgcaactactgacataaatgcatattacagaccgtgaagtggttacaacatgccaagttaccaacatggtaactaatacagagtagaagttaacacagaatggcagaaagcattgtggaaggaaatgcatatagttggaagttataagctttgtgcttttgcaggatcacagcaatgtttgtctatatgaagagccaaacaggctttacttgaaaacaagtgcttcaacaaatggaataattgcttgaacatccctacaaacatggaaatacattgaagaatacaatgctgggcaagaatcgtatgtcattgtgtgacatgtagatggatttggaaaattgaatgtcagttaagttacaaaacatggtccaggtctttttcctgaagctacattgacagaataatatagcgcatgaaacttcatcatatatattttaaagagttgctaaataatcttaccagggctggcaggcttgcagacctcccagattgttcatctggaaggtaatctgctatagtgttagtgagaataagtgcccgcaggtactctgcagcccccctgctatccacagcatggcttcgctcctcaaaccttttaatgacatcttcagggctgcatatttttggtgcacaccaaaacaggaaattcaaacaggtgaaaccattcttcagtttctaattcgaagatttgatgcaatggtcagtacaaagtccaaacaacaaaaccaacaaaagaagcaactttcttcattgtcatatttatttcaaattgcatcaaaagatggcacggaaaaaggactcccatgcttatgtcaacaatacgaccactactaatgatgatgcagtactaggacaccaaccataagacaaattggacgaatttatgaacgttcaagaacatccaaatttgtgctttctcctaccaatgatccaacagtatatgaatcatcaagcactcaccatattgcttattttcaactttgtgaggcaaatcagcatagagggtatacggtatacctagggcgcagaatccactcaatatcgcgaaacttgggaattcatacccacaaatttctcaagaaaccttgccacaattgttccttaggtaagtcaaaccgtataaacaaccacggcaaatccactcagccggaaccacattcgcccaattgtcaaagtaaaacaacgcaccttaacttgttgagctcgtgcaggagcgcgctctgcttggccgcgt

SEQ ID NO: 18130 - DNA, 950 bp, Zea Mays
gtgaaggcaaggtgtctgtcttgtgaggagtgtcttccatgctgctgcttgcaccttgtgagaacataagcgaagactggtgtgtccctatggttgatgttgaaatgtcaacattttgattgcctagttcctttacagtagcattgacctggaagcagacgtttccagagttaattgtgtgcccagagaagctaacgttccaaatgaacgtcctttcaagcagctttgtgattgcgtctggaataaagcctgatggagtgttcgctatgagcatatcgcaaggccttttgacaattctttgagccatgtgcccaaagagaatgaagtctgtatcagctgtctcgtctcctgcagtgacaagtattttatacctgaaataagaggtgtcaatgacttagtgtggttaacatagtaggcttgtaagtcccaaaggaatctatatgtaaacaggaaaacattgacataaagaaggtagaacgtttttgtgctgttggggagctgaggggtgatagagaatctagtatatgaacttgttgtatagattcatgtcatgtttgatgcacacaaaactggtacattgagttgaggaagggaagagtgctgctcaactcgaggacacgtcatctaacctttggacgggcataacaatgttagcacaatcatggtttgtgcatttgtaagagtctccgtgagtgacagctgtgcaggcgcattttcggcacgagttataccaccacttgctgtcaattttccttatagtgactgtaaccaagaattcctttccctgcatggaaaataagaaaaagaggcaatctcaaataaatgtgttatgctgaaacctaaatggttgtaactccagtctgcctctaatagaaaactgcgggttcaatggcatttttggggagataaatgtttgtagcggtaagaatccaagtgggcaaataatttgc

SEQ ID NO: 18131 - DNA, 368 bp, Zea Mays
ttcttgacagaacgacaacactggatataaccagaccgttcgaacctagtcacgaatagtccgatcacaatacagaccgtccgacactccctattggacagtctaggactacgccaggcccaccatgtggcacccaggcaatagtaagcatgaccggacaattcgggtataatatcggactgttcgtcatcacaacgaacagtccgaatacacatacaccaaatctgttgttgcacatgacacaccagttttttatgcaccacaacagcaatatattcgtccccctacatatcaaagccacgacgctccatatgatcataggcagacattgttttcgatcagtcatgagcagaaggtcgacataacac

SEQ ID NO: 18132 - DNA, 355 bp, Zea Mays
ggggaattcatccattaggggacggggatggttacattttactccccatggggaattaaatgggggaagaatcatccccgtcgggtctggcggggacgggtatggtagcctgttctccgtccccgatccccacagggccccgtataagcagacaacaacaaattcggcccatggaattaaggcacaatgaccaacatatataatgtgacgagcaagtgagaaaccctagcttcttctattttgtcatcgtcaccgactcgccgctctctcgttcgtcacttcgtcctcccaaatcccaatctccctccagcttccactgtcattcatcacttcatcctcccaaattccaatctcc

SEQ ID NO: 18133 - DNA, 514 bp, Zea Mays
cggcagagccaacccgctggggagtttcgaaacaaagaacacaaacactttggcagcaaggtcgccgagaggagagacagcagcacaagtcctcccagcaaatgccagcacaccccatccgagcgggttgcgcgccaagttgagtgccacctcgggctggaagcgattgcaagggtctagcaaggccatggtgactacggcaacgcgaagcagagaccttgaagcaaaggggcgcggagagctcggaggcgaaaggacgtcgcgagtgggagagaagcaagacatggctgctactcgagggatgaacccctctttaaaggcaaactcccctgctcctgcctcgaagcgccgcgagaagcctcccccgatgcacaccggggtatccatcccatgacacgggggcccggtcccacaagtcatacaactggcgcgctggtcctcgagtgcgaagaaggcgaaccgccacacaaggagcgtgctaccgccccgcggtagtgcgcccccttcatctttg

SEQ ID NO: 18134 - DNA, 1102 bp, Zea Mays
gcaaaatcaaagctggattatagatcaacaactttgttacagatgaattaacatgttgtcacataaaaattagagaatgaaggcctctaactcgctctgtcaggcgctctgatgggggttctgatggtacagtggcttgacaaagaccagcagatgcagtgcacctcatcgccgatgaccccgcggcgcgatcctcgccgacgctatgattcgtgcccggtggcgcgcggataatgacccggggtaaaagatcttggtgttgggatgagctcagacccgaccactggattattcaccgtacccacttgttgtacgaccaaccgaggtgtcctcgctatagttcgccgcctttgtagtcgtgccacgtgcttaggaacgttaccatgtcacagtgaaccgtaagagggagtctgtccattgccgggagttttgcctcagtgaaagccacgttagcgctcgccggtgatttccccctctctctggccgcccgtgtgtcttccccaaattggatgccaccgttgttgatctctataaattgagcgctcagcgtgctccgttaggttgttacgcaccaagtgcaccagctctcgcctctgatcatccaccgtagcgtcccaatttcacttttcccccaattctgttttccgcgccgccatgaacatctcgtcgtggccagccatctactggtcagttcaagattctctgcttgatgttctagcatcccttaagtttcctgttgctcatagacccgtttgattgaactagaccgcacggaaacaccaagaacacctcggtttgtctccggtattcaccgctgtcgtgggtagatgaactccgggccggattcacgcaattcatagaggaattagggtcgccaggggtaggaataggtgtcgaatgagttagggcatcagtcgttgcgcatcctggccactacaagctcgccggagggcgcgctcaccgccgttcaccatcggggacctgggtctgctaagaaacaaaagtgcaagggattatgtgcaaacgtcagagacagatgaatagcgcgcaaggattcttaaccagtttttcaaatagccaaggtcctctatgcaaagtcacc

SEQ ID NO: 18135 - DNA, 557 bp, Zea Mays
tagaaatgaggctagtgctcaagtgaataagatgcatttattttcaaactgttaagtaaaactgtttcttgtagcacggtagtacctttacattcccagttgtcacacaagacatcaaagcctgcaccattctttcaagccacacaggatctccataaaaaactgaatcactgttactaaaatcttaaaattgtgagttagagtaaccagtaataagaatagtcatagtcactgatccatacagaatgttctgctaccttgggtcatttattgtgccggcgtggtaattgaatctgataaatcttgaaagataaccaagagctctaacagcgtttgattttacctgaatgaaaatcaaacaacttttttcaccacacatacaagcaggtttgcttagtttacttgtttcacaatgaacatcgttctccaactatctctgtatctgtattccttgtggataaaaccaacagtctgctatggatgacggcgaacaaacaaaaacaagataaataaaggcaacatatctagtgtaaaataatgatgctaacatcaaatct

SEQ ID NO: 18136 - DNA, 371 bp, Zea Mays
ctaaaaaccagagaatatatggtccataatataaattttagggctcgaccataatgataataatattatagggttatttgtaaacaaagatggggtctcttttgcagtctcacggccgaaagggtacgagaccatctgggtcgttggatcttgctctaaccgcccagattaggcgcacacaatatgaaccgatatgtgatactgaccgctagatctaaggttgaaggctcacattcctcggaccgaaggtgtacaccacagatgatctcgccagtccaaatactatcccatggttctaaacctctcacacctccatctaaccatggttgtttatcacgagattgacgtcactggcttcttcttcctccccg

SEQ ID NO: 18137 - DNA, 523 bp, Zea Mays
cttagagtatccacaaaataatttgttcaaaagaaaaggggcaaaatgggaaataggaattagaaagtaaaaagaaaaagagaaaagctttctcctctccctgctggaccgaatcccggcccaaacccgcgacctcccccttcccacgcgcccgcgctcctcctctctcggcccatcttcggcctgcctccacgcgcgcgcgccagcccgctccacaccccgcatccctctcgctggcaaggcatccccacccgtcagccgccctctctctcgcgcgctcgctccctcttgtagaatggccccgctggtcagttgcttcgtcgtccttccgccgtcccctcaccgaagtcacctccggccgtcgcctccgtcctcccctctgccatctcgccgcacagggaagtttggcatcgctttgtccccccccccccttgaccagcgtcctcgcgggtaccgccccgccgtagtgtcccctcggcggcgttgtgcggcattaatggcggcactgtgaagctcgccggag

SEQ ID NO: 18138 - DNA, 680 bp, Zea Mays
cacatttccctttcagagagctcaccggcgctttgagctgtcagccttccactcagtaactggttcagagtctgagggccacatcacttatctgccaggtctatactctttgttgacttttggtggtcggtacgttgaggagtgggtcagggtgttctatgccacaatttgggttggccgtgaccatcagtggatgaggttccagttcgagcgaaatgatgtcactctgcgcactgctcagatccgggagctttttggattccctgagtcgatgacgaggctccacaatgtatgctatagtactttagaccccctcgtcgaccttatggaggagttgctcctggtacagctcacgttgccgctcttttcaaacctccgttcataaatgattctcggcgctcccctgcagtcttcaccccaacgacgaagttcctttatgagttgatgaggcgcactctgctaccgaggatgggatacaaagaggctaccacacatattcagctttggctccttggtgctttggtttcccactctgtgttcgacgtcgtcgatttcctgatctgtgaaattgaggacacaatgttgaatggacttcgagctcggtgttagctgtcatattcacattacctctgtcacatcttcatgcagttgattctaactccttagttctaggcagctct

SEQ ID NO: 18139 - DNA, 440 bp, Zea Mays
ttaggcaagctttactccaaattttgcatggggtcatgtcaaactcactaagaaaatttgttcaacatcatatggacttcaacttctctataaacactatagtctaaagttctatggtttagccacaaatgagctccaaaacaacacactcaacacggaaactccactcagttcactattcaccatctgaaattccatgagtctgtcaacacttctttggaccaccttttctgctggtagcatatacttttaaggccaagttgcttaacaaagtctatacttcaatagttcctctacaagttctatatagtgacccttagctaaacccttttggattccactctaccacagcccaaagtttgcacaaaatactgaaattcagactctgaattttattaagtctgaactccacactttccagcagctctactttagaccag

SEQ ID NO: 18140 - DNA, 1954 bp, Zea Mays
gatttgggtctgggcaccaaccctcgttggagtcgcttggggggcgaaggctggtggatgctgctgcgtccctcgtcgcgaaaaggcgcgtgcttggggggcaggatgcatgcacctgaaccaccagtggagtggagatcaatggaccagcagcctgataggtatattatcatcagtaatatatatgtttgttcattggacaataatgcattgaggggaggggaagaccaaagcaaagcagataatgacgcaatgtaggccatcagaacaagattaagatatagctttgcagattatacgtatatagctgtacagctattcagaggaataatagtctttattccggtctcgatctccctactaggaggctaggatacatgcactccattatcacgttgtcttaccaccccagggcccagggatctcaattccattattgagaagaatcaacgagccaatgacagagagcactctcagaatgctgtttcctttattttggtgagggctatcgaagcagccccccatggcgagcggaaccatctccggtgccgccgccaaatccaccagccgccgcttggcttccagcctcaaaccaccgcataggtcgatagatcaggccacaagctaccgcccgcaccctgtctcgcccctcgccccatgtcccagtcatgctccccagctccccacctcgccggcaaagctgtcagccatggcgcattacggcctcaaatccgcggtcgcggggccgcccaaggctggctccctcgccaagcaagttcgattcagaatccctgccacatccctcagccactcacgcagcaccgtcgtgcgtccctggagatcgtctgtcactgcaaatcagcattcaagtctcctgtacgaggcgccgctggatgccagcctaggtaaacctactgaagacgaggtcgatggatggacaacggtccgttacaggcgtcaccggagggtcaacacacctgcgcattcaagcctcccaacaacccggcacactgcgctgcgctccccggccagggaggaattgatggcaagcttgagaggtaaatgcatgcgctgcttgtccagaggccactttgctgcagattgcagggatccactgaaatgcctcaagtgtcgaggttcaggtcatatggctcggcagtgccctcagagaagtagtagcagcagcacaccaaccactccacccccacatctcgacggcccctgcttcccacctcttgtccagaccgtcatggtgaggcccggcgacccggacgcccgtccgaaggagacgttcactgtggcggcctcctcccaggagatggaccgggagcttgacagtctgagcacccatgccgtggtggcctggctcggaggagttcggccggacacaagccttcgcacggtgacgagggcgttctgttcccagttcggcgtgcgtgcaaacgacatcaaggtggcagagcattacccagaggacttcttcatcaccttcacgcaccgtcaccacagggatgcggcggtggcgcaaagagacttcaaatacggcagcatcgacttccgcgtccgacagtggcagcttccaacacatggtgatcacgacgactttcagtaccacgttcgcctatgtctagagggtattcctctccacgcctggaatgagagcatcgccaagagagcagtgacaagaagctgtaccctggactatgttgaagagcagtccctgaggaaggaggacgcgcgaacgctcaatctctgggcctggacagtggatccgtccaacatcccaaaggtaacttggttgaccattgttgggaggacagcactggtccacgaaggagatgcaccaccagcggcccgcagcggcttgactttccgcgtcatcgtgcacctggacttggtggaggacccagcaggcagagggggtcgcgctgctccccgtgcctacagctggcgg

SEQ ID NO: 18141 - DNA, 518 bp, Zea Mays
cacgaggctgatgaacatccttgaagccaagcaccagtggaagagcgctgctcccacaaggccgtgcacctccagcaaaggaaagacaagactggcagcaccaacccgctggggaggacaaaaggcacgaactctccaatggcaagttcaccgaggtggatggcgccggcgcaaatccttccaccgaacaccggcacatcccatccaagaaggcggtataccatgtcgagcactcactcagtctgggcacgctcgggatgaacttacaaggccatggcaaactacggcaatgcaaagcagagaccttgaaggcaaaggggcgcagagagctcggaggcgagaggacgccgcgagtgggagagaagcaaggcatggctgctactcgagggatgaacccctctttaaaggtagactcccccgctcccacctcaaaacgtcgcgagaagtctcccccgatgcacaccggggtatccatcctatgacacgggggcccggttccacaagtcatacagctagcg

SEQ ID NO: 18142 - DNA, 296 bp, Zea Mays
tatcacagaccatgtgaatctacaatcagaacatatgctttgactaaggctgatggatcatattcgcaggcgtccccgcggaatagatcaaatgccaataagtcaaatgtggatatgatattaatcccgggtacatccacatctacatcaggtagaagcattcaaaccaatatggttaatcctcaacgatttctggcaaactccatatacacaggggtacacactaaacgacaggttcagtttggctttcgtgcgttttatagaatattgaggcattacacttagatgggcactcc

SEQ ID NO: 18143 - DNA, 398 bp, Zea Mays
ggtttttccaccccttgttctctaaataatacaccatatcaagccaactctcttcatgaaacttgctatccttcagataatctttaactttgctacatagagtagggctcatactccatgggattaattaccacagagctccaaacagataacccaacactgaaattcagtcttcaatacactgaatataactcagtttcagtcacctgacaatccaactttgagccagttttactccacttttcgtgtagaatcatgttatatccacttactgaaaactattcaatatcatatggtctttatttcatctacaaacaatatagcctaaaaccctatagaatagccacaaataggtttcaaaactgctatcaaaacactgaaattcagttttagttact

SEQ ID NO: 18144 - DNA, 485 bp, Zea Mays
gcgggccgcattgccattggtggaagtcaagggatcgagatagccagggttgtcccaaccagcacaggatgatatgtcgagtggagtggttcgccagacccatgggtggcagcgtcgttgatgacgctgcgaccgttagcaccaaggtctgtgttgtggttgtttttggaggatccaagccccatcctaccatggaggtagtcggaactgctcatgaaagtgcccctacctggtacgccctgacgacgtttgtcagtcgagggtacagaggcgtaccacccataagaatcagtagggggctttagtgtgctgaccttctacccaccacacttgtcaagccccgacccgattaccaggaatatgagcatggagaacatgggaaatcttatgatgggagcaaaggacttaggttcggactacgagagtgtaatatcctatgtcctatttggatgagatgaatttcttgaaataaccaattgtttgta

SEQ ID NO: 18145 - DNA, 558 bp, Zea Mays
gcggggtgtaatcatattgcctgagtagttgaccttggtccaaacggtgtcgcgttacgcgaagcggcgcctgttgcctgactcattttcaggcggcttgaattgcttattgaatacttgcgactgttcggcgagcgtggtaggaagtggacggtcacccctggcctctataaatagcctgcttgcctcattgttctcttcactcatccttcaatcatctgctgctttcttcttcttcgctctctacttctccaaccaaccatgggtagaggcacgaggggtcgtgattggcctcgccacgctgacggcaaacgcacgtgtgccctgagtcccctcccccctcggaggactttggggactcgaagtactcggaggaggcctcctccgagtctgaccgctcgcctgctccggcttctcccccggcgtcatccgaggacttggatgactccatggggctctccactatggcccgggcatactccgtagaggtagtagcagtaaaataatgtagtgttagttagtagtgtagtgtagtgtaagtagtaaggtagtgtaatg

SEQ ID NO: 18146 - DNA, 1113 bp, Zea Mays
ctgttgcgtgcgtgcgggtcgcggtcgggattgttgggatactccgcctcctccgatggactcctgggtatatatgctcctgccccggggtcctctcgccctgcaccagtagccacaccaagccatatccgaagccctcgtagctaacttatcgtaattgccgtaagaacagagaagaggaaggtatgggagatagaccctggagaaccataccggcggcgcaagaagtaggtcgggcgcggggtagaagcttcccggtgatgcggggttcatgtggggctcttttgggtgatgcgggtcgattgggatggatgaattcctcgccggtggggacgaagcgctgttgtccgccgcggatctgctctcaaccatggccgtgattctccaccgccccgacctcgacgacgtgtgggggatgatggtctgggcaccagggacccgtgtgtggtactcccgaacgatgtgggtcacctgagcgtcgggaatccctcaccggaaacctccatacaccacggtgccgctatccagtgtgggcggccggatttttcgcctccagcgtcggtacaggcactctccatcactttgccttccttccctcagtgtatagcgtcgtccgcgtttaggatttggggtctctggtgctctgtgcggggaggaactccggtgatctccatgggtggagctcggtctcgccgccgccactgcctggagatgggctggtgagggtgttgtgggacgctgaccgtcggatctctagacggacgcgctagattcaattctgcattttaaagatctggagcgtcgatctcttgatggacggtcttgatgggatctaacatatctctttgactaaagtaatctggaccgcgtatccctgatccgacgtgtcaggttgcataccggttcacacgctgtgcgatctaatctgatccgtctgttttggatcggacggctcagaatagatcttaccctttcggccatgccattatgcaaaagagaccccgaaaaacttgctattcaacccgccatccaccgcggggtaagtctgtgtcatgggtttctttcgcgttagaccctggacttctctgtaattgacgctcagtccagaatatt

SEQ ID NO: 18147 - DNA, 427 bp, Zea Mays
ggaccacgtcgtcagttctacccctttcctcacccatctctccgtcgcgctcggcggggatttcgcgggtgattcggcatggcgaccgcgcacgacctgtcgagaccgcatcttcccagaagtataaaagctccctcacagctatccatcccccacttctttctcccccttttcttagcctcgtaaccacctccgtgcggcgaagaggagttcgacacctgcgaggcaaagctctgcgccgaccttgacttcgccccagaccaccgcgccacccatgcccgtttcggtgtgtgaggagtctcgcctgacgccactgaagctgctcgtcgcatcgcttgtcgagaaggaccccctggacctcggtaatttctcgacggagaccgctacacccccgccaatccgctgctcaccgaggaccggtctctag

SEQ ID NO: 18148 - DNA, 502 bp, Zea Mays
atttggggggaatcgcgaattgaggagctatggtgaacgtttggaggcaaggagcgatgcactgggcgcgtaacaacatagaggaacacgctgaacgctcaatttatagtgatcaatagcggtggcgcccaatttggggaagacacgctggtggccggagagagagggaggtcactggcgcgagctatcgtgactttcactcaggcaatgactcaggcgatagacgggctatctactgcggtctactgcgacgtggtgaaacgactaacgacgtggcataatcgagggaaacggcggcacttcgtcggcggtcgcgcagacacgtcgtcggtgcaagtgggtacggcgaggctggttctatccattcccccgtggatctttttacgtctatggtaatatcctgcccgagctgagcacgagtcacggcggaccgcatggattgcggtgcggcggtcaccggcggtgaggttcagtgaacccaagatcttcttcagactattgt

SEQ ID NO: 18149 - DNA, 621 bp, Zea Mays
tgctgttagaattgaggtgtgacttccccttgctgttgggaatgacgccatgagatattgtatttgtaagacatagtaatttgccttttagccctctttgcaaaatgaaccaactcagtgagacatgtgtaattttccatatccactttatcagcaatgggtttattgaggcccaccagaaaccgagccattgttcattcctcagcatcagttatccctgtacgaagtaagcacatctccaattcttgaaaatatgcatcagcactgcgattaccttgcacaagacgtttcagcttcaaatgtagatcacgagaataatatgcaggaacaaaacgacgtctcatttccctcttcatgtattcccaggttatacggtcatgcccaactctatgatattcagtatggatctgattccaccaagttatggcatagcctttgaactcaatggctgcaagctttgccttcttttcagcagggtattcatacaaatcaaatatttgttccactttggtttcccatgcaaaataatcatcaacattctccttgccgctgaatggaggaatggacactttaaccttgctcaaaccatcatcattctgacgttgtttaggatgacgccgc

SEQ ID NO: 18150 - DNA, 315 bp, Zea Mays
ccggtgaccccttcgccgggattagtgctgctcgccgtgattcgtgcgtgcgggctgtggattgagttcgccggcgaaaagatctcgtcgcagataggttcaagtattgcggccacgttatccctcagttccccgcgccggcgacgtggccttacggccgtcaccagaatccgcgatactcaccacggttgcgccacgcctccagcctttaaccgtgccgccgtgactcgcgttagtcatccgatgatcgctggggtgcttgccacggtaataggccaccaatcccgagcgccattaactcctgtcttctccggc

SEQ ID NO: 18151 - DNA, 315 bp, Zea Mays
aaattcaaaagtgctccaattgcgctcacatccggaagcggaacaacaaaggctaacgatgcgctttgcaaaggattgaatctcaaatgcaaggccaccatatgcatcccaccaacgaactaaaaaaagagaagagaagttgaattattgttgccaaccatacaaaacttaaatgattaatgaggtaatggaacttactggggctctttttttgtatttctctaattgctaatggtgatgagaaggcagggccagccatattcatatactcatcagcttgtttactgattataacttgaaggtcataatcttcaa

SEQ ID NO: 18152 - DNA, 297 bp, Zea Mays
cctttctcttcttcctttgccctttctacttgtatggctttgctggagaggtgcgagaaactgaggaagtcttggctggctaggatggtcttgagttctggtctgagccccttcaggaagcggggcatcttattgacttcggtgctgacgtcatccggcgcgtagcgggccaactctgtgaatttgtgcacgtactcactgacagatcttccgtcttgagtcagttcccggaattcatcttccttgagctgaacgatcccttggggcacatggtgctcccggaaagccgtttcaaac

SEQ ID NO: 18153 - DNA, 644 bp, Zea Mays
gcggcttcacgagcaagtagcggcactcaaatttctctccccccgagcgcggcaatggaggccaagggagtacaaccgaggcactgagcacggtgaatcccttcccccgtcggtaaggctcacatcatcgtatgactttgtggcgaccccaggtttggggtttgatgaatgagggaggtcgctgatggctcattatatactccagagtccgagccagtgcgaaaacgaccggcgcaggaatctcggccatgcacaaccgtgtaggcgccggatccatagggataagtggagcgcctgaggataagcatccggggtcctagcttttaggtggtgagggggaaggtgatttgttaggatcttgttgggatcaactcccaaccggatatgcagatacgaacgcagcgccgctcgctccttgttccgctcgggatgggatccgagagacgcaagcaggacgacaatgctgacattagggtcccacacgcgagcgcctggagccgagcactttgctgcgcgtagacttgggccgcgcggagttggcccagtcggccgtagaagggaaatgcaggggcaatgggcagaagcagggaatccggccccatggacacagggtgagtcttttctttttatttatttattttttt

SEQ ID NO: 18154 - DNA, 513 bp, Zea Mays
acaagccacaacagtggccaaaacaaaaataatccaaaagaaaaccgaaaaaaccacaaactagaaagaaccacaaactagaggttggattttctccccctttttggcaacaagtaccaaaaatggagagagagataaggatacatgaatcaatatcctccaggaggaggatatgacagaggatatgatggagggtatgaagtgtagtcagggaagagggtcctcatcacgtcctcctcaaatgtggagtcccgaggtggctcatcagccgcagaaaaaacagatgccgaagatgtacgatgatcaggaggaggtggagggtggtgatggtaaccagagcaggatggcctagggtcaccaggaatgggtcccggacccgggtagggaggcggagggtgagaggatgattgacccggatccccatggtagggaggcagggcaaactcctcgccatcatcaacataggctttttcttcttcatcgtctgcagacataaatggcaccccgtaggcc

SEQ ID NO: 18155 - DNA, 514 bp, Zea Mays
aacaagtagggagatgggtaatcaggccgcctcagtagcagcaagcacccaactgtctcctcgtccccgctccaaggaataatcagcccccacgacagcaacaacagcagcagttccaacaaggaaacgagaatagatgcttcacatgtggtaacattggccactacgccaaggattgcccacggattcaaccgagacaggtgccagctgctagccaagagaaaggaaaggagcaaaaggtacaagtcacgcaaggaaggctcaatttcactactctggatgagctacccgaaggagcacccatcatgactggtaccttctcagtttttaatcaactagctttaattctttttgactctggtgcatcgcatagttccattagtcaaaaattcactgtcaaatgccaactgccccaagggggttttatgatagcaacgccgggaggcaaaattgccaccaatcatttaaatcgaagtgtgcctatccaattggagagcaaaactttcaaaaccac

SEQ ID NO: 18156 - DNA, 608 bp, Zea Mays
cgaccagggtggcctgggaggttggggaaggcgcggggaatcttctggtgggggctaggtcaggacaggggcaccgaagggggggcggtccacggcgaagtggctcggcggcggcgctaaacgactccggcaagaaattgagcgcagcagggtgcaatagaggggaagggagagggcgaaggaggttccttacctcaaggcgaaccccggggactccacggtggcggcgaatgcacgacgatggcccgggtcgacggtggcggaccacggcgactgcacagaggacggcgggtgagcgcgggcagaggaaattagggagggagaggggaaattggggcgcgtcccgggttgcggacgtcgaggcgaagctcaccacggcagagggcgcggcggggctccgacgtcgacggagaaacgggctcggggcggcggcggttaatggcggcggcgctttggcgtgcgcgcagcgtgggggaggtggaagggaggtctgcaggtgcgcaaatgagggagggagagagggtgggctaggctccgggctcaagtggccgagggcgaggtggttgcgagcttcacgcgcgacgtgggcgcggagaccgcggcacgcg

SEQ ID NO: 18157 - DNA, 407 bp, Zea Mays
gggcattcagggttcccagttacataccgtcgcgtgaaacagctgtttgcttggcaaggaatgaaatcaacaattcgcaatttcgttcaatcctgtgatatctgcgcacgtgccaaacctgataggtccaagtatcctggcctgttgcagccccttcaggttccttctcacgcttggcaagtgatctcgatggactttattgagggactgcctaaatcgggaagatatgactgtatcctggtagtcgtcgacaagttttctaagttcgcacatttccttgcattggcgcatccatttactgctctgaaaatcgcccagctgttcatggattctgtttaccgcttacatggtctaccagaggcaatcatctctgaccgtgacagaatttttaccagtacattttggaa

SEQ ID NO: 18158 - DNA, 517 bp, Zea Mays
agttcacagggaagtggatcagagaattgccgtatgtggtttggagcttaagaactcaacctagccgagctttgcatggaaacactcccttcttcatggtctatggttcgaaggcagtactacctgctgatctcaggtttggggcaccaaggctgatctttgaaaacatagctgaggcagaagctactagactggaggatattgatatactggaggaagaacgattgaatacagtaattcagtcagctaggtaccagcaaaccctgaggcgctatcatgataaggccatacgacatcgatccttcgcattgggagacttggtcctttgccgatttctaacgggggaaggacgacacaaattgtcgccactattggaagggccattcatggtagcagaagtcactcggccaggatcatatcgacttactcaaatggatggcacggaaatagggaattcatggaatatagagcatctcaggaagttttacccctatccagatttcgaaggctatcgggg

SEQ ID NO: 18159 - DNA, 632 bp, Zea Mays
gttggaaatggaaatcctaaccctacttaggacggacacttgtatatatatagtgaactatacatggggttgggtcaaagaccattacattaataacacatattctacatcctctgcatttgtaattctagccattacaaatgttagattggaatgaaactttgagaatatcatggatggaaggcccttggtgaagatatcaacgaggtggtcgggatgtggaggatgcgaacatcacttatagtgacatgctcgcggacaaagtggaggttgatttctacgtgcttcatgtgctggtgctccatgagattggtgttgagggctatgaatctgtaagaaaagctgatgaagcgagaatgccttgaccacattgttggttacaacgtgatactcggcctcaactccacagcgagagacaagctgtagtttcgaggactaagagactaggttggtgcctaagaacacgacatatccgaaggtggacttgcgcatgtcttagcaactagcctaattagtgtcggtgtaaacgactagctcagaggttggatagggccgaagaagatggtcatgttcgaggatgtcgtagtgttagcgaagaatcctctttgcagcggtgaggtgtgactttcgcg

SEQ ID NO: 18160 - DNA, 739 bp, Zea Mays
aaaatgaagggattcaaacgccatgtaagactaatataatttaacgtaggactaattaggatctcttaattttttttaggacgagacgataacttgggcaacaaacaatacaagcacacaacatcatcgttagttttgaccaaaaactaaaacacaaagatgttgaaaacttgcggctgcttcggctcctcttcgatctctgttagaaactgtgcagtcctgtggcgtagcgaccacgagctccaacttggtgtgctggtgtttgcggaaagagaagatccctcaaagactccttggcctctggctcctccagatccgccgtagctattgtacaatgcccaaacgatagttgtcatagttgttcatttttgacctatgcatgatggcatcggacaaattaaaaagagatagcaccgtcaagattttgagctaggcagcccctttatattcccatttgtgatgagtgttggtgatttctttatagtcttctggcatcttaattattctcatacgcgagcacatgcataaacacaacactattattatctggataaataaatggctaatcattttaaagggcattatatgtccctctcgattagtcaaaaataactgccatcatagttcggttgcaagcacaagcttgaagactgaattatagacgccaatatctcttctgaaatttgaaatagacttttggaaatgtcgttgcaatatatatttgtgttcacaagtagtt

SEQ ID NO: 18161 - DNA, 630 bp, Zea Mays
aaaatgtgtggagtgccatgcttgcgtacattcctcgcgcgaggtttctccctggcgcgtgcatttttatccacacacacaccatttgcactcgtggtggaggtattccagggctggtgccatgttgatcaagatctcgtgctggtggtacaacgtctgcatgggggccaacatgttgaacgttgctcgatctaggctatcgttgcccaaggagtcaccatcagatctcacccttgtcgtagcaccactcttgcaagtggatcatgttgccattgctagaaatgtgattcttttgttaggttgtggaagaagcaagaattgaaaccttctcatactccttcaccatgttatcacggataccttaagattgtgttttcttcttacccttcaattgaatcacatttttctttaccggctcaatgtcttctttaagctctttgttttctatggattttttctgaaacaaagattagcttgcttaggaaacacacttgttaacacatgaaatatttaattgagataatacacaagtgtgtgtgagacagagtggtggagttaattttactaatgtagttacaacctcatgagccacctcaagcataatatgagaatccattagttctcatgaga

SEQ ID NO: 18162 - DNA, 634 bp, Zea Mays
gttcggaatttcggatcgtgtatgggatgggcaggaagaacccggccgcccagtcccagccatcccattcccatgcagccggtttcttccacggcagaaccaccgcgccgtcgcgtttgcccgcatggcatgggcagcagaggcggcagcagcagtagcagtgcgccgcacggctcccgctctcactaatctgctggatggcagctcacgtgtctagaacccaccacgccatttttttgtcgctactcgctagtgtgcggggggcttggtatttgctccgtatccgtgtgtgctacgtactgcaagagcaacggcaaacgtggtgacgtaaaaccccaatccaaatgcgttcacctcaagcgatccacaccgttcttttaccatcaacaacaacctcctggttcggtacttgggtacactgctagctgcgttcaaggtttactgaggtggacgaaagtgatggacagagtcagagacaggccattcagacagacagacagatgatcgcaaatattcacctgtataaaaaagattaaaaaaatgctaacaaaaaacagtaacgtctgctccactgtgagctcgctcctagcatgccaccgcagagattcgccccccggcgtgatgtggatctgca

SEQ ID NO: 18163 - DNA, 445 bp, Zea Mays
cgctactatgaaaattccccgctcgcgggtatcaattcgttttgcgtgcggcggctgctggagaggaagacgtgtgacggtgtgtgagttagggttagaaaacattctacatgtttgcatttggctggaaacctggaaccaaatttttttttttgctaggccattaggctaactctaaccatttttctcttccaaatttattcctttaaaaatctatcacacaaagattcttccaatatatttcacctaccgtgcgatcgttcctcttacacagctctcctctaatcttagcttattcgttgcgactttaatctaaccgtggctgcaacttatacagtattttgtctatatgaaatatagctattgcggctgaatcatagggtttagggttttagacaattaaacttaaaaatgtttaatttgcaattaaaaaagaactagggtt

SEQ ID NO: 18164 - DNA, 332 bp, Zea Mays
cttacctaaggattggagcatccgaggatcaagaccacgcgaggacccgcagcatggtggtggccatactttccgagcaattccgaataccacaggcatccaataggccctaaccagagcccaagggaactcgtgaacctccatggccagttcctttggcctggatagctttgcagacaggattccatggcggcgacaatttcttctctctctttctaaccttgtcgtgatgagatgacgagctggagcgagctctaggattatatagtacggagcgaaggggcaggtagagtcctatcccgagagtcccgacagggttgacggtcaagtcg

SEQ ID NO: 18165 - DNA, 453 bp, Zea Mays
gttcggtgacaggccataaccccacgtagtggtcctgctgttcaccgttggcttcttcgttgatgttctcctcttcttcttcgctgtcatcttcatcatcgtcactagggtcatccgggtcatcgcctccgggagcaggggcttggactgctggtgctggcagtgctgaagatgacgatctagctgcgaaggctagtgattcgaccaacagggtgggcgtaggcagaaattcctccgagttgtcctccagaatgactccgttctccacacgaatgtgagggagatccacagggatttcctcaactaccacggggtagacgagaacttgtcgtggcggagggatgtagttggtgttggtccgggtggtttggattgtacgaaccatctacaagagaaaatgtcaacttagttgaattttaaagaggtaaggttaataaaataattttgtaagaa

SEQ ID NO: 18166 - DNA, 532 bp, Zea Mays
gagtagaaccatcgctgtagggcgtagattgtgggagaggaggccgccactgcaatacttctcctctgcccttgaaccggagtcagatggcgttcaagagtgttcgacaggacttggattcgttggcctcgaagtttccccaaatatggaccaccgggcaactcggaatttctcgccggtggatttcttgttagttgggtattttccgtccgcagcgctgctgggatttccctgtgttcattctgggtaagtaattgcctctactattttcgttgtatcctcagtgtctatctcctggtcatgaccgtgtaggattatccgagcaccgattcgaggaacgccagccatggcgccaccgtcaggcctggccgccactgcggtgtagcgcgcctgggcgtactaaagctcggtgaaggagatgaccgtctgaccattgatctgtgaaacaacggctgggatcagatcgcccttaccccttcgcttcaatgaatcgtggccgttgggcggatcagatggtccatattggatcgcg

SEQ ID NO: 18167 - DNA, 767 bp, Zea Mays
caagattagggaaggagaaggtggccgacaaacataacgagaaggagaagatccccatcgacgacgaccttaaaggcgagaactccgtcgacttaggaacgaagaaggaggacaagaagaagaagagtgttggggcagaggccgaaccagacctcgatcatcactgcataggttttcccccttatcttgactaaccatacttgagcacagggccaaggacaaccggagccttcgttaggcgcaacttagatggagtcttcgatcaagcaactaatgccgaccgtggcaaagactggtgcctaggagagagcccaagtatgggccaaatgtcgaggtcaaggactttgccatccacaactcttcgaggggccctcggcataggttacacccctgcaagaagcgagggataccaagacgcgaaggctatgggacgacaaaggctctagggaagaatacttttacgggtcaccgacccactattggggttccctggagggtccatctgccagtgtaactagagggtaaaattgtgggtgcatgtatccatagggcactgcggtgtcgtcattacccgttacacgaaatattctaggaatgtagttgttaaccagggtacggatgtattttggaccacctacccctaggttgccctataataaccctcgtcctgtagctggacgggacatgcataactagacgctacagttccctacctaatgttttgttttgcattgttatccacatctattcctatgtgtttgggccca

SEQ ID NO: 18168 - DNA, 665 bp, Zea Mays
tgggtaggaccttgcaaaaagggaagaacgcccataccatcgccttggatgaccaaccctaaggaatccgccccggtccatagatgtgaagcaactagtggagggagggcaagggccgctgaggaagcccacgaggcataagagccaacatgattgcccacctgttagggtgttctctttaaaaggcgacgcccaaaggaacttatggaaacaaacctatgaccctgaaaacgggagcagatcagtggagaaaaggccttgaggccccatgacatggtcgcatggagtcaaagggcagcacaagcaaaaggaaaatagaaaccattcttatatcctccctcaggaaacgacattaggacgtaatacactagggggacatcgagcgctacgaacgatatcgtctttagacaacctatctacaacatgattggtcgccttctcgtagtcctccagtacatcctctagctcctcttccgatagagatgaaggaaggccaacgatgtcacgaagaccacatccggaccaaagctcctcgatgaacaccaaagtcaatgatatctcggacacgacacgagatgttgtccaagcgcttactaaggaggagccatgagccccgacgtacttctcaactttccccaaacagtggcacattttctccaattcgt

SEQ ID NO: 18169 - DNA, 821 bp, Zea Mays
ctgacttcggctgctaccactctgaattctacttcggctacctggcatggggagccaagctgcatgtggcacaagggccttgtcatcccgaagctcaatttcaatggactcatgaccatagtcattagcttctcccttctcttctcgtctgcctttatgtaaaaccattcgtttttccaaccggtcagccacttggtacgatagccgagaaccggggcctttgtatccttccgatacgcaaagttgtagcagccaaagttctcatgaagaccatttgcttcacccttcgtttgatagtgcagcccgtgcacccggcagaaggcttcggcattgggactcataccctggcttcggagggaccatatgtagacactaagtctaacgattgcattgggtagcagctgatgaaagtatatctcaaatttttttaaaccttctccaatcatctcatgcaggggggagcgaagtcctgccctgaagaagcttttaaaaactacgacttcatcgccttttggatctggaatcacctcttccccagcaaaccggacaggtttgctctttgcctccccaaagtagcccaatttcttcatcatgaccacgtcgtctaccgtcatagtagatttaccaaattcaatgtggctgggtttcgctgggctcagaatagtgtagtcctcttcatctttgctctcacttcctccttcagctgcgatctgttcagcttcagcaatcgaggtaccttcggcaacaacctcctctggcaacaagacccgattgcctcatcacttctgatattggtgtcgtttcagtcacttcggcctcgt

SEQ ID NO: 18170 - DNA, 817 bp, Zea Mays
taaatttggacttcaaatgaattttctacgaattaaataaattctagcaattgtttttatattaataattcattttctaattcaatttatctatttttcttattcactggactgcgcaacaatttgcagagaagacaggggctaatctacaaaaattccagagactcagagctaaccccgcagaggacggcgggttattttccataaaacgcaggggctcttttgtaaaacgtacgaggccgaaaggttacagttaactctcatccacttaatctgcgacggacggcccagattagattggatctcatctgaaccggtatgcactaatagtcgctggattaagatcggacggcccagacattatgaaccccgatccaccactcgctacgagatcaacgcttcacaccacccggatccaaatccctgatcatcaccattgattagccgatcaacggtcaagagcgcgctctcaatcactgcccttccccacggatcggacggtcaccgatccgccatctaccttcagcgaaccacggcgacactgactgcaccacggcggcgacctcgccatcgagcaccccagccgagcgcaatcccccaattcggacacgataatacgatgactagagcagtacgagcactagtgagtgttgcataccgaggcttgacgcagggggttttctggccacggtgacaggcagaagtgcggcggcggaccgagcactcacgcgacggcgagcaattgatcggctccgagcggtccggtggtggtgaatggagtccgtcgaggaggttcgggtgccttgaacaacccccg

SEQ ID NO: 18171 - DNA, 401 bp, Zea Mays
ggtatgactccatttgggtgattgtggacagactgacgaaagtggctcacttcatacctgtgaggactaattacacgggagccaagcttgcagagttgtatatgactcggatagtatgtttacatggggtgcctaagaagattgtgtctgaccgaggatcacagtttacttctcggttttggaagaagttgcacgagtgcttggacacacaattgaattttagtttggcctaccatcctcaaactgatgggcagaccgagaggactaaccaagtgctggaggacatgttaagagattgtgctcttaaacatggtggtagttgggataagagcttaccatatgcggagttctcctacaataatagctaccaggccagtttgaagatgtccccgtttgaggct

SEQ ID NO: 18172 - DNA, 366 bp, Zea Mays
ggggaatgttaggaacccaacccttttggttcacgctggcccaactagcggagatgagaactataaggagcagtaaattgaaggccgaggacatcgaaggcttattcagaaacacatatccatctccactgctcggggtgtttgtgcttcttcctctccaaatctccatctgtagagctagatctcgcatcccttccagctccagtgctctacttctccatatagtccatagcttgctacaaacctcccttccctaaggttgtgtaatcaggttaccattgaactgagctattttgtgtatgagttgagaggtgtgttaacacagcccctcccaacaccccctcacgcgcgagtcccctacgcgcg

SEQ ID NO: 18173 - DNA, 272 bp, Zea Mays
tcgatgcttgctcctcttcgttcttccatgatcttgtcgtcccgttcttctcccggccctctcctgctttgctgctaagtctcatacgtgcctctcctagcgcgtactcccacacccgatcgatcattcgactaggagcagtgcgcggcagtgttcgaggaagcaggtaagtgtttcccttctcaggtagtgggatggttccactggctggcgcccagggagcgcgccgcgccgcggtggtcatcacggaggaggagcggcggcgcaaccgc

SEQ ID NO: 18174 - DNA, 614 bp, Zea Mays
tagggggaacgtgaaattgagaggctctggtgggtgatcagcggtgagagctggtgcgctgggtgcgtgaatacctagctgaagtcactagggcattgaattatagtgtccatcagcggtggtgcccaatttgaagaaattgtgctagcggccgagagagaggggtgagtcatcgcggcgatctaccgtggcagtcattgggtaagaagctacggcggtcactggtgagctattacagctggcaacgacgtggtgaaagggtcatggcgtggcacgatcacggcaaacgacatacacctcgacgacggccactcggccacgtcgtcggcaagtggatgaggcgacagagcaaaacagtgccccaagttcatccccggtgaagatcttttcaccaggagttgttatctgcacgttaataggcgcgaatcgtggcgccagcgcgaatccgagcacgtgggtcattggtggcaaggggtgatgcacctgaagatctttttcaatctactgtaccatcagaacgccattcagagcacctgacagagcagatcaaaggccttggttctccaatttttgtgtggcaacgtgatcattcatctgtatcaaatttgttgatc

SEQ ID NO: 18175 - DNA, 972 bp, Zea Mays
gccaacgtgtccacgtatctccaaatgttgtccgccgttcgattcaagatatacgaccagcagaggttctagccaatgcaaattcttatataatagagcggggagcaaaggagcaacaccagcgtgtccacgtatcaccaaatgttgtccgccgttcgatttaagatatacgaccagcagaggctctggccaaaccagaagggaggttacagtggagatcgctggagacttccagctacggcggccaataaggcagaaaggtgggggtacagtcacgaagaggtgtcctcctcgcccccaatctccgttgagtgcgcacgctgttgtgagggggaaaagagagagagtcgtcatcatcgtcgtctccctcagtgagcgcgccatcagtcgactacttctgcatggtgcgccatcgactcccacgagtcctacgtcaagttgtccgtctggtctccttgtcggggcagccaatcctcatcgtcacgccgattcactgaggtatgaatacctttctacctgtgtccctcgccgttacgatttcatctagcctcttgcttcccccaccacaatcccactccaattcatcgacgtgcagatgcgggattcttcgaaatgtatgtccttcgtactagggtagcaatataagttacctgaatatttgtttcaatgccaaccattgtgaaacagactccatctagagcactacatgttttccttcatacccatttatttatgcatatagatacacagacaacatgttcaatgtaaaaaaaagaaaaagaaacttcatccgctagccatttgtttcgatgccaacctaccaatttagggactgtgcatacctctgtaactgtatgcgtctttcggcagttcctttggagaagaacaattctaatcattatattgcttcgtaatgaaaataattctccaatgtatcttcaccatccatgttacaaatgccaccaagttagc

SEQ ID NO: 18176 - DNA, 380 bp, Zea Mays
gcatgaccttgggagcagagggggaggaagctctggcaaacagatgatgggttaagacttgtcggcatgatgattaggctcaaagaaaaagggattacacttacttggggccctagaccttccagtgaccctggaagcgagacgatcgccgttcctactcctgctactgttgttgctgctggtgtccctagggtgatcacccccagatggtggtggtggtggcggaaccggaggactgatgtgcctctgcacgccatgggcttgggagctggcctcctcggccccaccagtagtcctctggcgcttctgggggggatccgaaatgagcgacctatcagcgcgacgcagcctgcatcgcctctcctcctccgaccccctgg

SEQ ID NO: 18177 - DNA, 372 bp, Zea Mays
cagccgtcgggatctccgcgggcgatggctgatcgcggctcctgcggtaactacccaaccgggtgctgctcgggataagatggaggggggaaatcgccacatctgcacctcccctcttccttctctactgcctggcgacgagagagcgaccgggagagtgcggtggagtgcattgctgccatgaactctggtgaggccgtgtcatggggtctcggtgctcgggtgaggatgtttgctggtgaatatcggatgcgggggtcatcattcgctggcgcattaggccaagacagcgtgggaattgctcatcggagcagtccttcgccatgggtccgccgctcaccgtggtctgtgtcacatgcgcgtcaatctatg

SEQ ID NO: 18178 - DNA, 380 bp, Zea Mays
ttgacaatctattcctagccatcaattgcaagatcaatgcttcatgtgtcctccacccgaggcgacaccggcgtcggcaacgtatctcaccccacggcggcgccatgaccagcccgcaccggcaaccatcccccaagtgtaaatctcacccccgaatgctgcataaccgcattggagatgcccctaagcaaataagaaggtccttaccgtggatttaggcgcaaaaacaatcacccacgatggaacatggctccgtggcgtcgcagtggttctggtgagcaatctccgctgccccaatggtcaatccttgccgtcgagcccacaaacgacttcaccaaccacacacgatgcacccctacccgaccacgcgcacagcgtcg

SEQ ID NO: 18179 - DNA, 722 bp, Zea Mays
tgccaagcaaccttgtgaggcggggcacgcgaccaagtccctaccaatcaaccttatgaagcggagcagacgaccatgtccctgccgagcaaccttgtgaggcggagcggatgaccaagtccctaccgagcaaccttgctaggaggggcgggcgaccaaatccatgccgagcaaccttgcaaggcagaacggatgaccaagtccctgccgagcaaccttaccagggactagcgtaagacaaggatggaccaacgatacgagcccatgttggtgggacaagacgggtcatcaccaaactagttccgagcctcgggtacagcgttggaaggtctctaacagatgttagacgacacctcgccacgtactgtctcaagcgaaccaccgctagcgaataggactagtcaatcccaatggaagggatctcagcatcagagtctctacagtgaccagaatatctaaaaggatgtaatggatacaccataccgggtgtatgcctacacacatcgacaagtgacatatgcccatgatgacaggcgaagctacgctacgtgttaccgtgccgtggggctgacccacgggacccaccgccactactacgaagatatcagcagtggactcactatagggacccatatgaagaatgagagagacaatgcgccatactaggggtacggctatgcacgaccctacggatagcacgacattgagggcacaacgtcaag

SEQ ID NO: 18180 - DNA, 608 bp, Zea Mays
ggcttatccatggcggcgatatttacgtgaccctgagcttatctgctgcccacgatgcacgaatcatggctatccgtcaacaatcccggcgaaaagtcaccggcgacgagcagggggggtgaacctgtgatcttcttcagtttggaacttactgtaccatggcaagggtcatcaaacaacctgacagccacggtttagggccattgttctcaaaattttgcattacgacttggtcatctctctgcaccaaagttatagggctaaagttaatctttaactttgccacaaagcttactatcaaatagtcactaaattcccttcgaaatcgagctcaaagttcatcccatctcactgctcctggaaattcagttcagggagggactgacagcccgactttgagcttaattatctctcaaatactcttaacaaccatgcttaccaccttaagcaaagttgttcttctttgatagatcttcaaatttggtgtggtgacctagggcaaaaaccctataatttgaaagttacaaagccccaaagttgagccaaattctctgattttcagacttagaatagaactcaaatgaggttcattttgcatttaagtccaa

SEQ ID NO: 18181 - DNA, 285 bp, Zea Mays
caactaggagcggtgtattgggccacgatagagaagggggagagcgaggaggactatgcggccactgatggatagcacgacagggcagtccacgtgcaaggcgaggaacgcctggcacagaggagtgtggtgcgtgggcacggctgtagagatcgttgctagcgagcgtactccatgaagggcaggcaggacacacactgaatggagaggggatgtcggtagtgtgggctccaacgcgagggaaacagatgacagggctagcaccaacacattgagaaactggag

SEQ ID NO: 18182 - DNA, 364 bp, Zea Mays
gaaactgatgacgatggtcatgtgcccgctggctttaagcttcggaatgacgagacctttgtgcaacatgcagctagggtcagcatgtcagctagccgcagtagaattcagggtggtggctgaacaaatcagcaccagagacctggtgcaagaatacctggccaacaggacatctccaacgtcaagtaattggagcatgccgaagctaaaaggaacaaagaaaaaatatgagcttgttcgattgcgttattgttttaagtttgagaaacagttcaaagagccttgccaagaatggctagagatgattgaaactatgtgcaatgaaattttggggaactacactaaaaaggaagaccagttaatg

SEQ ID NO: 18183 - DNA, 831 bp, Zea Mays
cctgcctcgtgataatgtgagcgaggtggcacaagaggcggtggcgggatccctaggccctcatcatcatctgaagaagaatcagcaacgacaccctgggtctcaaactgtctgaaaatctcatcctcaggccagatatctgacactagatctggcattggtactggatccttaggggttggacgatagaaaccgaactaaaggcgagagcctcgagggtgccctggaactaagatggcctgatcagctgcgcaaagatgtgacagagataatgagcatatggcagatgatgacgagcacagagaccatccaatactatgtccttgatctcacaaataaggaagtcaaccacgtcgaactctaaatgtgagaccaaggctacaagtagccatagctgaatatgagtggttgcctctctgtatcacatcctgggtagtagtgtacgtctcatcagctcatataggaacttcgctgcagtagtggagtcggtaggagatcgtcgcgacccatctgtgaaaggcggtctgaacaggctacgacgtgagctgtggcgggtgcaactccgccgtgagggcgacgaggaggatctgaagtgccatagcacaaactatggagcctagtcgacgactctggaaatccaaggagctggcggatctgactggtatgcaaagtgacatcctctcgctcaaaacggaatctcatccagtgatggtcagggtcaatccacacggtggcatagaacactctgatccactcctcaatatacttgccactcgcggtcaagagtgaaagcagtcctggcagataagtaaggtgcccctcagagtcggc

SEQ ID NO: 18184 - DNA, 592 bp, Zea Mays
gactgaggtgttcccgatgatccagcacggtctagttcaattaatcgagactacgagtaacagaagaccctaaggatgctagaacacaaatcagagaatcgagaatcaacctgtggatggctggccacggcgagatgccaacggcggcgagtttgaccgatttgggggaagtactgaattcgcgggctacggtggttaatcgggggtgaggagtggtgctctgagtttgtgacaagataacggaacaggccgaacattcaatttatagagggcgaccgcgagtaggacgaatttgaacggagaagtgctcgcggtgataggagaaggagtcatcggagcaactatcatggcgctcactgatacaatggctcgaagatggtaattataagcttgccacgacaattgctacatggtgaaagggtcactgcgtggcgcaatcacgaagaacggcgtccacctcggcgatggccgcttggccacgtcgccggcaagtggctacagcgactgagcagtaacagtgccccaagttcatccctcgcgcaagatcattgaccgccagccattatccgcgcaccagagcgcacgaatcgcg

SEQ ID NO: 18185 - DNA, 1075 bp, Zea Mays
accaccgaaccagaacgcgatcgcagccatcgaatcaacgatcaacgacccgaaggattatacgcctagatctaatatgtgccctccgcaatcgatccaacggtccatggcgcatcatcgtccccagctagtgtcatggtggtgcacagacccttcctcgccggcgcaatgcttgccagcgacatggccccggcgagcggcggaccggtcagcccagcctgaaattcaagaacgaacgagatctatgcactgtgcgtagtttagacgatgacgaaacccataggggaattcttaccggtagatttggatgccacagcgtcgcacgcgacgatcaacatcccgacggcaatgcatctgtttcgacgaaggatcgcatgcacatcggctactccagtcgctaagcgcccgtgatgaggccacgatgtgcgcgacattcaccggttgtcatccaccagcgccacaggaacgacaccagagctagcgcgcaaatcgacatccatgtgctccaggcaatattctatggagagctagcgatgtggagacaccccaggtgtggcggctcccctatatctccctggcatgaatcaccaggtgctagcgctcatggccaaaggtgaggagctctactatttatggacgagcaggcgcggattctacggagggtaggaggtaaccgaatccctccatagcaggagcggttgttgcgctggcaaatcacatgtagcaatggctaccgcgagatctccgttccccgtggttctgttattgccaccagggagaagatggatccaggcttgcttgcatgttgacatcatgatgatgcaagccacgacaagagaataaataaaagataaattggagatgtggagagagaacgtggctggcctagtgctatttagcgcaggagcaaaaaggagagatgggccagggagacggccacgaggcttccttctctttgtttatttttatttattttttacttctaatttcagttttcatttcctagtttagatatcctaaatttaaatccgattgatgttgtcaaatcaaacttatatgcacaattcaaagagcc

SEQ ID NO: 18186 - DNA, 582 bp, Zea Mays
gacttgggcccgggcgcccggctgccgcacgtgagaagtcaaatggagctctctgtcatagtgttgacaatggaatgggtcatccctcatctctctctctctctctctctaatgtgattgcatttaacaatatgccaggttgttcctcttgcatatttaccaaatagtaaagctctgttatatacgggatttactatgtggagaatggaaggaatgcaaaaccagtgtaagaagggacgccacacacagattagcatgagagatgggtgattatgggttaaactaatgaggttgcatacgagtgagaagtgtagtacacatgccttgtacttaatttaataaactggagtctatgtgaacttagcaatagaatgctaaaacggaacatgtgaatttagccgttttgatcgaaaactaaagcatgagccatcagaagtggagagtagccaggttagccccagattttaacaatcatattgtgcagttctcaaggaactgtagagattctaccatgtctaggaagtaaggtaaagaaattacagttccaagtatgattcacatggagtcatttaacaatttaac

SEQ ID NO: 18187 - DNA, 487 bp, Zea Mays
cgcctatcaaccattcctcaacacacgtgggtaagcaagctgtttggctatgacttcacagtcgaatacaagccaggcaagctgaatgggctgcagacgccttgtctaggcgcgagaagggtcccttgctgttgctaccatctctaccccaaccttcgagctgtttgaggccttgcgaacagaggcagctcaggatcctcagattgctaccctacaacagcaactagccgatggcacagccccagccggctggtcacaggcagatggtcttcttctcttctagggcatagtttttgtaccagatgcttctgccttgtggccacacatggtggctcatgcacataactcagaacatgaaggcatccaaaagacagcgaacagatggaaatccacattctacaacccacacgcactccggcgggttcgtgagtttgttcacagttgtgctgtctgccaaaagaacaaaactgagcaccttcatccggtg

SEQ ID NO: 18188 - DNA, 606 bp, Zea Mays
gggcaccttcaatgtcagccacccatcccctgtttagcagcgcctgggacatagtatggtgcttaattattctcttgggaatggttttaaagaggttaggagctagctcttggattgtcctgccctccagccatctatcagcccaaaacaaagtatttttaccatcccccactgttgtttgaacaaacaaattaaagagagctcaatcatattttggcacctggatgggtagtccactccaaggcctgcaaggtttagttttttcaagccaaatccatcgtacccgaagggcccaacttatcacctccaaattgagaactccaagaccgttaagtcgtcataatctagcccttgagtctgttggaaaccacgagccatgagacgagctttgtatggctcaatggaaccatccgattttgtcttacctttgaaaacccatttacatgtgatggggacaacattagagggtaaaggaacaatatcccatgtacccgtgcgttctagagcagccaattcctcaagcatagcaagctgccacttagggatactagaagcctcatgataagcctagtggttaaggcttccaagtagcacctccaaatctcg

SEQ ID NO: 18189 - DNA, 395 bp, Zea Mays
ctggtcgaataaatcctcaattctgggcagggggtacttgttcttaatagtaacctcattcaaggctcagtaattgatgcacatcctcttcgtgccatccttcttctgcacaaacagcactggggctgcccaaggcgaggtactcggtctgatgtagcctttctccgacaactcatcaatctgcttcttgagttccaccaattctggttcggacactcgataggctctcttggaaataggggcggtgcctggtataagctctatggcgaattcaaccttccttttaggtggcatacctggtaactcctcgggaaacacatctgggaattctgatattacattgatagcctctgatggtttaatctcctcaatatgggcggtgacttggtgacaac

SEQ ID NO: 18190 - DNA, 419 bp, Zea Mays
cgtgtcgcggaccagagcgagctcggagagcttccctactgctttaatctccggtaataatgccactctcgagttatgcattgcctgcgcctactttttcgcccagctgtgaccgttggggagctcggcctcgatgggtgcttctcgtcgatgccgccgtcatggtctgcatggccaccagtcccgcgccgccgtctgttggggttgtgaggtagtagagggctgctagccatcggatctgtgatctgcgatggagatgagtgggtgtcgttcatcgattaatgtacggtggagatttgatcacatggcgatagaacacgagccttcggattgaaatcgtgcggttcggcgcggataagagcgttggcgtcgcgtgggccgttgatcgttcgatgtgtggtcgagaccaaaccgcgtgc

SEQ ID NO: 18191 - DNA, 732 bp, Zea Mays
aagtggacgactccagggacctactcctgaagggcctctacaacaatggcgaaaccagctgctcggccgaagcaatgttccaggtcatgaacgacgaggtggtcttcatcaatgagtactaccactccgttgtccccgtcgtccttgcgagccccttcttcctcgtcctaaactacttcctcctcaacatcgtcgtagccatcctgtgcgtcatgaccgtcatcctctgcgccaacggtgacgtcccctacgcgttccagagcatagccaaagacaactacaccttggattctggggtgtttaagatagccatctgcctcctgcagagagtcggcacgccttcaaacttcttctccgtcgtagacctctccatcaccatcctcctgttcgtcatctacttgtacgaggagatgtgggagttcttcgtcttcctcctctccaactggttcatggtgtccctgctctacaactacatctccaagccacggtggctgaggcacaactccttccggggcaccatgttctcggtgggtttcagcgtcatcatgtggctgaggagcaagatgacccagccgagcctaaccctcaagcagttcaccgtcctcaacgtccgtttgccgctcaagctgccgctcttccccgcgttcaccggcctggcggtggagaagaagccagtgccgaacagtgtgatgagatccgtcatcgactacctggcgaaacgtggacatggtg

SEQ ID NO: 18192 - DNA, 426 bp, Zea Mays
aaaaagactatccgtgcaaaagtcgcctaagggtgcagccggattaagcacaacatgtgcgaaaaatcgactacaggtgcgccggaccgacataataaacacactagaccaagtgcgcaaggcctttatgagcatagccaaatgtgcgaaggcgcacattctcatcatacaagctattacatatgtacagcgagggcatcacaccttacatcggttcaaccatcggaatgattctcatctccctatagttaaataacattatcctcagctcctcaccctcaaaaagacttcgtagctccccctcacctacactcgcagcggccggcaaggacaacaattcctgcttgccagccctgcccacacgaagccaaccgccgtccgcctcactcactctacgcttcgcaaccacccttcgccgtctacgcc

SEQ ID NO: 18193 - DNA, 529 bp, Zea Mays
gtaggtagtttgatgagaaatgtagataaccttgaatagcaatccaacatttggtaaatattaggaaataaaaaaattgttgaataaaaaaaatggagtcgaagtgagcgaagctggaggtaagccctaatcacccttgcacggaggaggaagttacaaccaaaaacctaacatcgaagccctaatatctagccatgttcaatggaaccagaatgagatgcaaaagacaaaacctagcacgaagaacacatagccagagaagtctccgtacctgcggggatcgtcggcacgttgaggattgggtgtactggagatggtagcacacgtcgggaacaccacacggcggccgtcagtaacagtacagttgctaatggggaatgcggcgcgatctgttgctggaagaatcgtatgacgcaatgaacagcgtaaacacgtggagaaggatggattgtgaggtacgcaccagaaacaggatcgtagttgccggcgatggagcggacactcgcggggaaggaggagcagcggcgtt

SEQ ID NO: 18194 - DNA, 857 bp, Zea Mays
atctcacacgccatctttctgaatttgagacttccttgttccaccaaatttctttccatctttttcagccgaatagcccaagtatcaagccaataacaacaggaaaaaattacgttagtcggatcattaattttttcagaaccaaaacagcaatcattacgacacctccatatcgcccaaataacagcaccacatccaaaaagagccagattcttgtcagaattattaaaactatccatccaagagccaaacatatcatccacactggtggggatagaagttagatcaagagccaagcatacaattctccaagtaaatctagcaaccgagcactgaaaaaacaagtggtctatggattcagaaaatccacaaaaaatacaatccagattgccactccaattctttttgaacaagttatccttcgtcagaatctttttatgtctaacaagccataaaaacgctttgattttatatggcagtctatttttccacaagaaactagaaggcacagagatctgagtgtttttaatttttttgtaaagagaattgacagaaaagcctttattccccaaaagccaatctgacttatcatcctcctcagagatggaaaaactattacactgtgtaataaggcaattatattcatctttcaaagcaccataaatccttcttctaaagttcacagctctaaactcagaggaaaaggcttttgccacagtgatattcttgtcataagcaatatcaaacaggttagaaaatttcgaagacagaggttcagtgtcacaccagatattatgccaaaaactagtactattgccattgccaattttttttttacaataattgtaaaaattttc

SEQ ID NO: 18195 - DNA, 630 bp, Zea Mays
tagcagatggtaattctggtgcagatgtattaatggaagaatcatcaacctcagtaacatgtataaggaatttttcctccactcctttggacaagccttgcaagagtatgggttctccctggtatggtatcaacatccatttctgacaccaatggacctccataggactgaactgttctaaccagtccatacctaggataatgtcatagacagccaggggtaaaatctttagatccatctggaactggtaatggtgaatagaccagatggcttggatgatcgaagtctgacacaacattacttctccattcgccactctgacctgaatgggggcagtactctcctctggtagatgaagcttagccaccaattgttggcttacaaaggaatgagtgctacccgaatcaataagtatgctgacatcttgatcctttaaacgacctcctagttgcatagctcttttagccttaccacctgacactgcttcaaaggaaagagcagaaaacacatgctcctctggaagtacttctgactcttctccagaagctgattcttcaggctcgaacaactcccagacttcctgtatggcctgaagctggacagtagtcgcacaggtatgtcccttatgcc

SEQ ID NO: 18196 - DNA, 786 bp, Zea Mays
gagagcaaagcaaggtcagacccagagaaggagaggatggaggaagaaattaaagttttggagcatgtcaacccacttccccaaaatcctttcacccccccccttcctcaccagaattgtatgaggccagtgacaatgactcgtatgactccgacagatccactaggtatagcatttggaacctgtaaatgtggtacctagtagagtcttagtgctagtaatgcatccaaataaataaaaacttatgtgtgatgtctgtgatgcatgggttgccgatgtaggacatgtgggatgtttgttaatgttccttttgtatgaaccttttgtgaaatgcatgaaacttgctatattttagtaaaagtgtgttatctattgttccaattcattgattcgtgtatttcattcctagaatggctgagaacaaccgaaacacaccttttcgacctcctggtgcctgccccagtataggtaaccagatttccccccacccatgtgggatcctcaattctggcagggccaaggattagaccaaacccatcctgctacaatgactggtagtacaagccacatgagcaatcctacctggtcccagggacctaatgacatatcttcatttccctttcgcaatccatggaacccatattttgctatgatgaatccaggtggtcctccaccacaaacatcattgggtcaagcccagatggtaccacctagtccatttccccaggtttatacccatgtgacaaacccgactgaccctatcaatttggaatcagaagcagagca

SEQ ID NO: 18197 - DNA, 870 bp, Zea Mays
atttgagcttattcgagtgagcaaatggtcaaagttcctatggtcgaattggagctggcatataggtaaataactttgcagtaatctggtcggtagcttttcacatagaaattaaagaaaaacacccctgaatatgctctgtcagacacactaaagaagatcctgatggtacagtgaatgaaaagatctttagatgtagtgaatgtgccgccggtgaactccgcgccgtgatcctcaccggcgtcacgatttgtgcgctctgggtacagatatcggccgacggtgaaaagatcttgaccacagatgaggtcgtgagctggccgtcgtacccacttgccctgcggcaggtccagatgacctcgccggagtctacagcttgccgcttagacgccacgtactgagaagcgttaccacgtcgcagtaaatcgccataggtagcttgtccatcgcctgagacattgccccggtgaaagccacgacagctcgtgccagtgaactccctctctctccgatcgtccgtgtgtcttccccaaattggacgccaccgctgatggactctataaattgatgccccagcaagctccattaggttgttacgcacgcagtgcaccagccctcgcttccgattagccaccatagctcgtgaatttcaaacttcccccaaatcggtcagaacgctgtcgtgagacttctcgccgtggccagccccctacaggttagttcaaggtactctccttaatgttctagcccccctaagtctcctgttgctcgtagacccgtttgattgagatagacttccctgaatcaccaagaacacctcggtttatctccggttctcaccgccatcgcgagcagacgaattcggggctg

SEQ ID NO: 18198 - DNA, 715 bp, Zea Mays
ttgctcaagttaattccacaatcttgtgagagcaatcaagtggaagaatctctcctccttctcactctaacttgatctagttctgcactaacacttaatttggatcaagtttttgtttaagttgtgattttcaggcgtcacctattcacccctttaggtaactatgacactaaagctccacaggcgcaactaattctagcaactcaaccatcttccatagagtgtccaaccgtcccaagctctatcacgtctacgacaaataagatctgctatccaattgataatatcataaggtctgtgttgtgctccctagttataagatatgttattaacaatatttgtacaagggaagtagacacattccttgtgatcctaggattctagttccatggttgctaaattctagaagagtattgcatggtagaagtgtcgatagtcgtccaatgatatatggacgacatgctagacatccctagtcctgagggtattgagacacttggacatgctacaaaaatttcatccttagggtgagccaccaccaccatactctcatgccctccccgtaactcaggagtcatcacatgttgatcctattgctaacaaactgtcatcacctcgtcatcctcttcctaatccacaatcttgacttgcttcccagtctcttccttttaacctaccatcgccacctcatcctcttctaacccactttctccgc

SEQ ID NO: 18199 - DNA, 584 bp, Zea Mays
cgtgctagaacgtcatatggaatgcgtcaaagttccacatgattgctcccaaggaggggtgccactgaacacctaggatgacattgaagctagtgatagagaggacaaagtagtaaatgtcaaagttctcagtgtcgatggagatgtgttgccggagggctacgcctttgttggcgatacagtcgttgttcgtgaccttgacagagagatccttgtgtggcgtaacatgcaagcctagctaaaaggccacctcctgcagtacgaacatgtgtgtggagactgagtcaacaagcgccatgagtggggtgtcattgattcggatctttagctacatggtagcgccgacgtcgatgctcgttagggcatgcgacgagatacccaatgccttggctacttcatccatctcctggtcatcgtccagttccatcagaaatacccccatgcctgcacacttatggttaggtgtgtattcctctaggcagtggtagcactccccattcgcctgcttcaccgccagcgcgttagtggccagccgtcagaaccgaggtctggtgggggttgtcagtcctaggaccctaggtttg

SEQ ID NO: 18200 - DNA, 446 bp, Zea Mays
acgaagaagaggtggcatgcgtaagccgaagggtgtagagggggccggtgctatcacatctgaggagggtgcgccgagttgtcgagtccttcacagtaagaccagaagagtcaaactcgacagaacaagaattatcagcagtaaaacggcgaatggaaagaagattgtggaccaaagaaggagcgacaagaacatcgggaatgcgaaaagagccaggagggtcggcggcacccacagatttgataggaagacacgagccatttgccaccatgatgaatgaagggagagaggaagaaggagggcgaactgaggtgagtataccaggggcgagagtggtgtggtaggtagcatcggtgtccgcaatccactcgggacccatcggcagagtcagagtgggagtctggaaggcagccagggcggctgcgtcccaaccaaccaccccggac

SEQ ID NO: 18201 - DNA, 468 bp, Zea Mays
catcatcccaatagcttctaggatgtagctaggggtaaaacttcctgaggtgttatatgttccatgagttcccaatttccgtgtcgtccatctgagtgagacgatatgatcccggctgagtgacttcagctactatgaatggtccttcccatagaggtgacaatttgtgccgtccctcccccgttagaattcggcggaggacgagatctcccactgcgaaggatcgatgtcgtatggtcttatcatgatagcgcctcagagtttgcagataccgtgctgattgaatcaccgtgttcagtcgctcttctttgagtacatcaacattctccagcctagtggcttcagcttctgctatgttttcaaagattaaccttggtgccccaaacttgagatcagcaggtagcactgcttccgaaccatagaccatgaagaaaggtgtgtttccatgcagagctcgactaggttgag

SEQ ID NO: 18202 - DNA, 543 bp, Zea Mays
aaaaaatcacggagcgaccgagcacagtccatctctgttaaccgtggcagtgagtgcacatgtgtagtgtgcaaggtgtgtgtttcctctccagatgcaacctgaaaacaatgcaggtagagaatatactagtttatgaccgagttatgtgaagttatgtggtcataaatgtatatttggagtacttacatgaccactaggtgtctgatcaaaaagggggcccgtgtcagtttgagtgtcatgagatgcatcaatgtcacctccctgccccaaaaatcaatgatactatgtttaaaccctcagtcaggtgtcaattacatttaatcgataattgagattacaaaggataaaacaaagatgaaacatatacatgtttttgtggtgtggcgtcaaacatcggcaagtgggaagacgtatatgagctcataatgttgcagtctggtatatgttgaggtgggatgttttcgccaacattaaaatggtaatcctgttgacattattatggttttgtataatatgtggatgcgaagtggaaattaacat

SEQ ID NO: 18203 - DNA, 432 bp, Zea Mays
aacaggattacaaaagcagagttgagttctatggtttgaaatgcataagaaaaaaaggtgccaccaaggagatgagaagtaatgccactggagaagttatggtgaagctgcatgttgcctcatgtccctagttacttgccacttacactgcaatcacatagtaattgaaggttagtagcttagcggtcaggggccaagggagacacgagtcgagtaaagaaagaaaataatgtgggagcgattgaagggcaagggaactgatctggacaggttagaaagagaaagcaccgacctttcttgcatgaacctcacccgttcttgagatttgagaaggagaaagcctcagcctttcttgcacaaaagttggcagtaggctcaaagagcgatgaaatcgcggagaagcgagaagaaatcgcagaggagaaatcgtca

SEQ ID NO: 18204 - DNA, 714 bp, Zea Mays
gcactatcgaaaatccacaagtttccccctttttttccccattatcattaccactagttctatcaatcagtaccagcagtagcttcggtttcgctcagcagtccgtccgtttcccaacaggaatgaaacatgagctctagatccctccctgcttcttcttcccggccggagctctacataaaaactggaagcgttcgccggttttccgatgttcacgttggatggggaagtcgtcgtgatcgatacgtcgaacgacaatcatatatttgagctgcagcctgcagctgatctgcgacatttttttctttctttgttggagatggtggcgtatccttgtcaagctaggagaagtagaaaagagacgagcatagcatttttttctcagagcctggctgcaattgcaacgaacgatcgatagcggagcaggtgagaccgtgactctgtctctactctcaacgtgagaggagagtagcaaacgcaggaaggaactggtacgcattgtatgacgcgacgcaatgaagaggcgaattaaattccgggacgccaccctccatgaaccagcacgcttccatctgaatattgcgagcatcgcccaccttaattgccgctgcaccccccggccccttggtcaactttgccaccaccaccgccggacgatacattaaatcatggccaattcatatatgtatatagatatagattgtatattacgag

SEQ ID NO: 18205 - DNA, 343 bp, Zea Mays
gtcgatttcaacttgtttattgtataacaagcataaatgtattttatatgtcgagtgagaaatcacaatgttgtctcccgtgaagtagctcgggcgacatcaatccctagccactgccccttactcccttctccaccttgcaaacactagagtaagcaaccaaaagttcaaagcagctttgcgaggatggtggtgacgagtccttctcatgtccttgcaactccatgcatgcaggcggagacgcatcgacgaatgcccacgctgacgctcctctccttaggttgtccattatagatcatgtaaaataagtgatttaggctatctccagcagatcccctatccc

SEQ ID NO: 18206 - DNA, 457 bp, Zea Mays
ctttagtaaactttgattgattggcgtcgagagcaacaggaagctaaggacatgctggaacccaaggcaattgagtgagtaacagggcacgaagagagctggccacggagaggtcctgcacggcggcgctcggaacagagcggaatggattttggactgtgtgagttctccagtgaaattgagttgattgcacaagtgctcgtgtgcatgatgtggtgaagaagaaggacccgggctcaatttataggccgatggccgaagttggatgaggctcgcggagctgtaaacgcactggcgagctcacccgcgcgggcagagccacgacgatggtccagcgaccgccgattaaccatgcagtgccacctcgggacattagcgccacgtcgcagaagatttttaccgcggccgaagacccatccccagccacggtggtgatcttatcccagcaagatttttc

SEQ ID NO: 18207 - DNA, 563 bp, Zea Mays
tgcaattaatttaatactaaaaatctatttctaatttaatttccctagttttcctgctctctggactgggcctcaaataccagaaagagcaggggctctggcgcaaaacttcctaagacacagaaacccgaggagaggaccgcgggttggtttcctgaaaactgaggggcctaaatgcaaaacgcgcgcagcgaaggggtatcgggtgttatgagccgttggatctaagtcatgcggcgcagattaggtggatcactatccgaaaacgttgagcaatgagacccactggatcccgcaccaacggtgtggattttcagtgcatacgatttgctttcacccacacgatcccggatcaacggttaaggtcaaccggtacacagagactaatcgggaccggtcacccacgaatcaacggctctggtgccgtcttcctcccgcgctaactgggcaccgcacgccgaactccttgcggcggcgctctcaccagcgtggggcgaacccaagaaagacgacgccaaacccaaattcctgttactcagaccatgtagagactacaacgaaca

SEQ ID NO: 18208 - DNA, 764 bp, Zea Mays
gtatatgatcctaaagggctaccaagagtaagtaccaccggtctaggagtggacagggtgttacactagttctagcaactttaatctctcgcacaacataggtggcatcaaaatgcaactcagtactaccctctactactgcaagtgggaggacaccatctagtggagccacatggtgatgctcttactaaccctacatttgttcatgctccttttaaagtacaaaacaccttagaggcatcatagcagacacctcctagagcgctaggataatgaagtcttcttatacatgtcactagcccagttttgtgataggatctcaatgaggcatccaagcatgaaggttcatatcaataatggttgtcttggggggcttgctagcgcctccactttaatgttgatgacatcgccagacctcttgacactgtggaagtaatcctttgcaatcctttaacgctcgatgcaagagaggcaatcatagaaaaacggcaacaatatgtagccaagtacataatatcttatagggcaggtcatggaacttctcaaaccacatagcctcactctaagaggtcagtggttgggcatgacgagccatcacatgatcccatgtgtctttcgtggaccagtaggtttatggctctaaagtcacgccctaagtcctagaactttagtgtagagcaacacctctttcttggacatgatctcgagggaaggaacatcatttttgctagtagtatggcacacatgccatcaccatcctcgca

SEQ ID NO: 18209 - DNA, 479 bp, Zea Mays
cgacgctatttcactagttggttaggtccacggatccaaacaccgatagttggcgcgccaggtaggggctgtcgtgtgctaacactcagttcccatcaagactccagatggctggctttcaccaccccttgaggcttggcacggtgatcgggtttgggagtctggagttcatgtcgctcaggatcaagtacgacatggtgctcctcccccgggtcccctggctgacactcaggaacgttcaagcgtttgtcctcgtccttctcgttgtaggacaagagacggagcaactgtaaccgcaccacctgttgcgccccatgtcctagcgaggctcctgtgctgaccgatgatgcagactcccttgtgagggacctggccaatgtcactatcacacctagagcaccaccaccggcacacgcatcccccgaactaactcttctggctcctcctcctgtatcatgggaagtaccaactccctacgc

SEQ ID NO: 18210 - DNA, 766 bp, Zea Mays
ggaagagagaggaagccgcgccgccgccaccgtagatagccgccggtagcgcgactcaggcaccaatctggtaacccaaagcttgggttgcttacgtagaagttgtacgagggcgcaattggaagggaggggttcacggtgtcgtggagattcttcgccgatgttggtgatccgccgcgtcgcgtggacagctaccttcgcgccatcaatcgccgacaggtaactacctcactggccgacctcggtctgcactacgcgtgtcccggtttggatcaaagctttgacgtgtggtcgagtgttggcggattccgacgatggcgccgccgccgggggtgagcaccgtcgcggctcgacgtccaggggggaagaaaacccgtcggccattggtttggcgatgtagggctaggatctaatcctgtgtaccgtttcggcctgacccttggataagaaagggaacgaccctgattagatcctgataccggttcggcctaaaatcatcccggccgtccgatgcggatcgggcgcgtgagaagcaatcttaggattttaaatctagacgcttgattgttgatctgacggtgaagatttcgtaccgcttcgcttaaatgagtggtgtaatctggggcgcataatcctaatccaacggcctggatagatctataccccttcgtgggtctaattttcacttgagcccctcggtttatgtcaaaacaacccgcggtccgcatataggagattctgagtctagagatttattacaccaggg

SEQ ID NO: 18211 - DNA, 308 bp, Zea Mays
tcgacgaatcctttcggttgctcgcagtagacagtctcctcgaggttgccgtggaggaaggcattcttcacgtcgagctaccggatgggccagtctcaggacgcagcaatgctgaggatggtgcagatcatggccggcttgacgaccgggctgaatgtttcgtcgtagtcgacgccttcctcctgggagatgccacgaacgacccagcatgccttgtgccgggcgagggagccatcggagtggagcttgtgtttgaacagccacttgccagtgacaatgttcgcaccaggcggccgaggtacgaggcg

SEQ ID NO: 18212 - DNA, 370 bp, Zea Mays
tatagaaatcgaccctgaccgaatcaagtctattcggaatgtgggacctccgacttgtaaggtcgaagtgcataagtttctcggcaaggtgaattatttacgaagttttatttttaacctagccgggaagattgacgcgttcacccctattcttcggcttaagaatgatgccgaattcgcttggggggcagagtagcaggaagcatttgatctcatcaaaaaatacttatcttcggctcccgtattaaaagcaccacaagcaggagtatcattccgattatacattgcagctgaggataaggtcattggggctgttctgacacaagaaactgaggaaaaggagcatgtggtgacatatctaagccgaagg

SEQ ID NO: 18213 - DNA, 398 bp, Zea Mays
gaagcttcagtggaggaaggtacggtaatcagcccaggaaattgttctacctttctatggcgtggacaagggacacacaacgaggacgtgccaggttacgatccaaaagcaaaaggaaattgttgaagccgaggcacggcagaataagccaaagcaggtactgcatactgcttggtgctactctccatatatccctgaatacgtaggcaatcaacaacctacggtttctgctgcttcagcaagtcactctcaagcttcctgggctcaactaccaccacccccaccactggcgcctgccctaggtcatgatcagcagccagaagggcatcttcggcctcagcaacaacgcgaccttcgggagcaatctgaagctcgcacagttaacagtactatgccca

SEQ ID NO: 18214 - DNA, 714 bp, Zea Mays
tagcgacatcgagccattcacagtggagtacattgtcaccaagtccttgtcgggaggagcagggtcaagcaacgacatcggatcactctatgcgccaagaacgtcgtcactagcatcggtgtcatctgcacagaagccggtggaatatgtggcaccaccaaccactgatgacgcccttgatgcagatgtcgacagcgaggtagttcctagataccggaagattgagaatctcatcagagatcctcaagttgctggactggcagcgcgtgacgtcgacattgcagagctcaacgccatcagtgcagaagagccgagcacgttcgcccaagctgaaagggaagcgtgctggcaggaggcgatgaacgaggagatgaagtcgatcaatgccaataagacgtggtccctagaagatctcccatcgggccaccgagcaatcggcctaaagtgggtgtgcaggttgaagcggaacgaagccggcgatgtggtgaaacacaaagcgcggcttatggcaaaaggctacgtacagaaggcggggattgattttgaagaagctttcacccctgtggctcgtcttgagtcagtcagactcttgctttccattgtcggacattgcaattgggaggtacaccacatggacgtaaagtccgcgttcctcaacggagagatcaaggagatcgtcttcgtcaagcagccacctggtttcattgaccccaa

SEQ ID NO: 18215 - DNA, 528 bp, Zea Mays
taccctcaaaccgtgttcgcaatagcatgatcatcgcgtagtcctatccgatttggttttgtcgctcggggttggccgttcgccgtcgcactcacgtgctccgctgtgtgagcctggcggcggtgactctgctcggagttggtaggaagaagggcttctagccgttcattctttgatggtcggctagaattaggggtcttgggtgtattaaaccagagccgtcgaattggatgtgtgcggcccagatcagaaagcttatataccgtttagtcggaggagtgtaatccgtagatcttggatcctacgaacgagagcgagcacaggttcataagggctcggatctaatctgagcactcgaactatgatccaacggccagatttgatgcataccccttcggtctgagagtctttctaaagagccccttcgtttttagcttatcaacccgcagtccagggtgactgtgctctgagtctagggaatctttcgctgtggcccctagcgttcggtttaatcttgtgcgcagccta

SEQ ID NO: 18216 - DNA, 899 bp, Zea Mays
ccccctgtttgacatgtgctacgcatccaaacgtacgaaagtgttcaacagagggcttaaatccataccatacttcatgaggcgtgcgaccttcaacactctgagttagagatctattcaatatgtagacagccgttgatactgcttcccccagagccgtcctagaaacctcatagccttaagcatacttcttgccattcccatgacagtttggttccggcgttcaaccacaccgttctgttccagagtgtgtggcgcagttaggtgtcgctgtataccctccctggtacagtgctcgacaaacgaacgtgccgtgaacttgccaccacgatcagtgcgaagagttcccagcttcgttcctgcctcagattgcgccagtgcctgaaaggctatgaaggccctcatggcttggtccttcgttgacatcagagtcacccacataaactgacttagatcatccacaaggagaaagaaataccggctaccactcggcgtcgctggcgtcaccggaccacagaggtccccgtgaacaagctcgatcttgcgcgccgctctgtacttcgcttcagtcgggaacgggcgttgacgttgcttcccggcgaggcagctgtcacagacctgatcaatgtgatcaatctatggcagccctttcaccatgtcctcctcagatagttggcgtagtccacgaaagttgaggtggccgtaccgcgcatgccacctctaggccacgctgtcgccctgcgccatgaggcagattgggcgagcgacctcgagctctaggacatagagacgatttgctgtgcgcgccacatttgccaccatctggcccttcacgtcctagatcttgagccttccatggagcaacagtatcttgtggtcgccttcctcaagctgcccca

SEQ ID NO: 18217 - DNA, 415 bp, Zea Mays
ctggagcttggatgatctcatcgcggaacacgcaagttccctccctggtgcgccaactatcggtgtttcgtaccttgcttcgacaagtaaatttattgtgtgcattctaggcttcagagggtgtgcacggagggagcaagatttatactggtttgggtagaacgtctctacatccagtcgtcagtggcttgcatgaccggcaccattgatgatcaaactagtagtaggggttataagcagttgagagagggaggagaggctcccagatcccttatctggggtggaagtggagcttagaagctataaggtggagtcctagctaagtattggcttagcgggccttcggcctcctggtcctcgcaggtgctcctcctcctgttcatccttgtgggctcgtctccgcctgaaggcgttt

SEQ ID NO: 18218 - DNA, 631 bp, Zea Mays
atagttcgagagcttttgagaacgaagtctttttattgatgacgtacttttccaattacagaatacaatgctgccccaatagcttttgaaatctagctaggggtaaaacttcttgagatgctctatattccatgaattccctatttccgtgccatccatttgagtaagtcgatatgatcctggccgagtgacttctgctaccatgaatggcccttcccatagtggcgacaatttgtgtcgtccttcccctgttagaattcggtggaggaccagatctcccactgcgaaggatcgatgtcgtatggccttgtcatgatagcgccttagagtttgctggtacctggctgactgaattactgcattcaatcgttcttcttccagcatatcaatatcctccagtctagtagcttcagcttcagctatgttttcgaagatcagccttggtgccccaaacctaaaatcagcaggtagtactgcctccgaaccatagaccataaagaagggagtatttccatgcaaagctcggctaggttgagttcttaagctccagaccacatacgacaattctctgatccacttccctgcgaacttttcattcttgtcgaagactttcttccttagtgcttccaat

SEQ ID NO: 18219 - DNA, 474 bp, Zea Mays
ctgggggatgccttcgacttgacgatgaatggaccctcccatttcggctccagcttgccccgtgattctgtccgggtggtccggacgagtacaaggtctcctttgttgaactctcttgggacaaccacgttgtcacgccaggccttggtttaggcctgatatttgttgagggcctgtagggcgaggacgcggtctccgtcgatgagatctttggatgttggttcgtcgacatcgggaactcctgatgtgcttgttcggggcgacccatgctttatctcttgcggcgtcatggcctcggatccatacaatagacgaaatggtgtgaatccggttgctcggcattctatcgtgtttagggcccagaccactttaggtagttggtcggcccatttgtcctttttgtcgccgagaagttgtttcttgatggtagtgaaaatcttgccgttggcgcgctcgatgacgtcgttggattgc

SEQ ID NO: 18220 - DNA, 384 bp, Zea Mays
ggttaggcaataaccatccatagtggacatggaatgtttaattcgtgcttcaaatagatggacaattttttgagcttatatcatggaggcaatgtggaagaagatccctatggaaatgccaagttcattgacatgtgacacgtgcccgcgctattcgttggtagaccattcttgagtgatgtgtttactaaggctaaacaaaagctaggttaccatgaagatgatgacattgcggttgacgaagtgtttaacattggtcatgcaccaaatgtcataagacgagtcatcccaattgattctcaactggattgggagaattatgttacttcggctatgaagacccagttgcaactcatggaggttgtggtgcggcgggttgtagta

SEQ ID NO: 18221 - DNA, 446 bp, Zea Mays
cttcctcacgtccagcttatcgtagccgccgatacattggctcattttcatcaccctattctcctcttcatgttgaggtgattgtcgacatcttcatctggacccctatcacgcccagtcttccgtttgcgactaccagtggtggctctctctacgtcctctcttgatgcatggcccgtcgcaatgtcgaaaagcttctttggcgtttgtggggtcttccgtcccagcttatgcaccgaggttttgtcggtggctccctaggtgaaggcgttgataacgttggtgtccgtgaggttgggcaactggttgcattatcgcgaaaagtgtcagatatagtccctcggtgcctcgtccgactactgccaacaatcgttagggtcccatgggtttctcgggcgtacgtacgtgccctggaaatttctaagaaaaatctcttctaggtctac

SEQ ID NO: 18222 - DNA, 760 bp, Zea Mays
tgatcgttgcccctcctcttagtcgctcacgctaggccttttctattccttttgttgtagcgtcgtcatgccgcaattctcatgagactcaatcatggttggcaggaaggcaatcaatctgcacaaacctggacaagggtgggcggttctgcagttcagaacagttcttcggtcggttgtgcattccagatcttttcttgtccacgatgctaagatgggaggcggagggagcaggaagaagcaaccaagtggaggggagcaggaagacaaaccagggaggcggggaggatgaaggtcttccacgacgctgagatggaatgggcgtgggcacgagctgcgaactgggcggttgtgtggcggagtagatgctagtggtgaagatgaaggctgaaatgctggtgttgagatgggaactggcgtgcgcacgagctgcgaactgcgcggttgcgtggcggtggatcgggagtaaatagtgccagcgaagatgaaggttgaaacgtctatggagattggacgagtgcggaccatatagggccgcgaatcagtgagtctcaaatatgctacccttcaagttgggcctcaaaacgtttagacgaattttatgaaatgagactcctgttggagctatccattcttgttgaggccctatattttaatttgtttgtgttttagggttcctattggagttgctatagcagtgaccttattttatacaaaaatcatcaaacaaggttatacggcttgatctctctggttctaa

SEQ ID NO: 18223 - DNA, 667 bp, Zea Mays
aactaccggtgccctaacttggctaacaccgaattcaaactttggtgacctactgggacacactaattcaacccgaacaccactcaagggcacggttcacgcatacccgcggagttggagacattcttaacgcgttcctaatgttctagcgcagtataacttaatcggccaggccaacaagcatcataagcatgcgggagtagtgaaacacggacaacgcggacctggaaatggctggccacagcgcgaggtcacactacaatgcggaaaaccaatttgggggaaattgcgaattgaggagctacggtggacgattggaggcgaggagcgatgcactgggcacgtaacaacctaacggagcacgctgaacgctcaatttatagtgtccatgaacggtggctccgaatttgaggagagaagctggcggccgaggagaggggatgagtcaccgtggcgatctaccgtggcattcactggacaaaggcgtacgactatcactagttaacttccacgactcaagacgatgtggtaaaatagtctaaggtgtggcgcgaccaagtgaacggcggtagccacggcgacgaccgcgcaaccacgtcgccggcaagtgggtacggcgtcagggcggccacagtgccccaacttcatcccttgcgtaagatctttt

SEQ ID NO: 18224 - DNA, 495 bp, Zea Mays
ggaccaagaagaacaccgcgcgcagcagctgcagctgcaccgactacgacgtacgtcgacaacagagaagtattcgaattccaacgcagtggtgaggaaggaagacgaagcagcagcaggggaaaccaaccgaccaagaagccgcatgttctggcgaggagcagtcagaacaagagcaagagcagcggaatcggacggtaagaaaaaaaggccatgtggaatgcgggaggacatctacctcggttcgggcggggcacgggggagcggcgggaatggcgttcgcggtcgcggctaggccttggtagcgttgggacggtggtcgatgagctggctggccctgttcgagtccacgcagaactggactttggaccaaccgaaatagggcccataagaaaaaaaggccgagtaataggctgctcccggcccgacaaacttcattcaatcataagaatcgggagtgagaagttgagagttttccacttagaataaggcata

SEQ ID NO: 18225 - DNA, 273 bp, Zea Mays
ctcagacaaaagcatggcgcgaccacacagtcatcccgagggaattcaacgaaggagacctcgtactcgtccagacagctcggacagagtcccggggcaagttggagccaaaatgggagggccctttcatcgtcaagacgaaggcgtcccccagcgcgtacaggctcacaacgccatccggcgaagacttagaacattcttggaacattgataatcttcgcaaattttttgtttaactcctcagggccacttcacccttgtaatccgcagaac

SEQ ID NO: 18226 - DNA, 469 bp, Zea Mays
cgacctcgcctcatctcgagcacaggcacaccgccgcgttcatggcgatgcccccgccgacgattgttgacacagcgcccaacaacgttcactcccgcggccgatggctataatcacatcccagcgcaaggcgaatccgatagggcccccaatttaatgtttgaatcatggtaccacccttcccatggaggggagtggatccgcggcagcgcttgaaccacggctggcactacccgcttcggcaatgcccaactaccccgcccagatgatgcgccaacaggagaagaacaacgcaagccagcaagaggtagctattaccgtagttattggggagattcgccaatctccgatggagcgtatgccgcggtagaggaacgcgtcgacaaacaattccagtcatcgcaagtcgagcccttgcttgacgatgccctccaaagcacccacgcgtactaacggagctcccacgacg

SEQ ID NO: 18227 - DNA, 361 bp, Zea Mays
ccttggtcatctgtcctgaggtccgggagttgttccttgcgggctttctccacaagccttgccgtctctgggtctagatgttgagctttgcagatgaggtcttctagcattggcttgacttcgagactgtcgttgtttcccagacatgcatttagttgtgctgattcttccttccagtcttctagaaagttggtcccttttattccgaatggtttttgactaagagcgtcggctaccacattggccttcccggggtgatagtgaattttgaggtcataatccttgatcagctctaactatcttcgctgatggaggttgagatcaggttgagtgaatatgtatctcagactcttgtgatcgg

SEQ ID NO: 18228 - DNA, 403 bp, Zea Mays
cgggggtgttctggtcattcctctgattattgcctttctggggtgtctgctggttgcgccttgggcagttgttggcatagtggcctagctcactgcacttgaaacatccattgtgttggacaggtgcgttgtttctggcctgcgtgttactggcgccaccttgacggttctgagaactcccaccagacctctggttggtctgagagttactcctttgttggttctgattttgattatttctctggctttgctgtccagagtgttgcacttgataattgtttccgccttgatttccagagcggaactgcgaaccttgagcgttgttcgggcgggtgttcctgcttgactgaccttgaaatttccttttgtggtcagatagctcctttcttttactttcaaggcc

SEQ ID NO: 18229 - DNA, 460 bp, Zea Mays
ttccagtgtcggtcatcgacgaatttttggatgagttacatggggcagcatggttttctacccttgatctgcgagcagggttccatcaaattcgtttggcacctcatgatcagcacaaaacagccttccaaacccaccacggccattttgaattcaaggtcatggcctttggcctctccggagcaccggctacctttcaaggagcaatgaatcgcaccttggcaccattactcagatcctgtgtgttagttttcttcgatgatatcctggtatacagtactacctgggaggatcacttacatcgcctagagctggtgttgaatctgctcgcacaggatcgttggcagatcaaactttcaaagtgttcctttgccagacagcaaatttcatacttggggcatgttatctcccatcaaggggttgctactgatcctgccaaaattgatgctgtcacgtcgtg

SEQ ID NO: 18230 - DNA, 357 bp, Zea Mays
caaagtagtgccgaagcttgcgagcagttagaagtactacgtataatagcttgtaaacttgagaataccttatctttgggtaccgaggacttcactgataaagtaaatcagatgctgcactgggtatgtgtgcccttcttctacccactcgactaccaacgtggtgcttaccatgtgagtcgtggagcaaatatatagcagcagatcctcgaccggctgatcggttgtaacttggtgtggtggcttgagcactggtggtgtggtcagaaacttctttagtgcatccaaggcttcctgcgcttccatggtccactgaaatttgtccaccttcttgagcaacttatggaacgacattcc

SEQ ID NO: 18231 - DNA, 296 bp, Zea Mays
cgaggcatggagtattttggatcggctgttttgatggtaaccttatcttcttttttggttgtattggccgattcaccaaaaatcatcggccctttattgtctccctgtatgacaacatctgcagtgcctattttgatgatatcctttttttgttgttctttgagttgctgcaggcatatgcccccttgccggattggtcggccttggaggccgagtagtccggcaatcttgttgggcctgtgcctggtgaccggattcagcatcgctcaatcggtttggtactggcggcgccaacc

SEQ ID NO: 18232 - DNA, 701 bp, Zea Mays
gccacatccataagaacaacattatcagtattcaaaacagagaatggattgtaagacatacctttgttgatgaaagcatctttagccatagctcttgtagcagctttatcagcaatcttcatttcctcagacgattccaacctgctgctccttctaactccttctgtaacttcaccttccataggaccactttttagcaccagcagtcttgctagcctcctcaacattactcagatgcatttttcttttttatcttggctaggagaaggaatgaattcatcatccttgatgaattcatccaactcctgagaatccaacaggtcatcttcactatcattgaattcctcatcctcatttccctgactatcaaggtaacctttaggttcttcagaacctttccccattttcatgctttcagattgttcagacagggaaccagcaacattggcctgactggaggatatctttaagggagattttcccttgatgtccttgccagagtcctcatcaccacttttggccttttagcatatttgccaagagagatgtcaccaaatccttgtctatcaaccgaagccctcttacccagattaacagagtcatcattccaaccttcatcagtaatgttgtcaattttgaagaagatgtcatacaagaaaggtttgacaccaacttcaatgataggggggatcatagcaaca

SEQ ID NO: 18233 - DNA, 613 bp, Zea Mays
ttattatgtaggatataagagatggataggttagggtaagaatagcatggggtaagcaagtttatgatgggaaagaattctgtgttgagtggtaatgcatctgaagatcttgtttgactcctctctttccttgacgaggttgatattttcttctccggtcttgagctcattgattcgcggtgagtgcatatcatcgggggtgggggaatgtggttaagatagatttggatgagataggctacatgatgtaggtctaaagttcatttgatgttaggtgggaatagacagattatgcaatccatcatgacactattggttgggttagctcttatgttcacggttgagttggtctaatgcactaattttaggtttaagtgcattaggagagaacaagatttataggagtaggatctagtttattttactagtgttaacttgttaagggactgtccttaggttagctcaacttaaggttagacttcatcaggttagattagcctattaggttggatcagatctagaataaatcgatatgactattttagactagataagatctaaataaattttggattagctcatggttgttattctagagtgggataaatatgct

SEQ ID NO: 18234 - DNA, 484 bp, Zea Mays
ccggcagcaccaacccgctagggaggacaaaaggcacgaactctccagcggcaagttcactggggtggatggcgccggcacaaatccttccgccgaacgccggcccatcccatccaagcaggcagtataccatgtcgagcactcgctcagtctgggcatgctcgggatgaacttataaggccatggcaaactacggcaatgcaaagcagagaccttgaaggcaaaggggcacagagagcttggaggcgagaggacgccgtgagtgggagagaagcaaggcatggctgctactcgagggatgaacccctctttaaaggcagactcccccgctcctgcctcaaaacgtcgcgagaagtctcccccgatgcacacaggggtatccatcctatgacacgggggcccggtcccacatgtcatacaactggtgcgctggtcttcgagtgcgaagaaggcaaaccgctgcacaaggagcgtgctaccgccc

SEQ ID NO: 18235 - DNA, 823 bp, Zea Mays
gggctgccccagggacaatcacggtcaaaccctgcttggtcctgacacgagctgcaccagtgcacgctcgggctcagggaccctagttcatctacaagtcatgcatggccaccgttgcgtcggctggacacagaactgcaccagtacctttgtctcggtagtgcgctgtagcaggcccaacatgcaaactttgttatccacctccctgactcgggactagacttagatcagtcagaggaggaaaaagggtcgagggccccaccatcttcaagagtcaaaaaacacgactgactgacgccatggccacttggcccgcaagtgcggtcatcaagctcgcggagccagagcctcccctatactacccttacgccctcttcaaggggggagtagacaacgatcctttctctgacgatgagcccagcatatagggggaggagcctccacagcgtggggcacgtctccgtcggaatcgacaccacaacatctagtgtcaccacaccgccagggagcaagacccaacccagcctattcccaagatgaggcattcgaggtcgatgagtcccctaatgagaaggtattacacatgcaaaggaatgcccgccgctcaccgtgtcactcaggagcacaagcacgagatggccgaacgcactgttaggctcccgcatgatcctatgcctgttctacacaatctgcagcttgcatttgctcaggccatgcagactccgagctaggtcggcggtgtgctggctcggattgcgaatgacttagctcgcatgcccaacactaagggttaccaacagctcgtcactcgaacaacaaatca

SEQ ID NO: 18236 - DNA, 342 bp, Zea Mays
tttggctcggctcatgcatggccacacagacatagaagcatgcatgagggtgcccgggaattctgaactaacgaagcaaccactccgatgcgacgtcgaagcagcacggaagacggcccggaaagccaatttccttggatcgagggaatcgccgcattccgacggggtgacgaccatacgtatagcggaatcatcagctggcggcgaccagaggagtagccagtaggaggacgacgacgcagctagcaaccggccggtttcccccggatcgacaagtccgtacgccacacggccgcgtggcgaccggcgaggaattaattaactggcgggcgcacgcacggc

SEQ ID NO: 18237 - DNA, 1112 bp, Zea Mays
attttgataatttgatttgccactgatcatcccgtaatagctgaaacactgactgtaaatgcggaatgtgatcaccccaggttttgctataaaccaatatgtcgtcaaaaaatactagtgcatagtggcgtaggataggggcaagagttctattcattgcgccttggaatgttgctggagctcctgataaaccgaaggccatgactcgaaactcaaagtgaccatggtgagtttgaaaagctgttttatgctggtctttaggtgccatgcggatctggtgaaaccccgctcgcaggtcaagcgtggaaaaccacgttgccccgtgtagctcatctaggaactcatcaatgattggaacaggaaacttggtcttcacggtgagagcattgagatgtctataatccacacaaaaacggtatgtgttgtcctttttcttgaccaaaatgacagaagatgaaaactcactcttgctgggttggatgatgcctgactgcaacatctctgtgacttgtttttcaatttctgtcttcaatgctggggcataacgatatggtcacatctgaacagggcgagcaccagcgattaatggaatgtgatggtcacaatctcgggacggaggtaaactctgtggaacctcaaaaatatcagcaaaggatgctaacaaatgttgcaattcaagaggcaactgaagtacaatggactgatccttagcaggaagaatgtccagtggacagacttctaaaacggcgcattgggcctcttgagcgccgagaccccacaacttaagagatgaaccaccatatggaataaccaaccacttggctgcccaatgaacccacatgggactgaatgtacctaaccagtccattccgagaataagatcataactagagatctgtaacactttcaggtcggatgtgaacatgtattcattgaggtaccatgtaacctgaagcacttccttgtcacaggatagagaagaaccattagcgatgtgaaccagaaggggcttagccatagcctgcacatgagggagatgggcagcgacatgatcgctgatgaaggaagctgaactgcccgaatccagcagaaccaatatctccataccagca

SEQ ID NO: 18238 - DNA, 713 bp, Zea Mays
ggaggttaggaaatgaatataagaccaataaagagcaaccatatgcagaatgtataaatattttcacaacttcagcaagcaatgaaataaatccgtctactagaacttttgataattctaacggaagtactttgagatatccaaaacaatctttgtcagcatcgtcaagctctaaattgcttcagagtgcaaaggtgaatggctcaaatctgatgttatcggatcatatatctttacttgctgataatttgcatcaggatggagcaacaaccatttttggtaagaatagcacatcatttcagtgcactgccaaaagtagaacttttgtttttggtgctagtagtggccagtaccatcagacatatcagcaatcccagtcttctctgctatcagagcaacataattcaggtactagtatggagcatggtcattctgactcaataaattcgcatagaggcagcgctgcttcgccatcagtagagcataatggtgttccttttgcacaaacacgaacattctccagtggctcagcttttgaaggtttggatgatatttgcaatggttttactacactgaatatttctgaatgccctcaaggaactactgagaccagggctcaagatccacctactaatggtccttcaatgtgcatgctagataattatgaacatcctgtagtttttcgcgagaacagatcaacttttgacttggat

SEQ ID NO: 18239 - DNA, 2130 bp, Zea Mays
tctcattcatcaagctattttttattttgcagaagaggaaaatttcagatttagatcccaaatggagcaaggatgaacttacacgcttttatgaagcctaccgtcaacatgggaaggattggaaaaaggttctaactgtttgtttccctttgttcttttccatgatttgtaaatatcagtcaaggtgtcatggctgtgtgaactttgaccggtgaatttgcttatgcagatcagcatagcgataggcggtaagtcgtcggacatggtgcggtctctttacagtgcacatcgggtgagtctgaactttgtagctctttccgaagtgcaccatctctgcatccactgtttaatgggcttgtcacacttaagacagtgttttttgttgctcatataagatcatataacatgttgcagagatagtacttatttggatgttcatgttttaatccatatcttcatagcaaataaatgtatctaagcttcagttcagcttgaataccatgttgcaccttatgatccttgtagattgacacatttcatttcttttggtagactttcttatctcttccagaacatcaagctactgccatggggtttatcgcgctggtgactggtcatcacaatgcttcggttagcttatctcggttacttgttcgaattactatttttttggatatgcagaatgaccctcaatttctttcatttattatttgatcaagtgaacatttgttccatatgaagctacgatgctaagctcgttataatgaagatcagcacacctgatcatcattgttccaacatatccatgccaattttatattaaataagaatagccatacagtctctttgtttcatgatttaagcttgcttggcttggtgcagttctccaaagctatcattaaacatttttttaccattctctcgtcataatatgttgttcacaacaataaaatcatgatcatagtaaagtactttgaaatatgaatgcaacagtaaccattatcataacactatctacataacattagagtaataatcagtcaaatgtcaccaactttaaattttaaatgtgtttgccccaaaagaaagcgaggctgtactctagtgatgatgatgtttataacatcaaataacgtccaacctagagccgcttgggtcattttgacataattgggagttcttaggctcagaagcacaatttcatacaaataggtgaatcataaaacacgatgagatgaaaatgcaatgtgggatagacaagacaaaagaagtgaattggccttttttcgtacaaaacatggtttcatccaaataaaattggccttttttcgttgtctgacttgagatgcttgaaatggcaggagaaaaccacgagtcatagaggatatgatcacatagccagagcatctggaaaggcaaggaaacatggagaacaacagaaatcaattgatggacctgacctgcacaactgtcatgaaggggaaattactggattttcagcttccttcaaaaaacgatactatggcggtgagtaccataacaaaaatatgtcatcttctgtttcccttaacaacctttcagtctttctcataaggattgcaaacttaggaaactgttaacaaaaagtttgataagtattttttttggataatttgttgcctaagaagaaatttaagcagcctttttgtttcttcagaattggtcaggaacagccgaaatcatgctgttcagaggcgtactcctcttataccagttatagctcctgcagacaggagtaccattgatgagcccacaccaggaattgaaaacgtcatcaattttaattctaccaagagaaaatatgaagcggccaatcatggctgtgctgttgctccaacaaataagtactcttcggacagagtttctggattcgctgaaacatgcaaggctgatcaaggccatagttacttggataccatggaaattggggacatagcgatgtgtcaacaacattttaagaaaacacgaattcagcaaactgtggaggaaagtcagactggtatagttgagcatgagacaacgatggcatctaaagaagggaataagctagtctcttctgtaaacaacaatcagatacttatcgacagtatt

SEQ ID NO: 18240 - DNA, 771 bp, Zea Mays
aatttggcaagaagggactagagtggagatgtatcttgttgtttctataatcaacttgaatcagttgatcacttgtttttcagatgttccattgccagggtaaatttggaggttatagcaaaaaggttaaacacatgtgttattcctagagatataaatcaatgttggaggtggctttctgtctatgcaccacagattcagaatattcacattgtggctgtatcggccatttattgggccatctagagatctagaaacaaaatgtgttttcagaatgtgttgattaaatcttcaagtgaaattgtctgttatgggagtgcgctgatgatttgttgggcaggtttaagcaaaaaagagccttagaacttgattcaagaaggggctaaactcctagtgagagcggctagtatcaagttggacgcacccgcagatgatcaggtggatgaggaagatgatgaagctaagtaggtcaatccgtgctgtgttcgtcatgaatggtcggaggctgaaggaggatatctctacatgatgttttggctgcttagtcgtgtctgcttgtttctagtctttctttgtgctcctattttggctcctgcctagtctttctttgtgctcctattttgcctcctgcgtgggcatgatagtcacaactttggatttacttcctatattggttgggttgcgtcttagtatacgtttggacgtttggttgtgggacaaatgagaacatgataggatggttcttggtttgagggatgaaatgatccttgg

SEQ ID NO: 18241 - DNA, 878 bp, Zea Mays
gaaacaacggtttgtcagttagcagctaagaaagaacaaatactagtgaacagcatccaaatcagttactactgacatctccagtttactacagaccaatctggttccaaatgactctttgcgaacagcagccatgaagtctacttcaattaggtgaaataatggagtatttttggaccaacgaaaatcaattatacgtagccatttgagatctgagttttcttttgtacctgcgcctaaaacacatgcagccttaccgatttacttcgagcttcctgcagctgttggtggcagtgcatctgaaaatttgtgtttgttgacggatttatttttagattccttcaatgcttgctgcatgtgcatgaaagaataaatggcttactcgagaccccttttgcatctaggattatgtcggattcaacaaaacaataagtacatggccttctttttacaagaattcggcgtacagaacaacggacaaccagagttgtttgggctgggacaaagtgagccagggtcatctttgtcttctgaaagcagcaatagtgcaagattgtgtagtgacacatactcgtcctcttgaaccttgtctacctcgtaagcttgttgatcgttgttaaccagcgctattggctcttcctgaggttgagcatgcgtgtcatgatcatcaacgcaagggtactgtattttttctcagtcaatcactccaattctctccagcatatacctcacacaggcattaaggtcttcatagttgatacgtccaggactttttgcagacaaagcaaaaggcagtgctctgagagcatttgcgatagcttcagtatagtagcagatattttgtggctacacggtaatatttttggtccctaattgag

SEQ ID NO: 18242 - DNA, 593 bp, Zea Mays
cccttggcctcatctgcagtggctatgctacccgccaccctctcacaagaaacacatgtgctactgtggcggcgcgcccccgcccacctccgatcgcggccggggctcgggatgcgtcgctccgttttcttcctattcttcttcttgtccgggtgtcgtttctttatttgtctgtttaccatttgataataataataataatcataaaaacaaaaataataaaggaagcactcgccgtcagcgtcgcgttccctgtcacgacagtgggtgaccgagacgagcgtcccatccccctcccctcgtacgtgaagctggacccgccagctgcgtcgtccttttctctacgacgacggccgccggtgcggagcgtccacgcgatcgaggcgctgctaggcttaagccaccggaagaaaatatagggggagcgacggagatttgggcatctcctgggcgtcctgctgcgctccaagttccaactgaccgagtcagtcaaagcaacaccatgccaccatggggtagagtagtatggcaggcatggacggacgcggactcgctcgcgaaccacgcgtgcgctagcctatagagtctgtccc

SEQ ID NO: 18243 - DNA, 559 bp, Zea Mays
ctggactgcacaagtcaccgtgcaccagctcaagctgattctgggcacggtatgctgctgcaactgggaaggaacaccgcctctgcttggtggtaacgcaagtgtcacacacctgctcaacatggtcgaccaccggcagcccgcgcgccatctcctccttgctgagtcaccggagtgcatcgaagtgcagatgaccgaaacgctcatgccactgccatgcctcaacatccttgcacgccgcgagacagataggttgtgcagcctcaagatgcagaatatacaacctattcttccctctatgtaccttggcgagcagacgacgattcttgtcccaaatgcgaagcacgtcatggtcaatcacaaccttagaccctccttcatcaagctgtcccagacttaggatagaattcttcagcgccggaatgtagtagacgccatgaataaccctctgctcaccgtcttggcttggaaaatgatagacccaatgcccttgatctctaccttcgacgcgtccccgaaccggaccattcctcgaacgccagtgttcagatcagcaaag

SEQ ID NO: 18244 - DNA, 401 bp, Zea Mays
tggagaccccgaacgtatcctcttgtcgatgatcttgccatcgatcctagggaggggagcgagtattaagttacctcgattgtccccgggccggactgttagtggaggctgctgctgattcgatcctggtcacacggctgcgtgccggtacaccatgatcatggccgtattcctcccggcgccttatttcattctcgtgccaacgattgcgtgaagcactgatgttgctccatgcgtctcgttggctactgatggcatgacgcagatcgttcggtgggtgggcaagaggtagaagatgattggccgcctgagtaagtacctgctgatagccctccgcatctggggttcgctggaggccatcggctatctgcgccaggacccctccaactttgctcgacatg

SEQ ID NO: 18245 - DNA, 303 bp, Zea Mays
gcctgttcattccactggtaggcggtgtgccgcctctgcatttattgagacctgtccattcctctggcagacggtgacctgtccatcccgcaggcggcgtgcctgtccattccactggcaggcgacacgcccatactgccgcgtgcactacgctcatcattactcgcacgttaccaaagaagcagccgccacatatcaatactgcgtggattgcggacatcatggcgcccggagattgctcaggcgttacttgcattagttactcctataatgtattccttccattatgctcctgggcccaca

SEQ ID NO: 18246 - DNA, 750 bp, Zea Mays
tcactcttctaaaggatgcaaacccaccttaactgctctatacgcacgtggcacccaagtatcgaaacaaagtaacaaactgtgtgaaccaaagatgcagtatgcatagcctgtccctcacaaatccaggtatctggaacccatcccaacacagacacacgcaccaaagagtaagaatccaccaaccacacatggattctataccggatgaccgacggtaacacagttgttgcaaagaacaaacaccctaacgcagcaagcaccaacggagccgaccctaatgcagatgcagacgacatgagggggtctagcagagcaaacgtggacttacggagtcacagacaatgtctacggggtggcgggcagcaggagcagaccacacgctcccatgacgacggtgggtgcccaaaccaaagtggcgaacaacgacaaagacgggctggagaagctatcggttctaggacctaataaggcgaacatgaattgaggagagagggaagaaaatattaaaagggaggaaagtactcaccgtcgtgcagcacagagcgcggtgttgtttcagccatgcctgtcactggtgaggcatgggagcgagggagatgactactggtatggcgacgacagctacacggacacctgctcttcctttacaggttgcacgtggacctgcacggcgtcacagaccacataaacagcgtcatccgacgtcgaggcgatgacgaccgcgcatgggagctcgcgtcaatcaac

SEQ ID NO: 18247 - DNA, 373 bp, Zea Mays
ttcggcctcgcactgcaataaagactcaagcactagttgatttcgtatcagagtggaccgagaaacaagtgccagataacccgaagactgtagaagtatggcagatgtatttcgatggctcgttgaagctgcagggggcaggcgcagggatcctctttattgcacctagaggtgaacaactcaaatatgctcttcagttgttattctcagcatccaataatgcagtagaatatgaagctctgattcacggattgaacattgccatatcactgggcattaagagattgatggtatatggagattcactagtggtcataagtcagataataaagaatgggattgctcgaatgactctatgggcaagtactgcaca

SEQ ID NO: 18248 - DNA, 677 bp, Zea Mays
tgttgctggtttgtagctctacaaatttgctgcagagcctcagattagttaccatgtaaatttgagagaaaatgaggcccaaactttgtctgtcagacggactgaataccatttccccatggtacactaaccaaacggatcaggtcgccagcgcgactgtcctcgccgccgatgactccctccaccgcgattcgtgccgtcgtcgccgtgatttgtgcccgagttgaactggtcgcgctcgtgccacgtcgtcgtggataagtccggcaggtaaaacaaattcgaccaccgtactagctcgtcgcggtggaactcgataggctcgccggtgaccgccgcctcccggccgtgcgccgcgtggctctatctttacaccgcgtcaccatgactctctaccattgtcctgtcaacgccggtgaggttgccacggcgttagccacgaattcactgcgccgcggttctctcttatctccggccgccgcgttgctcgaccaaattaagcgccgctgtcgaagcctcctataaattgagcccccgggcagctgcgctaggtcataccgaagccatagcacccactctccccctcgattagcccccctagccggagaatcgccgttttcccccaaatcagctttctgccaccgcaaagaagacctcaccgtggccagctcggttta

SEQ ID NO: 18249 - DNA, 695 bp, Zea Mays
aatgcataaaaacacacattcactactaagtgcgggagcgcaatcgataaggctagggtaaggcctggccgggcgatggtgtgacttgtggttggcggggatggtgatgcgggcacaaccaacacccgatggtgtaggggcatggctggtgtttgacagtgcggggctcgagcaacgagagagagagagagagagataacacgagtgcatcaagaggaaggaggcaaggcatctatagggatggaacctcagcacagagatatatgtgttaaggtcggcaccacatatcttggtgatgaccttcgtaccacgagccatggcatcgacatactgtcatattagggccacaatagctcacacatcatttatggagtaataccttgacactacaacctatgtcagtgtgtgggtgggaccagggatggtacaaccaacaacgattaatgtgggacagagctggagctaggtggtggcacggtcagagcaactcaatggtggagcaaacgtcatgggattggtctagagcgtggctagcgtcaagatcaatgaaacagatcttcgtgctgacctcggtatctacatcatttgtagcgtaatacctcaacattatgaggcatcgagccatgtatcttcagcaccataggtcatggcgctaggccgctagtccatagaatccagacgtgatcgtataagag

SEQ ID NO: 18250 - DNA, 422 bp, Zea Mays
ggaattaggaggtctggttggggctatacggtcgcaaagagctaccaattcaccgtgcacactcaatttggggagaggtggagaaggcagtgcgaattttgtcttctaccaagttcaatggtgaaattgtgagtgcctcgccgtggtccatggcgctatttataggcacggcggtccggctaacgaacagcagccacagattgtattgttcacgcatggataccacgtagagaagaggcacagtaaggggaaaacaaggcatgggtgacaccgcggcacaagtgaccgagccacggcgaccgccggtgggatatctccggccacacatggctgggttcgcgggatggtgccacgtccgaatttatctctccacgatcgactccctccaccggatcactcgagcacatccggttcaacagtgc

SEQ ID NO: 18251 - DNA, 451 bp, Zea Mays
agcgctggagtgtcagtgcgggtggggaatgcttcgccggcgtggggcctcgctgtggcggcgttgtggccgccgtggtgggctgtccgtgggagaagaagatgcttgcgccgtccgatcctctgcggatggttgggattagaagccaggtatcggttcggacatgtccgcttgagaccatcgattagaaatccgatggtagagatcggatctggacatcgtaaaaccttggccgttgatcgctccctggacggctcagattagatttagatctcataaaaccgtagccgtcgatctctgatccagcgatcctggacgcgtaccggtccattttggttcggatttaatctggtgcgctcacatctaatccaacggccgagatctcatgatacccgttcgcatggctaaactgcaaaagagaccctctgtttttgtaaaactaacccgcggt

SEQ ID NO: 18252 - DNA, 1088 bp, Zea Mays
gagctacgggcgaggtcaatttatagagccctcaagcggtggccgcgaatttaagcgatgacgcgcggcggccggaggaggggaagagtactggcgcagcggcttggtgtctaatgccgtggcagttactccggtgagccacggggagtcacaaaggttcacggtgacacggttgaaacacttaaatacgtggcacaaggccggaagacggcggttcaccggcgagcttatctgctcaagccgcagagtaagggggctacgacggtgagtcaccggagctatccccagccgtcgagctactacctggcagacttatctagttactgacgacgtgaatcgcaacggcggcggcgtgaatcttcgcgcagagaggtcgccggcggtgaggatccgacgctggcagtctgatctttatcgggctactgtaccatcgaagtgggattcagttggcctgacagtcaatatttaggcttgatttgctcacaaatccctatggtaacatactctatgctctgcagcaaagttggagagctatataccatctatatttcgactatagggattgaaatcatttgatcactagatcaaggttaaattcaaacccaaagatggctctgttacactgaaattctgaatttcagagttccattagcctgacagtccaactttaggcttaattatctcccaaattctcttaacaactatgcttacactcttaagcaaagttgttctcctttgtttggtcaacaactttgatgtggtgccttaggcaaaaaccctagtacttgaaagttacaagactccaaagttgagccaatcacactgatttcagacttaggctatatagaggttaagtggtactttttgcaattagccccaaaacttagggtttcacttgcaaatcttcctaaatgtgaaccatgtgactttatatgctttaacatagtagttttgacactttagtccaaatgtgcacagtttttgcacataggcccctagggtttggacttagggttttccagggtttcaattgaggtttctggtatcccaggggtataaatgtaatgtagatctatctttagtaatat

SEQ ID NO: 18253 - DNA, 529 bp, Zea Mays
agcaacggagaaacttgaactgacctgagttgagctggccgcggtgagggtgttcttgcggtgtttttgagcagatgggggaagttcaaaattcgagctcactggtgatcaactgggagcaatactgggtggtgtggtgcgtgttgctcttgcggagctgacggcgggctcaatttatagaacccatgagtggtggccgggaatttgagcgttgacgcgcggcggccgaggaaacagggagctactagcgcagtggattggtgtccggttaccgtggcaacctctccggcgatcaacgaagagctaaagcatgtcacgacgatgtggtggagatactcaggcacgtggcaccaggccggaaggcggcggtcaccggcgtgcttatcgggttccacatagacgagctctgtacggtggtcggatttgtttaccggctggacttatccacggcgatgatatttgtgtgaccctgagcgctatccaaacaatccgagcacgaatcacaacgacagaagcgcgaatccatgag

SEQ ID NO: 18254 - DNA, 375 bp, Zea Mays
agtgggcactgaaggcccagcttcggtctcagcttgaacttgagtagcttcggcttctgtttgcccactttcggtttcggtctacgatttggctttagttggagtgactttctttgcaggaccagggctcagtgcctttgtagtctccagtacagcatctagcacgttagccattctcctcctcttgggagttgcggcagaagttttttgcacattcggtaaacctgttgttctcagtggactcaggatttctggtatttttgtcactttttccatctgtggctctttggccttattatcttcaaccttggctggctcaactgtagtcatcttcggtactacactcggctctacagcgctctgcataattgaaac

SEQ ID NO: 18255 - DNA, 348 bp, Zea Mays
gtgggggcaaaggagtaatcctatgcttgtatgtcgatgccatattgatttttgggacaagtcttgtcgtggttttggaaactgggggacaatagaatttgtgttcagtgggggatgctagcgggaactcactctgaatggtgaatcgctgggactcgagcagggatattgagagggtcagttatactggttcaggctctagccctagtctagtgtagtgttgatccttgtattgcttgaggattgtgttacaataggtgtgcatgtgggaagaaggagggggccctgcccttttatagctcaagggtaggaccttacagtggggacttgtattctaatggaggaagg

SEQ ID NO: 18256 - DNA, 575 bp, Zea Mays
gtggcttgcctttaacctctgacaggtgtcacattctgatacatatttggctatctcccttttcatcctggtccaccaatacaggggtttcagatcatggtacatcttggtgcttcccgggtgcatggagaatttggagaggtgagcctcatccaagagtctcttcttgaggtatctattttaggaaccaccaatctatcttcaaaccatagtatccccttgctgtcttggtgaaagcacttatacttctccactttctgattaggattctctttgatgatttgtactcccttgtcaccgagttgggccataataatctggtctaacaaggttggctcgacggagatgtgagacaaggtaccagaaggaattacttcaatcctcatcttactcaactcatcacacagggtattgatgcgagaatccatcaccatacaattgcattgtgactttcgacttagagcatctgctaccacattagttttccccgggtggtaatgtacttccaagtcatagtccttgatcaattctagccatcttctctgcctcatgttgagatcagcctgactaaagat

SEQ ID NO: 18257 - DNA, 1427 bp, Zea Mays
ggaggatcaaagaactgatgcaccaggtgagttgcaaagtgttcttccccagactgagctgggggaggatagctgcccgaaggatcctggggcggaggataagaagaggattgacctggatcccctggtggggaggcgaggcaaactgctcacgatcatcaaagaattcttcatcttctggagtcatgaaaggcaccccatatgcctgctggtgccactcattgatttctggtggaggaggatgtagaggcacatcagtcaaatggggagcaaatggcatacccatagaggaagcttgacgacgaagattgtcgtcaatctcccgctgccgccgagccagctcatgcacatctgaagatatatttctgcacatggaaaagaatgttgcaataccatgggccagactagcacccatcccgcgaccatgacctcgaccacgaccatgaccatgtagtgtgggagatccgcgaccaggagatggacacgagggtccggcagcagcaggtccacgagagctagagggggatttcctcagacgccctgctggattttttggatcaatccagaagggggtgtaagatagatgtcttgtgcctttctcatagcgaaactgagtcaccacttcaatcatcttcatgatgaagggggcgtgaagacatcccttgagagggaagcagacagcatggataacttcttgccaaatcatgtcaaaaacattgatgccttcagagctatttggcttcataaatgagagcaagactttgctctcttccacgatgttcatttgattaccccctttgggaatgagggtcattctgcagagagaattaatatatctataaaacttatgcagattggtggactcccaaaatttaccagtctcagatatatgaagatcccgggcttcatccttggtgggttgacgaaagtcatgaattttaatcttgtccctagaaatatcttcatcagaaaatccaagtatgtgagcaaacctccggtagctcaccttgtaccagctgccttcaatatagaaattaagataaggaaagttataaggactttcctcatcagccagtttgatccaaagggtagaatagaactgagcaataacttcatcattccaatcatattggaatgtcataatgttcttcatcctcttcctttcacaggccctcaaagcctgtgtcatctctggatcaccaattgcttcacatccttcccagttgatgtatctctgatgcaggataggccgatgcttcttaggaagaatcacagaattgtaaaaatcgacatgttggagggttcagaaccgattaccatcgatcctagcatcacgaatacgcaatgtagggttttggaatcggatgtcctggagaagggcggaccctccgctggcagtgaaatctgtgacaggctcatttgcagat

SEQ ID NO: 18258 - DNA, 722 bp, Zea Mays
gcgggaacgaagagttgggtggcccctatacgtcatgggcctgagagctggccccaatgtccccatctgcagtcttctgacgtttctcagcaggctccgacacgaacgacccgtcggcacagcgtagcctgcgtcgtctctcctcttccgatcccccagagctacctggggcgaaagagcctcccgtaggccccttgcccttgcttgaggagctcgggatcgtcgtaaaagcggcgccggatgccgcatcaccggtctggggacccccagcctgcacaccggggatctggatccctcggtgagggtatcgaccgacgatctggtgcaccgccataccactgtcatcaaaggtcgacaacgtcgccagcatcgccgccctcaggccctgttcatcgcagagcgcgcagatgtgctgagggaggattagagactcgggaacaaagacgtccccagtaattccctgcaccaggagctccagttccttctaggatagattggtatctggcctgtactgaatcctgcagtggtcatccgggccggtgaaccaacaggccatgcgcaaccttcgctgcagcggcgcgatccggcgtttcaggaaatcaccgagcacatgcatcgatgtcaggccgcccaaagccaagatctcgatcttgtccagcacgagatggaactccggcgagagggacggtttggccctccactgcttgcggtcgagggacggc

SEQ ID NO: 18259 - DNA, 529 bp, Zea Mays
tggacggcgggttcagtctaaaataacagggggtttcttttgcaagaatgacaggacgaaggggtatcttctattgtggaccggacgatccagattctagggcctagattagatcctagttattgaactctagcgcgtgatacagccatcggatgcccgatcaacggactggatcaaactaaccgaggcgctcgaacacccgtctgatccccatctgacggcattgatcaacttcacgaagcggtacgctgtcatctaatcacaaccgtcgaccagagatcaacggctgacaacccctccccaacctaacatacgcgcgcaacagcgccgcccacccgcacggtggccaccatggtcgaagtaacccgacccggcgatttagggccccagactccaattggatgtaagctacacgaatgcagggatacggcgaggcatggggggagttattaccggcgattgggaccgtgttgcggccggtcgacggtgttgagcggaaccgaggcggagctccgactccggtgagcaa

SEQ ID NO: 18260 - DNA, 543 bp, Zea Mays
gttgtaatggcagggtgtgaactgttgaacacaatcacctcgagttatctctctgtttaatcaaaagatgtggtgtagtatacagttaatcctggaaggtctttaattgtttaaccgggaccaggaacaggaacagatcatcaaagatgatggatcttttagtagtgatgtatactgacagtttctatgtgtagcaaaatcgaacttttggtcagcattcatgctacaatacatggaactacttacttgtttcaaggtatagtaggtagcagtcttaaactgaactactcgtcaaagtggaaggaaaatggttctcaagtaagatatgctacccaaattgatgttatgttttagtatatgaaagtgggatggcagaaagatggtaccacgttgtaagattcaggaacctgggaaaagggccacctgtgctgaaagaagttcacatttgtcaaggtctaaattgtgaggcaaaggaccttattcttgacttttaaatcaataattttttcctttgtcaagttaagcatgactttactttattct

SEQ ID NO: 18261 - DNA, 399 bp, Zea Mays
cggcgacggagcccggcggcgcgcccgaggggacggacgacggagacggagcgaggagacagtagtaccagtagagcgtggcgtgctgattgacaactggccttgtaaattgtctcctccccggaccatgaaacgtgcatgccctgcgatcgttggtgtcgggaagttttggaatagcctgtgtacgcctctgtttggaagcgatggatgctggtggtggtggcgctgtttgaatttggcgtgcacaagcacaacggagtggatttgatgttttggttttactactcgctcgctagtcatatacattgcctgcctgcctgcctcattgacattgaagagtcgtcacatattgttgctggacgcgttttccttttccctttgctcgcgttcgttcccgcg

SEQ ID NO: 18262 - DNA, 535 bp, Zea Mays
ctctaaagcgactccttgaccaaaggcttgggctaccaccatgcaaccagaatgtggaggagaccctacgtgaacatccatggaagtacaagagggagaacctgctcggacaccctcgggggctgggtcatagtttgcaccacccactcgagccagatcgtctccagcaacaccctcgggggctgggtcgtagtttgcgttacccatccgagccgagtcacccccggcaacaccctcgagggctgggtgagcgccaacaccatccttgagggctgagttctctgcagaagccacctctaaggctgaaggtccctcagtcacttccatgggagcaagacaatccaagtcaacttcctgaccctcaagaccgcgctccaaggtcgatgaggcgcgggacgctgcccgggatgaccccaacccggcgtcgaacacatcagcacaaacatccatcgcgtcaccatccgccggttctgataacatatcctctggaaccatatcttcaagagtttgatcatagttcgccagagacaattct

SEQ ID NO: 18263 - DNA, 1059 bp, Zea Mays
agtctgaaaatcagagaattggctccactttggggctttataactttcaaattatagggtttttgccctaggtcaccacatcaaagttgaagaccaatcataggggaacaactttgtttaaggattcaagccatgatcttatgagaaatttggagaaaaacccaatcaaagatgggctgtcagactgtttgaggttcgaatttcagagtaacagtgttatgagatgaactttgagctcgattttgaatgggatccagtgactttttgtgtgagcacattgtagcaaagttgtaaagggattatagttctacaactttactacagaaagttggcttaggtttcacatgaaaatttgagaaaactgggctccaatttgatctgtcactcaagtcttttactgaatccaaagcactgttcatcgtcatcagataatatcgcacggtggataaggttctggacctcgccggcgataaggacgccacgacggtcggaatggactggaggccgcggtaaatatcttgggtcacgtggcagtaaccctcagtggtggcggactctggttaaacgacgtcgccgtgccatccccggattctgccgcgcggcaagctcacctgcaccgtctgaaatccgcgatcctcatccgtcgccggccagccgtctataaatagagcgcggacacagcttcgtcaccacattccgcacatcagcaattgagcttttgactcgagctcaccggagagcccccgtagccccaaattccctcctctcctgttcttagctccgccgcaaaaatccttccgtgaccagcgcgattcgagatagcttacgacttctacttccccgtttaagtattcccaggtaaccgtgatgctccccaacctatccaattggattataccaccgtgaattgcttggaacatgcggttcctttaagtctctccgctatcaccgagggcagtaagatgtagagctccaattcaaaaattggtttaggggaaacattcagggagggtttaatccggtgtatgtcgctcgggagcgccggtcatagccccgttt

SEQ ID NO: 18264 - DNA, 319 bp, Zea Mays
gaaaagtcgagtcggacctccaagtaggtctctcaagaccgcctggacgactagtcgccgacttgaaaacagggttaccaacctttcaattcaaaatactatgaatgcttgctcacccttcatgttaattagaggtcggcctgagcctgcactcattcatttttagaaagctattcatttcatttgagttctcagcacttttttgttctcttcgtggaatgaatgacaacatagtatattgacgatccttgtgtaatatggtcatactattttagttccctaaacaaaggccacatatacctttatactaatgcatcat

SEQ ID NO: 18265 - DNA, 563 bp, Zea Mays
ccgagacgctcgcacccacgcagcgcatgaaaggcaaaactgcccctcctcttcggccatttgaatgccagatccaccgctcacccctcccatctcccattcgcacccccctcacctcgctcagcgccgcctcgcctggtgctccgctgagccaccaagctaagccccaccgagtgcgtcgagcgcccaacgtgcctgaagaaccgccacaatggctgcctcgaggcccaaagcgcccgagccaagcaccacccgagctccgtcgtcccatccacgctcgagctccatcgtgacactatcgtggctaagcatctacccccttcttcctctcctactacctacccattgtctcttttctccagccacagctgccaggccgagtggccgagcctccacagcccacccccatgcttgtggccacatcggtgagcctcccagcgagggcccgaacgccgccatgcatgcacaaccggggaagacgggtaccctgacacccagggcctactatcagcctcccctccccccgcgccaatcccttctaccatcctctcggcacaccaaca

SEQ ID NO: 18266 - DNA, 1232 bp, Zea Mays
tatgtttttcaatgggataatgcttcaatcatatcagtatatgaactgttcttgatgaattgagacggtctcagtagcattgaccaatggaaagtaagctactcacaaaattgagcaggactgcccatgacaaattggagacgaggacataacagttcttgtgtttcagctgagattatacatgtctgaggaaacaagtgccagtcaactgtgcaatgagaagtgacatgtccacaagcctaaatattacacgaacttcaactgatgtgtatgggaaactactttggaatggtaaaaacaacaaggcagggccacagaacagtcagggacgttgagctccgtgggacccactgaccttacaatttttaagctaaacatgtaaatatttctagcccaaaagaatttcaaccaataattctttggtaaagcattttttcttgaacacacaagagagttgtgcaccatttcaatagagaaaagaggaacagtacaaagaagggagaagagcccccttccgatgggaatactagaaactttggtaaagcacaaaatgtaaatacaacagaatatagcaggaggacaaattacatcatagaaaaactcacagattcagtaatttcgaaggagcagcacgtagaagaactaatgcctccttccaactccattgccgctcagacagaggtggaagacgttttagaacagatagacgccaatccaggtcttcaatagaatgtttggcatgtttgagcctccattctaacgcttgtctaccagcaggcgacagaccagtacttgaaaggtgatccgtatcagagccttttgattcgagattatgacgaagtatatcaagtaaaagcccaacaaaatataccaccacgttctttccctcagattcgatatttatatcatggcattcatgactaacatagcactcagaagggacagattgagacaatttggcacaatcatccatgtgtaacaaggataaaataatgctaaccatgaaaatctgcaaagtaacatagaaaaatgaagcttaatagcatacgtaaggaaccccgttgaattcttatctgtacaatacttttgaacagtgaacgtgatatcatacaggaataacttgcattaacaatttaaaatcaattgtaacactaccaaaaaaagcttcaaaaagtttaatcttgcattaataaaatccatttaatagttttatatttatgatctgtgtaggg

SEQ ID NO: 18267 - DNA, 578 bp, Zea Mays
ggagacccaaccctccgcctagaggaagaaggccacgttcccatagccagaaagttcagacgattgaacacagaaattctggggcgaggccgaagaagcccagcaaggggcctccaattactacgaacctgagcaggattaagggaaggagggttcaaacgattgaacaccgaaaatccggcccgagccagacgctgaacaccactaggggacttaacattgttgcgaatcggaacaacattggcaccggtgagagggagcttaacaatatccgcataggaaagattcttcctgccccggaccttcaaccaagaagccgcttcctcatccgaaaaaagcttgaattcatgcttccagttgggtccaccgtgattccaaaggttgaagaaagctctgaattccttacgctcaatgcatccagagttgtaaatatggaaacccacagccatcgaagaaaccgaaaaccgaaaaccccggtcagccagctgaagcacctcaaagcccgcggcgaacccaccaagggcagcctgaagaagatgaccaaccgagaccgaattcaacttgaagatgcatctgcc

SEQ ID NO: 18268 - DNA, 648 bp, Zea Mays
tcgggctattatggcctcgctgttcctcgaccacttgcaccgacgacgtggcctcgcggccgtcaccggagtttgcgcccttcactgcgattgtgccacgcctccggccattaaccacatcgtcgtgagttgtgatcgttacacagtgatcgtcgtggcttcttatcccgcaattgccacgaatcactgcaccagtaacctctcctcctctccggccgccgcgcgtctccttcaaattcattggccaccgctcaggagacctataaattgagcacgcaatgagcttcgtagggtaattacccatccaaagcatcagcacttgcctccaattactcaccagagaccacgaattgctcatctcccccaaatcgggtttccgccaccgtgaaaaggtcctcgccgtggctagctcgattcaggtccaatcttgtcctctactctcttgtttcagcactcttgcatgccactgatgctcctcaacccactccattaagctagactgccctagatcaccaggaacacccgtgctcatccgttgtttgcactgcttctgtggacagaatgatttagagctcgaactatgaaattgatcgaggggaaacgctcgttaggtgttgaattagggttcagccaaattagggcaacagc

SEQ ID NO: 18269 - DNA, 561 bp, Zea Mays
cgtgtctggggcttgcatagcgctccctcgccccaaggcggagatccgctactgccacatggctggtggcccatgacgtaagccaacaagaggagtctgacgtcgagccactagagtcgcgcagccgctacatttattgcagaaaggacacatcgtctaccggaaagccaacgagggatgtgccctctcggtatttaatgtgtctagtcctttccactggcagacagtgtcagacggcgcgccggtccaatctattatagaatagcgcgcccgtgccatgcggcggactggactcgttaccccttctacaaggagctttccctgcacgccaagtatacacagatctcatgtgtcagagcgctagaagatcgcctcagcagcacacgttcgtggctccgagtacaatattcgttaagtccctgggcccacatgtcggggctcagtacctttgtgcatgccccccttcggctataaaaggcgaggcatgcgacgttacaagacaggttcactcacaccccatcttaggcagacattcacaagctcatacaagctcccaaagca

SEQ ID NO: 18270 - DNA, 323 bp, Zea Mays
gtctcatgcatcatcgactttggaaggcagtcttcgatgtcaagacgttggtcaggattgcccgactcacatggaggtgactgaggatccttcagccttagaggtggttgttgcagaagacctagtcctcgaggatggtgttggcagtcacccagcccccgagggtgtcgctggtagtgatctggctcttgtgggtagcgcgagctgcaacccagcccccgagggtgttgtcggtcgttatccggctctagtgggtgacgcgagctgcaacctagcccccaagggtgtccaagtgagctctccttcccacacctccatggatg

SEQ ID NO: 18271 - DNA, 770 bp, Zea Mays
cggagtgcggaggtgatcccgcatgaacgtccatagaagtaccagaggaagaccccgctcggacaccctcggggctgggtcacggtttgcgctgcccacttgagccggatcatctccggcagtaccctcgggggctgggcagtggcttacacttcccacccgagtcgagtcatccccggcaacatcctcgggggctgggcaagcgtcaacaccatccttggggtccaagttctctgcggtagccacctctaaggctgatgggccctctgttacttccatgggaccagggcgatccaagtcagtctcctgaccctcgagatcgcgctctaaggtcgacgaggcacgggatgacctcaacccagcatcaagcacatcagcacaaacctccatcacaccatcatctgctggctctaataacaaatcctctggaaccatatcctcaagagtctgatcaaaattcgccagggacaattcttgcagaccaatgagagcagacaaggcaggtgaaggaactccactactttcaccactaccaatgaactgccgactgtttttccaagtcaaaggaacttcatcctcttcctccccgtcgacttcattagcaacacaggcagcacccccattgggatcagcagcagattgggcacacccattggggtcagtgtcaacaaattcagtcgcagacacttcttcagcagcaggaaccgaagcaccaacgttccgatccaaactggatactcgccggaggcgtctctttttctttttctgct

SEQ ID NO: 18272 - DNA, 483 bp, Zea Mays
caataacacagagacatgcaagttataacaattagagaaaaaaacaaatgattttgtattgttgaaaccttttaacccagcccattgtgttgtttataaaaatataagtaaattccagctatgtttatagaacatgtaaatttcagttatgtttactaatttagttttagtataaaggcaaaataaatataatgtgacacattgtagatagatatcaagaaaagcaccgaaatgtagccaaagctataaaatataagtagcaaatccttatactcacttcatcctaaatgtatacacacatagtgtatatcttagtgtatagaaaaaaaaactttgtatagaaaagtcaaagtgtcttcataatttagaacagaggtagtaaataggtatgaagaaaagctaaaaacgatctataatttggaacagagggactaatacatagtcaccgttagaatgtcgatggtaattactggttgagagctg

SEQ ID NO: 18273 - DNA, 346 bp, Zea Mays
tctaccaggaacactaccccacttaaaaggattctgacttgggagcacttgagctggcatagaaggtctgaccccggggttcgggtgactaaaggaatttctaggggtgtagaggggatgccatgcttttccgcaaacttagtggctataaatgaatgggatgctcatgaatcaaaaggcacagtagcgggagtaaattcaacaaggaactcaccaagcactactcctggagcttgctgggcctcttgagcgtcgacgtggttgactcgtgctctgccctggtactgggtcatgctctgctgactgttggagggagatgccttggaggtaggtgccgagggaatct

SEQ ID NO: 18274 - DNA, 393 bp, Zea Mays
tggggcgcttcaggtggtatcagagctgttaggttggccgcaggacgtaacccttagcctgatccaaaagtttttgagtcaaaactattttcttaaaaaaattcttgctctcatcccttcatttcaaaaatgctttccccctttccttctctcaaaagtcagatggaggtccgttgccaaatcagcttatgccagaatgaagatggtttccccaaattgctgagagcatgctcagttcgcctcggaatcaggagccaaccagagtatgatggtcatgaattcatcgagcatggcacagagaagtgtgtcgtgactgtatacattggatccagtccgcaccatgtggaatggagtgtcactgctgcggggcacagattcaaagacacctgccaa

SEQ ID NO: 18275 - DNA, 582 bp, Zea Mays
gtttaaaggggctgccataatgtgagcattttatcttcctttttaaattctagcggacaccagaagttgagtttgttctggtttaacatacataatgtgttcaagctgttgtttcagatacatcagtttcagtcccctgcctgcacataatactctctgaaaccgcttcgaacaggtactaccgcaacatcactgcaaacactctagcagtgctagaagccatggttgcacacaatgtgaggactctcatctactctagcaagtgtgcaacctatggagagcctgacaagatgcccatcgctgaaggaactccctaggtcagcagttcagttctgatttctgaaaccattagttcctttctaaaatcaagttgaacgcctctctagctagcattaacaaaaaatgaggttaaagtttacaaacttctccttctcgagttctgagcataaactatatatgtcgtgcagttcccgatcaacccatgtggtaaggccaagaaaatggcggaggacatcattctggacttctcaaagttgaagaaatcggacatgatggccatcatgattctcaggttggattgga

SEQ ID NO: 18276 - DNA, 505 bp, Zea Mays
cctcgatgcctcaaatgtggtctgatcatcaactcccggggccctcaaagctgctggtggagtaactgcctctacaacaatagctgtttgcatatgcgcacttgcatctgaggtaaactggttccctccttgttgttcttcctgcaccattattacgatatccaagcatggatttgttcgatgaactgatgtcggcgtcgtatactcactgattgactcgttaccccatggcgctgccatcttccagatcagattacgcccttcagccagccacgccataaccaatgattcgtactatctaccttttttggaagcctatgaatatttcctcttgaccatgcgcatatccattatcgtggacgcgatattcacggcgcatatcatttatccgctgaattctaggatcgtgggcgcgctaatcgtgggcgtaacagccatttatgcaatttatacatagatttatgatgtcgtaattgtctgtttaaatgtgcttccccaattttcg

SEQ ID NO: 18277 - DNA, 986 bp, Zea Mays
gcaaagtcacacacacggctgacgacgttcctgaacagcacacacgtcagcacagtctcttttggcagcccatgacgccacggtgagctctgcatcaggtctcccttggcctttggctgagaccggtcctctgatagttgacctcctaacggaaagtagccgagagccttgtttgtcaaatagtgcactggcagccaccccacccctgctgtgcctggtgctgagttgaacgaagcaagtggcgagtggtttgtgtgtgcgctgcgcaccaccagcgttcatcactggctaagccacatgcagacattccctttggttctgttatgacatttcctttttcatcagcatcacactgagcacatactacatacaacttgcagggatttgttcttttttttttttgcacggcatggttgattggttggttgtacagcattagaattgcgtccctgatatattacctacacgcgtggcggaaaccactgcacacgcactgacgcacactggtgttccggatactttggatggtggggttcagctactacagagatgacgaagggcggcgaccactgctttttatttgcagggttggttcctgtgtgctggatggagggagcagagaccaaactaactaacctgcctttgccgtaaaagcctccaataattgagggggggcatccaatccaatccaatccaacccctcttttcattcttttggccagccaaagcccatgacgagaggagcccctgccccaccacacacacacgctatgtacgatggctgatgagccgatcgccgtcactgtcgccacactcacctgtttattaacctctgctactgagtaatggctgtccttgtcgtcctgtcctgtcctgccaatcaagctaagggtagagatgcatacttggccggatagcgccaccgccggtcgtcgtcggccggtggtgcgtacctggccgagctaggccagtcatggtgcggctag

SEQ ID NO: 18278 - DNA, 750 bp, Zea Mays
gagacgaagatgtcactcatgctcttcctccgtctttgagtaaatcagaatatcatccaaaaacacaaccacaaagtcatccaagaactcatgcaacatcttattcattgcttccataaaagcagcaggggcatttgttaagccaaaggacatggcgataaactcgaagtgcccatacctagtgctaaaagctatcttctcaatatcctcttcgcgaatcctcaactgatgataaccagagttcaaatcaatcttagagaatacctgggcacctctcagctgttcaaagagaacgtcaatacgaggtagcggatatttattcttgattgtcacttgatttaaagcatgataatccacacataacctctttcttttatccttcttctcaacaaataataccgggaaagcccatggtcacctgctaggcctaatgaaacccttagcaagtagatcatccaattaccgcttcaattcaacctgctcctttggagccatccgatacggggtcttatgaataggctgcgtacccggaattagcttgatttcaaaagtcacatcgcgctctggtggaatgcctggtagctccactggaaacacgtcggcataatcacacaccacacagatgtcctgcacccgcaaggcagcctcactatccaccatcatggaaaaaaggattcccgacttccttgaccgacgatccggaagtaattgggacaacaaggaaagagtgtactttggagagcttcccaa

SEQ ID NO: 18279 - DNA, 1035 bp, Zea Mays
tgttcttgaacggctttgtttccggctatatattttcagttcaaaccaagaggccattctatcaatagagagcctcacagtcaactgctgcctcacggtcaggttgtgagcaaggtatgtaatcctgaattttggtttatttcctttttgacagagatggcgttgagctcggcttaggaaagtcatcccccgagcgcgtccttattgttcctttcctttttctggctttgttttagcatcaagatgtatataaacagatgcctaatactaagaaaaaatcagttgtggttgcacaacaccaggaatttcagaatgcttattatgttgttgagagttctgatgattggttcatccttgccggagcttcgatcatcgccggaaaagagtttcggctaacgtttgttattggagccgtacgagccatgggtggatcgccactctgctctaccagacggtggttatagaaggcggcgaggtcgccatgtttcaccctcggtagaaccacacagagggcgccgcaaggtcatgatccaccacacctttgaggagacatctgccatcgggactcagtttcacatgaccaactaacaggagtggatgatgctgatgtaaatgaacttggaggcggcagggtggcagtacaccattgagctagaggaaggagaggagatcgtcggctgccatgactgcctggcgctcaccgcgatcctttggctctatgccgtctgacatgcttggtacaacaggtttgccacttatttgctctcactgtgatttggtgaggttaagttaggcgcctctatattcatctattatcatcatagtgactctatgtacctcctcttgtgtgttgatgacattatgctcattgtcgtctctcctttgagtctcatgcaatggatcattacaaccattcaacatgaattcacaataaaggatttgggtcctcttcaccactttctaggattctgttgagcgtcgcccggataacatgtttcttaagtagcgtcagtgtaccctgaatatcttggagcg

SEQ ID NO: 18280 - DNA, 481 bp, Zea Mays
gtattgtggcttatttcaatcgcaccgtggcccctcgccatgccaagttgtccccttatgaaagggagtcgatcggcttagtcaaagtcgttcgcaattggcaaccatacttgtggggaaggtccttcacggtccgcactgatcatcgcagtttgaagtacatactggaccagcatctaaccactattccacaacacacttgggtcacgaagctatttggttatgatctggatgtggtgtaccacccagggaagcaaaatgcagcagcatatgccttatctcgtcaagatgaggagacctttagtattcatgccctatagacaacatcatttgcagtttttgacataattcgtcaagaacttcatgccgaccaagagcacaagaaattcaggctcagatagccaatgggactataccggcaaggcggacaaaggtggatggactgttgttatttcagggcaaagcatatgttgggatttaa

SEQ ID NO: 18281 - DNA, 376 bp, Zea Mays
agagagggtgcgggtggtgctcaaaaggaagttggggtgcgtgggcaggtgacgtgcccggagctcttggtgtgcttgcacgctggtccacggcggtttgcagggaaggcggagctggcaggggggcccacgacgcatcgagagagagcgagtgcacagagggaacagttcgcagcgctgatgggccgagtccgtgggatagagagagagcgcgggcgaaggaaaccgacgctgatagaccggccccaccgggcagagggagagagggagtgagagcatgcgggcgcgggctggagccgacaggcggggaccgcctgttggagggaggcgagcgcgcgcgcacggggcttagctgggttggtttgggccggcttgg

SEQ ID NO: 18282 - DNA, 282 bp, Zea Mays
cgcgcatgcacgccaagatcctcggccacgtcgcctgcccacgcacccagctcccttttgagcaccgcctgtacccgcactcccttccttgcctcatttcacacaagctcaccttctctcgcgctttgctctcgccgctcggcttaaccgaagttccacggtcgctctgccgcccgtccagctcgccagaagccgcgtcaagccaccccgagctccgtcccgaggtgagacatctgttcccatgctcggtttctcccaattccgctttgtcttggccaattt

SEQ ID NO: 18283 - DNA, 395 bp, Zea Mays
cagcgaggtgcccgtgtataaaatgtcggaacttggtttggttgaaaaagtggagctctcgtatcatgttttcaaacatggctttatgccgaactatctggtatggcatgagcatagagaggtggaccatactactgagtcggaaggggactaggatgtagaccgaatggaagagatgttggatgatattaggaatgagtacccagaactacagaataatcaagcttttccagaggatgtgagagagttctacaagcgtcttgaagcctcgaaggcttaagtgcatgaaggaaccaatgtgagcgtactgcaggtggtaacacgtctcatggcgatgaagtcaaagtacaccttctccaataattgttacaatgattttgtgaaactgattattg

SEQ ID NO: 18284 - DNA, 556 bp, Zea Mays
gcagcagtgcctgggcttatcttcttccaaccacactctctctccctcatgttctttctgctcgtcgcactttctctgccgctcgctgctcctgccgcgagtcccctggtgttgtgcgcgcgcgttcatctgcggaaaaaaaaatcttctcgccaccgcacagcatcgtcgctatccttcttcctcctatgatttttctacggcaccgcccatgagccctttaaaagtacagccgagcggctctcccagcgttctgctcccgctcggtccctgctctgcagctcctgcgtgtcttctccctcgccggcagaaacgcccagccggagctccactgcatcgtgcccaagttccctccctctgcccagctcgccgagcgtcctcctggccggagcttcctgctcggttcctcctgcgtcgcgcgccctgtttttctgtcccctgcgcgcagcttgccgagctcgccctgcccactcccatggcgctcgaccgccctcctgctgctcgcccttagccgagcgctcctcctccagctccttcccttagctcgccctcgctc

SEQ ID NO: 18285 - DNA, 392 bp, Zea Mays
agttcgatgatcaccatcccaagatgtggaaagctaaatgtgaatcatattttgatgttttttcggttgctagtcacttatgggtcaaaattgctattatgcactttgtgggttcagcgacttcttggcttcagtcgatcgatcccagtcttaggcatatgtcttggcctgagttttgctctgcggtttgcgcaagatttgagagggatcagcacaatcaccttcttagacagttttttcacatcaaacagtctgagagtgttactgagtacataaatcagttcgacacccttatgcaccaaatccttgcccatgatcctcagtttagtgtattagctcttgttaatcgatttgcagatgggttaaaacttgatattaagactatggatttt

SEQ ID NO: 18286 - DNA, 325 bp, Zea Mays
aagcctgcaggcctattgcaaccccttccagtgcccgaatggaagtgggaggagataggcatggattttgtaaccggactaccccggacgcaaaaagggaacgactctatctgggtaataatagaccatcttaccaaggtagcccacttcatcccagtgaaaactacctttggaggagccacccttgcatggatttatcttaaagagatagtaagactccatggcattccaaggaagatagtgccagacagaggaacccagttcacctccaaattttggacgagctttcagaaagttatgggcaccaagctagatttcagcaccg

SEQ ID NO: 18287 - DNA, 1346 bp, Zea Mays
taaagcatcttcgttatgtctatctgcataggatatcacttgagggaatgcgtgggcttgttaaacttcatcacttacagctagttgattgtttgaatgattgtggggaggaactaaggcaagtgatgtgtttggggaacattgatcatctgcgatatgtaaattatgggtcgcgtagaattggtgagtttccaattggtagactcacttcacttcaggagctgcacaactatcgggtacagggaggtgaaggtaacaaaataagtgatatcaagaacctgggtgctcttcgcgaactagatgttttcagcattgagaatgttgaaagtcttgaagaagctgataatgccaagttaaaagaaaaaccatatctcaactctctatctctcatgtggtcagcacgtgctgatgcgaaaaatgggaaagatgatttgattcttgatcatcttgagccacatgcccacattcgaaacctgaatatttctggttattgtggtgcaaggcctcctatttggattgaaaatctccatgtgaagaacctggtgtcacttgagttagcaagatgcatgtattgggaacagctgccttcactcggagaattagaatgtcttaagaaacttttgttggagtgccttcctagcctacaacagattggtcaaccatctcaactttccaacattagctgtattggttcataccttcctccacatcttgacacattgattataagacattgcaaagaactgaagcagatccctatcctaccaccctgcttggttcatttggaaatatgtagggttgggttgaccgaattcccaagtataggcaatatacatggtgagagtatcgaaagcaggccatctaaaatgcagtttgtcagtgttgaagaatgtgaaagtctgaccttacctaaaggaagccctctgttgcaaatacactacatcagaacaatccatgtcctacacattagtgactgtaaagaactggaatctgctcccctgttcgatgaaatgagaaaccttagagagctcagcatcataaattgccctaagctgagggcatcaagcgaaactgaaggcaagaacctgtcaccatcactaaagaatcttataatcaagcagtgtggtgatctagtgcattttcttattaagtcactacatggtctcgttaacctttcagagctggtactagaaaattgccccggccttctatcccttccgtcagctgatgtgttcaagagtctcaagtcgctgaagttcttggaggtaattgggtgtgagaatctttcgtcatttggtggactcagttccctttgttcccttgttacactgaagattagctcctgc

SEQ ID NO: 18288 - DNA, 790 bp, Zea Mays
atcacatacaaagtttggagaaaaataagctcaaagttgtgctgtcagtcactctactgactgaatttaggtcaccagtgacattggccaaacttttgggacaaattagaataagatctgttgcttgaatgagggtagttgctatagcagaattgtagctggtatgaagggctacaagtttgctacagatggattagcaagttgttgcacaaaaattcgagatctaggcattgcaattcggctctgttagaccaactgaatgagttgcgcgatggtacagtgtccagatcagaacgccagtcagataactcaccgtcggcgaccgtgcgcccggattcgtgcccgccgcggtgattcgtgctcggcgcagttggataatggcaaggggtaagaaatatcccccgtggatggactctgaccactattctactccggctgccgtacccgcttgagtcacggccgctttggattggctcgctggagttagccaccccacaaccttgtgtttttgcctcggtgctttaaccacgccgcactgagtcacctcaacccattcggtgatcaccggtgagcttgccacggtaaatgccaccaatcgcttgcgccagtgcacccccttctctccgaccgccaccgcgcgagctcaaattcacgggccaccgctcaagggtcctataaattgagcacacccttggctccgctatgtaattgtgcactcaacacacccacctgtgcctccaattattcaccagaacccccgaattgctcagttcccccaaatcagttttct

SEQ ID NO: 18289 - DNA, 549 bp, Zea Mays
atgcaggcagaggagggcatggggtggtggcgattggtaggagagtcctgccatgatggcgcggtgccgttgccagtgatcacccgcggcttcccaacagagctaggaagacgggggagagagaaagggaacttcggcgggaaattcacctcgtgtgaatctcggacagtggaggagctccgttcggcggtggcggaccacggtcagggacagcggggtggccctgttgtggtgaatctgaggcgcaaaccacgcgacggcgagagagctccggcgagctcgggcgcgggcaggtgcagcttgggtgggtgcactgaagtgaaagaaaggaggcagggagggaagtgggcatgtgcagtgacttcaaagggggtcagggcggcagtttcgtgttgggaggcgatgtgggcgcggctgtctcggtgtgcatgcgtgtggctcgcacggacgaacggttggaggaaggggggctgccaagatgggcctgtagggcagtggcacagacgtgtgtgcgcgcaacgggcagaggcgctgatggttggagcccgc

SEQ ID NO: 18290 - DNA, 634 bp, Zea Mays
gagcaatcctatgagcggaatgagcgaccaaccctctgagcggtcccgcgaggcgaagcatatgactgagtcctcgccgagcaactcaacaagaaaaagggtcgatctaatacagttgacagacatcaacgcgacaagatgcgtcaccaccaaaccacgtctggaccacgagtacggtgccgagaagtccctgtcaaacatgacggtacgcccgcgtgtactgtcttaggaatatccccgctgacttgtagggctagtcaaccctagtcgtggggacctcaacgccgaagactctatagtgatccacataccgagaaggacgagagaatacaccattcctggtgtatacctacgcacgctagaaagtgacgcgatgctcatgacaagagacgaagttgcaccaagcatgaccctgaaccccaccgtaagtccaacctgcaagacctaccaggcaccactacatcagcgtcgaactcactatagggacccgtatgccagacaaatgaagcgatgcgccataccaagggtacgacaacccacgaccctatagatgatgtcaggaggactacaccacccaagagctacaggccgaactccctctagtagaatataagtccccactgtaaagtccgac

SEQ ID NO: 18291 - DNA, 641 bp, Zea Mays
tataaaagcaaaaaagagtaggactggaacaaattagagctttcttttggccaaaacattgtgtcatctttagtggatatgtctggattcgggcacagtgctattaactatgcgagcttcagactgctctcaaaggtcacgttgttgttgaggccaaagacgcccttctggctgcttatcatgatttagggtgggcgccattggtgggggtggtggtaattgagcccaagaagcttgagagtgacttgctaaagctacagaagtcgtaggctgttggttgcctacgtattctgggatgtatggagaatagcatgaagtagtatggaggacctgcttcggctgattctgtcgtgcctcggcttcagcaatttccttttgcttttggatcatgacctggcacatcctcattgtgtgacccttgtcctcgccacaaaaaggtagaacaacttcctaggctgattaccgaaccttcctccactgaagcttcttcctcctctgcctctcggagctagtggtctgtaagatgtttgttgcatgcctgaagactatgagctatgatgactactctgagcattgttggccctttcaccgttggcattggaattatggattgacctcacatgcctgggatgaagtcttcc

SEQ ID NO: 18292 - DNA, 683 bp, Zea Mays
gtgaaggttatccgatcgacgatgaggaagagggaaagtacggcggctagccggattggtgtccagcccaacggcggtgatgatcttttgaccccgcgacgttatcgagactaagatgggcacgaatcacctcaccggcacgaatttacgtgtgaggtcgtcggcgacggggtgagcggtggatttgatcttcgtcaggttactgtacaatggcaaaccccattcagttggactaacagcctgatttgcagagcaaaaatctccctttcccatgtaatgacttgacaatctgtctttaaagaagttgtagttctattattcagctttaatcttgttatagtaatcataaccagataatgactggatcatgatcaaatttaagatcaaagatggcttcattacactgtcataccagaattcagtcccagatagcctgacagcccaactttgagtgcatttttctccaatttcttcataacaaccatgcttacactcttaagcaaagttgttcccctttcatagagctacaaagttgatgtggtgacctagggtaaattctcactaatttggaagatatagagctccaaagttgagccaatatcatagaatttcagacttaggtttatagggtttaagtggtgctttttgcaaatagaccaaaaacttaggctttaacttgcaaa

SEQ ID NO: 18293 - DNA, 743 bp, Zea Mays
acacaggtatgataaaggaagctgaaaagttgatcgaggagatggaaatgagtgggattgtaaatcctgatcggtacagctataatcaaatgttaaagggattgtgcaaagctcatcaattggacagggcatttggttttgtttcagatcatatggaggttggtgggttctgtgatattgtatcttgtaacatactgattgatgcattctgtaaggcaaagaaagtaagttctgctttgaagctgttcaaagaaatgggttataagggaatacaagcagatgctgtgacatatggaactctaattaatggtctttacggtgtaggatactactacctagctgaggaaatttttgagcagatgctgaaagctcgggttgttccaaatgttaatctgtacaatattatgctccataacctgtgcaaagctggtcagtttgaacaggctcagaaaattttcttgcagatgattcagaaggaagtgtcgccagatattattacttttaacacgctcatatattggcttggtaaatgctcaagggcaattgaagctattgatctgttcagggatatgacagctagagggatagaacctgatagcttgacatttaggtatctgatcagtggcctcctagaggaggggaaagctacacaggcttatgaggtatgggaatatatgttggagaatggcataattctcgacagagatgtttctgacaggctgataagtatgtttaaatcaaac

SEQ ID NO: 18294 - DNA, 491 bp, Zea Mays
ggcgagcaatgattgctatcttgtcgagctaagtcagactaagttggttgaaaagtccatgagctaataaactcgccataagaagaaaaatgctctcagacaactgctccacttgcgcaaggcacacaagagatgaccaatatcagtatgatttcggtgcggcaaagtagaacccaaactcaagaatatataatgggtgccaaaatcgtgccctctgatatgtttgcaaagtaatcactggcagtggtgaataaatccaaagttgttcatgtacttcccgactgaataagcaatggatagtgtcaccacacttctgtcgcgttagttgcaatgatggccctggttgctctccatgaacatgctctctctcatactgttaagattgtagggttgagactgaaataaattgcaagccatccaatgcaaaaatgcaagcaatagagacatctgaacatatgtagaactgaatagtgcacaaaggcttctttctg

SEQ ID NO: 18295 - DNA, 395 bp, Zea Mays
ctcgcatgctttagtggaaggcaacaacgacagaggccacgaagatgcgcaggatggtgttcctgacctaacagaaaagctacatgaaggtacactttcaccgtgctgctgttagatgatatggaggttagactccatgttgagtcaagaagaagagccctctaagttggatacaaactaccaataaagttcctccaagatcaaatggagatcctagggagattcatgtgccaagatcggatagggcaatcaagactacatggaagtagttccatcacctctttgtccccattggtggtgaggatagtgatggcatatatttagaggaacccgataaggttgatggtcctattgtacttttctaaaaggtgagggaggaacttatgtgtccatgc

SEQ ID NO: 18296 - DNA, 546 bp, Zea Mays
aggtccttgggctactattcagctgagttactaacattgcagaaaaccccctaggcttgtgaactatctaactcgctctcctaacctcaccggaatactaaccgctgcataagaaagggcagcggggcttaccggcggtgatctagctctcgtgaagtgtccaccgaggtcggggaggtcctagcgaacacgtcgaggggctggtggtggtcagagatggtcggagtcgctctggtcgtgcgcgagggcggaagaactcatcggcggcgaggagtccggcctaaatacggtggtagagttcaattggttggcttgagaagctttaccaggtgacgcagaggctgtgcgcacgaggaatttgaaaaatggtgtagtggcttacccggtccacactctccggtgagcggaggaagtccggcgagggtggtctggcgtctccggcggggttgcgcttggtctgagggtttgggaagcttcatgggcctctggtgaagctaaccgagcaactagcgtggatgcggggtggctggggtgagctagccgcgg

SEQ ID NO: 18297 - DNA, 1254 bp, Zea Mays
tggccgattaaggcgacgaccggcgctcccgagcggcggacatcacatcggacctaccccgagtgtttcccctaacctaattgcacaaatggcgagctatcaagctctgtccgcgtgaaccgaatgggtggcggacagttgagtgcgttcccggtgattggtgagcccgcagtccaaattggtggttcggcaagcatcgtagacatgtgagaaagcttaaacgagggagagggagggttggactgaccgggaagggagctggccgcgttgaggtcggtttcgggtggcggaaactcgaattgggggaaatgagcgattctccggctatgggggctaattggaagcgggagtggtggctatggcttcggtatgacctaacgcagctggccgggggctcaatttataggcagagcaagcggtggccgcgaattttggatgagacacacggcggtcggcagtgaggaagaacggtggtgcagtgaacacgtgttcaccgccgtggcagtaactccggtggtcgacggggagtttagagggggtcacggcgatgcgatggcgcggttaggacacgcggtggccaacggcgatggcacgacgacggtgagcactttacccgcgggcggtgagccaggggagatgaactacggctagccggagtggctcccaggtcactggcggcgatgatcttttgaccccgcgacattatcaacttaccccgagcgtgaatcatgacgccgacgacgcgaatcacggtgggggggtcaccggcggtgagcaagccgcactggcgttctgatcctatcaggctactgtaccatggtgaacaccccatcagagcacctgacagccagagttgagggtcgattttctccaaaattcctgtggtaacacaagttaatctttgcagcaaacttgtagagcattataccaactacaaacttgctatggcaaccataggtagatttccactggatcatgcttagaatttagcttgaagtcgatgctagtccactgctagtctgaaaattcagaccataacagcctgacagtccaactttaggctcatttatctcagaattcttcataacaactatgctcactctcttaagcaaagttgttctcctttaattgctatacaaatttggtgtggtgacctagggcaaagatcctagaatttgaaagatacaagactccaaagttgagccaatatcactgaaatcagacttaggcatttgagaaagagtgtggctcttt

SEQ ID NO: 18298 - DNA, 846 bp, Zea Mays
taaacctgcaggccgcttatgctcggccttcacgcactgacatacttcacatgcggccacatacttagaaacatcaaccttcatccgcttccaccagaagttttgcttcagatctcagtacatcttggtttcgccagggtgaatggtgtaaggcgttttatgagcttctctcaatatatccatcttcacctctgatttctgaggcacacaaaggcgacccctgaaacgaaccaaatcattctcatcgatggagaactctcagggtttaccatcgccaaccctctttcgagcttcctgcaataaatgatcctactgctgagccgcacgcactttctccatgagggaagattgaataagcatacaagtctcctcactagcggtgccaacatagcacaagacgatccccaaacagtccagatcagcaatcaactacaaggccacttttggaaccccggacctgctaaggccatcagccaccacatttgccttctcgggtgataatgaatagacaaatcataatctttaatcaattcgagccatcgacgctgcctcaaatttagctccttttgagtaaaaatatacttgagacttttatgatcggtgtaaatgtcacaagcctcgtcataaagataatgcctccatgactttagagcaaaaaccaccgcggccaattcaagatcatgagttgggtaattcccctcatgctttcttaactgccttgagccataagcaatcactctgccttcctgcatcaacacacagccaagaccaatacgcgaagcatccgtataaactgtgaaatgcttacagctcttaggcaaagctaggataggggcatccaccaac

SEQ ID NO: 18299 - DNA, 881 bp, Zea Mays
agaagaccaactcataatgagttggtttttttaagtttggtaatacttcccctccctttataatgaagaagatttcatcccattatgcgtgtgtttctttgctttcccatcgctccttttccaatcgatcggtcgatcgtgtttatgcttaatgtagtcgttgttcttggatgtaatgcttgagtaacgacttggaatcgtcgagtcgcattttagatttgcctgcatattcgtagagaaaaaacggctgatttactgttagtattttcagaggtggcaaccgagtggttctttttgcgatgccgacgttttagaggtaacagccgagtccttttgagccacgtcgtcgttttagaaataacggccgagtgattacttgtgacgtcggtgttttagaaataacaaccgagtgataacgggccacgtcggtgttttagaaataacgaccgagtgaagactggtaacgtcagcgttttagaaataacagctgagttatattgggccacgtcggccgttttggaaataacagccgagtgatgacttggcatgtcagcgttttagaaataacagctgagttgtattgggccacgtcggcgtttatggaaacaacggcctagtgatgactgggcactttttagaaatgacatctggcccgggaaaaccccatttgtactacgtcgtcgcatgcctctgcattctgagtcctagccctgcttttctgcatccagaccttctctgcttccttgtgatcttgcttctgctcagttcgctagcgagattgagatggcgcccaagcggaagaataagagttcatctaccgcgactattcctcccatcgatcccaacagtcagttgcctttcgcaggtaaccacatgtctcc

SEQ ID NO: 18300 - DNA, 537 bp, Zea Mays
gtaggagttagtgaccttgtcgtctccatgacagcgtccagcacgcttgtcattcttctcctcttgggggtaattgcgggagtttttgccaccttcggcaattctgcctctggcggtcctgtcttttcctctcggtctagcttcttggttgtcttttcttcagctttggcagtttgtatcgacgcactctggccgattcgactatagaaacctttggtactgctgccaattctttggcgcttcgggcggtaggagcagcttgttccgctttaacagtggaagatgctccttcatcaaatttcggcatcgtggccatctaaatgtatctcgaccggtgcgtcaaaaccttgatcttttttcccttcggcacaacagagatggccgaagcgacagttttcctctttttccctgctttcacgaggggtagcagtaatcagggtatatgaaaccaatcacatcaaaaactttgttcaaccttttctgtcctcgacctccgaaggctgaggtcaaagcatcatcttcggctctagtgtatgc

SEQ ID NO: 18301 - DNA, 540 bp, Zea Mays
cttcctccgttcttcgtgtagattttctgatccgccgcgcccctaactcgtctaatcaaggtgcagtgcaggagtaggttgtgatgtagggtaaaatactgctacttgcctacccttgcctcatctaatcggggtagggcgtaggagtaggttgcggtgtaggctgacacgctaccgtgtgtagggatgctctggcgacattgtcttgtcttctccgtctgtcatcctttgcattagttccttgcactctacagtgggggccatgatggcagttgcccacgcgacgcagagagtcaatggtcatgtcttggtaacgcgtgagccactgtgtggtccgtgcattttggtcttgtccgtggttaacgtcgaggcatgccagaggttgatactgggttttctcagcggtccacgccatgtgtcgtaggagacacggcaacaccgtgtttcgcctggtgagggaggcaacgatcggcactgctctaccttgtgtcatctccttttccgcccatttattggtgatctgcaaaaaaggtatccctg

SEQ ID NO: 18302 - DNA, 606 bp, Zea Mays
ctgtcaggtgtgataattaggggtatccagattatccctctaaaacgcgctcaggaaaggtcaagacataaccccgaaggaaaccaaccaagacaccttctagcccgaggcccactgcggatgtcttccctacaggtaccgagtcccctccccgagggtctcctacctcaggtaaatctctgtctcgcccgaagtcaccaccgctccatccatctcgcccgagccgttctcaggcatataggacaaaggcacccgcaagccggtgagggacactcgcatttaatgcgtacacctaccccacacacaaaggcataggagcacagtgactacaagacaacagtcatgtccaggcgcaacatcatgattacgctcccgccacagtgcacgcacactgcctaccatccccctgatgggacatctaatacgacaagagaagcagataggccctcggggcgcaaatctccgcctcgcccgacgctgggctcgccctcaagcgcaatctttgtctcgcccaacgctgagctcgacctcgggtgatgtctctgccttgcctgagctcagcttcgtcggggaaggctcaaccatcgcctcgggaagacttctgcc

SEQ ID NO: 18303 - DNA, 462 bp, Zea Mays
gtttttgagtggtcggattggtggcgccgggttctagggctccatgcctccatcccgtgcaattgtacttgtaatcatcccttcccgtcagaatttgggcccaccgaccgtgtctgagatgtgtgggcgcgcgaatgtatgtgctattttgtttttcgtggagcccgatttgggttgcgttttttctgctgggatccatagtttttgcgggttcgtttgtttctccagacgcatttgttgcaaaactgcttgtgtggtgcccttgctgtgttttggattaattatccgtcactgtagcttatatgcatgtgttcataactggaagagcaggaatgtgcctgaagaagtgaagctgatgctattcgctagtctttctgtggaggatgaaggcaagaaggacaactggtttagtttaatgtttgctttaatagttctgtttcggtttttggttttctttctatg

SEQ ID NO: 18304 - DNA, 499 bp, Zea Mays
taagtgcgaagtctccctacggtggagggacaacaggtttaatatgcgaaagtgcatagtctcttttaaaaacaaactcagcgaaggggtattagctcattctagccgatggatcaccaacagacggttcatattagatcttaggttatacccaaccgatatgcactcaacgccactggatcagggatccacggcctgcgaggccaccacgccagcagctaccgccagacgtccgatcgaatctgacgtgtaggatttaattacatgaaggggtattcgggtttctaatccaatccgtttgctacaagatcaacgacaccggtcgcatctccttccatctccttcctctcaacgaacagtgccgccggcgcctcctgcccgtgacgacgctcttgccggtggagccaagctcgaatctactcgatgcaagagaaataggacaggaaagcaaatgttatggcacacttcttaatgaagaatatggcgatgaccatgctgc

SEQ ID NO: 18305 - DNA, 464 bp, Zea Mays
cgggccgctcatcggcgtggaccacgctaccaccatcaccccttttggtatgaagcacctcggccgactcgcaattactatggcctcgtgtaggaccgtttaatttgggtttggcgcagtggcgcgacatattagccgtcgtcggcggagctggtttggtagtgtcgctaggctccatcaggggagaggggtcgcgggaggaatacgtcgtccatgccgttagatccaattcggacggcgtagggttgatcagtgggctcggtcaatgtgggtcgtggatcactgatctaactgcccaagatgtgtactagttcgagatgatgttagtttgatctgcgtcgtccatttctaatccgacaggagggacacatccataccccttcgcgacacatttttcttaaagagcccctctcgaattagaaaatgaacctgccatccatcgccactattcactgagtcctaag

SEQ ID NO: 18306 - DNA, 839 bp, Zea Mays
agagaactgacaattgctggactagaggggtagtagcacagcactgtagttttgattgacgggaggggtgatgctcatgctgagagttcatgcaggggagggaggaggcttcaatggccttcatccaacccgcattaacgggagggcaggccggcattgaaggtggcgagtagctagctagagtgaccttaataaatgtcgcaaatctccccacgcacctccacctacgtacatgtacacgtcataatgccagcccagcccagcccaggagagccacctcaaaatctctccttgtaagctgtatgtagactgctggtaggatttgaagcgcgatcagctgcagcagaagcagaagcaggtgcagcaggtgcagctgcatgggcagcagcagcgtggctgtaaactgagatgatgttggtggttcgtctgttcagaaggtgggcacgcaggaactgtaactgagctggttggattaattggagggtagcactagatcctgcttgcacatcgtatacgagtcacaatttatcatgcattacctcttggtcttgaaacaacaatgcacataatctagtactgtgcacgcagggtagctcctgtccatagtggaaaccggtggtgtacgttgaccagttggagaagattggagctgcgatgcgatggccatccgtatccgccatctccaacagtacctatacacgtactctcctgctgctgtctgtgctggcctccagcagctctgcacgtcagcatcactgcgtaggtaaataatggctatgcgtgtgagcttgtccgagttaggagtagatgcaactagcaggtcggtggttcatagacga

SEQ ID NO: 18307 - DNA, 713 bp, Zea Mays
gtgccaacaagcattggctggaggttggttgcttgcaacagatggggcatggagggaactttgaccctgctggctgaaacgtgacggagcggaccctgctggcttgttgaatcttggtcctttgggaggaaacccaaaagatcgaactctctagtgcttgtcctgctgctgagctcggatgacttggaacttcctcttgaggtgacccttttcttcttctctaaccctttccacttgtatggccttgtttgagaggtgcgagaagccgagaaaatcttgactggcgaggatagtcttgagttctggtctcagccccttcaagaaacgggccatcttcttggtttctgtgctgacatcatcaggtgcatagcgagccaattctatgaacttatggacgtattcactgacagatctccctgcttgagttaattcccgaaattcttcttccttgagctggacgatgcctaagagcacatgatgctctcggaaggcggcttcaaattctgcccaggtagcatccctgacgacagcgctgaaggtatcccaccaggatagggccattccggagagttgatgagcagcaagatgaacacgttggttctcagggcatccgatggcttctaacttcctttttattgtgcgcagctagtcatcagtgtcaagcgggttgctggatccagcaaaagtgggaagcttgagccttagaaattctc

SEQ ID NO: 18308 - DNA, 360 bp, Zea Mays
ggaagaggtggccagggaattggatggaagaatgattttatgtgaagaacgacttagtggcgagggaggatgttaaggaggttattatgcgccccatttggtcccactttggccttcgaaggccaaaggttaagattgacgaagctgccgaagcatgccacaaggctttcggtattgtctgcttttttattggtacaagagatttaatcctggagcatatagccttcagagtatggccacttgtagagaactggaaaatgccgaaggagactatcaccaagtctggcgaaggtgagttggttcgactgaaatacaccttcagatacggggataaatttgatgaaccaaatgatgactggc

SEQ ID NO: 18309 - DNA, 572 bp, Zea Mays
ctaccgccgtctcgccagcaagggcattttggatggctctcccacgtctgctcgccgctatgtcgacacctttgagcccacgcccaccccagcctcgactcttcgtgcctatattcatactcaggcggcagccctcaccagcattcgggcaaccgtcaccaacgttctcgcgccggattccactcagtaccctcggtggcgcgaccaggtcctgcagaccctccgccgcttcaccctcgcttaccacatcctctctccggtccctgacccgatagaggattggcttctgatggatgaggtggtgctctcttggatccatggcaccctcacggccgaacttcaagacattgttcgtgtgccggacgatacggctcattggatggggtgcccttgaggctcagttcctcgacaaccgccagacttggattctatacctcgagaccgccttttgccagcttcctcagggcgatctcactgtggacgagtactaccgtcagatgaagacaatggcggacactctccgcaccctcggggcccccatcaccgatgagagcctcgtgatcaacctccta

SEQ ID NO: 18310 - DNA, 385 bp, Zea Mays
ccattattactaggactataaaacatgatactctttggtataattagtaattgtaccatgtcaaggtaataaccccggggcccaaagcccatgggtcgagtaaaggaaaaggtgtgcccgaaccagcccagacaaaaaccgacctgctttggcatgcataggcaagccatgggtgctcgtcccccacttcggcataaagcatggatacctgggggcggtctaaccacaatggtatgagacacacctgaggccaatccctccgatcaaacaaaaacatccggctcgcaaggtaggtcggaccgcacccgtgttaagatggattgtcctacggatgaggctaatcctctgcatcgccttaaaagccctccaaactacacgacgccat

SEQ ID NO: 18311 - DNA, 528 bp, Zea Mays
caaacctatccatatgtgtcggatattataattaggggtacctggatcacgtccctaaacgcgcttaaccctgaggttgttgtctggcacattccccaaggacaataaagtatgaaccacgattcgtccgaggcccctctccgcggtcacccataactccgcctcgcccgagcctatcctcggacaaggtacatactcgggagaatcctcgtcccagacgaggtcccctctcccagaactactgtctccgcctcgcccgagtccgtctcgggcaaggaagacgaccccgaggcaggtctcaatcgaaggcctcataagacataagcattcaatgtgcatacctaccccacgcagtgtcgcaagcgaacagggcaacaagaccacgacctcgtcggacttcaccaactacgatgacgtatgtctgagaacagcagtcactgttcccccgcgctgcctaccaactcctgatggaacacgcatacgacaaaagtgcgggctggtcctcgagcacaagctccgcctcacccg

SEQ ID NO: 18312 - DNA, 421 bp, Zea Mays
agattgtggcgcccgatgaagtggggacgtcgtttgagagggccgatgagaaacacagccaaataacctccaactaacctttgtggtgagtagtttgttttcgctttggttctctcttgcacatagttgaataaaagtgattcttatcaatcttgcaggtgattaaattaagcatacaaaatggtgttccatcggagtacacaaatatgatattacttcaaacaaatttggacaatactagagtgtatgctttgtcacttgaatgagatttggttttatgaaagccacttctgcttgaggtaaaacaagttttccaatctgtgatagaatattaagtgtttcatgagccacccagctgcctgagatttgttttctttccctgtggttatttttgtctttgctcacagtgcattgcgtcgac

SEQ ID NO: 18313 - DNA, 504 bp, Zea Mays
gcggataactgtggtcgagtaaagatcttggcacctggatcgactcgggctcggtcacagctaagctcgccgtacccacttgctcgtcgatcggtcggatagacctcaccgccgttggccaattcccgccgtgcgccacgtactaaagcacttgaccacatcgcagtgaatcacatcgtgcatgcccggtgatcgccggggtgcttgccacggtaataggccacgaatcaccgcgccagtaaccttctttctttccggccgccagcacatcttcacgaaattggatgccatcgccattggagcctataaattgccgaccccgcctgctccgctacgtaattgtgcaaccagtgaagcaacccgtgcctcgaatcatccactagaactccccaatttgggatttcccccaaatcaacccagaacaccgagcggtataacctcgtcgtggccaactcgattcaggtccgatcttgccctctgctttcttatttcagcacccttact

SEQ ID NO: 18314 - DNA, 472 bp, Zea Mays
atgaacacgggttgtctgaagggatatgtgggtgggcgagaagaagaacgatttgggttgaagggacgaattaccaaccttgttcgcttttcagacccctgaaatggtccttcacccacatatctttttggctttccttgtcccgaatttttggcttcaactgacagtgatgtgcttacaaccgtgttgtaggtgagatccaggcacgtagccattttatgctggagtcgatcattcaatcccctcatgaagcaattctgtgtccacttgatcgatggcatattgggagaggtgattaaacttgttgagatactacattacagaatctcccccttgctttagaggtatgaactcctccagcttcatctgtagcaccccttccgaaacataatgttccatgaatgcttgtttgaactccgcccacgtgacctgatgtcctgcaggctgaatggctgacaaatttgcccaccaa

SEQ ID NO: 18315 - DNA, 583 bp, Zea Mays
aagctactaccatgctataaggactgccatgaaatacattactatcatgacacagacaacaacacatataaataggagacactaccaagaatcaagaacgttaagattcaccacctaatacaggggatagacatgggagaggagcaagaaggaagggaagagatttaccgatccgccaggtaagctgagcggcaattcaatcattcatatcagaatcgtctcatccccatcccaaccgtgctttgttattttcctaatttttgtgcccggcttgttcagatccaggaacctgcgacaacaaaaaaatcgtgagatttacccacccgttctgatttttttcacaaatcgatttgctcctccttgtcgcggttgttgctgtcgccctgagatcctgaccctggaaggattttatagcattagttccttggattaccaagtagttggccgtaacgtgtcccatatataagttacacactacgagactatagcacgtaactaaagaagctaacgctgcgtcacatccatgattattagtcagtctagctaagagatttggtcttgaactcaggctaggcgatagcat

SEQ ID NO: 18316 - DNA, 491 bp, Zea Mays
gctgtggcaagcttcgtctcaataggcactgtgggttcggcctcggttccagcctcaattgttgcagttttaccttttatctgcctagtatcagcttcagcctgcgcctcggcactttcggcaaccttctttatggaagaggggcgtttggagtctgttgttttcaaaatgtctaatacatttaccatccttttccttctaggggttatcgcagaactttttctatattcagcactgttgcttctgctgaaggacttagaaccttgggcatctttgttacttcttcagtttttgatctttcagccttatcttcgtcaaccttcgattcaataagcttagtcgaaggcgccttcagcattacagccgtctcttcaatcttctgcgtgggaggagcaggttctttcgcttcagtaactgaagaagtttccccgccaaactcaggcactatggccggttcaatgtagcgcggtcggtgggtaaggaccttcaac

SEQ ID NO: 18317 - DNA, 693 bp, Zea Mays
cgtggtcgtactccaccgcctacgtcaagcctcggtggtcgatccgggaggaagcacaacgcacatgtatgctctccgcggcctcgtctgggaggaatcgagctccgacccacctagattcctcgccggtgtgggagcttcaccgcatcgccgccgtgtgccgtgggcagcctccctggcatcgttcctgcacccggtatgctctcccaccttgtatgcgttagatcaggaacgcgtaggtctatctggtttcgggtgtagggcgtcggcgtgccgggacggtgttcaccggcgggagctccgccgtgtagacctatgcgtcgccatgactgggtgtgggtctgcgggataaggttggggcgatcctgtccgttggatccgtggtgggcgcactcgattagatctgagtgatctcctggcatcgggcatcgcgagccgttcatttgttgatgagcgccttagattaaatgaggggttagaactgatttgagccatccgatcggatcgaacgggatcggatcacgatcgtgcggttataatttgagtatcggttcacattatgttatgggccaacgatcgttcatcgggcggttctaatgtctcggtaggattaggtctaatcaagaccgtaggatatcgatctaccggccagtgttttcaaccgtaccccttcatggtgccattttgctaaag

SEQ ID NO: 18318 - DNA, 645 bp, Zea Mays
gcacgatggtcatgcacttggctgtgggatggcgcagccggttgcgggagcatgggcacatgcgagtttgcgaccaggtcctgagtctcacctatgaatgagttaataaaaggagaaaatgcagtaagcagatgtgcgctgcgcaaaagaccgtcttcagtgctcactgttgttcatctagtttatcgcgcgtccgagtgacagtgaggctgagtgctctagcgaccgatcgatccctatctgtttccaacaaagtgcggattgtgcagagccggagccaacagggaacaccagaataggcaggcaagggcgcaaggcaacaggccaatagccatcgcttgctgattggggttgcggtccttggggagacgaaacggaaggtgacggcgaagaatccgggattggcattggcaattttggaaagaggaagacgaggagtcggggagacgaatgggtgttgactgctgaccactgaagtgctgagtctaggaccctgggtatgacctgtgtcgtgcggtgcgcttcgtgggttcgagagttcgggtacagtaggtcagtacccgaattatcttgattaactttggtaggggtgtaatctgaataaatattatcggacattcgaaccgtccaaaatggtcgaataga

SEQ ID NO: 18319 - DNA, 569 bp, Zea Mays
tgtgtgcagaccaatagactgggttcatgggagcggaccccactgggttgtcgtacacgtatgtgttatctagttacaaaaaaagggaaacagatttgaccccttagctcttgctctatggatagaacttaccaagatgttcgacatcgtggtaaggtactcctccagtcgtagctagatggttgcccctgggtcggtgcattcccgttaccttgaagggtccttcccagctgggggagagttgcggagcccttcttggcatggtactcgccgtggggctaggtcctgacccagggttcccacttgcatttgacacgggagccctcgtctctggctgtggccacttttgcatgtacctgtccgcagcccggacccgtggggaatccggaagggcctccggaggatggcgtgcttcagctccgtagaccaaggaacgtggggtccctctagggtccgtctagttgtcttcatcgaagtaggaaccttcggcgaagatatccttcaggtccccctcgggcgactaatactcccgctcagccacggccacctcgccgtcgtccaccttttcc

SEQ ID NO: 18320 - DNA, 628 bp, Zea Mays
gtctctgcgcaaaagatactagacccagcgcacagccggataggatggcgggttaattttcgttttagtcggggtctctttagcgaaatgtgcaagccgaaggggtatcatctaatctgaaccgttcgattaggtgtggacgcgcgagattagatctagcctttcccgaaccggtatgcgactgcagccgttggatcccaaatcaacgcacccgatataaaacaccaaggtctaatcctatccgtgcaatccccgatcgacggtcacaactccatgcgacgaaggggtacgctcagttttaatcacacccgttgatcactgatcttacggtgcccaattcccttcctcgccgtgacaccagacaccatggtgtccgcggtggcgccctgaaccgcggcggcggcatcaccgggcctctcctgcttttgatcctaggcgcagaactccaatccgaagagcgatatacggagcggaggtgaaggcaagaaatgaggtagcgttctcaccggtagatacgcagcactgaaccccgaccacggtgctatccgagtttgcggcggagcaccaactccgacgaggaatttcacccgcgccgaacgcccacagacgcaacgcctttgctcaccac

SEQ ID NO: 18321 - DNA, 776 bp, Zea Mays
ccatgacaggagcgcgatcaacatagagaggtataaggtggtgaagaaaacaacaaagagagatgtgagtgaggcaaagggtcgagccaatgatgatctttaccaaagactaagtacaaagaaaggggaaaagatgtctataagatagctaggattcgggaaaggaagacgagggacctcaaccaagttaaatgcattaaggatgagatggatcaactcttgttgaaaggacaagacatcaaacagaggtggcagaggtattttgacaatcttttcaatggtgagaatgagactatggacatacaattggatgaatcctttgatgatttaaatagatgttttgtgtgcagtatccaagaatcaaaggtcaaagaagctttaaagaggatgaaagggggcaaggcgatgggcctagatggtatcctaatagaggtgtggaaataccttatggatattgctatcgtttggctaaccaagttgttcaaccatatttttcgatcaaacaagatgcccaatgagtggaggaggagtacattagtacaaatcttcaagaacaaggtagaaattcaaagttgtaccaactatcgagggattaagctcatgagtcacactatgaagctatgggagagagttattgagcatcacctgagagggatgatgcatatcaccatgaaccaacttggattcatgcctggaaggtcaaccatggaagcaattttcttaataaggcaggtcatggagcgatataaggagcagaagaaggacttgcacatggt

SEQ ID NO: 18322 - DNA, 440 bp, Zea Mays
gccgcccgttccacgaccgccgttgagccctcgccacacccgttgcctcggtaagctccgccacatcacccgcagctcgggacaccattcggttcgtcctttcccccctatggttcgcttggtccacgctcaccggttcactgccgcagctccgccaccgtcgacccgtgccctcatcgtgccccggccaccgttcgtgcgttcctgagacttccctcaaggtaaccgtcctagccccgcccttattttcccctgtctcgcatttactcgctcacgattgctcgccggagtattccccggtctgccgaggactcccctccgccgtccggttgcctcagtcctattcaaacaaacccgaccccaccacagtgctcgctagaccctcccctacctctctagctatccggaccgacctctcgcgccctacgagtcccagtctg

SEQ ID NO: 18323 - DNA, 718 bp, Zea Mays
cgctgccaagtttgtgctccgggtcttcgcaggcaaaacagtgtagtggcgcgcggggtaccaaaccagggcagagctgggatcaccgcgggatccgtatccttgtcggcctgccatttctcgggactgcaccagagggtcgtctgggtgaaggaagtttggtgccgacctcgggcgagagtgacctccaccgtatcaccgacaatttctcaccggttttggcgcaccgccgtagatccgcgctacaatgaggaccgcttcgactattcctccaaccccggtaagcaacccacgactagttttgccttgatcacagcatcgcgataggactagtatcgaccggtttgggctgctgttgcgtggggcaccctactccggccatgtcgccaccattctgcagttgcctctggttgctgcgccggagagatgagaggaggatctggtggccgtcgatcttaggaatggcagtcacgattagatgggaccatgaagtgtttaggtccgtaggatttctatcctgcgcctaggagtagatcgggggtgggctatcgtgggccgttgatcctagggtgggtggtccgatacgacttggtcatagttaaagcgggactgttgatccacgatcctgtggtcatctttgtgcgccagctcgggggaattgcgatctaatcgggcgcgtcgggatctgaccggacggtcgtgattcacgcgtacccct

SEQ ID NO: 18324 - DNA, 372 bp, Zea Mays
tatcgtaaacagtttacaaaaaagaattaatcaagacccacgccaaagtacgtaatataataaatcccaattgatacacagttgttaacatcaaattatacaaacataaatcccaaatactacaccacaccgaccaggccgcatcgctgtgtcaatttatgtaaccgttggagtcataatatgcaagtataaacgcggtcaattcccacgcgggacaacaccacgactccggagaacccgcgcggaacgagcggactcaccgtggcagttactcgtttatgcatatggaattcgaatgaaacggatgcataaatggtaatagtgggtgggtgcgcacgtacgacccaccttgacccggtgcatacgcgcggt

SEQ ID NO: 18325 - DNA, 271 bp, Zea Mays
ggccgtacaaatgaatgggagtatctactccaaattagcaccaagagggagaggagagaaacacaacgcaaaagcctaaaaacaccgcacaagaacgcaacacgaacgcgattcgaagaatcaacacaagaactcgtagatctagcgcccagaatgattcaagatgtctcacgaaggcgtagaaaagtttgtggcggcttttgggggcgtttggatctacattacattcattccaagatcagggccccttcctttataaagccccaatcag

SEQ ID NO: 18326 - DNA, 396 bp, Zea Mays
ctaagagctaacattaaagagaataatcctacgtggacagcaattagggaagagagagagtgcagtcgtcgtttcgtgaggcgacggcttcgtcccgtgctccaagaaccaagcgacggacgaagcaacggctgtagagcgaggcggcagcgacgacggattacctgcgcgcgggagcttttggcgggcggcatggatgaatttgctcctgcgcgcgccattttttctcctccccatatagcttctcctctcgttttttcagttcaatcttgaattttttttccccaatcttttggcgggtgacaaaggttgccctactatgattcttgaagcagtggcatcccgtgatcttcgtatatggcatgctttttttggtactgctggatctcaaaatga

SEQ ID NO: 18327 - DNA, 707 bp, Zea Mays
acctctagaagcaaatgaatgggtacgggttatggagcaaaagtttgggctgatccgatgaactgaaacgcagacgcccctattcgctgcctaacagttgaggggtcctgccagcacttggtgggaaaagtttttagccattcagcctgcaggacatctggtcacgttagcggagttcaaacaggcatttagggaacattatgttccggaaggggtgctacagatgatgctggaggagttcatacgtctgaagcaagggggattctataatgcagtacctcaacgagtttaatcacctctcccaatatgccatcgatcaagtggacactgatttaaaaaagaaaaattgcttcatgagggggctgaatgatcgactccagcacaaaatggctacgtgtctggatcttacctatagcagggctgtaaacacagcactatcagttgaagccaagaatttaggctaaggaaaaatcaagagatatgcgggtgaaggatcatcgcaggggtctgaaaagcggacaaggttagtaattcgtcccatcaacccaaatcgttcttctcctcgtccacccacatatcccttcaggcaacccatgttcattcgtcccactcctgcttccgcctagaacaatcagttgagtgcccctagtgctcatttcactgcccttctggaagggaaatgtggctttgggcaatttctattatgt

SEQ ID NO: 18328 - DNA, 340 bp, Zea Mays
ggagaatcagggacacacaaggacactgaaacgaaagagcagagggcatgagcggacctggagtaggatggccatggcgaggttgtaaggtgtgggattttggaccaaattgggggaaatccgaaattggggcttgctcgtgagtaattggaggcacgacttggtggatcagtgcttgattaccctacggacccgtcagtgtgctcaatttatagtgtgcttgagcggtggtgtttaatttggacgaattgcgctggcgaccgagaggggaatgagtcacgacggcgatctaccgtggcaatcgcagagcgactgaactacggcggtcactggatggtca

SEQ ID NO: 18329 - DNA, 306 bp, Zea Mays
ggaaaatgacccgcgtatccggatcctggttggagacgatgttccctggtcgagggtcactggcactgtagctaatacactggttatcaccaatatcggttgacatcaacttggctactgatgatgtggtcatggtctgaatgcttgcccccattgactctgatgatgggttaggttgatcttgtgttcgtgtttagtttggttgcagcttttggcgttaggtggcctgctccatcttgcttttctacgggtaggatccgtgctcaagttcgtctctttgatgtgccagctgccaaggaatgttcc

SEQ ID NO: 18330 - DNA, 493 bp, Zea Mays
aatagagactaatcctaatcttatctgatccttaatttttatagtacaaaacttagagctcgttaccaccctacacacattcagaatatcatcacggtagacatagtgcctcaatgggtgaagacttcatctccacaagcaaactcaagcatataggacagcaattccatctaatcaccccatccatcgatggtgtagtagtactcagattcatcaccagctaaacaattttcagtatgattcatactagccgttgttttctcaccactctatgctttgcttgctatgtaataagtggtggtatgcaagggtaaggaaaataacctattatatggctgtagttttcattctcataatctcatatctcattattaaagtatatttaaatcctcttaggtatcaactcatccaactattcctcacatgcatgtccaccacaacgcaccacactctcacacctcatcaccatgctctctagtcaacaatgatgact

SEQ ID NO: 18331 - DNA, 360 bp, Zea Mays
cttatagtcttgcagacgaatatgggtccattcatgattcgcctctggtaagattacagccttttgctgctcatatctgtttttaagagataaccataatacatttggctcttcttccatcacatattctgctttcagatcaagatggaggtgatgtcttataatgtacaaagcgttgtacttataagcatcatgtagtgggtcaaccctctcgttgggagggagtaatgcactcagaatattctttgagactaagctgatcttgatatccaacgtccaggtaggatagttgtgaccatcaagagcaagttcttcgaactcgcgggccatgatcctacacaagcaaccagagaatttcat

SEQ ID NO: 18332 - DNA, 592 bp, Zea Mays
ctctgctggaccaaaatcgagcttttgtggaactcctcctttcctgctcgtattagcaatctttagagggctagttgacacctcccctttctcacaatcagagaaagcctttgcacttccagattcagatctgattgcgatcttccagctttgtttactcccactaccttggctcttctcccatttgcctccacctgaaccactcccatcactccctctccccctgttttcttccaggaaccggcgccgagacggcactattctgagatcaccactatacggtcttctcttttctcttgagctcttaatgtcacaagatttatctgtatgcccaaggagaccacagatgtagcagaaatttggtaaaaattcatacaccaccggacaccaaattttatcccccttctcgttcaactccattatcactcctctctgaagtggcttatggatatctaggagaactttcactctcaggaaaaggccgatggctacctcatcctcctcagattccacctccagaaaggttcctaaactctccccaatggcaagtccagtagctttgttcatcaatcctaacgggagtttcatcact

SEQ ID NO: 18333 - DNA, 491 bp, Zea Mays
taaaattcggcttgccctcaagccgatgtgtagcattacttccatcaggatcccaagaaaattgcaagcacctgatgcttctcaaccagatgagcatgatccatataactgaatgaactacctggagaatcctttgtgatgcaaacacaaatgcagcatcgacggacaaagcctttctttctcttgcacttggacagaaggaaaggtgacacaccgttgacaggttgtaacaccaggcatgtagcatctggaggtctaacgccactctgccaggatcccaaggaattagcaggccaatggtccatgtcaaatattgatcacagccgactaggtatgttattccaatagaggtcagcatcaaacaaagctcatgattgcactgtgataccttgaacacgatcatcagatgcactttgtccaagacaaatattgagatcagattgccactcagaagtaccagtacttgtattgaggtcaggttgcagtccaac

SEQ ID NO: 18334 - DNA, 594 bp, Zea Mays
gctgactgctcggccacgaccttgacgacgaagatgtaggcgtgaaggaggggcttcgacggaggagaagcaggtgaactcagaggtgtgctcgccggcggctggaacggactggaaagctccggcagcagtgaacggcgacggtcggcgtgatagctctgaggatagagaaatggggcacgggagagagacagcgtggtcaggaataggttcacggagctatgggctcacgatttatatagagaatgagaggggagaggcgcttgacagggagactgtcacgtccccatggccgccgatggtgagtcgagacgtgaggagctgatgacgcaccgatataccactatgtggaggaagacgagagaaggggacgaaccatgtttccgatttctgatttgttttcgatttctctcctaccgttgtggtcctgcctttaggctgctccgagttgggcgccatgggagactgaggcccatcgcgtagtgagccggtgccaggtgttacattaccgccccgacgaaaagttgcttgtccccaagcaacaccgtgatctcaaagctagctcctcacggctcatcaccagttacccatttg

SEQ ID NO: 18335 - DNA, 834 bp, Zea Mays
cacattctggtcagaattgttctagctagcaggagtcaagctgcacatgagttcagctttccacccccaatctgatggacaatcggaagtggtaaatcgaattatcaccatgtatcttcggtgcctggcaggggatagaccaagagagtggctttaatggcttccatgggccgaattctgctacaacacttccttccaaactgctctccgatgctctccatttaaggtggtatatggccgagaacctcctgctcttctgccctatcatccaggaacatcacaggtggctgctgttggcaaacaactacaggcacgtgacgaattcttggtggatattcgtgatcgattgattcagtcacaggtgacaatgaaaagctactaggacaagcaccgactggaagtggagttccatgagggcgattgggtatggctgcgcttacaacaacgcatagcagttggtgtcacttctgctacaccccacaagcttgggccaaagttctttggaccatatcaagtgctatcgagggtgggcactgtctcctacaagctgcaacttcctcccagtgccagaatacatgatgtgttccacgtttctctactcaagaaattcatagaggaggctccaacccaagttataccgctgcccgagctcctcaacggcagagtcatccctacactagaaaaagtcctccgtgcaaggctgaatcggggggtgtgggaagttctgatcaagtggacaggccgagcagagacggatacttcttgggagcaactggaagatttcaagcttagatatccggtcatgacgctcgaggatgagctcttcgtcggcga

SEQ ID NO: 18336 - DNA, 749 bp, Zea Mays
tgcggaccgtgtggataacactggagaccaccgccgtggataaaacttcagccgctaaagaagtccagccaccgtaccgtgttcaccgtggtggaaccgataagaacgccggtgaaccgccgcctcccggctttgtgccgcgtggctctgcccttccactcgtcgtcgtgactcctcacggctgtctcatcgatgccggtgagcccgccacggtggtggacacgaaatcgcgaagctgatgaccttccttatctccggccgccgcgcgtcatcgcttaaattcgcggccaccgcttgagggctctataaattgacctcgctcgtagctccgccatgtagtcaagcaactcctgtatctatctgtgccctgaattatctacccgaaagcttctttgagatttccccaaatccacccaaaacaccgcaagaacctagctcaccgtggccagctcgttctggtatgtccctattcaatccatgtgttgttttcgtgcctctgcgtgcttgtgaagctcacggtggcgtccgtttgctctgatcgaccatgatttggcgggaacatgtgctcccatgctcggtgtccgccgtgatcgcggacaagcaattcccagtgggtttcctgtcaaattaatggttgttcctagttctctttaggtcagtgaagcctccccgctagttaaaccgagcagccatcgccggccagggccagtccgtgcgtcgtcaggggcgaacggcgagcgcgccatggc

SEQ ID NO: 18337 - DNA, 509 bp, Zea Mays
ggagaatcaagttgattggctcggcaagggcgtctcgggcgaacactgataggtctctgaatatccaaggttgtatcagcttttgggagaggcgccaccaccaatgtcccagcaggaacagcatcagaagagtcctcagccagcatatcaagcatagcacttatctctgcatcactaggatccaaaggcacctcaaagtggacctgccgttcatcatcaagaatttccccgagagaggcaaccaaagcgctaacttcttcggcagagggtcgcactctaaggcccaaaccgccatcagcgacaggtggattcgacacaaaaagagtgaaggccttggaagggggcaggttccaggctgagtatgccactggggcaccaacatttgataccttacctctaagaatcatctcaagtcggttcaccaaatctacagcgggaattcttctgttggtaacccgagttgagtcagctaaacctcggtacagataagccgggtatgccctgtcctt

SEQ ID NO: 18338 - DNA, 586 bp, Zea Mays
atttaaagggaacccactgcaacatctacacagatcataaggcctcaagtatatctttactcaggctgatctcaacatgaggtacagaagatggctagagcttatcaaggactacgacctggaggtacactaccacccagagaaagccaatgtagtggctgatgccttaagtcggaagtgataatgcaactgtgttgagcaagatgaaaatcgaagtgattccttctagtgctttgtctcacctttccattgagccaactttgcaagaccagataatcatggcccaactcagtgaaaagggagtgcaaattattaaggagaacctccatcagaagacaaagaagtataagtgtttccgccaagatgggaagggtatattgtggtttgaagacagattggtggttcctaaaagcaaggatctcaagaggaaaatcttgaatgaggctcatctctccaaattctccatgcatccaaaaagcaccaagatgtaccatgatctgaagcccttgtattggtggactagaatgaagaaggaaatagcccagtatgtgtcggaatgtgacacatgtcagaggataaaggcaag

SEQ ID NO: 18339 - DNA, 399 bp, Zea Mays
ggggtttttgcaagaaacaatccacatcacatgacaggctgcggggggttaagtgttaaagtagcggtgaccatcggatcgtggttggagggacaggatgggagatgtgcatatgtgcacagccgtaggcatgtgcataagatacgctgcctttaaactattctataaaacttttgtacaactctaatgagattttcgcgtttcaaaacggtgttaccttgcaaaaaatagcaaacgtagtagattaaccgattttttataatataagaagatcaatcgatttgttgtatatcagcagtgacgtgctatgccagaagacagacgtggtgttgcctgttcccaatcaggtccccatcggttcaggaggcaggagtcaggacaggacgtcagaacgtctct

SEQ ID NO: 18340 - DNA, 447 bp, Zea Mays
caacgattttgttgtcgtagtgtgagagatgtggagacagagtcataccggttcatggtgctctcgtgtctgtcgtggagaagagctgaggtcgtctacctgcacccctggtcggcggcgacaatcagcacccaggttgaggcagccacctgcgcaccgtacgtgtttgagcatatgatacgttgccatcttcaaatcagacaggactgttagacagcaatacatagaaggctatcaccttgtatagaaacccatcaccaggatatcaatcctctagtttcttgcctgcctacccagatcctgtttctataaactgggctagtgcttggctatatattgtaatgccctcattgatattaatcaagtcagtacattacccatttcctgtacgtcttcatggtatcagaaaaggtcccgttcctctcttgacccacccttccgcaaccc

SEQ ID NO: 18341 - DNA, 760 bp, Zea Mays
ggaaaatataaaaggaaaaggaaaaacgccgggcgggcttgaatctacaattcggcccattgtgctcttgtctccgtgtggcccagttgggggggagagcgcgctgactcgcgggcccaccccgtcagcgctccctctaaccgcgccgtgctctctctggcctgtgggccggcgtcgtcatcttcttcctcaactgaatcccgcacatggcgggcggtctcctcccccttcttccggagctgctggccaaggcttcacctcaaatagcgtacgccggggtcttcgccactcatccctatctcctctccgcttcgtgcgctggcggttgatggacggactccgaagacctcggtcgcaacaaactccgaccgccgcgcaacggtcgtggatcccggggctgcccgcctgctactcctcgggtataagaaccgcagcctcgcgcccttgccctactctgctcccccttcgactcttccccataaacgccgaacagcagtgccggtattgcaagcaggactcagagagagagagtgtgagaaagctcccgccgccgataggattcgcgcccatggctgcatctcctcgtatgttggcacctgtgggatcaccagggaccttggtaattgggcaatggcgctgccaatctcggggatcaccatggccgtatgaattactcaccgtcgcagtgctccgccgtatgcccgcccgctgccgtgaacgggaagcttcgcatcaccacttcgggtatggtcacctctcg

SEQ ID NO: 18342 - DNA, 684 bp, Zea Mays
tcttaacaacttcaccctaaactttcttcagctccatatctacaaaacaaaaatataggaacctatgtaaaaggtgcaacatgcatcaccataatacaatactaacaatttcaagaaaataatgacaagatcaggggatgcacctgcaaacttgaacagaaaaaggttggttatagtgtgcgttgatgcatgtgcgacggtacttcaatcagtttgaagtgatagcatagctattaaagtgtccttaaggcgacgcctaagcgccaaggcgagcaccgagcgcaaggcgtccacatcgccttaccaggaggagcaaggcgtccacttcggcctctatggtgttgccccgccgccttggagaggcataaggcgatgagaagcggatgccttagggtgtttagggatggactaaggtggatctgacctgagccgctgatcgattgagctctagaagtggtggcggcgctggttcctggttgttggctcctggcgacggtgtccctcccttgcgccggcgaggtcctctgttggctcctggcgcgcgacctccactcctccctccctctgaggcagctacagggtgagggtggcagctgagggagggtgactgggtgagggtggcggctgatttaggtcaagtaggctagctaggctgagttaggtcaagtaggctagctgggcatg

SEQ ID NO: 18343 - DNA, 907 bp, Zea Mays
gagcaaactgtgatggtcttctctcttgtgtggatggcgggttcatattaataaaacctagggactttttactaacatgaccctggctgctacaacgtgggtcgcccaggatcggaggatctgggaccaagggctcatattaggtcacgaagcggtacgcgatagtggccataggatttcaaatcaagcccctagatttaattactgcgagatccaactacgaccctccgatcggctatgcacagcccaaattagatccttcttaaatcgaagcagtatgctatgtggaccactgcatcggaaatctgcggcctagattttattaggcccaatctacttacacccgtctgatctgaatcgaacgacatatgttacacctacccaaaccagtatccggatctgattttgaccgcccaatgaataatcaacggaggacgctactccccctctctcccagcccgcgcagatggcgcgcggcggtgccgcccagctccgcggaagtgaagcacaccggagaagcataacttgctccctggtgcgttattctcctcaccgataggtgctacgtgatgagggtggaaccacgaattatcgagacggtcactcaccggtcgtgaccgtgcaaacagacggatccgcgacgggggattgactccggcgagccattcaccgtggatgaagcctcccctgcacaccggcgaggtacatgaaggatccccacaccttgagaaaccccaagggccatacatctatggggcattacccgtaattgcacaatctcgcagggcagccataaatagatacccagggcatgagtcggcggggttagacccgagatccccggcgacgggtaaggcaggcatgagctgttgcgagatttcagtgcggacagggaccaggcgtccgg

SEQ ID NO: 18344 - DNA, 638 bp, Zea Mays
caacagtcaaggcgagtaccacagaagcggtacgccccgatctaatctacaccgtccattgctagatcaccgatccacgaagcgtcttcttcctccgtcaccagagtggtggtgcagacgcgaccagggcatctccctcgccggagtttgaagacttacctaggagtactcgattgaagacttacctaggagtactatcgtctgcagctcctggttcacgaagcggtgcggatctacggccacgacggaaattcgtcgaggaattgtggtgacgatgcgcgcccaaaaagccgagtgacgccgcggccggcctccacttgtacggacgataccctacccttgaccgccaggatcgggacgacggtggcccccgattacaggtacgacggatttcctctttcctctcaccagctccgttatgtgtgtcttcgtgaagcatccaggcgattttttttatctgacacataattcatgaaccatcctccctggcttcatccttatgtgtgtgatgtctgtaaaaagaaaacaaaagggaaaatatcatcccagctcatcctcgcacccctcgatatctctcgttctctcttatcctctccaccacctaaagtttcaaccgtcctcatcctctcacagccgac

SEQ ID NO: 18345 - DNA, 468 bp, Zea Mays
tggtccgtgtagtttttgctccatatggaaaggttgagcatgtccacatgtttggggactcagaccatgtgttggctcatgtggtatttgaaacaaaagatgaggcagcaggaacttttggagacttacatggtcgaaacatctatgatggttgctgtgagctaaacattcagtggggtgcatctcaagatcacagcaatgccaatatagataagagctgctacgatcatgtgagctcatattcatccatagtgaaggtgcacgtacctgtcaccaaccttgctaatgcaacagtgtcggccacaaatgatgttcctggcatcaccaacatcatgccatctctggtccttgctgaaggccccagcgtcaaccatgtaaaggcggcatctgatgacatcaactctgataagttgtgtgtgaaggttgctgcaagtggtgcacaagcagtggttgctgatgtcgcacttg

SEQ ID NO: 18346 - DNA, 282 bp, Zea Mays
tgcgggcgcgattgatggtcagggtggagggaattcttcaccgaagcttaggcgctgtcgtggtgccgcaggtcgccgtgggcggactcctcaactacaccgatgccggtaaggtgaccatcataaagttcgccatcctccattctattcataccgtgtaccgttagtgggaataggtcatcgatgttgtggatgtgggccacgccggcgatgcgccaccatgcacagcaagcgccgccgccggacctgaccattagggaaaggaagacatgagagtcgtcg

SEQ ID NO: 18347 - DNA, 1047 bp, Zea Mays
gcctcaattactgaaaagtgtaggggttcaagcgtaacatttccacagactcagggcactgttatggtggacggcgggttgattgtggcaaagggcaagggctctttaacaatttgcgcacggcgaaggggtatcttgtgttttcagccgtccgatctagagtctagggtttagattttatgaagcctaacgcattctgaaccgtccgattaaacctacggcccggattgactcatccaggaggtattcccgattagatctgcaccgcatatcaacgatcccacgggtacctttcgcccaacccatcttcaaatcccgaccggtcatctcagtatctacggcgacgacatcgtcttcttccctcggacggcagagcggtgccagcaagcgccaggaagcaagcggcgagcagggggatgagttacccgcggtgcggcgtgcagcgcaactaaaacctacgcaccgaggaaatactgttgaatcgcagggatgttctcttaccgttttcgaagcaccggtgtggttgtccccggaggctggcggcgcgccagatctcttgacgccgacaacgaggctcccggtctctggcttagcgaccccgtggacgagtccttgcgcagtacaaggatgcgccaccatatggcaccgcgtgaatattgcgaacgcgctcgacttcacccgcgatcaaacccactcccttctcccttggtttctctctcttaatggctgcaatccaggcggcgcacacctaccattttttttgctccaggtcaaccacgacggccaacaactaggaccatccgacttatgggcgagcagagcggtagcaccggagaacccgttctccgtttgaccaacgcccacacccagaagaatacgcgtatgcaaatacatcgtggtcccagccgtcagtggtggtggaggtataggggtgatgtcacccatgacgcctggctaacgccttcctcactgaagaccattttttttattcagcggcgcacaggcttggctattgggccgcgtgagataagggagaatgggtcaacc

SEQ ID NO: 18348 - DNA, 517 bp, Zea Mays
cagaaagatgtgaaaagatggagaaagagcgcaggctcccttacccagcaatgatccgatggatgcagcacattgctgcatggctgtggcagagactatgcgttaagggtttgtcgcttttgctgactcatcatctgttggcacttggcaggcatgctgacagttgattattaactctggaaagtgcgtggtatgcactttacactagctggtaacaggtacgccatgacctgattatttcccatctaaaacaaacataaactaattatacgggatatccctataaacagatcacggagcaaagcagtcaaaccaaacagcaccaagtgtggaactgaaataccatataaattgttttgttaaacactttatttacttttgttgtctgtcagtatgtgccccggtgttggtggtttaggcccttagttggtgacctggccgtgctaattcaccagatccgccgttcttcaatggtaccacccatgacccgaatttgacccgcctctatctgttcccc

SEQ ID NO: 18349 - DNA, 491 bp, Zea Mays
ctgaaatactatgcagtgctgctgaatcctcatcacgtcttgaaacggcatcagcggcaccatttaatttgccaggctgatactccaccaccatgtcatacccaaacagcttactcacccatgtatgctgtggaattgtggacaggcgttgatcaaggacgaatttcaagctatagtgatcagttcgtactttgaatgggcgcccctagagatatggcctccagttccactgctttcaccaatccaattaactctctttcatatgtcggcagtttcaaatggtgatgggctactggtttgctgaaaaatgccacagccccatctccttggtgcagaactgacctgaagccagcgcccgatgcgtcacagtccacaataaatggctggttgaaatcgggtagctgaagtagaggggctgagatgagggcctgtttgaacagaacaaaggctgctctaaatgcttcccgcttcagtagcttggttagaggcac

SEQ ID NO: 18350 - DNA, 563 bp, Zea Mays
gtagctccttctcaaggaagctaccagcggccaacccctgccttggcctataaaaggaggaggttggtcgcaaaacagaggggttggaccgagatgaacatacaagacacacaatggaggatacacgcttgacgagattagaagacccgaaagccagagcctaggcataagccaccatgacgtccaaggcttagataggactccagtcccatagtctttaggaccacccaagcacaagggacttgggagcccttcctccctctctcacccacttctaacccctaatacgagcattgagcaacaaaggtgtcggtagctcaagccaccgaagactagatgtagggacgttctacacgaaccagtataaaccttgtgcccactgtgcacaccatccggagcctagcatgagcacatagaaatttacttgttggagcggaggttcaaaacaccgatagttgacggctaggtagggattgcacattctcaatgaattctccaggctccgaatggtcggtcacgacaccgatcggattccaaattggcaatccattttaggaaccttg

SEQ ID NO: 18351 - DNA, 416 bp, Zea Mays
gtggactgagcaacaagtccctgaccatccgaaggctactgaagtatggcgaatgtattttgatggctcactaaagctgcagggagtaggcgcagggatcctcttcattgccccaggaggtgaacaactcaagtacgctcttcagctattattcccagcatcaaataatgcagcagaatatgaggcactgatccatgggttgaacatcgccatatcactgggcgttaagaggttgatggtatacggagattcactagtggtcataagccagataaataaagattaggattgctcgactgattctatgggcaagtactgtacagccgtccgaaaattagaagacaagtttgaagggttggaattccatcacgtggaaagagaccgcaacacagcagcagacgcgttgttgaagctag

SEQ ID NO: 18352 - DNA, 402 bp, Zea Mays
tctggccattccatttcatctgacgatcaacgtttcccggagtagtattgatgggtatttaagcccaaaaaattcggacacccctagataccctaatcacttcacacgatcgcaccactctgttctcttctccctctctccctctattctgttggactctggcgaggaagactcgatgtcgacggccatggtggcaccgccgtggggctcatgctagctaatgaaggtattttctctagcagcttggaagcacaaagcctccagcctcaagaaaaccctagccgccacaatacttgggaaccgatctccctagtgcactgagcgacgagagaagctgtggtccatggcgactgtagactgaggcataccaacgaagcctatctctgatggcccctccaaccc

SEQ ID NO: 18353 - DNA, 307 bp, Zea Mays
agctcacctggtgcgggtcggggtgagctggaacaccgccgattcaagccgcgtatccggcctcatttgcagaatggttcttgccgattctccttatgtgccagatcttgctggaaggagacggaggatttcaaccggattggatcagaagacagaaggcggccaaccagagtgagtgacgaatttggaagggaaaatgcaggtctcgatgatgcaatcaaagaagacgagtgatccgagaagtcttgtacgtacgaaccaaattaaagaacaaaagaagagataaataggaattggaaagtgaaaa

SEQ ID NO: 18354 - DNA, 1001 bp, Zea Mays
caggaaccataattatgaaacatatttttggacagccatattgtgcccagaagttcatgaatttctcgaaaaactaggatagtccaaagcttaatgagcttcttggatttagcttgtgcccaaacgctaccaacgctgcgaagacggacgcatctcacttatccgaagcatctgtgaagactgaagagagtttggcattatgcttgaatgtaaatgacatgaaatatcattataacaaaatcgcgaaagctaatttgtaaaactgctaatgttatctagcataaatcaagcaacaggcaaagcgtacatagaacagcggttatgtaagtcgatttcttaagcaaaaccaaattggcatcagaagggatgtcatgtattcatatcaccgcgggttgggctacaagtgcccatgaactgctcatagcccttgcgcaataatcccagcatcacttgccattggaaaggggtgtgaataaatcttatatctcaggaaaaaatgccaggtagaaacggcaaattaaatgctttttttgtagaaaactgaacaatcacaagactacaaagcaaatgaagtttcctcgcaaaagggtgcagatccaggaccgaaaactgctgccatcagaagggataatacatacatatgttgtgatctcatcgcattcggcaaacacaagccacgaattgctcaaagcccttgcgcaatattcccagcatcacttggcagcaggaaaaacacacacgtagatttggggctacaaggaaatgaacgaatgaagcaggcacgcccaaagactgggaggagagacgaggtacacggggacacggctgtgtctggcaagaagcaacaaatctcccatggttgctgccttgctgattggaggcggcggcggcgttccgggcacagcggtagggttaagggggtggcttaacgacgacgcgtgcgcgagtcatgggctaaatcgggctaccaaagatgggcttgacatcgcaatgggctcacc

SEQ ID NO: 18355 - DNA, 784 bp, Zea Mays
ccgaggcacgagcactggtgtgagccttatcctcaggtgtcgggcgatagaaaccaaacataagtcgggtagagtcaagagcggccaggaaccgaggaggtcagctcagttgcgccaagatgtgacagaggtagtgagcatatgacagctgatgacgagcacgaagttcatccaacacagtgtcctctatctcatagataaggaagtcgacaatgtcaaatagtgagtgagagacgagggcacctaggagctagagctggatatgagtggtggcctctcggtatcccatccgtggtaacaaggtttgtctcattagctcatataggaacttggcagctgaggtgaagtttgcaagagagcaccacaagttgtctgtgaatggtggcctgaagagagcgaagatgtgatctatgcctggagcaactccactgtgagggtgacgaggtgggtctgaggaatcatagcagagactgtgaaacctcatcgtcaactcagggaaaccaaacatctctctgatctgagcattgtgcagagtgatatccttacgctcaaagcgaaacctcatccactgatggttggggtctatccacactgtagcatagaacactcatacccactcctcaacgtagtgacgacaaaagtcaatagagagtataggcctagtaggtaggtaatgtgcccctcaaccttagaaccagttgatgtgagaagtgttgccaaatccaaactcttgtgagccctcaaggctatctgggcggtcagctaagctctgtagaaggactca

SEQ ID NO: 18356 - DNA, 422 bp, Zea Mays
acatgtgagtggtctcactgaagcacggtcgtgcggttgcatggtaacactgttgcgctggttatgtgaacttggcagctctcatctgagccagagttggtgggcatcatgctttgggggtttggtcaaggcattcttacgtcgtgtccactcctcattccatgtaccaatggttagcgatgatttaactaggcattgatgtttaccggagtgtgtgccttatcgaaagatcagaaagtagtgtgacagtcgttctggtttgggagcccccaccagttcggttcctcatccaccttttaacaccgagcctctttctccgcacaaccatcgcctctccgagttctccgttgtcccttcccttcactcattctcgtcttcccaccactttctcccttcgcaaaccatggtgttctagagatgtt

SEQ ID NO: 18357 - DNA, 997 bp, Zea Mays
cggcaggctgaagtaggatgtggttgatgcccatttggtcgaaggcatgtaggaagatgatgtcgacttggctcccattgtcaacgaggacttcgtgcagctcctagcctgccactttgcaactgatgacaagtgcgtccgtatggggcgcgctgcgaaggtcgacgtctcttgcattgaaggttaatggtacatgagaccacttcgtctgaacgacgggtcctgtgattgcgacatggttgacccttcgatagtgatccctttttgtcgtttgttctcgaagtctgagctagaccctctggtgatcatgtaaatcactcccctaaaggctgggtccgtgaagtcttcttgctttggtggtgggggcgtggtaggtgttgatttgggtgccgtggtgggggtggcaaagctaatctttcttgatgttgaaggcgttgttgctgtgggaagagattaggtttttgctgctaggggtagtatgggtgatcattttgatattgatgctggttgtactattgcggttgataggtatgagcactaactctttggttgtctgccagggtggccctagccattcggtcctttgttgctttggtctcggggcagtctctgtttgggtgtgctgagtcttcgccatggaagacacagtagaatcttctcgattgctgacagttcagcctcggcctttgcacctggtcacgttgccaccgtggccttgttgcgggggatagtcttgacgacaaggggggttctctcctggttgctgctggttttgcgatgttgtgcacctggagttgagcacgctcatgctgtgctggatcctgctgtggaggtctgatccatgtcctgctgaactacggagtctccttaggcttttgctaagactcaacttttcttcgatggagttcttctgatcgggcatatttttcgaaaactgctacaactcctgcaagttggttggtgggtctcttatgcagaggctatataagatgcctac

SEQ ID NO: 18358 - DNA, 585 bp, Zea Mays
tggacgagtaggggacggtggccgagaagaagagctgaacgaagaccagcaccaaccaagagaaaagtagcaactcacacacagtaggagaggagaggaaagaacccagcgatagatcagagtcggagagaaaattttgcctcctcccatcggaatctagctaattattttccagtccttctcccccatgtaagtctccctctcccatccccgtcgcctgcacctaccggaagcgaagccttctacagttcaggtccatatccgggtcgccgccgtcggctagctctaggcggacatggtggccgcttgccggagcacggcctccacctacgcgtttctgctgctcttgctgtttgccgctgcggtcgccgtctcttcttcctccgggttgcgccgtgtccaggaccaggacagatcggcgctgctccagatcaagaacgccttccctgccgtagacctgctccagcagtggtccccggactctagcggccgcaaccactgctcctggctgggggtaacatgcgactcaagctcccgggtcgtcgctctggaggtgctctccccttcacggcgtttcggacccag

SEQ ID NO: 18359 - DNA, 397 bp, Zea Mays
tgcacagatagaagttgggttttctctagcagatgtggaaatcctaaaatctgtactgaggaattcccttacttcacctggtgaggagttttggaatgcaacaattgaatgtgctgatgggatatccgcctaggctaataaggtcatatggaaggcctgaatttgatatgcaacagaagacaagtcacacaggtgagtccaattctcaattgatctactcggttgtttgtgattactaggttttgaactaatcattgtgttgttgctcattatcacattaacaaattaaatgccaccttttttctttacatccataataagaacgtgaaaagttaatggtctttcagtctatattgggctttgttttttctttgttctcaaactatttgtacctttt

SEQ ID NO: 18360 - DNA, 814 bp, Zea Mays
cagaaacactcatagaagaggaagctccctgagtgaaattaacagaagaaccccacagagtcgcaggatgaggcagacgtggagctccaaactgggatggtacaggagcggtcggtgctggagtgggcgcggccaggtactgagggaatcctcgcataggcacgaactgaggagtcctcggcatatagaactgctgctgaggggtggtacagaaaattgttgctcagcgcatgacaacatgttgacagtgcccagcgaagaggaagaagtcactggctcccatttaagtttctcattgggattcctcctacacaccacatccttgtgatcctggctgcagatagagcatctaccactccactaacactcggcacagcaatgcgcttcaccacaacagaaacacaccaaccacaacctaggcttaggaatagcccgatacctctgagtactccctcctaaagtacttgattcagagggtttgttatgataggggtggtggtgctggtgttgtgactttcccctcttgtgggctggacccccagtgttgcccctcctcgcgtcctggccacgaggctgatcaacacctgaagacttctgagattccatggtatattgatgttgcatctccacgcccaatgcctgctccatcgttgtacgaaaatccaccagcggaaaggtgcccagagcatgccagatagagggtttcaggccctgacggaactggctcgccttttccaattcattgtaagccacatgaggaacaaagcggaccatcttgttaaagcccacttcatattctgtgactgacttcttc

SEQ ID NO: 18361 - DNA, 377 bp, Zea Mays
aactagatcctactcctataaatcttgttctcccctcatgcacttaaacctaaaattagtgcattagaccaactcaaccgtgaacgtaagagctaacccaaccaatagtgtcatgatggattacataatctgtttattcccatcaaatgagctttagacctacatcatgtagcctatctcatccaaatctatcttaaccatattccccaacaacaatgatatgcactcactgcgagtcaatgagaccaagaccggagaagaaaagaccaacatcgtcaagggaggatataacagtcaagcgaatctcgagatgaatcaagacttaaacattttggataaagttctttccttgccataatcttccttacctcaacctg

SEQ ID NO: 18362 - DNA, 886 bp, Zea Mays
gtgctttactctgctcttcctcttcctccgctcttcctcagttcatctgctgactgctactgctcgcctgctctccctctgtctctcatctcctattttgtatgcagcaagccagcaacactgcaacaacaccctcatcaatcaatggctagcccatcttcagtcaacaatgtcaactatgatccaaagacagacaaagcaaggaaggctaactcaaatgatccaagttagaagtatgatattgggcaaatttggcaaatagagatcaagtgacatgcaccctttgtgacaccatagtttctggagggataaaaaggctaaagcagcatctagcatgtggctatggagatacaaagatatgttcaaaaaccactactgcgattagaaaggagatgaggggttacttggaatccaaaataaggaaaagaactattttcctagatgataatgagcagcaagaggaggaagaggacgtaatggtggtggatgcagcagctgaatctgttcaagctcaacaagatgcacctatagaatcccaaggctctaaggtacaaccaagttcagggactgcagccaaacacaggcgtgcaacctatctgtacaaggatacaacatcaatcaagaccaaggaaaatcaagcaagcaagaaaaagtcaattgtggagatgcttcggaaatcacctgaagatgtagttgatgaaaggcgtaaagggtgttctcaacccacaattccatccaagatgaagtccaaagagcagaagaattatgtggatatgcaatgggctttgtggttttatgaatgtggtgttccatttaatgcagcaacagcaagacaatttcaggttatagttgaggcaactgcccagtttggttcaggctataagcc

SEQ ID NO: 18363 - DNA, 507 bp, Zea Mays
atagttgtagctgcctagctggactacatgaactgtaccagtgccactgccatcgttctagggctggggcaacacatattctaggaagatgacttcaacattataacaccgcctcctattctcatctgcaatggcacaacaatcaagtgaagcacaactcaagaggaggccagggcgggcacaatactgcttaccgtttgaagaggtcctcaatcctcatctcggtctctgaattctaaacagaggagtggttgcctactcgcctgcttagccgctgaacagacaacagaggaggcaggagcgcgctagaggggggcctctgcagactacagtcgacgcatgatggagggggcacagctgctactcgagcagagggttgccagagcacaacaggacgacaggagagggggcggcggtgatggagaaggggcggcgacgctggagaagggatggttgcactacgaaagagcgcacgcgcaacagtgtgtaccgtattggtataggcag

SEQ ID NO: 18364 - DNA, 557 bp, Zea Mays
tgatctgtgtggtcccattacaccaatgacaccaataggtaataaatacttcttgctgttggtggatgatctgagcagatacatgtggatggctgccatctcatcaaaggaccaagctgttgatgccgtgaaaagaattcagatgcaagttgaaggagagtctggactcaagctgaagacactccgaactgatcgaggtggagagttcacctcggatgagttcgcggagtattgtgcggctggtgatgttcaccgacaacacactgcgccgtacagtcctcaacagaatggcgtagtggagcgctggaatgggactgttgtagcaacaacgagtatgctcaaggcgaagaaactccctggttggttttggggagaggtggtaaaaatagctgtgtatgttttgaacaggtgcccaaccaagagtgtagatgtgatgactccatttgaggcgtggcacgacaagaagccggcagtgcaccacctcaagacgttcggctgcatcgtctacgtccgcaacgccgtacctcatctgaagaagctggaggatcaaggaagga

SEQ ID NO: 18365 - DNA, 459 bp, Zea Mays
tatagccttcagagtgtggccacttttagagaagtgggaaatgccgaaggagactgttactaaaactggcgaaggagagctggttcgactgaaatatagcttcaaatatggagataaatttgatgagccaaatgatgactggctgaaatgtatcgaagctacaaagtgatgaactgcttgggctgtactccaaagcggaagataatgcgttatctgcggccttcgagagccgaaaaagaagaggctaaatagagttttttgatgccatcggatttatgtatcctgactaccgctacccgccgaaggggcaaaagagaaaaagtgcaacttctgggaaggatgttgctttagttgctccgagtgagcccgcaccgaagaggagaaaagtaaaggtacttactcaccaaccgcgctacattgaaccggccacagtgcctgaattcggcggtgaaatatctt

SEQ ID NO: 18366 - DNA, 606 bp, Zea Mays
cagtggggtaaggaaatatcgcaccgtggatgaactccggccactattctactcaggccgccgtacccgcctgagtcacaaccgctgtggataggctcgccggagttagccacctcgcgaccttgcgccacgtgccctggcgtcttaccacgtcgcagtagtttgcgttatgcatattcgatgatcaccggtgagctcgccacggtgaaagccactaatcacttgcgccagtgcatccccttctctccgatctccaccgcgcaatcgcaaattcacgggccaccgctcaagggccctataaattgagcacaccctcgactccgctctgtaattgtgcactcaacacacccactcgtgcctccaattactcaccagagcccccaaatcgctcagtttccccaaatcagttttccgccaccgtgaacaagctctcaccgtggccagtgcacttcaggtccgatcttgccctctgctctcttgtttcagcactcttacatgccattgatgctcctcgacccatttaattgagctaaaccgtgctagatcgtcaggaacacccgtgttcatccttagttcgcgctgtctccgtggacagggtgattcaaa

SEQ ID NO: 18367 - DNA, 911 bp, Zea Mays
cctgtttctctattattacttttgttgttgttgttgttactaccggtacaattgctaccgctatccttcacgagcacgatcggcgaactattcctatgatttgattctacatcatttttatttctatggcccgaacgattgtgttcgagatgacattttagctatgaacctgactcaaacacaatcttcttagggggatactatatcctagtcctagatgctacttattttatagctcaccttctacaacacacacaaacctgtctcaggcatccgattccgatgcaatgatcagtgaaaaatgttgaaaactattcaagttgacacatcgaacaacaatgttcgagccctagcttctttaggtattgaacatgatagggcatcaatagagctgcttaagacaatgtgcaatagttgatcttaaattttgccccccacatcccaatatcataccacaccagtattatctctcctcctatatcacttccatcttcaacggtttccccttaatcacaacccttcatccactatgcataaataaaataatttacatttggtcgtcgtacaccatccacctcctccttcccggctttccccatcatcttctatgaacaaagcaagatagtgtgccctctgaaataaggggagagagaacatccctctagcttagggggacaggtatagaggcaagtgatacaacatatagaggtgtcctattcaaggggagagagtggtcacaccggaagtgttgtggatagcctaaagataagacgaactctacaccacctaagcctagcccactagctagcgcatgcagagtccttggtcgagatgcctttttcgaccgaggctcccaaaggccccaagggtgcagtacaggcttccacgacatcttctagggtgtctctagc

SEQ ID NO: 18368 - DNA, 313 bp, Zea Mays
gttggattgttgtggtctaggtcgtcagggtcgatagagctctagggaagttgcattgtagtttgttcgagcttcgatggtcctggtgacgccggtgggaagtcagggtgactctggtgtggctcaacgagcaccagggcttatgggctgcgacgacactggtggcatgaagaaggtgttcgggaagctaggagtgtgagctgagagggtgtgaaggtctgcattttatatgtgtgcaccattattagccagagacagctccaacgtgagcagcgtggctggcacatcggttgaatatcggtgagttcgtgtc

SEQ ID NO: 18369 - DNA, 503 bp, Zea Mays
tgccaagtacatatccgagtgtgatacctgccagagaatcaaagccagtcatttgaaggcagcaggccctttgcaaccccttcccataccatcttggaaatgggaggacatttgcatggactttatcatgggattgctcaatacctccaggcaccatgattctatttgggttattgtagacagattgaccaagaccgctcatttcttaccagtgcataccactcacaagacagagaaatatgcagaaatttatgttgatcaaatagtgcggttgcatggtattccggagaccattgtatctgacagaggagcactgtttgtggcacgcttttgggagcagctacaagaatcacttgggacccaggtaatacgaagctcagcataccatcctcaaacagatggccagacagagagagtaaatcagatcctcgaagacatgttgcgagcatgtgtactacactacggaaaggattgggacaagtgtctttctttggcagagtttt

SEQ ID NO: 18370 - DNA, 347 bp, Zea Mays
ctttattagaggcaggagtatacaagataattttttgtttgtgcagcagatggctagatccccccacagaaccaaggaatctcatttgttgctcaagctggatataactaaggcctttgattccttgtcatggccatttttacttgaggtcttgcagcatgtgggctttggcagaaagtggtgcaacctgatctgtttgcttttgtcaacgtcctctacacagattttggtgaatgggcaacctggacctccaatttcacatctccgtgggctcagacaagcgacccgctttcgcctatgttgttcatccttgccatggacgttctgaactccctggtgaaagtggc

SEQ ID NO: 18371 - DNA, 876 bp, Zea Mays
cttgggaggccaaaaactaatatcaaggattagcaaaaatcgagtgttgattagcgaagttcaataagcgtccaaatcacaagtcataattgctggctaatacgtgtcctatcgaagcacaagataaaagtaacaaactagcagaatggtagttcttgaaatagcgcagatttttcagcactagtagaaatcaaaggcgcgtttccaaacgagtaccagcaaacgagctcgaaatattctgaattttttatcactgatccaaaatcacaattgatggaagcacacaaaatttcacttgaaacagagttgtattgtggcctagagaaaatcacaaaggatctctaaaattcctgaaaacacttaaacaattttttaattatcttcccgatttttttgaattttttgaccgaaccaaacaggccataaaaatttgctgtaaaaatttgagctcaaacggagcaccgagcgaaaagttatgcccgttctatggaaggtacctcaagttatggttttccagggcacaaattggtaggaaccgtagcggcggctatagaacacaggggcacaaacctccctggtataagcaataggtaagcgccagatgatgaaacaaggaggggctgcaatgcaatgcggcttgcaacctaatttagggctagcgtggcgagaattcacacaaggcggctagcgagggcaaatcgagtaatgtggtgtctcgacttgtaatatgggtaaggtggatgggatagtggcggaaacaaataacaacgatggagcgattgaactacgattatgacacgacctaaaccagcaacaagactcgaacacggacacaaattcaacaaagcaatctgaaacgaaattgcaaggctaaac

SEQ ID NO: 18372 - DNA, 292 bp, Zea Mays
cgacgagtcaggctctgacatagacgtgtggttcgaaatgacagcacatgagttggtatacgggctgtgacattagggatagtgtgaatgaccattctgggaaagacacgaacaagtgtgtgttgcctgtatggaagctaaccatggctaagaagtcaacctaatacatggtgtagaatacgacaaggcatagcatcatggcatgagggaatgtagtagcatgacagaggggacaacatcatcaagaggagtctatcggctcacatgaatcatggaagacgagtaataccac

SEQ ID NO: 18373 - DNA, 773 bp, Zea Mays
tggtttccccgggttcataggaccagatggagggaggatcctgcccgtagaccacgcggaaaggggtgtcccgcagggacgtctggtacgccatgttgaagaggaattccgcccatgggagccaccggagccactcgcgcggcctgtttcctgccaagcaccgcaggtacatgaggatgtcacggttggccgactcagacttcctgtcggactgggggtgaaacgccgtggtcatttgcaacttggtccccatcagccgcatcaactcctgctagaacgtcgacatgaacaccgtgtcccggtcggagaccatggactgtggaacactgtggaggcggacaatgtcgttgaagaaagcctgggcgatagattcagcggagtacgggtgtgccaatggaatgaaatgacagtacttgctgaacctatccaccacggtgaggattaccgacttgccgcgaacccgtggaaacgcctccacaaagtctagcacgacatcagtccacacgccctggggaaccggcagcgaaaggagacccgtcgggcgctggtgcttggacttgtagcattggcagacttcacacgtacgaacccgttcctgcacaacttgcttcatgttaggaaaatggaagtcacggcgcaaccggtggagcgtccgctgtactccttcgtgtccgtcctcatgtatggcccccacgatctcttgtagcagcgggaagtcggtcggggatgtacaaccaccctgaaaattgcaccatgccgtccacaagcgccta

SEQ ID NO: 18374 - DNA, 404 bp, Zea Mays
gcggaagtagccgcggcatcgggaggatcggaaggtccgcggtggctgcggaatttctcgccgaagtggaggaaccaccgcaattccgcccttcgtcgtggcctgccctgtcgtcatctctaccgccggtgagtaccctcctggattgttagccatactatcatttacgtgaaacactgttcggattggagattctagcgcgggatcggtggttggtaatttccggccatggcttccgccgtcggggtactgtgcggcgccgccggcgcagtgtctggtgggggatgaccttgtggccgtctgatcggctgcgtgtggctgagatcggctcgcggtgacctgcccagccgaaagcgagatgggccgtccgatcgggatcggagggcggtgagtaggctaggatt

SEQ ID NO: 18375 - DNA, 534 bp, Zea Mays
cgcggcgctctacggcggcgccgtcggggaggccctggtccgcgacgtcagggcggcgggcggggtcctgacggtggacgacctcagagggtacagggtggaggtgggcgccgccttgcgagccgacgccatggggttcaccttcctcggcatgccgccgccgtccagcggcaccctcgggatggcgctggtcagtgcttgctttgctcctgctctgcaaggggttcgatccaaacgcaagcgacgtgcacttatttgttcgtttcttggtatcatgcatttgtatgatgaccaatgcagatcctgaacatcctgcaagggtacagctcgctcgagttcttgaaggagctccttggcatccaccgcgtcatcgagtccatcaagcacatgctagccatccggatggacctcggcgaccccgacttcgtggacgtgaccagcgacgtcgccgagatgctgtccacgacattcgccgacaaagtccggcagaggatcgtggacaacacgacgttccctcccggctactacttcccc

SEQ ID NO: 18376 - DNA, 1115 bp, Zea Mays
caagaaagcgcgcgcgcccgcacccgcgctggctattttgcgaaaagggcctcggcttactgaccaatccgaagtgggttcaattactattttcatgagtcactggcagtttacacaggagtccctcgagttctattcctttacacgataaagtcctcgacggtgccccgcacgggaagccaaactccggcgagctagactggccggagggggccaagacctgcgctaatcttcggtttacacctaattctacccctgaggagtatttcccctcactcaatttctgaattggagctctactgcactctgtccacggtgacagtgcggagaatctaaggaacagcgtgttcccggcgacccatggcagtctagttcaattggacgattcggtgagcatcaagaacatgggagggtgttggaacaatcgcacagagggcgagatcggacctgagttgagctggccgcgacgagggcgttcttgcggtggtataacaggtttggggaaagtaagaaatttgtggtctctggtgagcgatttgaagcaatagctggtgcgttggcttctggattatatggcgcaatagccccagccatcaatttatagggggcttaggcggtggcgcgcaatttggccgagcagtgctggtggccggagatagagaagaaccttggcgcagtggattcgtgtctaccgtcgtggcgacttcaccggcaaccaacggggagctagagtgagtcacgatgatgcggtagacaggtagagacacgcggcggatggcggtgagggcttaacggtggtgagaaccttatccgaaggatcagtgcgcaagggggaggcacggcggctagccggagtggcgtctagcgcacgcagtgatgatcttttaccccgcgatgctatccatcaactcccggcacgaatccagtcgtcggtgacacgaatcgcggcgaaggatcggacgtcggcggtgagggctccctgcactggcgtcttgatcctcacaaagcactgtaccatggcgattttcagtcagatgaacctgacagccaatctttgagctaaattttctctcaaactcatatagcaactaatccgggactctgcagcaaagttg

SEQ ID NO: 18377 - DNA, 322 bp, Zea Mays
ggaccgcgagcgcgtggggtaggtggtcgcgacggcaagaagtagatccgcatcggactctatttcttcacgcggacacgatgcagctcagcttcaacgacacgtccatgaaggccatctgcgggcacccgtcgcggagccgtccgccagcacaactggcaccacctacacgctgtctcctcgctgtcggcttgggcagccccacgcacgctcggcaggagatggtgacggaggggaaacaacacctagaggagacatcggcgccacctgcacaacggtggaatgtgaggggagaaacatgagatcctggtgccctgctggc

SEQ ID NO: 18378 - DNA, 499 bp, Zea Mays
gttgtactgtcctctagtagagtccatatataggcaacactatagaaagtacactattccaaatcaagcaacggttcagcaattttcaaaatgccgcacttaatgtgctcagcagattttaacaaggctcacgttggagaaatgaccatgccttgctgttttcacactaactatttttgtcaacctatatatagcattcatgcacttgtattaaaataagcaagatcagtctaacaagttgaacccatcagcggctcttgagtccagataactaccacggacaataaactacttgcgagagcatcaaatcaaaggatatatcgactacagtacatctcagtaactatacatctcaaattaaacatcgatccagcgaaatatcgaattaatcacccaaaaagcaactaataaagcggcgcacaatatcctatatcattgtaactgaccgcgcgcagccgcagcagtaggtcagtggaaagagaaaccaacagatcaccac

SEQ ID NO: 18379 - DNA, 736 bp, Zea Mays
gacgccgtttatcctgataactcttcatagttacttgggcttgcactagtcggtccttgatttcagcaagaaattcatccctgtcctgcaactgggcgtcaatcgcagccacctttgagtcccctgcttgataggagaccattggaggagggtcccgtccgtagacaatctttaatggagaacatttcagtgtcgattgatatgatgaattataacaaaattctacccatggtaaccatttcagccatgatttaggacggtccccagctagacagcgcagatacatggtgattattctgttaacaacttctgactgaccatcggtttatgggtggaatgccgagctcatttgtaacttcactccagccatggtaaacagttcaggccagaactggttagtgaaaattgtgtcccgatcactgactatcgagcatggcagaccatgaagtttgacaatttcgtcaaagaaggcctttgcaactgatgccgctgaatatgatgccccaaagcaataaaatgaccatacttagagaaccgatcaaccactgttagaactactgacttgccaccaacctttggaaatccttcaataaagtctgttgacaccatagagggaattggcaagggtaggccggctgggtgaagatgttgagtcttatgttgttggcaaactgcacagctgcgcacaaactccctgacacgttggagagctttagaattgtaaaatgatgtgcgc

SEQ ID NO: 18380 - DNA, 344 bp, Zea Mays
ggttttccgatcgtcgatttcctcgtccacggcgcagattagatcaaaacagtaccaatccctgtgtgtgccctggccgtcggatttcgatcccacgaacacgaatggatatagaataattgaatccaagccattgccctctgatcctgcggcccatatcgcgtaccggttcggcacgtgcgtggattaatccgaaccctccacctcagatctcacggcccaaatttaagtgtaccccttcggctctggatatttgcttaagagaccttcaagttaaaagaaatcaacccgcagtcctggcagtggaagtctgagtcttaggacatttttcgtgggagcccctg

SEQ ID NO: 18381 - DNA, 607 bp, Zea Mays
cccgtgcgtgtgtataacgagataaatgctaaaccatatccgtctggacgtgcaatcggaaactctggaagtatgaaactattgcaatgttgttcgtggccaattcatgtgatgtatattataaaatttatgctttttagactgcatctctgatccccagcggggcttggatctctagcggggatgaggatgagacatgaaattcctccattaaacactttgggacggagacagagatcaggtttcggaaatcggggtggagatggaatatacttctctggtctcgtcccgctccattgacatccctagttgaaacgcaacgtattaaaggcagagtgagctatgagtgacgtatgaaaattgtaaaccaaacgcttattactgaaattctaccatctctactctctctatctctcttcttctcctcctcgtttccttccctcttcaattgtttcctcaattgtttccgctaacaaaatgataattttcacccactccaatacatgagcatactaatttctagtcgttccaagtgcattcaaccttcggattctaggtttctattgtacacgagtttacacaaaatgctagcagtgcgctcttcctg

SEQ ID NO: 18382 - DNA, 631 bp, Zea Mays
gagggatgaatctgattctacagtagactgaagaagttcatagcagtttagtgcagtccgaaaacagcagaagtatccccatccactagctcttctagggagttttggggtgtggtatgttaaaggggactagtgtgaagggggagtttatctgtcacagttttaccaaaccgtggataagtttgggggtgtaaatcctatctacattgtgactgagctgttaacttttgctctgctgtcatacatgcaatgaagatgtgttggactcttcccctgtgctttcaccttgcgtggtgaccatgcaatggatgtgtgaagtatgtgggctctcgtttagtgttgttaaatgtcccagtgaaacacaacaagttcattttgtgtgtgtcttaccatagtgtgttgaacccaacaaactatactccactatgtcatgtcgatcccatagcctctccctcgtggataacccatcccctacacctaggttaagctctcaacctctctccctagttctctggcctcactgcaaaggattcaactcgagttgttctgaagggtggtgaccacaccaacctttttctttgactcaccgtggccagatttcttcgtggtataactcactcgatcactctat

SEQ ID NO: 18383 - DNA, 802 bp, Zea Mays
acaaacttgcaccgaaagttccaatcacgaccttgtaatgaaaaacgaaaccctgctggaagtacgaacatccgttgatgcacctacataaaaaaaaaaaactcgaccgaccacgttcattctttgttttcccttctttttccaacctcaaacacactctcaacattatatttgagcatcagaccaaaatcactacagcagaaactgcagcttgatggttgcaatcaagggcacggcacaaacttttaatctaaatgaaaaaagatatgaagaatcttataaccaaaaaaaaactaccagttagcaacccaatgagcctatgcacaaaaccgaaggcgcccttcagaaatcagaagcgggataaacagtagtgcacctcaagctcatcccatggagactttagcaccaccactcaagcccaaatcgttgtgcatgcacagctcagaaagacaagcgagcaggatggacgattctactgtagcatgataaacagcatcagcacttcagcagcattcgtcaatattgcacatgcacaaagatgacaaattcgaaacagcaaaagacgcttaaccactcctgctttagtcagcatgaaagcaccgcttcaattgtaaagacaaatatgtaagttgcggtacaaaacaaataccatatacactggtatgcaatatgtaccaagaaccccgcgagggtcaaaatagaatcctagagtcaatatgatatgtttggggatctaaatgaacatgccattttatgatgtctagtctcaaagactgcactcatcagtcatcactacgagaaa

SEQ ID NO: 18384 - DNA, 466 bp, Zea Mays
ggttcaattcccccttggacggatcgacgacaagggtgaggtccaacaacggtggctccacattcttccaccgcgtgctctctctctctctccgctcggcgatggtgctcaaatcccaagctagatggtcatatggaaggggcctggtgcctgcttatatacgtgatgggaattcagctgggagagattgtggtgagatcatggatgaagtacctgtcgaactaggcggagtttgttgtgatcatactgggagaagagggatctgacaaaccgggcccacgcgacagcgacaaagatgcgagtgcgcctgggtgtgcgggtgaggtgtgagaagctagcacgtgggccctactggtcagcaaatgcgactagcgtgggttgaggtacagggtgggcggtagggtaagaaaatgggcaggaagtagtaatgtagatgggctggcggtgcaagtagtagtggcccgcg

SEQ ID NO: 18385 - DNA, 578 bp, Zea Mays
cggggaggaggttcgaccggtttaaagcatgccctgcacggccgccatggctctcgcaagctaaggtcgacgcatccgtagccagtatacccgccgcgcaacccaagccactgtcgcgcgccattaacgggtgaagtgtgtgcttgcgtcaaacattctctggtggtgttcgccgtcgtcgggtcctgtgaggttgtccatcgggatccccctgtgcgagcgtgaatcaggtggcgactggtgtgcgggcgtgccttcgacgccacgaagcttgctgctagaacagccgttgtccacccaattggcagtcgtgtagcgtctctggtgccacccgcgcctgctggtgaccctccctggccgcgattggatcggccccgtcaagaatttctcgccgacgtgtgcgcctccgcggaagatcgggtgtgccgtggtctgcccgtgtgtgtcatcctcaactgtgagttccgcgtcctgatgattcgtctcgtcattctctgcgcgtagcacctttagggacgaagtttagggccgtgactcgccggattgcttttcccggccatgacctccgccgcggcctg

SEQ ID NO: 18386 - DNA, 544 bp, Zea Mays
tagatcaggactgatgcccaaggatccaacggccagggagcatcgtctacccatttcttcctccctacggctattctatggtggcgcagacccccagcggcggcggcgccatggccatgaccgagcgaggaggtcctcccagtggacaccttcaaatcgaaacaaatctacgcgttgttgagactacggcgagcaggtctagggcacacttacccgtagttaggacgtcgaggtaccccgaccatgatgagatgcggatctagggcgaggtaaaacttcgatgagaaattccaatccacccacggcgtcacgagcttcgattcgacttcgattatcatcccctcatgctggcgacgctacttgactggaatcccgaccccgaacgccattccccattggattcgccctaggcggctattacctcactgcatatggcggtacagcgaaggaaaggggggcagggacctagttttatactccgagaggtgcgcgagatctgcggggagccatgaccacgcagagcacggaaatcacgggttgttgg

SEQ ID NO: 18387 - DNA, 786 bp, Zea Mays
ccaaagggaaaagtaggtaaagtacgatgctcggattgagatggaaaagaggatattttaaaggttggtgtaagataaacatcaaggtaagatataggggtgataaggataaaggtgataatgatgaaaagcataatccaaggacagagttaaggcaagactcgcaaagtgacgaagtggagaaaacaatcaaggacaagataagtaaggttccatcaggacaatcgaagtaaagaagttcattaccgagggatgttataaggaacaacgagattagcaggaatgtgtgaaataaaatgaccgctcacggttcatcgagaaacaagggtggtcaagggcatgttaactgaaatgactcaaacagatattgggatataaaggttagcatatataaaaataagagtatgcaagattccaatggtacgagcataccaagaccaagagagtacaaattgccaaaaagatagcgacttaacaatagaataggaaagggtctcaaaagacagtaagatcatggacatataaactgaaatgtttaaataggcaggagagtttttattagaggtaggtattgaaacaagagtattaaagaatccagggatacaagcatgttaatgtcaggggaataaagattgccaaatggtagcaatttaatgacgaaagaggaaacgataccaaaagacaataaggttatggttagggggcatctacaaagatgttgcaagcacaactgtgagatcagatctaatagattgagagaagaatataccatacaagaatgaaata

SEQ ID NO: 18388 - DNA, 968 bp, Zea Mays
agaagaaatgcatctacttcctctgatatgagtagcatggcttcgcaaggaccttcaactagtacaggtcataagatgttcttttgaaacacttatagtagcacatgattaagaattcatgtcactgggtaatattcttagttttcctgtatgctatttatgagcaaactgcaagaatcataactatagcattagattgggccttatttaaaaaaaaaatctctttaatattgtgacccatgcgctttttcacaatatgttttttttctggagataacactgcatatagttgaaaataagcaaacaagaatatttgaactcagtaagcatggaggaaacatacaacttgttgcagctgttaccttcgtaattcttgcagtcttgctgcattgttgatttgatttataaatcttttctgttctcatgggcatgttttacaaaaaatgcagctcctcttaggcggtcaagcagttggacttttgatgagaaaattttagtgcaagcattgtacaaggttctgctttcagtgtcaaagaagtacccagttgtactctatataagagatgttgagaagttccttcacaagtccccaaaaatgtatctcctgtttgagaaactactaaacaagcttgaaggtccagtgttaatcctcggatcaaggattgtagatatgaacagtgatgaggaatcggatgacagattgactgttctgttcccatataatatagaaatcaagccacctgaaaatgaaaaccaccttgtaagttggaactcccaattagaagaagacatgaagatgattcagtttcaagataaccgaaatcatattatggaagtgcttgcagaaaatgatcttgaatgtgatgatttaggttcgatttgcctatctgatactatgtgccttagcaagtatatagaggaaattgtggtgtctgcagtttcgtatcacttgatgaataacaaagatc

SEQ ID NO: 18389 - DNA, 640 bp, Zea Mays
gggaagggaagggatgattcaaataaagtagttcatggggaagggagatgagttatccaactatctggaccgttgattttgatagtctgttaagtttgagtacaatatgtttggtgaatttagtgggataatgagtatggggtgagttggttgtgtgacttttgcaaagtttaaactaatggattatatagtggtaagagcataactcttttctattatataaatatatgcaactttctatctttaacgtatacagctttatatctaactttctatctttaacgtacataccattctatatttaacgcaagttttttattattattattttcccggccggtcccccctcccctcatcacctgtgcttccgcgaaacaacgctccgaattcaacagtgcctaaattaagtgacacaaccctaaactttcatatgactactatatagcatgtgttacacatgatcccgaggagatgatcgatgatggtggtggcacaagtgaggagagggggaagggaagggatgattcaaataaagtagttcatggggaagggagatgagttatccaactatctggaccgttgattttgatagtgtgttaagtttgagtacaatatgtttggtgaatttagtgggataatg

SEQ ID NO: 18390 - DNA, 300 bp, Zea Mays
ggccgagacgccacccccatggtggcgggtcgtgtcgtgatctagatgcggtgtcatgtgagcaaggatcgaatcgtctcttccttagtggtgtgctacatcgacgcccgagtgtagtgacaaatgtgcaagggtcttcgcatctgtgtcaacgggtgcgaggggtaaggaagctaattgagctgacaaagatccatgtaggtagttggaacgtagggtctcttacaggtaagctaagagagttagtcgatgcaacgagcagtaggcgtgttagtatcctatgtgtccaggagacaaaat

SEQ ID NO: 18391 - DNA, 394 bp, Zea Mays
tagggccatcccggaaagttgatgagcagccaattgaacacgctgattctctgggcatccgatggcttctaacttccttttaatcgtgcgcagccagtcatcagcatcgaggggattgctggatccagcgaatgtgggaggcttgagcctcgacaatctcccatcctgtcttgtggtcttccaccattcggcgttgattctccagacttctagtgaggacctcaatgagtcgggtttggttggctagaacttgggctaaatctaatggcagctccgaaggtgcggggaggtgggtctcactcccttctcaactggcttctcctttatctcctagaggaaaccctgctccaatctcgaaggtggtaggcgtggttttatccgaagccatctgcca

SEQ ID NO: 18392 - DNA, 842 bp, Zea Mays
gcccacacgtgttcgaccctggtcggcaaaccagcgcctacccaacccgcgcgcgcttgcccccgcgcacggtcagtccgcccgcacgctctcaccgcgcccactcctatagaggctgtcatcttctcggacttccttgcctcagcccctcacgctcacccgtgctcgatcatcggagttctacccgtgaaccgatagctccgccgctcgcccgagccgcccgagcaccgaccaccacgaccagctcgccccaaccatccctcacccatgccaactgctcggctagcctccctggagtcccgtgaagcttcctgagccatcagaccagatgcaacctcaccggaaacgccagatcgtccttgtcagaatccctccgcccaccggagcatgtgaaccgggtaaggcactgcgccattgtcaaattccttgtgtgcacagcttctacgttagctagtgaacctccccaagccgtccaattgaactagaccgccctgtacaggccaggctcctcgccgtcgacgagctcttctgccccgcgtgtggctaggatgacttcgaccaccaccgaccgccatccgaccatcgacgggttcgctaggacctccccgatctccaagaccccttcgccaaagctagaccaccgctggtaagcccgccgcccttttttctgccgtggctactcttccgatggggttaggagcgcgggttggatagttcacaagcttaggggtttttcgcaaggtcagcgactcgtttgaatagtagccccaggactcgtctgtaagtgcgcagggaaaaataagctagggaccgagcgcaagaaggattttcttttccatttt

SEQ ID NO: 18393 - DNA, 503 bp, Zea Mays
gtagaacctcctttcaaactgcctgatgaagacatcccaagacaggactcctagtgaggaggagtgcgctgcctgcacgcctctccaccaaatttgagcctctcccttcatcagttgtgtgccaaagtgaacacgatcaccatacacaatctcaaagacattcatcttatcctccacgtaagttagccaatctgccgcctcgaccggagtaccactgccatcaaaagtatccagcttcatgcccatccactgcatcagagaaagaccattgactggaagaggcacctcggcctcgccacttggagcagcacccgcaaggacagcgcccccgggcacccctccaccaccaggaccctaagcagcacccacaggggcaacaagaatagcttgcctcagaatggccaactcctgctgcatggtctgcatcgcggctaacattgccgccggactcatcgagtccccactaggaacttgcggactaccccgagccctacgaggcggca

SEQ ID NO: 18394 - DNA, 799 bp, Zea Mays
ggttagttggattgaaacattagctcaccttaaacaacacagcatcaccacagctctataccaccacaccactcaataattgaactatacaaacgttgtcactccacaaaaacaacgacaccacatgccaatgaacttgctacaatagcatcacccacttgcatagtcataccgatacaccatcatcgcacacacgcccgacttgtgccacattgatccaaccactatgatggaggacgacatgcaattgtacaactacaagccaagtaaccttcaagccatcatttctgcaggcaccacttattgacaatgtccatgacacgaccctaccataccataacataacacaaacgataccctacaacgttgtgcctacatccttgtcctagtcaactcaagattatactgcaaagaccacctccgccactagaggaaactaatacatgttcatgggtcaaattatgaatgtgggtaccgacgaccttacgaaggttaaattcgtgggtcaaattgtagacatgggtacccacgattaagttagttcatgggtgacgaccataaccgtcgaacttgttgcaatcaagatcatgggtacccacgaacttaaattaagtttgtcggctagggtcttaatcgttgaatttattccactagtcggtaaacttttcccatatatgaactttagttcatgagcccgcatggacatcaacgaaattatgtgccaaaacatggttaagtttgtgttccacgtggacaccgacgaacttattgtgttaagttcatgggccatgtagcctct

SEQ ID NO: 18395 - DNA, 765 bp, Zea Mays
caatcaaccttctacggggaggatttaaataaccgaagggttatttggttgatctaatctcgaccatacaagtcaaatcgaacggctcatgcttcatcatctatctccctacaccggggcacggtggcgcagggccacccatgcggcggcagccattgccgcgcacggccaactggcgatccggcgcctaaccttcatcactgaccccagataaacgacgcggaggatataacgaactgggttacgatgtgttaccggtgggtgaggcgacgactgctccggtccagagcgcgacgacgttttacaactctagcgagatccatccctgtgtctccgatcgtcttctgccccgaaaccgacgtacatgcgctcagcacacaccagcgaactcagccaagccctggtcacctccaatcgcgtagcgaagcttctcggcgttgacatccagcggctctgtggcgatgcgtccgctccggcgaggaattccttcctcttcgcccgacgatcttgcctggtgaggccacggacatcttccatgtggcctagtgaagcttccgggaacgaatccgaggacacgacggcgatgagcatgcggaattgactacggcggcggcgaggcttttccctccctctctcttcctctccgcggcggcggtggtaaggctctgctcgctcggtgatacggcctcgcgttatatacccccaaatcggtggtccgagcggaacacgacgcaacatgcgcggagtagagatcgcgcgcgtgga

SEQ ID NO: 18396 - DNA, 336 bp, Zea Mays
gtcggtgtttagtaccagcaatgcaccatggggtgtaccacatgatgcctttgtgagttggcaacatcaactgtagctcgatggttcgctttgagatgcgacaaaacacacgaattatataggttcgggctgcttgatgcgtaataccctacatcctgtttgcggtgggtagtattgctttgatatctagaggttacaatgagggctagagtttggatgtttgatgagagagcggggggcatgtataagattagatcctctctagatctaccttgggagggatccctagctcgccttatataatccggcatggcttgggttacaagtaggtttccc

SEQ ID NO: 18397 - DNA, 553 bp, Zea Mays
caagtccctgccatagctgtatccccgctgcgcaagaggatttgctatggagacctaggatctatcaccaggctactctagatttctaagtcatgttgtaataagttctattttgcgttagacgacaaaactctttatgatatcatgattataataacaaccatgtgatggaatgatggccataagaacatttaaaattaataaataatcttaacttttattgaaagctattccatctagaatttttttccacccttaacttatcgaaaggatgcactttctaaccaacgagatggtgaacgatcgcccaggtcccagagacacccgtaatcagcgtgctggtcagcagttgccaccaccacccaacccaccatggagcagttcattgctgcatagatgcaacttctacaaggcatcactgcttcagtgcagcaaatccaacagaaccaacagaatccccaacagaagaatgcaccccaagctcgggacaagcacaaagattttatgagtcatcatccccctgcgatttctcattctgttgatccattgtatg

SEQ ID NO: 18398 - DNA, 586 bp, Zea Mays
tcagccaggttgttggcgcacgattccacctcgccctagcttcaaaagaggactcgagcccttgactctctccttgcctcctcttctttccgccgccacctgggtgagagaaagtcacagtccgcgtaagggaagctatagccgccgcactcaacaatctgcctgaccgttggttggtactagatgtggtgtcgcggagactcgccgtgaggttggcattgtgcgcgctcgattcatcggtcgtgtgtgcgacatgattccgaggaattcctcgtcagagcatcgaggaccaccgcggagctcacctttccgccgtcagtcctctacgccgcgccattgacggtatagaccctccccatctatccacattcactatggttgcgtagagcctatcgattaggtagttgcgtgctctggtggcggagtaattgctcgccggcgcggggcaccgtcgtggtgcccctgttcatcggcaccgccgcgcgcgtatcctggtttatggaaagtaatggggccgttgaatctttgatctacggccgagattagacgaccacgtattcgttcgcgctgtgtgatctgaaccgtc

SEQ ID NO: 18399 - DNA, 704 bp, Zea Mays
attagagcaaacggacgccaccgtgagcttcgcaagcatgcagaggtacagaaacaacacatggattggatagggacttaccagagtggttcggccacggtggggtgtgtttcacggcggcagagaccggtttgggggaaacaggaaattcttgagctctagcgaacgatcgtggctaattagcggtggctggatacttcacttccctacgagcttgcggaggcttcaatttatagggatagcgagcggtggtgatcaattcggccgagccgtgctggcggccggagatgaagaagaacactagcgcagcaaatacgtgttcaacgtcgtggcagctattccggtgagcaacggggagctaaagcgagtcgtggcggtgcgatggcaaggctcggacacgcggcacaagaccgtgcgacggtggttcaccggcgagcttatctgcgcaagccacaaggcacatggggtacggcggtgagtcaccggaattatcctccggcgaagggttactatctagcaagcttatctgaccgctggcattgtaaatctcaacggcggtggcgcgaatcacggcggggatcggtcgtcggcggtgagagtcctgcgctggcgatgtaatctgatcctggtactgtaccatgggatatgttcagtcagatgaacctgacagccaaacttggagctaaactttctctcaattctca

SEQ ID NO: 18400 - DNA, 866 bp, Zea Mays
cgcctctcccggaagctggtacaaccttggatattcagaggcctgtcagtgttcgcccgaaacgcccttgccgagccaatcaacttgattctcctgttgatgagcagaaaaagaaaaagagacatcttcggcgagtatctagtttggatcgggatgttggtccttcggttcctgctgctgaggaagtgcctgtgcctgaatttaccgacgctgaccccaatgggtgtgatccatctgtcgctgaccccaatgggggtgctccatctgttgctgatgaaaacgagggggaggaagaagatgaggtccctttgactcggaagaacagtcgacaatatgttgccagtggggaagtagtggagttccttctcctgctctgtctgccctcattggtctacaagaattatccctggcgaactttgatcagactcttgaagatatggttccagaggatctgttatcagagccaacggatggtgatgcgacggatgtttgtgctgatgtgctcgacgccgggttggggtcatcccgggcagcgtcccgcgcctcatcgatcttggagcgcggtcttgagggtcaggaaactgacttggatcgtcttgttcccatggaagtagctgagggaccttcagccttagaggcggctactgcagataacttggtcctcaaggatggtgttgacgcttacccagcccccgagggtgttgccggggatgattcggctcgggtgggaagcgcaagtcgtggcccagcccccgagggtattgccggagatgatccggctcgagtgggtagcgcaaactatgacccagcccccgagggtgtccgagcggggtctccctcttgtacttccatggatgttcacgcag

SEQ ID NO: 18401 - DNA, 676 bp, Zea Mays
aggagatatccagagatcacaatgaacaagatcaaaagtctgctcagccctagaagaagtagcaaaaggaagacgaacatgacgacctagctgacatgcatgacatagactctcaaaatggcccctgctacaagatatatcataactactggtgagcttggtcatgatgtcgggtccagggtggccgagacgatgatgccaagtggtggatgtggtggtcgaagccaggaggtggatggccagatcatgtagagtgtctcgagctgtcacatcaggcgagaagggtcctagtagccagatccttcacaaacaaaccaaacgggtcaaacgcaatagaaaaagagttgtcggtggtgaaccgatgaatagaaagttgaatgatgtgaggggcaacaagaacgtcgttgaggtagaacggttctggaagaactgagtcacctactgaggtgactaagagggtggaactgttccccaggacgacagactgacagaggaagggtgggaggggttgtggggatgagagcgagataatgtcgctaaggagggacgtcgtagggtggcgtcgctaggagagccggctgaggaggacgcgacaaagaggcacccgtgaccaaacccggccacatggagatggtctcggtctagggattgtagaacgatggccacaccgggccgc

SEQ ID NO: 18402 - DNA, 345 bp, Zea Mays
aaaacataactctcgaattgagatcgaaaagaggggatttcaacaagcagacctgagataagtatcaaggcaagatctacatattacaaaggtaaggatgatatcaaataaaagctcaaccaaggatgaagttaaggtgaggcaagactgcaaagcgacaaagggaaaggaaacgaacaagagcgggatagggaaaacaacactcttggattgaaatggaataagtgaggctaagaaaaataggtaaacatcatggtaaatatgaagagaggtcaagggtcaaaggtgataatagacaaggatataaagggagaggtaaatgtgcataaaaaaccaggaatctag

SEQ ID NO: 18403 - DNA, 496 bp, Zea Mays
aaacaatttctacttatatcgaccggacatttgtgtcgagcacaccttatattaccttatctcgcatacaaccatgttgtggcgtgcacccgagacactaccgattaacttaacgcaattatcactacaatgcacttcgacatacacgttcgacatcacagtgcttcgacagaccccacacttccaatctacttgtcacatccaaccacaccacgtacccactgcattctcatgaccaaattttaacacaattatttatgacaacatttatcgactagacaagtgaaacactaaccgataattcgcacatctcgtcttaaaaacactaatcacatgtcacataatttatatcttcgattcattctatcctacatcacgatgaatacataaaatatttttaacatagacgaacccattagtcgactgcggaaactacccaacatgttttacgctttattaaatttaccacagctaacacactactttacgacgaagt

SEQ ID NO: 18404 - DNA, 801 bp, Zea Mays
cttcaccgcggcacccggggcgcatagcagaagacattcccgggcggctgagcgacctgggaggacgaacttcttgttgcggttgtctctccgctgtgcgatcgatgcgtgacgtgggcagctccaccaacgtcccaaccttgggtaagtaatcctctggttgactccctttaccccctggaatcaataggaccccgcggtagggtgtgtgcatcgcgtgtctgccggcaattgctcgccggagcacttcggccaggccaaaaccgtcgtgcgccatggccaggttactccggtgctcctagagtgtaagtatccctaccatctgattcgccatgggtaaggcagcgtgtgggggctatcggagtggggtatcgcgtacctaggcggccggggccttcttctccggcgtgcctgtgcggtgcataggggcggcgccgccggtcagagtttggtgacggggaacgggatcgcggtggccgttgatcaagggatgaacgacacggattagatctcgcataacctttcggctaggaaaggtctgggccgtagatcatcaatcggagggcccatgctaaatctgttatgtggatgatttcgggccattgatctttgatcctagggcagtgaacgcatatcggattataaccttccccgatctaatcgtggctcttgatgcgggatcgggcggccagaattgatctataccccttcgcgactgcagtttaacatatgagccccagcctttacgtaaatagaacccgccgtccatgggcgatgttcactgagtcttagaaaatttac

SEQ ID NO: 18405 - DNA, 430 bp, Zea Mays
attacatgccacaattacacaacctctattacattattccaaactttctctaattatacatactcaacttatacaactcacttttccttatttagattacataaggaaacaatctactactacactaatctagtcatccgcgtccttggctgctcccgctccactgctatcttcaggagaatgatcattcgcgaagttcatggaaggaggggctccaaagagatccaactccccataaggtcctacgccagctgctcttgatgcaccagctcccatcgccacaacctccggtggcacgttcggatgtagctggtcatacaacacgtgcacttcctcgtgcagagtattattatatgcttgcagattttccagggctacgcttagctcttccacccaggcttgggcagtcgcctcgcaatctcagactata

SEQ ID NO: 18406 - DNA, 656 bp, Zea Mays
ctcacggggatcatgcttataaaggcagaccttaggcaatgttgggcttggtgaatgtgagatactgaagagcaccacaaggctccggtaggcgatgggatcccttataggagctccatttggcttgcgtgtcgatcgaggttacacaaggcttgcagtccaacatgtcagcccgctcgagaatgtctagggtgtacaaccactattgtaggaataggtcctaggagcgaggctcaacgacaatccctagaaaatagtgaagtggatccaaatccttcgtggcggtgtcatcaacatagaggagcaggtactcgatgtcactacgacgctagtagatgaatagagatgtgtctgacttggcctcaacaaagccaagagagagcaggtatgtggcgaagcggctataccaagcgcgaggagcttgcttcagactatagaggaacttgttgagcttgcataccatatcaaggtgacaaggatcaacaaagccagcagactgactacaatagacagtctcaatgagtcccataaagaaatgcattcttgacatccagttgatgaaccgaccacgagcgagagagtgccaaagtgagaacaacatggacggtagcaggcttcatgacgggattgaatgtctcaatgtagtccacacaagg

SEQ ID NO: 18407 - DNA, 605 bp, Zea Mays
ccgcggcggaattggataagaacgccggtgatcgccgtcgcacggccttgcgccgcgtgtccgagtctttccaccgcgtcgccgtgactccctattgttgtcccatcgtcgccggggaggttgccacgacggtagacacgaattcaccgcacacgcgttcttcttcatctccggccaccagcacggctcggccaaattgatcaccaccgctcgctccttctataaattgggcccgcggccagctccaccacattatcacgcaccaccccaaccagtattgctcctagtcaatcaccagtgagctcgaattttaaacttcccccaattcggtttccgcccccgcgaagaacagcttcaccgtcgccagccctgttccggtcagtccctgtcccttgctccctcgtttgaggattctcataaccccgtgatgcttgccgagccaccgaattgaactaggagactcccaatcgccgggaacacggcgatctagccgcactgctcacggtcaccgtggccagagcaaaacacttgatcattagtgaaattaagttgggggaaaggctcgggatgggttcaatccggtgtatgtcgctcgagagcaccgg

SEQ ID NO: 18408 - DNA, 570 bp, Zea Mays
aacaactttgcttaagagagtaagcatagttgttgagaagatgttggagataattaagcccaaagttggactgtcaggctggtggaactctgaaattcagaacttcagtgtaacagagctaactttggacttggatttaaacatgatccagtgcaagtttgggcatgattcccataacaaatttgtagctggtatgtagattcacaattttgctgcagagatctggacgagttgctatatgaatctgagagaaaatgaggcccaaactctgtctgtcagaccgaccgatgaacatatcccatggtacagtactggaaatatcaccgaagtggataactctcaccgccgacgaccaccgtgcacggattcgcgtattgggtcgccgtgattcgtgctgaccaagtggatagcacttgggatcaagcaagggtccccgtcgtggataaactccagccgataaagaattccggccctcgtaccgtgttcaccgcggtggaaaccgataagaacgccggtgactcccatcgcacggccttgtgccacgtatccgaacacctctgtcgcgtcgcc

SEQ ID NO: 18409 - DNA, 753 bp, Zea Mays
ctcctacctagtcttcaggtcgtggcgcaccaccggcgtcaaaccacccctccctggccgatacccacctcgcgtcagccgaaccaccgcgcgccgtccgtctttctaggggtctgggtgagagtcgcgatttcgaagcgtcgcacggtattggttgtcctgtgcggccatctttccaccgttggtgaccggcgaacccgtgctcgtcaggctccgatgacagcatcttggcgtggagtcacgcacctccgtaagctccatcttcgctgtgatgttgccgacctgtgcatttcaattgcggtgagtattttttcttgtgcctcgacgtattctagtcgtgtgttgacggtggagtgtcctgtccgtcgccgtggtgttgtgcacgcgcaagcttgggcggagggtggaagaaagccaacaaaccgttgatcaaccgttgtagggctaagattagatctagagggacttggctctcgaccgtcgatcgtgtagggaatggcctagatcgatcttgggcgtaccccttcgggtcattaaatcgggaccgccgatcttggactcatcggcgtagatttaacgctggctccaccaggaatgaatctaatccgggccgttcagggaggatccaacggcccaggacgtgtgataccccttcggctgcgcgatttacacttgaaccccctctgtttgtacgaattagaacccgccgtccactgcgcattagtcctgtgtctgtgtggcttttgcgccgtt

SEQ ID NO: 18410 - DNA, 639 bp, Zea Mays
gctgagttgattctttcttccaatcttctagaaagtttgttcctttaaccccgaaaggttttcggctgagggcgtctgctactacgttggcctttccggggtggtagtggatttcgaggtcgtaatccttgatcaattcgagccaccttctttgacggaggttgaggttcggttgcgtgaagatgtactttagactcttgtgatcagtgaagatgtggcatttgttcccaatcagataatgcctccatattttagggcgttcactatggctgccaattccagatcgtgggtggggtagttctgttcgtgcggcttgagtaagcgggatgcataagcaatgactttctcattttgcattaggacacaccctaagccttgcttggaagcatcacagaagatgacaaaatcctggtgtatgtctggcagagtcaggactggtgcggttgtaagcttctcattgatgatttggaaacttccttcacatttgggagtccacacaaacttattgtcctttttgagaagttcggtcatgggctttgctatgctggagaatcccttgataaaacggcggtaataccctgccattcccagaaagcttcgtacttcactgacgttggatggttgcttccaatttgaaac

SEQ ID NO: 18411 - DNA, 471 bp, Zea Mays
acttataagcattggttgtggatcaagttaaggcaaaggtataacatatgtttttgtttttgccggtctccaggagtttagagaatacatttgaccgtattagtaggctagatggccatactattaagaggggtcaatgactttggcctgtgtaaaacttagtgcctcatagagcatctagtggttgcatttgcatgaggtctaacagcgcttccagtttcgagagttaaaaatcttttcgaaagcgtgttagaaaagttgctaagtcatgggtctggcggaccgtccgagccaagtggccggaccgtccgcgatctattcagaggagtccgaagtatgttcacttcagaggagtccgtccgcgacaaaaattcaaatgtaagtaaaaggctgaaatgctcatgcatgagcaaattgaaggaaactcatgacatgtgcagttgcaaattctacctagtggtttcattgaac

SEQ ID NO: 18412 - DNA, 579 bp, Zea Mays
gtccgagggctctttagactaatgtgcccgcgaaggggtacggtttgatcccgaccgttggatcagacttgggcgcgccagattagatctggattacatcgaaccggtacgcagtgaggaccgcaggatgaaccatcaacggcccagatttaatgaaccagctacgagtgtccaccattcgattccgatcggacggtgcataacctaaagcgcgaatgggtacctcagatctaatcggggccgttcctagtggatctgacggtgcacggtcctccccccaacggaacacccacgcacgacggcgccgccccgcacgctcggcggagcacaccggcgaggctgcaatcggccgttcccgagcgccatatacaaattgaaccgagctacacgtagaggaggacagcgcagagagtagggaggtgaatttaccgaggattgggtacacagtcgggctgaccacgacacgaggcggcttgacggcgttccgcccactccggtgatgaattgaggttgacgtggacccgaaccttgcacgccgagtgagtttacagctccgccaccccgagatgattatcccgc

SEQ ID NO: 18413 - DNA, 344 bp, Zea Mays
cacgaacacaaggacgagagccatcccgccgaccatgccgctacagagctcggacacaaggacgagagccatcccgctggccatgccgctacaaagctcgaacacaaggacgagagccatcccgtcagccatgccgctacaagactcggacacatctcctctgaccacaacagcaatgcaacaacccatgtactcctaggcctccttgcgactataaaatgaggagctctgggccttctatgggggacttgacgacctaacgatttcacaacttcacggctcacgactcatcttagtcctgatattggcattcacctcaatcatacttagagacttgagactca

SEQ ID NO: 18414 - DNA, 619 bp, Zea Mays
gaaataaccaaggattctcctcaaattggacatttccagagcattcgatttcgtttcctggccttttcttctagaggtgttagagagggttggttttgggcctgaatggcgcgatgtgctcagtgggctgctcatgacatcctctactcatatccttctcaatgggatgcctggtgatttcattacacatagaagggggctgcagcaaggggaccctttgtccccattgttgtttgtgctagtcatggacaatctcaatgcgcttattatcagggcatcggatgatggactgctccaacctctatcttcgcgttctattcaacattggatctctatatgttgatgatgtggtactctttttacggccggggttgctagtgaccttaatattgttgctcggattttggatctttttggagatgctacttgtttgaaaaccaacatttagaagagtagagtggtgtcgattcagtgttctcctgctaatatgcagacggtccaagattgttttccttgtggtttggatgtgtttccaaccatgtatttgggtttacctcttaccctaaagaagctcagtaaggctcagttgcaacccataattgaattactagctgacctc

SEQ ID NO: 18415 - DNA, 490 bp, Zea Mays
tattttgttggttaaaactcagagttgaatttgtttgaagattaaaattgaaaattagaactgaaagtaggaagcaggaaatataaagaaaaaaaacaaaaccatcccatgggccgaaatcgttcattaggcccattgcccaaccgttctcctagccgaagcaccatataaccagctccacaatgacagcagggcccacccgtcagtcgtggttcttcctctgtaatgtggacccggcgtgtcatcttcttcttctctccagcgaaacaaacgaaattccgtggcaattccaaacagaaatcacgacccccttggccgattcgcggaactcctccttggatttgggtcgatccgatcccgtgtccgcgctggctccctaaccgattctcaacaaccaaaatccccagttgacagagtccctcgcgaaaccttgatctgggccgctataaatggtgaccgcgacctcccctgctacttcatcacgcaaggc

SEQ ID NO: 18416 - DNA, 458 bp, Zea Mays
gtataatgttggcaggttttccctcttgctactgtgcttgctctttgatcatgtgcttctgtcgtgttagtgccatggtgttgtgtttcttttgtatttgtgtagtcttagctccgaggcagagttacctcagttcccacgtgtggctttttgggagtcagttttcgtgtgttgttgacccctgcaggttactctattcaaagttctgaaagtttagcttattaggatatgcatctacctgtgcgttgaccgcaaacatctagctattgcgtgtaaggggtttctgcaaagagtaaaagggtttgcatataaatttggtggccaatttattatttcttaggctacaaacaacattggcttcggatggtgggtcttcttgaaggtgaaaccaaaatagtttgaatcaatggtttgaattatggttacacaataagcattagcacaaaacatattcagag

SEQ ID NO: 18417 - DNA, 782 bp, Zea Mays
tatatagcctaagtctgaatttcagagttttggctcaactttggggctttgtaactttcaaattctagggtttttgccctaggtcaccacatcaaacttatagacctattaaaggagaacaattttgcttaagagtgtgagcatagttgttaagaaaatttaggagataattaagcccaaagttggactgttaggttactaaggtctgaattttcagacagacagtgcaaccactgagactttgagcataaattcaactatgatccagcaagaatctgcccatggctgcaatgacaaacttgtagctgatttgtagctctccaactttgctgcagagcatggagtatgttaccatatagatttgtgagaaaatcgagcctaaatgttgattatcaggcgctctgaataagtgctcgccatggtacagtgactgaaacggatcagaacgccagcgcgactgtcctcaccgtcgatgacccttcgccgcgattcgtgccgtcatcgccgtgattggtgttcggatggtttggatagcgctcagggtcacacaaatatcactatcgtggataactccgaccataaacaagtccgaccaccgtaccaagttgccacggccactgcggataacttcgccggtgaaccgccgtcgctcggtcttgcgccgtgtgtccgggcgctttaccacgtcgcggatagtcacgctaggggcgtccggtgatcgttggagagaccgccacggtagaagccacctagcgcttgcgccaatgcctttttctttcccg

SEQ ID NO: 18418 - DNA, 596 bp, Zea Mays
aacggttgccatgacaagcttcacaagcacacagagctactaaaacaatgcttgaattgggcagagccttaccagagcgggctgaccacaaatgagctgttctcggcggtgcggctgaccggtttgggggaaaacagcgattcaccgactatgatggctaatcgagggtgggagcgagtgctacggcttcgcaatttggagacgaaggtcggagctcggttgatttgaacgaagggagcgaggacgtggtgaatttataggcgcggtgaatcactgccacggccacggtgataaccattgccggccttagctggcgatcaacagcggcgtcaagcgctaccctttttttatggcttgccacgtccctgctacgacaataatgcggccgaatcggtgcggcgtggaagaacgaaggtgagcagcgccgatgaccaagcatggccggaaagatcagtgactgcgtggcggccggaataatcacccccctcccaccgcggcgatcttatcttgattccagaatatcgtcgcggggagatgcccgtcgatagctcagcccgaccctggcgcagatcggtcgtcggtggcgaggatgaagc

SEQ ID NO: 18419 - DNA, 514 bp, Zea Mays
ggagacaaattcagagaatagcctatttggaggcaggttccacgcagagtaagctaagggagcaccagcattcaagactctgcccctcagaatcatatccaatcggctcagcaagtcctcattgggaatctgtctgtttgtgacccgggtggaatcattgatgccggtatacaaataagtgggataaactatgtccttcaagggttgaatgttcttgaagacaaagtcagcgaccacggcctcagcagtcagacccctatccttcaacaagcagatttcaacaagtagcactttggcctcggttatctctgaaaaagtgggagactctacccagctaggcgtacgaacgtctggttgcctccctgactgaggggggagggatttgccatgattttgcatgatgaaccaataaagacaccatcctttaatgctatccttaagggggatatcaggatattccactttcctcccctggcgaagctctaaacttgcaccaccaacaagctgatgctgc

SEQ ID NO: 18420 - DNA, 1043 bp, Zea Mays
gtggtgttcatatttgagcgctcagagaggtttcttccatcttatactcgatcatcgcaagatctaggtggggcaggtgcgtagaaagggaagtacttgagcatcgcaagatccgggcggggctggcgtgtagaatgggaagaatgagatggtagggtggtcctacacttgcaatgggatgcaggccgatggtggttctgtgctagatggcgacgaggggattgggttgtgattcattccatggcggcgaggcgtggattgcatttggggcgtggaggatatgggcggggcatccgcggtgcatgggaagaacgattgggcagtgtggtcctgcgcgcgggggtcgtcgacggtgggatttttgcgtgttggattgctacgaggcgtggatagcggcgaggggatgtgtttccttctgtggcagtggcaggatttttgcttccataaccgaggcattgatcggtgaggggattgcagcgaggaccatgcacatgcagaggtagaggggagagggtgtgcacggggaagaaaggagacactaacatgtgggccatatgcgtcgtgaggaagcagaaccatgcactgcaccatggtctacattagattattatagagtagtatagatttggacagcagccccaagtcttcaacacaatggcatcacaggaccgcgataaacgcccaccgcccagctccctctaaaacttaacttacgcgccagtgccctgctctagcgacgcgatcaggaagtaaattggcagagccccgctcgagcgattatcgacgcgcttcccgacgagcgacatcagacacaaggcatcaaccgaaaacgaggaggcggcgtaggatcagtgggcggtgggctgggaagacagtgaggacgacggctacatccggtccggcgaccctgtcctggccctttgtcatcctcactgcttgctaagtgcggctctgaccacgagctcttttctccatctagatcggctacggcggggtcgcactgcggggcgtcggttgaggcgagctgagagcacctagaggcg

SEQ ID NO: 18421 - DNA, 459 bp, Zea Mays
tgatacacccagcccaggtggggttggccgaggcccaacaaattagggttccccgtagcccaacagttcattaagcacacccaactcagggaaaggcccaatcaccccaaaagattagtccaatgggggaagggtggctctcccttttaaagtggcttcctcctcccaagttaagcaaggtgggataattctgaggctcacacggtcaccgtccgactacaattgggccaactgggccaattgcgtctttgccaacgggtaatagtggaggatgtcctcatcattcccaccttcttaaaatgggctctagctttgataccagatgatacacccagcccaggtggggttggccgaggcccaacaaattagggttgcccggagcccaacagttcattaagcacacctaactcaaggaaaggtccaatcgccccaaaagactagtccaatgggggaaaggtg

SEQ ID NO: 18422 - DNA, 649 bp, Zea Mays
aaacgaactgcttcctgctggatgctcacgtgggcgtactgtcaaaattgacatctcccaggaatattgtaatccatgtcgttgtaaaccggtgaaaggggatatacatacattttttcctgtcacttgcttgtagaatggattgttatttgagaatggctgggatcaagtgatgcgcggtgggagtgtcactgagattagctgctagctgttgacgggaggagacagcgtcgttgcttaatgcttgccagtagctgacagcctgacacacacgtgcgtaacacgagctgctactcatgatctatccatttctataacgaaggaaaaaaagtcttataaaactaggaccacatatgcacttagcgttgcacgctgatacttaaggcgattgcgcagttcaattcaatgcaaagtgcagttggcatatggcgacaacctccccggccgcaccaggttcttcttcgcgaagcacctctgttcgactgttcctgctccacctcgcagctagtgttgcaaaacattcacatgtgatcaaacccatcggatgagttactacccaagggtcgcaccccttggaggagtacccctgcagtctgtatataatccaatgttccctgcaataaagacttacaactgtcatttgtctctc

SEQ ID NO: 18423 - DNA, 1099 bp, Zea Mays
agccggatcaactccgacaacaccctcgggggctgggtaagcgccagcaccatccttgagggccgagttctctgcagcagccacctctaaggctgaaggtccctcagtcacttccatgggagcagtgcaatccagaccagcctcctgaccctcaagaccacgctccaaggtcgatgaagtgcgggacgctacccgggatgaccccaacccggcattgggcacatcagcacaaacatccatcgcgccaccatctgccggttctgacaacaaatcttctggaaccatgtcttcaagagtttgatcaaagttcgccagagataattcttgcagaccaatgagggcagacaaggcaggagaaggaacaccactactttccccactagctatgtaacgccggctgttcttccgaatcagagggatttcatcctcttcttcatcatcttcatcaacaacacggacagtacacccattggggtcagcttcggcaggatcacacccatcgaggttagcatcagatgggtcacacccattggggtcagcttcagcaaattcaggcactggcacttcctcagcaacaggaacagaaggaccggcaccctgatccaagctagacactcgacgaagacgtctcttcctctttttctgcccctcagcaagaaaagtgggttgatcggcttggcgagaacgtttcgggcgaacattgtcagacctctgagcgtccaaagctttgccggcctcagggatgggtgccaccaccagtgtttcagcaggagcggcgtcagaagaatcctcagctaatatatctagcatggcacttatctctgcgtcacttggattcaaaggcacctcaaaatgaacctgcctctcgtcgtcaggaatttctccgagtgaggcaaccaaagcactaaattctttgggagagggtcgcactctaaggcccaaaccgctatcaccagcaggaggatttgacacgaagctggtaaaggcctgggaaggaggcaaattccaggccgagtatgcaacaggagcgccgatgttcgacactttgcctctgagtatcatctcgagccggctcaccaagtccacagcaggaattctt

SEQ ID NO: 18424 - DNA, 524 bp, Zea Mays
ctgaccgaggcagcgtaggtggacagcagtatcagggactcgtgagcagacagagtcctgaatcccctgtcacctgcatccattaccctgacgtggatgcgagtgatgtaatagcaagcccggggaggctcgctcactcgcctcgtctcgtacagggggcggacgtaggcgcctagcgcatgcagcacttcttgcagcaggttggggaagtgccctgtctcgaacattgaggtgtaatgttcgacaactggaccaatccccatgaagtggtcctgctgggcgtagtcagcttcctcgttgatgtgaacgtcttctccatcgtcttcgtcgtcgtcatcctcgtcatcgccgtctctggagtcgtcggggtcgtcgcctccaggtgcaggtgcttgaaaggctggtgccgacgatgctgacgtcgatgacccagctgcgaaggctagggactcggccaacggggtgggggtcggcagctgctcctccgagctgtcctccaggttgatcacgttctccactcggac

SEQ ID NO: 18425 - DNA, 344 bp, Zea Mays
cgccgaggcaccacgctccatagatccaggatggaagcctctaataccaaatgtcaagcagacaccatgggcctagcacagtcgcttcacctcctacttggtctcccttggatttgtcatggccgagttagacacctccctgttcatcctttagcatagagataacacagtctacctcctcctctgtgtagatgacatcatgttcacaatgtctagtgtagtactcctccagcacacaatcaccacactgcagcgtgagtttgtgatgaaagacttaggccatctacaccactttctcagggtcatcatggagcactgctcctagggcctctttcgtcactagc

SEQ ID NO: 18426 - DNA, 726 bp, Zea Mays
cgggagttgaggcagttggtatccatgagtcgacatgtagcatggggggacaagaagacattacaagatctgcccgtttctaggaagcaagccaatggacatttaatgtagcgaggagtgctaattatctggtgagagtgctcccttagagctaaagcaccataatgcatgaggaaggtggcatgagttggtggggctcgatacacgagtcgttgccactatggggccatgtgtcatgtgatcctttaggaaacaagctatgatgcaattaatacaaggtgagtggaggggtgctgggtacctagtaaaggtgggcccttagagccaaattggcacattacgatttggatgttggtgcatgcttataaaaggttgtcttgcacctacttgtgtttaccttaccattcttgccttgtcctcctgatgccattctttccttcttctccttgtttctaccttgcttgtgtacataagcaccctaccagcaaaactgatgaatagagcactaatgttcatcatcactcttggtaattcccatgctacatggccatcgacgactgtgtgcatgcactagtgaccaaggaattattgcaagattcatcgacgtagagggtgaagacggaggtggatgaagtcaagcctcatgcatgaaaggttgtggtgatgctctagcacttcgagtgtgagctcaaattgctgctccatcccttcttacgggggatgttg

SEQ ID NO: 18427 - DNA, 422 bp, Zea Mays
gcggcaatggcaccgccggctgagcaggacatgccgtcggccagcgtggggggggggagaagaaggttgcaagaccgttggatcgggagggatcgaatccaaccaggaagaatcgggcaccgtcggatttgttgtggatggccggattgagagttggtgtcctcccctgggcggtttgatctgggccgtagggggggtttgattggacggttcgggatggatcaagcttcataaaatataggctgtagatccttgatccaatggtccccgtcacttactggtttgtcccgggcgcgatctaatctgggccgccagagttcgatcggatggtggatgtatcacgataccccttcactcgtccgttttacaaaagagcccctgcgttttatggaaaataacccgcagtccaacgcagggtaaat

SEQ ID NO: 18428 - DNA, 1239 bp, Zea Mays
gacacgggcaacataagcgtgaaagggtttcaaatgcagtttaagaaactagatccgatttccagaattaaagtttgggcaagacgttgatggcttaacccaaacgatactggattcgatgttccgaaaattactgaagtctgaatttttgcgaaataatttaggacaatttaaacagatggagacagacacgatatcgaaatcgtgatcgacgaagatgattaaaatttagtgtccattttattcaccgctatcacatgttaaagtccgcactcgtggtcgagcagacgataaacacctggggtgttacactccccaagaataccacctccttacccgacggcgcatgcaataacactgtcttccagaagcaggatataaccgcacgatactgggataaccagtccatacccaagataacatcgaatgcccccaaggaaatcaccaccagattggccgaaaagacctcatcagcaagaatgacagaacacccctgacaagctgagcagctactaatggagccattagcagatctaaccagaattgggtgacccagcctctgcaccgaaagaccagcccgcgacacaaaatcctccgaaacaaacgaatagctagcgccagagtcaaaaagagcatgggctgcaaacgaatcaactgaaattgtacctgtcaccacgtctccttgctccctgccatccgcagcgggtagcacataagctccagaaatacccgcagaagaggaagctcccggagtgaaattaacagaagaaccccactgagccaccggatgaggctggcgcggagctccaaactgagtcagcacaggggtagacggtgcaggagtaggcacagcctgatactgaggaaaactctgcatcggcatgaactgagaagtcccaggcacataaagctgttgtggaggaagaggaactgaaaactgctgctcagcacttgacatcatgttgatagtgccctgagaagaggaggaagtcaccggctcccatctgagcttcccattgggattcctcctacacaccacatccttgtggtcctgactgcagatagaacacctgccactccactggcactctgcacggcgatgcacatctccacagcggaaacacaccagccctagcccgggcttaggaacggcccgaaacctctgagtacttcctcccgaagtacccgagtcagaagatttgccacggtaaggatggtggcgctgatgctgagacttgc

SEQ ID NO: 18429 - DNA, 593 bp, Zea Mays
tgagacttcagagtatggttactcagaagatggttaaatcgaagatgacgatgagtttgattcgaagagtttgtggaattagatttttaggaacaacatgaacaggagaacattgaatttcataacatggttgggatttccgacaatattggttgggatgtagacaagtcgtgggatcgtatcatgtgactcctcttttgcgatgtctattaattaaggcttcatgatctatgtgctacttgtagtaaggttggttgtgtaaggtcgtctatgtgtctccttgtagtgaggataagctcaaattgtagtaaggttcaaatgcaacttgtagtaaggtagtcaatgtcagacttcatgtaaggttacctatttaatgttgtctatgtgagacttaatgtatgcttttgtatgcttatgatgagatgattttgtatgcttatgatgagatgcttttgtatggttatgatgagataattttgtatgcttatgagaagatgcttttgtatgcttatgatgagatgattttatcatgatgtgcaagaagttgattgccaataccacctaaaagagaatagacatgattaatcagtaac

SEQ ID NO: 18430 - DNA, 351 bp, Zea Mays
atacgattgtctgaattgtcaaacactatctcaacaaaagcagatacaaccgagtgtccagcaccttcctggaatggttattacagtagggtatatcaaacaccagcggaccagccatctattccaactatctagattgcttagaggaggcatacatggagaagggcacccctatcttcacttcgcaggttctgaaacatgtcactcaggacaaatcgtatagctggagcaataagcataagcaaatcaagaggatgttctcgcataagagcagatgcaaataataatatagcagtactgtaccacatgtttaagattaccatgaaagaaatttgatttgccagatccatt

SEQ ID NO: 18431 - DNA, 773 bp, Zea Mays
gggatatgttgttctctctcgcggctgattcatcgttttctgggtcgtctcttttgtctacctggtttcagtgccggttccatcgggttttgacgcaagagtagaggacttggtaggtcgttgtgttgtgactcattgttggagagcaggaccgatttcagattgaggacaatttcagccaattttgcaggaacccgtaaaacccatccggagaattttccctgcgcgtcccatgattaggagctgcggctggacagtgccctacgctctggagttttagtgcgaatcgttgccagtttcagtcaacttttgatggagcccaggtgttgagcgccaatttgggagttccagctgacgctgcagtctgcattcttctaaggccatcagtgaggaattttcgttccttggtggcagatgggttcctccagctctaaagtggacaatgaggagcccgtgaggcgctccaaggacaggaggcggctcatgaagcagctggtgcgccgccgcccagagcttgcagctgcgcacattgcatacctgcacgccctccgcaacacaggagccactctccggcaatttgtggagctggagtctgctttgtcacagcagcctccggtaggccttgcggcgccgccctcgcctactccacagtcgctgccgcagccgcagcccccgccacctcctgaaccctcactgccaccctcgccacaccccccgccgcctctgccttttagtccagtaaccaccataagaaagatggagaagagggatgg

SEQ ID NO: 18432 - DNA, 378 bp, Zea Mays
gaagatcctagaccccgtggagtcatcacaatttttgaagatcgacaggtggcccacatcatagaatgggactttgtccctaggaaacaaaatcttcattgcttgggcgccagtacatagacacataacctagagccgccagccaagattgacaagcaccagaaccccacctaaaatgacgaggggaccaagaaagtacccctcaatactgctttcccaaccatgcagtattgaatggagaaggcctagctccgcaggaagcagccagcttgctcgactgcctgcgtgggaacaaagacgtcttcgcctagtcgtcatatgacctggtgagagttagccaaagtatcattgaacacatactgtctatcaactcctccg

SEQ ID NO: 18433 - DNA, 361 bp, Zea Mays
agctaattcccaaagtcttctctcgtcatcagcctgccgaaggatagaggggagactgggagtctgaccatcaaacacacatatattgcggtgattccaaaccatccaggcccccaaagagatcaaagagctcaatcctttcttgaccattccttgaactgttttagaagatgtctcccaccagtccaggaaggatgtcaggcccggctggggagcaaggttatccagcccaaactttctgagcagattataccagaaaatccttgcaaacacacatgagaccagcaggtggttgatagattcaggttcttggtcacataatggacaattgcttttgtgagtcagccccctctttgccaat

SEQ ID NO: 18434 - DNA, 438 bp, Zea Mays
gagccaccgagaaagcagtgcgcgactccaccgcgcagaccgtcggaggcgaggaagatggcaggagatgcaggaccttcaagcgtcgtccgcgagagtgcgttactctggccgatgcttactcggtcgaactatgcggagtgggccatgttgatgagatgtaactatgaagccttggagatctgggaggtcatcgagcccggcggcgtcggcgtaaagcgagcgcatgacaggcaggcgatgggtgctctcctgagatcggtgccaaaggagatgtggagactactcggtgaaaagagtacagtcaaggaggcttgggaggcggtgaaaagcatgcgagtcggcgcagatcgcgtgaaggatgccaatgcccagcgcctgttgatggacttcgagaacatcatcttcaacgatggcgagaccgtcgacgacttcgcg

SEQ ID NO: 18435 - DNA, 539 bp, Zea Mays
tgctcccaaaagcgtgccacaaatagtgctcctctgtgagatacaatagtcttcggaattccatgcaaacgcactatttgatcaacatagatttctgcatatttctctgacttgtgggtggtatgcactggcaagaaatgagctgttttggtcaatctatccacgatgacccaaatagaatcgtggtgccgggaggtattgggcaatcccacaataaaatccatgcaaatctcctcccatttccaagatggtatgggaaggggctgtaaggtgcctgccaccttcaaatggctggccttgattctttggcaagtgtcgcatttagatatatacttagaaatttcccttttcattctggtccaccagtacaaagatctgagatcatgatacatcttgttactgccggggtgcatggagaatttggaaaggtgagcttaatctaatattttctttctgagctcggggttcttaggaacaaccaatcggtctccaaaccatagaattcctttgctgtcctgacggaagcatttgtatttgtc

SEQ ID NO: 18436 - DNA, 320 bp, Zea Mays
ggcatgtgtccaactaggcacgtgacatctggctatcttttagaacaagttggcaaggacttgttgtgattctccatagtgaaccactcaaagcgccatcctttgatgctatccttcagggggatatcttggtattcaactttcctacccccaccaaagttcaaggctagccccaccaactacttgatgatgtcccccaccatccccggcttacagtggtaaagatacatccacagtccaaagtgtgggttaattccaaaataggcttcacagagatgcacaaagatggagatttggagaacagaattgggcttcaagtg

SEQ ID NO: 18437 - DNA, 482 bp, Zea Mays
ctaactacaacgtgattcacactttgataatagtctcttctttgtctcttgttgtcgaagtttgtgctagaatctccgttgattataccttgaactgggggctgagggtaaccctcttcttccttgggtgcgagcttgggtagctgtcttttggtgttggatcagctagggtggtggtggtagaagttgtagcctttcaggatggttatgtaggagttggtagttttgctggtactgttggtatgggtggtagatatcttgataaggatgatggaattgtggttggaaagtatgggttatggccttcagtagttgctctaggtggcccctcgttgtcctcttagcctcaagtctctctttggcttctttggtggtgcggcaatctctagttggatggtcaacgtcctcgccgtgaaaacgcagtaggacctatgttcacgcatggggtcgcggtcacgtcccctgcctctaggtgctctacc

SEQ ID NO: 18438 - DNA, 578 bp, Zea Mays
gttgagctgacgagctacattaacattcaaagatgctaaaacatggcacaaagggggatgaacagacatgggaatggctgatcatggcaggatgccttacggcggcgcgagtgaccaatttggggaaaaatccaattcctcgggctacaatggagggattgagaggaggagtggtgcgctgggtgcgtaacaagaatgtggagcagggagggccttcaatttatagtgactacacgagtgcttcgcgaatttgggacgagatgatcttgcagccagaagggaggtgagtcaccggagtgcaactatcgtggcgctcggtgaggttaggacccggcagtaaatgggttgtccactgcgatctattgcgatgtcgtaacgcccccatgcacgtggcatcctcgcggcgagcagcgaatgccgacgatgtcattccggccggtcgtgaagcaagtgggtacggtggccagctcacattctcatccgtgatcacgatcttttgacttgcccggttatatccgcgtcgagctatgcacgaatcttcacggcgagctcgaatctctatggccgatcactagcgg

SEQ ID NO: 18439 - DNA, 757 bp, Zea Mays
tctccgccatgattcctgcttttgctacgattcgtgtttgcgggaaaagggataagcatgatggagtgaaaatctcggcattggattagctcgggctcaggcacagataagattcgccgtacccccttgctcatcgatcactcgggataggatctcgccgtcgttgagccatcactgctgtctgccgcgtgtccagacactttaccacgtcgcggctaaccgtgctacgcatatccagtgatcgccggaggagccgccacggtaaaggccacgttgcgtggccaccagtgactcatcctgtttttactgatcacgctccgccgctcaaattcattgtgctcgcgatcagtctctataaattgaagccaccgtgagctccgcaagatcatcgcgtacccaaccacccagtattgccctcatttgatcactagcaagttccaatttcggatttcccccaaaaccttcaagaacactgtgtgagttgatctcgccatggtcacgcacttccaggtctgttcatgctctctgctgccttgtttcagcattagtgtgcttccctgatgctcctcgaccaacccaattacgctaagtcccccttaatcaccgggaacgcgatacccattcgagtgtccgcgttgtttccatggaccgatcgattcatagcgccattagtaaaattgattgagggaaaaccctcattaggtcttggattcgatctccaccaaagtagggcaccgatcatcgattttaatgaccg

SEQ ID NO: 18440 - DNA, 365 bp, Zea Mays
ccagggagctccgccgctgctcgtcgtggtctgccgctcattctgtggtcatcgtcgagccctctctgtgtccgttgcctcggtaagctctgcctcctcatcagcagtatgggacactctccggtttgcccccaacccctctagttcgcccgatccacgctcactgtgttctccccgtgtagtcgaagccccgtcgccgtcgacccatccctcgccgtgccctggacgtcgttcgagagtccccgagcctccactcaaggtaaccgacctaaccccacccctgttttcccctgtcttgcacttagtcacacgcgattgttcgccagagtgttccctggtccgctgaggactctccctctgctgtc

SEQ ID NO: 18441 - DNA, 588 bp, Zea Mays
gagcaaggggccagcggcgctggggaggtggagcgggagcttgacaagagcttcggctacgaccgccacttcgccgccaagtacgagctggggaaggagttgggccgcggccatttcggccaacctgcctcgcgcgcccctgcaagggagacatgagaggccaggtcatggctgtcaatgtcatctccaaagccaaggtcttactattcgtgatctcacaatgctcttttactggacgcacgacacgatcttacctgtttcaatcggctcggttcctccatcggatcatgaacaaactacatgggatgacataattgccatcctgttgtgatcttttttaactctcatttagtagatcagtatctctgaagtgccactaccacaggtgttgcaatcataagttcatgatttgcttcttggctgacttgcagggtgatcaattttttttccgatggtattggcattggcattggcatttccccgcagggttagaagtacattgtagagatcttgtttcagcaatgccgcatttaataatgtgcccattttcatgatctaagtgttcaactgttcatccatctatcacct

SEQ ID NO: 18442 - DNA, 468 bp, Zea Mays
aaaaaaactacttgcaagagtgagatcgagggtttgattgccaccaaccatgtagctcgcaaaaaatgtcgggacctgcgactttgactcaattttttatgtacacacatgcatgcattttcgttgttatgaagacgtgtgatgcatatccacaaggtactcaatgcacaaatgtactactactctataagaccataaggagggcatccacagtagtacaacatgcccacgcctctgcagatctcgcctttgtcccgctcgatggaaggcgctgatcctccccgcccgtaatcccctccggcaaccctgcgtgatgtcaatccccacacaatcgacgatcccatcccttccaaaaccagcgcctactcacctcgccttgcctaacaaacgcgtcgcctgcatcaaagctgtagccatcgagccctctttctcccactcccctcccttcctctttctgcccgactcgca

SEQ ID NO: 18443 - DNA, 368 bp, Zea Mays
gagttattgagcgtttatttgaggcagaggcaatagggatggggtatatacaacaacacatttcagtagggtcatgtgggtgtcctcaattttgattggcaccatgtggttgtcgtccttagtgaccatgacaccaacaggttttcagaatttcacatttgcgtttttagcacaatacactgatagaaagggaagacggatccatgccacgagtgggggacaacataaagtaatgtatgcataagaatataagatatcatgaagagttaaagaagagcaacatgcaccatcaccagccactaactatatgtgcttgtttccttccaattgcttttcagaattttgcatttgtttatggcatgcaaaat

SEQ ID NO: 18444 - DNA, 497 bp, Zea Mays
cggtgagcgcgccctccagcgagcttgtaccagccgggatgcgcaatgactagtaccctaactcggtcgacatctaatcctacccctggcgaccctaatccctccatcaattgcacgaatccggcccggagttcgtctacccacgacggtggtgaataccgaagtcaaaccgaggtgttcttggtgattacgtgcggtccagttcaattaaacgagtctacgagcaataggagacttaagggatgctagaacatcaagcagagaagcttgaactaacctatagatggctggccacgacgagatacacacggcggtgcgaaaaacggaattgggggaaaagcgaaattgggacgtttatagaggctttgaggggcggctccgaatttggaagggaagcgctagtggtcggagaaaagaggaagtcactggcgcaagctaccgtggcggtcactcaggcaatgcctcaagcgatggacatgcctcctcagttggtttac

SEQ ID NO: 18445 - DNA, 501 bp, Zea Mays
atcatcttgcattagcggagtttgcttataacaacagctaccaggctagcatcaagatggcaccatttgaggctttatatggcaggcggtgtatctcccctctgtgctgggagaccttgggagagagatccctggttgatcctgattgggttcatcagacttctgagaaggttcgggaaattcttcataatattttggccgctcacagccgtcagaagagttatgcttatgtgaggaggcgagacttggaatttgcagtgggtgaccaagtcctcctcagggtatcacctactaaaggagttgttcggttcggtgtcttcggaaaactcagcccaagatacattggatcgttcactatcttggcccgagtgggcagcctggcttatcgcttgcaactgccggattccatggcaggggtacacccggtatttcatgtctctatgttgaggaagttcttgcgggatccggaccatcagattgagatggaaccaattgctgtgc

SEQ ID NO: 18446 - DNA, 461 bp, Zea Mays
gtggaggtggaggagcgcgggcgttcgtgggactgggaaccaggtaattgccgcaatggagaagtgtttctttgtttctttctttctttctgcatgcgtggcctctgctttgcgttcggcggagaagacggggaggagaccctcttctttcttccccccacacacacagacacacgcacgcacttgttccgcagcctcaatcaccgtagcccgtagattcactctcgtagacgtattctgcgccggcgcgcacgttgacaactctctgttgctttggttcccgctctgttcacaaaccgtggtcgtagacgtgtcagcctgggtgagctaggactcagggccggtcctgagatttcagggacccgggacgaaaccaaaaattgaggcctttaaagcttcatctataatttttactttcttctaagtacatcgacaaatttttatatgataaaaaactcaaa

SEQ ID NO: 18447 - DNA, 725 bp, Zea Mays
gtgctgggtgatcgctgtctcttgctgcgggtgttggacgactcctcgggtaaggcggtcaactagggtcgtgggaattcctcgccggtgtccgatttgccgccgtgaacccgcatgtctccgtgggcggcgagtcctgctacacgattcacggtaaaatcgctcccatttggttcgacatcccttcctcttccgtttgcaccatttagcgctcgagttagggctatgggggtcggtcggccatgttgccggtgggcgcaccgccgggtggcttctccgccgcagtggctaggattgaattgaggaagacggcgcctcggccgttgatcagcaagggaagggcccagattagatcggcgaaaattgattgtgggccatagatcctgaggcgtgcggcttagatgtaatacgtacttacctcttcgtttcatttaatccgggcggtcgatccaagatcttgcggttagcattgtataccgcttcgggacaagccctagttaatccatgcccttgatatcaaatcctgcggccggggtcgcgtaccctttcatgatctaatcctgaccgcagatcatgatccaacggctagggcttatccataccccttcgcatggcgttcttacttaagagcccctaccctttgccacaattaacccgccatcccgcgcggtgttctctgtgtctggggaatctttcaagttagcccctgatctttttggtatttg

SEQ ID NO: 18448 - DNA, 696 bp, Zea Mays
aagatcgggagcgagagctagctgaacaagacgttaggctccaacgagagaaccctatcctcgctcgaaacctataccttgatttcgatcgagcactaaaaccctgagtgaagtcagagcagtactgacacagatagccgatggcctcccgcgaaccccaggcgtggaaggttaccgacggctgcttactcaggcggccaatcatcttctacccctcgctcatcctgtgaatgacctgcgtcacaccatcaacagccgacgagatgcatggagcaccatcagcgcttcacacaaccgacgataagaaaatgagataaggcactgggaggagtacgaccgagatcacggagtaccagcacgaagtcatgccacccgagttgagttggcgatagcttcaaccagtgtcccattctggggacggtcgagacgacctactacccactcccctccctgggatcgatgacacgaacaacggcaggaggatacgtgcggagtttccgcactaactccacgtctccgggccatccaatggccttccaacttcaaggtctccaacatcgacaagtacgagcctaagcaggacccaggaggctagttggtcgtctatacgaccgccaccgtgactgctggggcaacggacgacgtcatgatggcatacttgcccattgtcctagggcaagacgcactgcagtggct
